United States Patent Application Publication US 2010/0105865 A1 - sequence listing, part 2

SEQ ID NO: 588 - protein, 83 aa, Streptococcus agalactiae
MKDRKFGMDKNNLEDLTGKKILRNGFGGLRLEYGTIFLDVGLFTYIVLILSIFFFLVERWFLGALTFVLHVPLLLLGIWCGER

SEQ ID NO: 589 - DNA, 627 bp, Streptococcus agalactiae
atgataaagatttattttggaaaagatataacacttaaccaagctattcagtcgcgattggatagctatcagattgactatcaagcattctcaagcaaagatatagatgctaaaacactgatggaatggctattcaggtcgaccgatatatttgaattactaagcactaagatgttgaaatacaagctgaatacacaaattaccctcagtcaatttgttcgaaagattttaaaagatgtcaatagcaccttgaagcttcccattgttgtgacagatgaggttatttattcgaacatgtcccctgactatgtgacagtactcttgccaaaagaatatcggaaaattaaaagaattcagctgatgaggaagatggagcagttagatgagggacgtctattctggaaaaactttgagtcactacgtaagcaatctgagctacgttggtttgaactgaatgagttactgtttgctgatatgtccgacgatttaggagaaatcaaaaaagctaaagaccgtttctttagctacaagaaaaataaacaggttccgcctgatgacattatcgaaaaaatcctcaagatatttttggttgaccgagaagactttttcaaaaaatctgtgttggat

SEQ ID NO: 590 - protein, 209 aa, Streptococcus agalactiae
MIKIYFGKDITLNQAIQSRLDSYQIDYQAFSSKDIDAKTLMEWLFRSTDIFELLSTKMLKYKLNTQITLSQFVRKILKDVNSTLKLPIVVTDEVIYSNMSPDYVTVLLPKEYRKIKRIQLMRKMEQLDEGRLFWKNFESLRKQSELRWFELNELLFADMSDDLGEIKKAKDRFFSYKKNKQVPPDDIIEKILKIFLVDREDFFKKSVLD

SEQ ID NO: 591 - DNA, 1062 bp, Streptococcus agalactiae
atgtgcacatctgaagtgcatttactacacccgttttttggcaagtttggctggagcaaaatgaaaatggtccgactccgaaggggtcggcttggggctactcccccaagaatgtcattttacgtaggcctttgcgcagacaaaaaaatcggcgccgttaggcgaccgccaaaaagaaaggaggtttgtttgaaattaaaagtcagcttagacaatatcactatgacagcctatatcaaatctaaaaagtatttagctatgaaacaactcatagaaacccatttagctattactgttcaaactgcgatgactgacatgtttcgagccaccactggggatggaatccacgttgtgctccatatgaattatgacaaacaaaaaggacaagaccgcaaggctcgtccatttcgcttggagtttaatcccaataaactccgtttagttgacagtgaaattatagatactattataccatttcttgaagatatttcaatatcacgtgctgatttagcttttgatctatttgaggttgattgtagtgagtttgtgctcgaaaaaaagggcagaccaaccgcaaccaaggaatttcgttctagtactggaacgttagaaacaaaatatctaggtgctccacgttctgaaaaacaagttaggctatataacaagaaaaaggaacaactccaaaatggtactgataaagataaagactttgcaagtcaatttaagcactggtggcgcttggaatttcaattaagaagccgttcaattgatgagatattcgaggttattgatactattatttttaaaccattcaatcttaaaggcttatctattgagacccaaatctatctaactgctcttattcacgataaaaatatctggaaaaaactccatagaaatacaagagcaagatacaaaaaaattttagaaactcatcaaacatcagatactgattatttaggtttgctgaaagacttgttgaagcatgaaagaccaagactagaaaatcagctcgcttattatgggggtaggatagacaaaaatagctttcaacccttttgt

SEQ ID NO: 592 - protein, 354 aa, Streptococcus agalactiae
MCTSEVHLLHPFFGKFGWSKMKMVRLRRGRLGATPPRMSFYVGLCADKKIGAVRRPPKRKEVCLKLKVSLDNITMTAYIKSKKYLAMKQLIETHLAITVQTAMTDMFRATTGDGIHVVLHMNYDKQKGQDRKARPFRLEFNPNKLRLVDSEIIDTIIPFLEDISISRADLAFDLFEVDCSEFVLEKKGRPTATKEFRSSTGTLETKYLGAPRSEKQVRLYNKKKEQLQNGTDKDKDFASQFKHWWRLEFQLRSRSIDEIFEVIDTIIFKPFNLKGLSIETQIYLTALIHDKNIWKKLHRNTRARYKKILETHQTSDTDYLGLLKDLLKHERPRLENQLAYYGGRIDKNSFQPFC

SEQ ID NO: 593 - DNA, 474 bp, Streptococcus agalactiae
ttgttgaaaattcagtattatcaaggagttacgaggtcaaaaatgagaataaaagattatgctgatagtctaggagttagtagccaatctatctataaacgcatacgctctccaaaatataaagaaaggttgaaaggtcatttataccgagacaaccaaaaggttgaaaatcttgatttgataggcattaaaatacttgaagattatcattttgagaatgatgtcattgaactggaaaaaacgctgggtgatattcaagaagaattcgagcaagaaaagaagggaatgcaatatcggatagatagactagctgataagttaactcctttacttgaggataaccaaaacttggtacaaaaaaattatgagttactcaactatgttcggagcttggaacgacagaagctattgctgattattgctttagctgtcatggtaatcactttattagtggcaatatggcttgccatcttt

SEQ ID NO: 594 - protein, 158 aa, Streptococcus agalactiae
MLKIQYYQGVTRSKMRIKDYADSLGVSSQSIYKRIRSPKYKERLKGHLYRDNQKVENLDLIGIKILEDYHFENDVIELEKTLGDIQEEFEQEKKGMQYRIDRLADKLTPLLEDNQNLVQKNYELLNYVRSLERQKLLLIIALAVMVITLLVAIWLAIF

SEQ ID NO: 595 - DNA, 1254 bp, Streptococcus agalactiae
atgagttatgttgttgctagaatggctaagtacaagtcaggtcagttgacggctatttataatcataatgaacggatttttaaaaatcactcaaataaagaaattgacgttgagaaatctcaccttaattatgaactgacaaatcgagaccaggcacaaaattatcacaaacaaataaaggagcacatcaatgaaaatcgcttatctactcgtggagtccgtaaagatgctatactctgtaacgaatggattattacttcagataaaacgttttttgactcgttagatgagaaacagacacgagagttttttgagacagctaaagattattttgctgaaaaatatggtgatgctaatattgcttacgctagagttcaccttgatgaaagtactccgcatatgcatttaggtatcgtgccaatgaaaaatggtaagttaagttcaaaagcactgtttggaaataaagagaaacttgtagcaatccaagatgaacttcccaagtaccttaatgagcatggctttaacctacaacgtggcgaaataggcagtaagaaaaaacatttggaaactgctgaatttaaagaaaaacaacgattactggataacgctgatagaaaactagctgataaacatgaagaattgaaagcacttgatgataagatttcaaatgttaacgatacaatagctgataaagaaagtaggcttaaagaattggaagcgaaagaatgggatgctgttggcgatttgaagcagtatgaattagagaaacagtcactagctgaaagcattgaagacataaaagacattgaactattacaacttgatagaattcaaaaagaagatttggtaaaacaaagctttgatggcaaattgaagatggataaagaaacctataatagactatttcaaactgcttcgaaacatgcatctagtaatgctgagttaaaaagagacttggttaaagcccagtcgcagaacaatcacctttctagagaattactcaatcaccgtaagacagctgaaaaaaatatcaaattaagtcaagaaaacagaaaattaaaggacaaagtaaaaatgcttgatgaacaagtgaaaattctgaataaaagcctctctgtttggaaagaaaaagctaaagaatttatgcctaaacaggtttatagagaaacattatcaatcataaacactctaaatcctattggtttagctaaaacagcaatcagacaagttaagaagatggttgatagtaatagt

SEQ ID NO: 596 - protein, 418 aa, Streptococcus agalactiae
MSYVVARMAKYKSGQLTAIYNHNERIFKNHSNKEIDVEKSHLNYELTNRDQAQNYHKQIKEHINENRLSTRGVRKDAILCNEWIITSDKTFFDSLDEKQTREFFETAKDYFAEKYGDANIAYARVHLDESTPHMHLGIVPMKNGKLSSKALFGNKEKLVAIQDELPKYLNEHGFNLQRGEIGSKKKHLETAEFKEKQRLLDNADRKLADKHEELKALDDKISNVNDTIADKESRLKELEAKEWDAVGDLKQYELEKQSLAESIEDIKDIELLQLDRIQKEDLVKQSFDGKLKMDKETYNRLFQTASKHASSNAELKRDLVKAQSQNNHLSRELLNHRKTAEKNIKLSQENRKLKDKVKMLDEQVKILNKSLSVWKEKAKEFMPKQVYRETLSIINTLNPIGLAKTAIRQVKKMVDSNS

SEQ ID NO: 597 - DNA, 6177 bp, Streptococcus pyogenes
atgtttttaaaacaccaagatgtgaaacaaaaaaattggagaatgcgtaaggtcaaaaaagtctttgttagttcatgtatgcttttaacagtgggcctcggagttgccgtacctactggattcagccaatctaatggcgtgatggttgtaaaggctgcggaagtgccggcgacagatttatcacgtcaggcgtctgattcggagagggtagatgaatcgtctttattgcagaaagaaaacttatcagtagattcatttaaattagaaaatttaaatggatgggaagctgaaaatgatacagcaggtaatttggggaaatttaaagatccagatagttcgggctatcaaaatattttgacatcatctggaaagaatatcagtgtagctgttgctcccaaaggttcaggtaaaatgaacattaaagtaactaaaagatcaaattttcagggtggatattatgtaggtggtcttagaactcaaactccggtattgaagttaaatgatgtttatcgatattcttttacaactaaaaaattatcaggaaattcttcagagttcaaaacgagagttaagcccgttgaatctaataataaactagggaaagagcttgttattagggtggataataaaaatgtatctactaagcatgattggcttccagacatctctgatggaactcatactgtggacttcactggtcttgataaaaaattatctgttgctttcagattttctccaagacaaacttcgaatgttgtttacgaattttctaacataaatataaaaaacattagtcctgcatcagtgccggctattccttcgaaagttttagagggaaccagcgtcttgtcgggtactgcaatatcttctggagatacattagaaaaaagaaaatcgtttgatggcgatatcctaagagtttataaagatagcaaaatcattgctagaacagtaataaaaggcaataagtgggatgttaaactttcaaagcctcttattgcaggtgaaaaattagattttgagattttgcatccgagatctcaaaacgttagtaaaaaaatttcaaaacaagtcgaagctaaaccatttgatccagcttcctataaagaaaaagttatagccaaattaaagccggtttatgaagctactagtgaaaaaatcacaaatgatgcttggttggatgaaaatgcgaaggatttgcaaaaacaaaaattagaagaacaatatatttctggaaaagtagcgatatcagaggctggaactaaacaagaagctatagatgcagcatataataaatattcaagtcaaacagatccagactctcttcctagtcagtataaacaaggtaataaagaaaatgaacaagaaaaagggcgtcaagatttaatccagactcgtgatctgacgttgaaagccattcaagaagacaaatggctaacagagcaggagaaaacaattcaaaaagaagaagcattaaaagcttttgaaactggtatagaaagtgttaatcaaacagtatcattagaacagttgaagcaacggttaatagtgtataaagcttctgaaaaagattcagagaaaaaagaatatcctgagtcaattcctaatcagcatattccagggaaagaaaaagaagttaaagctgctaaacaagaagaacttaaaaaattacatgacacaactcttgaaaaaatcaatcaagataaatggttgacgccagaccaacaagctgaacagttaaaacaagcggaagttacttttaaaaaaggccaagaagcaattaaaagtgctcagactttaactcagcttgagacagacttagctgattatgtttctgagaatgaaggtaagggaaattctattcccgataaatacaaatctggcaataaagatgatttggtaaataaggctgaagttaaacttaaggaagctcacgaagctactaaacaagcaattgaaaaagatccatggttgagtccggaacagaaaaaagctcaaaaagaaaaagccaaagcaagactagatgagggcttgaaagctcttaaagctgcagatagtttagagattcttaaagtgacagaagaagctttcgttgataaagaaaaaaatccagattcaattccaaatcaacataaagctggaactgctgatcaagctagaaaacaagctttagatagtttagataaggaggttcaaaaagagttagagtcaattgataacgataatactctaacaactgatgagaaagcagctgctaagaaaaaagtcaatgacgcttatgatgtagctaagcaaacagctatggaagccaattcttatgaagatttgactactattaaagatgagttcttatctaatttacctcataaacaaggaacgccgcttaaagatcaacaatctgatgctattgcagaattagagaagaagcagcaagaaattgaaaaagctattgagggtgataaaacattaccaagagacgaaaaagagaaacaaattgctgactctaaggaacgcttaaaatctgacacgcaaaaagttaaagatgctaaaaatgctgatgctattaaaaaagcatttgaagaagggaaagtgaatattcctcaagcacatatcccaggtgatttgaacaaggataaagaaaaacttcttgcagaattgaagcaaaaagcagatgatactgaaaaagctattgatgttgataaaactctgacagaagatgagaaaaaagagcaaaaagtcaaaacaaaagctgaacttgaaaaagctaaaactgatgttaaaaatactcagacacgtgaagaactagataaaaaagttccagaacttaagaaagctattgaagacactcacgttaaaggtaatcttgaaggtgttaagaataaggctattgaagatcttaaaaaagctcatactgaaacagttgctaaaataaatggtgatgatacccttgacaaagctactaaagaagctcaagtgaaagaagctgacaaagctttggcagcaggtaaagatgcgatcactaaagcagatgatgctgataaagtaagtacagctgttacagagcacacaccaaaaattaaagcagcacataaaactggtgaccttaaaaaagctcaagtagatgctaacacagctcttgacaaagcagctgaaaaagaacgtggagaaatcaataaagatgctacactaacgacagaagataaagcaaaacaactgaaagaagttgagacagctcttactaaagctaaagataacgtgaaagctgctaagacagcagacgctatcaatgacgcacgtgataaaggcgtagcaacaattgatgccgtccataaagcaggtcaagacttaggtgctcgtaagtcaggtcaagtcgctaaacttgaagaagcagctaaagcaacgaaagacaagatttcagctgatccaactttgacaagcaaagaaaaagaagagcaatctaaagctgttgacgctgaacttaagaaagcgatagaagctgttaacgcagctgacacagctgacaaggttgacgatgctcttggtgaaggtgttacagacatcaagaaccaacacaagtcaggtgactctatcgacgctcgtcgtgaggctcatggtaaggaacttgatagagtcgctcaagaaactaaaggtgcgattgaaaaagaccctactttgacgactgaagaaaaagctaaacaagttaaagacgtagatgccgctaaagaaagaggcatggctaagcttaatgaagctaaagatgctgatgctttagacaaagcttacggtgaaggtgttacagacatcaagaaccaacacaagtcaggtgaccctgtcgacgctcgtcgtggattacacaacaagtcaatcgacgaagtggcgcaagcaactaaggacgctatcacagcagatacgactttgactgaagctgaaaaagaaacacaacgtggcaatgttgataaagaagcaactaaagctaaagaagaacttgctaaggctaaagatgctgatgctttagacaaagcgtacggtgacggtgtaaccagcatcaagaaccaacacaagtcaggtaaaggtcttgacgttcgtaaagatgagcacaagaaagctcttgaagctgttgctaaacgtgtcactgctgaaattgaggctgatccaaccttaacaccagaagtgagagaacaacaaaaagcagaggttcaaaaagagcttgaacttgcgactgataagattgctgaagctaaagatgcagatgaagcagacaaagcttacggtgacggtgtcacagcgatcgaaaatgcccacgttattggtaaaggtatcgaagctcgtaaagaccttgctaagaaagaccttgctgaagctgctgctaagacaaaagctctcattattgaagacaaaacgcttactgatgatcaacgtaaagaacagttattaggtgttgatacagagtatgctaaaggtatcgagaatattgatgcagctaaggatgctgcaggtgttgataaagcatatagtgacggtgttcgtgacatcctggcacagtacaaagaaggtcaaaaccttaatgatcgtcgtaatgctgccaaagaatttcttcttaaagaagcagacaaagtgacgaaactaatcaatgatgatccaaccttgactcatgaccaaaaagttgatcaaatcaacaaagttgaacaagctaagttagacgcaatcaagtctgttgatgatgctcaaacagctgatgctatcaatgatgctcttggtaagggtattgaaaacatcaacaaccaataccaacatggcgatggcgttgatgttcgtaaagcgactgccaaaggcgatcttgaaaaagaagctgctaaagtgaaagctcttattgctaaggatccgaccttaactcaagctgataaagacaaacaaacagcagcggttgacgcagctaagaatacagcaattgcagcggttgataaagcgacaacaactgaaggcattaaccaagaacttggtaaaggcatcacagctatcaataaagcttaccgtccaggtgaaggtgttaaagcacgtaaagaagccgctaaagctgatcttgaaaaagaagctgctaaagtgaaagctcttattactaacgacccaaccttaacaaaagctgataaagctaaacaaacagaagctgttgctaaagcccttaaagctgctatcgcagcggttgataaagcgacaacagctgaaggcattaaccaagaacttggtaaaggcatcacagctatcaataaagcttaccgtccaggtgaaggtgttaaagcacgtaaagaagccgctaaggctgatcttgaaagagaagctgctaaggttcgtgaagctatcgctaacgacccaaccttaacaaaagctgataaagctaaacaaacagaagctgttgctaaagctcttaaagctgctatcgcagcggttgataaagcgacaacagctgaaggcattaaccaagaacttggtaaaggcatcacagctatcaacaaagcttaccgtccaggtgaaggtgttgaagcacataaagaagctgctaaagctaatcttgaaaaagtagctaaagaaactaaagctcttatttcaggagaccgttacttgagcgaaactgaaaaagcagtccaaaaacaagctgttgagcaagctcttgcgaaagcacttggtcaagttgaggctgctaagacagttgaagctgttaagttggcagaaaaccttggtactgtagctatccgttcagcatatgttgctggtttagctaaagatactgatcaagcaacagctgctcttaacgaagcgaaacaagctgctattgaagctcttaaacaagctgcggcagaaacacttgctaagattacaactgatgctaaattgactgaagctcaaaaagctgaacaatcagaaaatgtatcattagcgcttaagacggctattgcgactgttcgttcagcacaatctattgcgtctgtgaaagaagcaaaagataaaggtattactgctatccgtgcagcctatgtgcctaataaggcagtcgcaaaatcatcgtcagcgaaccatcttccaaaatcaggtgatgcaaactcaattgttcttgttggcttaggagttatgtctcttcttttaggtatggtgctttatagcaagaaaaaagaaagtaaagac

SEQ ID NO: 598 - protein, 2059 aa, Streptococcus pyogenes
MFLKHQDVKQKNWRMRKVKKVFVSSCMLLTVGLGVAVPTGFSQSNGVMVVKAAEVPATDLSRQASDSERVDESSLLQKENLSVDSFKLENLNGWEAENDTAGNLGKFKDPDSSGYQNILTSSGKNISVAVAPKGSGKMNIKVTKRSNFQGGYYVGGLRTQTPVLKLNDVYRYSFTTKKLSGNSSEFKTRVKPVESNNKLGKELVIRVDNKNVSTKHDWLPDISDGTHTVDFTGLDKKLSVAFRFSPRQTSNVVYEFSNINIKNISPASVPAIPSKVLEGTSVLSGTAISSGDTLEKRKSFDGDILRVYKDSKIIARTVIKGNKWDVKLSKPLIAGEKLDFEILHPRSQNVSKKISKQVEAKPFDPASYKEKVIAKLKPVYEATSEKITNDAWLDENAKDLQKQKLEEQYISGKVAISEAGTKQEAIDAAYNKYSSQTDPDSLPSQYKQGNKENEQEKGRQDLIQTRDLTLKAIQEDKWLTEQEKTIQKEEALKAFETGIESVNQTVSLEQLKQRLIVYKASEKDSEKKEYPESIPNQHIPGKEKEVKAAKQEELKKLHDTTLEKINQDKWLTPDQQAEQLKQAEVTFKKGQEAIKSAQTLTQLETDLADYVSENEGKGNSIPDKYKSGNKDDLVNKAEVKLKEAHEATKQAIEKDPWLSPEQKKAQKEKAKARLDEGLKALKAADSLEILKVTEEAFVDKEKNPDSIPNQHKAGTADQARKQALDSLDKEVQKELESIDNDNTLTTDEKAAAKKKVNDAYDVAKQTAMEANSYEDLTTIKDEFLSNLPHKQGTPLKDQQSDAIAELEKKQQEIEKAIEGDKTLPRDEKEKQIADSKERLKSDTQKVKDAKNADAIKKAFEEGKVNIPQAHIPGDLNKDKEKLLAELKQKADDTEKAIDVDKTLTEDEKKEQKVKTKAELEKAKTDVKNTQTREELDKKVPELKKAIEDTHVKGNLEGVKNKAIEDLKKAHTETVAKINGDDTLDKATKEAQVKEADKALAAGKDAITKADDADKVSTAVTEHTPKIKAAHKTGDLKKAQVDANTALDKAAEKERGEINKDATLTTEDKAKQLKEVETALTKAKDNVKAAKTADAINDARDKGVATIDAVHKAGQDLGARKSGQVAKLEEAAKATKDKISADPTLTSKEKEEQSKAVDAELKKAIEAVNAADTADKVDDALGEGVTDIKNQHKSGDSIDARREAHGKELDRVAQETKGAIEKDPTLTTEEKAKQVKDVDAAKERGMAKLNEAKDADALDKAYGEGVTDIKNQHKSGDPVDARRGLHNKSIDEVAQATKDAITADTTLTEAEKETQRGNVDKEATKAKEELAKAKDADALDKAYGDGVTSIKNQHKSGKGLDVRKDEHKKALEAVAKRVTAEIEADPTLTPEVREQQKAEVQKELELATDKIAEAKDADEADKAYGDGVTAIENAHVIGKGIEARKDLAKKDLAEAAAKTKALIIEDKTLTDDQRKEQLLGVDTEYAKGIENIDAAKDAAGVDKAYSDGVRDILAQYKEGQNLNDRRNAAKEFLLKEADKVTKLINDDPTLTHDQKVDQINKVEQAKLDAIKSVDDAQTADAINDALGKGIENINNQYQHGDGVDVRKATAKGDLEKEAAKVKALIAKDPTLTQADKDKQTAAVDAAKNTAIAAVDKATTTEGINQELGKGITAINKAYRPGEGVKARKEAAKADLEKEAAKVKALITNDPTLTKADKAKQTEAVAKALKAAIAAVDKATTAEGINQELGKGITAINKAYRPGEGVKARKEAAKADLEREAAKVREAIANDPTLTKADKAKQTEAVAKALKAAIAAVDKATTAEGINQELGKGITAINKAYRPGEGVEAHKEAAKANLEKVAKETKALISGDRYLSETEKAVQKQAVEQALAKALGQVEAAKTVEAVKLAENLGTVAIRSAYVAGLAKDTDQATAALNEAKQAAIEALKQAAAETLAKITTDAKLTEAQKAEQSENVSLALKTAIATVRSAQSIASVKEAKDKGITAIRAAYVPNKAVAKSSSANHLPKSGDANSIVLVGLGVMSLLLGMVLYSKKKESKD

SEQ ID NO: 599 - DNA, 468 bp, Streptococcus agalactiae
atgacagataaaaaaattgtttattactttgaccatgacttatcaaaaaaagatatgggaggagtaggacctacctacaccggtaaaaatcttttattcctactttggtggacatattcttatgtggcagaagacaatttagacattgatacgtcattgtttgaagtcccagaattcaatgatttttacaataatggtctagagctttatcgtataaaaaatgaactagctaattacaatatcagatttggatatgaggttaatccaaaagatagtacaaagatgctgataggtattttgccaactgatgaagaagattatgttaagggatatagaaattttattgctgatatttccaatcctgacacacgttacgcaatctatcatcgactaattaaaaccatggacacaatgctaccgattgaacaaattaatgtttataaaagccttgcaaaaggtaataaaaag

SEQ ID NO: 600 - protein, 156 aa, Streptococcus agalactiae
MTDKKIVYYFDHDLSKKDMGGVGPTYTGKNLLFLLWWTYSYVAEDNLDIDTSLFEVPEFNDFYNNGLELYRIKNELANYNIRFGYEVNPKDSTKMLIGILPTDEEDYVKGYRNFIADISNPDTRYAIYHRLIKTMDTMLPIEQINVYKSLAKGNKK

SEQ ID NO: 601 - DNA, 333 bp, Streptococcus agalactiae
ttggactataagaaatatcagattatctatgctcctgatgttttagagaagttaaaggaaattcgtgattatatttctcaaaactattcctcgacatcaggtcagcacaaaatggagcaaatcattagtgacatagaaaaactcgaggttttccctgaagttggttttgatgccgatgaaaaatatggttcaaaaatcagtaagtaccacagcactagaggttataccttaagtaaagattatattgtcctataccatatcgaggaggaagagaatagggtcgttattgattacttgcttcctactcgaagcgactatatgaaattgtttaaa

SEQ ID NO: 602 - protein, 111 aa, Streptococcus agalactiae
MDYKKYQIIYAPDVLEKLKEIRDYISQNYSSTSGQHKMEQIISDIEKLEVFPEVGFDADEKYGSKISKYHSTRGYTLSKDYIVLYHIEEEENRVVIDYLLPTRSDYMKLFK

SEQ ID NO: 603 - DNA, 333 bp, Streptococcus pyogenes
ttggactataagaaatatcagattatctatgctcctgatgttttagagaagctaaaagaaattcgtgattatatttctcaaaactattcctcaacatcaggtcagcgtaaaatggagcaaatcattagcgacatagaaaaactcgaggttttcccagaagttggttttgatgccgatgaaaaatatggttcaaaaatcatccattatcacagcactaaaggttataccttaagtaaagattatattgtcctataccatatcgagggggaagaaaataggatcgttattgattacttgcttcctactcaaagcgactatataaagttattcaaa

SEQ ID NO: 604 - protein, 111 aa, Streptococcus pyogenes
LDYKKYQIIYAPDVLEKLKEIRDYISQNYSSTSGQRKMEQIISDIEKLEVFPEVGFDADEKYGSKIIHYHSTKGYTLSKDYIVLYHIEGEENRIVIDYLLPTQSDYIKLFK

SEQ ID NO: 605 - DNA, 285 bp, Streptococcus agalactiae
atggttacagcagaaaaaaatagagctgtcacattccaagctaacaaagaattggtaagcgaagcaatgacagtattaaacaagaaaaatttaaccttatcatctgctttaagattattccttcaaaatgtcgttgtcacaaatgaggttgacttattgacggaagaggagctagagaaagaaaaacttttcaagcaatttcaagctgaaatcaacaaaaatattgaagatgttcgtcaagggaaattttatacctctgaagaagtgaggtctgaacttggacta

SEQ ID NO: 606 - protein, 95 aa, Streptococcus agalactiae
MVTAEKNRAVTFQANKELVSEAMTVLNKKNLTLSSALRLFLQNVVVTNEVDLLTEEELEKEKLFKQFQAEINKNIEDVRQGKFYTSEEVRSELGL

SEQ ID NO: 607 - DNA, 285 bp, Streptococcus pyogenes
atgactacagtaaaaaaaaacagagcggttacctttcaagctaataaagaattggtaagcgaagcaatgacagtattaaacaaaaaaaatttaaccttatcatctgctttaagattattcctacaaaatgtcgttgtcacaaacgaggttgacttattgacggaagaggagttagagaaagaaaaacttttcaagcaatttcaagctgaaatcaacaaaaatattgaggatgttcgtcaagggaagttttatacctctgaggaagtgagggctgaacttggacta

SEQ ID NO: 608 - protein, 95 aa, Streptococcus pyogenes
MTTVKKNRAVTFQANKELVSEAMTVLNKKNLTLSSALRLFLQNVVVTNEVDLLTEEELEKEKLFKQFQAEINKNIEDVRQGKFYTSEEVRAELGL

SEQ ID NO: 609 - DNA, 291 bp, Streptococcus agalactiae
atgatgtcacaaattaaactaacacctgaagaactccgtatttcagcacaaaaatatacaacaggatcacaatcaattacagatgtgttaacagttttgactcaagaacaagctgttattgatgaaaattgggatggtacagcatttgatagctttgaagcccaattcaatgaattatctccaaaaatcacacaatttgcacaattattagaagatataaatcaacaattattgaaagttgcggatgttgtcgaacaaacagactcagatattgcctcacaaattaataaa

SEQ ID NO: 610 - protein, 97 aa, Streptococcus agalactiae
MMSQIKLTPEELRISAQKYTTGSQSITDVLTVLTQEQAVIDENWDGTAFDSFEAQFNELSPKITQFAQLLEDINQQLLKVADVVEQTDSDIASQINK

SEQ ID NO: 611 - DNA, 558 bp, Streptococcus agalactiae
atggtatttacatataccgagaaagaacttcgtgaattcaatattggagataatgtatattcagttaaccccgattatgcagaaaaaaatcattcaactgtcataacggatttaccccagaaagataacgaaacaaatattattacaacagaagatagaaaaaaatttaaggtattaaaaacttctcctgacgatatgtctggctatcagggtatggcagttgcaccaattatcaagggtaaagtagattataacagtgttgcagttatatccgccgcaacggattcaagtaattataaagatttaattggcgcagtttcatctgctcaaccacatcaaagttcgactcagttaaaatcagctgataaatttttaaaagacgtacagtcacatgacaaatggactgtgactcagctttcaggctattctcaatctgcatatatgttaaaattaggtgctcaatatcatatcccgactacagtatttaatggatggtttaggtatagcactttaaatgaagatgaaaaaaattcatggctaagcatcctgaatattttg

SEQ ID NO: 612 - protein, 186 aa, Streptococcus agalactiae
MVFTYTEKELREFNIGDNVYSVNPDYAEKNHSTVITDLPQKDNETNIITTEDRKKFKVLKTSPDDMSGYQGMAVAPIIKGKVDYNSVAVISAATDSSNYKDLIGAVSSAQPHQSSTQLKSADKFLKDVQSHDKWTVTQLSGYSQSAYMLKLGAQYHIPTTVFNGWFRYSTLNEDEKNSWLSILNIL

SEQ ID NO: 613 - DNA, 678 bp, Streptococcus agalactiae
atggctaagcatcctgaatattttgtgaattttcgacataaagaggataatgtaacttggtggaacgattttaataaactagatgataaagattatggtaccgtgaaatgggtaaatggtaaaagtcataaaatagagagttggaaatttactgatgatggtaagttaaaagatgaaaaaggtaacatcgtaaatcctaagtcaccagctgttcagtctgttctttatgaagaagttcattttcaaaaagctaaagctaaattaaaaaaatctggaggcaaacttagtcatagtgaaaaagtatatttagattctgaacaggctatatttattgctaacggtttaaccacggcatctcaaacagcttctgatgatatcaagaagaatgctgaattagttaaagaaaaagcatcagaactatttgcaaaaactaaagtgatgcctcctggtataacagatttaagtccggaagaattagctgatacatatagtgagggcggagttagagaggacaccatagtaacaccaattgaaactttctttgatgaaaaagttactaatgcacaagagattacaacttcatatattaatcttcaaaaacaaattgaatctggtgtccaaaaattgctagaagaggactccaaattagcaggagaatttaaggaatggtcacagtac

SEQ ID NO: 614 - protein, 226 aa, Streptococcus agalactiae
MAKHPEYFVNFRHKEDNVTWWNDFNKLDDKDYGTVKWVNGKSHKIESWKFTDDGKLKDEKGNIVNPKSPAVQSVLYEEVHFQKAKAKLKKSGGKLSHSEKVYLDSEQAIFIANGLTTASQTASDDIKKNAELVKEKASELFAKTKVMPPGITDLSPEELADTYSEGGVREDTIVTPIETFFDEKVTNAQEITTSYINLQKQIESGVQKLLEEDSKLAGEFKEWSQY

SEQ ID NO: 615 - DNA, 384 bp, Streptococcus agalactiae
atggtcacagtactagatcaaaatgaaaacaaaattaatagtctaaaaataaacctagggaaattggaagataattatcatcgcgaaaatatggagatagaagataaattatatagccttgaggataaaaagaacgagttagagacttatttacaagaagtctatgaagagacaagtcaccttttgagacaaaatgattcagatggttcgacttttatgagtttaaatcgaataattgaaagttatcaaatggaattaattgatgaatatgaaaactataaacagactatcattgtccaagaggaaaatagtcggacacagtttctaaaagaccgagtaaaattagaaaatgacatttctagtttagaaggaagaaaatactac

SEQ ID NO: 616 - protein, 128 aa, Streptococcus agalactiae
MVTVLDQNENKINSLKINLGKLEDNYHRENMEIEDKLYSLEDKKNELETYLQEVYEETSHLLRQNDSDGSTFMSLNRIIESYQMELIDEYENYKQTIIVQEENSRTQFLKDRVKLENDISSLEGRKYY

SEQ ID NO: 617 - DNA, 279 bp, Streptococcus agalactiae
atgagtttaataggcgctgtattgaaaggaaccaaagaagacaaagaattcaaaaagcaaattcaaagagctttagtaaggattgtctatgcccctgaaatagtagaagaagctgattctattaagatgacttatagtgacaagattgataatgtttctgagacggccaaatcatcaattaaaacgatagcaaatcaaatagattcaggacttgtaggacaatttggggaaaaagtaaaggcacaggtagatttaaataaaggtagttatgatgattta

SEQ ID NO: 618 - protein, 93 aa, Streptococcus agalactiae
MSLIGAVLKGTKEDKEFKKQIQRALVRIVYAPEIVEEADSIKMTYSDKIDNVSETAKSSIKTIANQIDSGLVGQFGEKVKAQVDLNKGSYDDL

SEQ ID NO: 619 - DNA, 96 bp, Streptococcus agalactiae
atgaaggataacaaagtttattatttacattttggtaaagcaatagataaaaatgaagctaaaaatgataagtatctcaatcaaattataaataat

SEQ ID NO: 620 - protein, 32 aa, Streptococcus agalactiae
MKDNKVYYLHFGKAIDKNEAKNDKYLNQIINN

SEQ ID NO: 621 - DNA, 105 bp, Streptococcus agalactiae
atgatggaggaattttgtatggtaagtactcaatatatgaaagtaaccttacgagaaaaattcccagataaattaacatatgttgatttagaagaacttgtgata

SEQ ID NO: 622 - protein, 35 aa, Streptococcus agalactiae
MMEEFCMVSTQYMKVTLREKFPDKLTYVDLEELVI

SEQ ID NO: 623 - DNA, 99 bp, Streptococcus agalactiae
gtgaatgtgactcctcaagaaaaatgtcggaagaagacctttgctttttgtcggattacctctttcaaaaggatagttgggaaattagtgactatattt

SEQ ID NO: 624 - protein, 33 aa, Streptococcus agalactiae
MNVTPQEKCRKKTFAFCRITSFKRIVGKLVTIF

SEQ ID NO: 625 - DNA, 858 bp, Streptococcus agalactiae
atgtttaaatatgtccctatttttagggaatttcgacttaatcgacagttttctcttaaacaggttgcttcaaatgaactttctgtttctcagttatcacgatttgagaggggtgaatcagatttatcattaacaaaatttttaggggctttagaggcaattgatttatcaattagcgaatttatggatagagtaaataaatatcaaaaatctgatcagatatctttaatgtctcagatggctcaatatcattatcaaagagacgtagctgggttagaaaagatgatttctgtggaagaaggtaaactaaaaaaggatagttcagatatacgttgtcgtttaaacatagttctttttagaggaatgatatgtgaatgtgactcctcaagaaaaatgtcggaagaagacctttgctttttgtcggattacctctttcaaaaggatagttgggaaattagtgactatattttgattggaaatctttaccggtattacaacacaaggcatatttgccaacttgttaaagaggttatcaatcaaaaggaatattatcgagatatttatacaaaccgcaatgttgtcgaagcaaccctcctaaatgtggtagagacactaatagaacggcgcgctctagaagaagcaacgttttttctagagaaagttgaagcacttttaaataatgagcggaatgcttatcaccgtattattttactctatgaaaaaggatttcttgcctatgctaaaggggatagtcgaggaatacaaagcatgaagcaagctattttttgcttccaagcaattggttctaaacatcatgttgaaaattttcaggaacactttaatagggtaacaagatta

SEQ ID NO: 626 - protein, 286 aa, Streptococcus agalactiae
MFKYVPIFREFRLNRQFSLKQVASNELSVSQLSRFERGESDLSLTKFLGALEAIDLSISEFMDRVNKYQKSDQISLMSQMAQYHYQRDVAGLEKMISVEEGKLKKDSSDIRCRLNIVLFRGMICECDSSRKMSEEDLCFLSDYLFQKDSWEISDYILIGNLYRYYNTRHICQLVKEVINQKEYYRDIYTNRNVVEATLLNVVETLIERRALEEATFFLEKVEALLNNERNAYHRIILLYEKGFLAYAKGDSRGIQSMKQAIFCFQAIGSKHHVENFQEHFNRVTRL

SEQ ID NO: 627 - DNA, 879 bp, Streptococcus pyogenes
gtgaaagtgggaaaaatggaaaaagaactcggaaaaaccttaaggcgattacgtaagggtaagcaggttagcatttcttttttagcagatgaatacctgtccaagtcacaaatttcaagatttgaacgaggggaatcagaaatcacctgcagtcgcttgcttaatcttttggataaactgaatattacgattgacgaatttgtttcggctcattccaagacgcatacgcattttttcacgctcttaagtcaggcgagaaaatgttatgctgagaaaaacgtggttaaattgaccaaactgttgaaggattatgcccataaagattatgaacgaacgatgattaaagctattcttttttctattgactcctcaattgcacctagtcaagaagaattgactcgcctcacagattatttatttaaagtggaacagtggggatattatgaaatcattcttctggggaattgctcgcgcttcatgaattacaataccctatttttattgactaaggaaatggtagcatcttttgcttattcggaacaaaataaaaccaataaaatgttagtgactcagttatccattaattgtctcattatcagtattgaccattcttgctttgaacatagtcgctatttgattaacaaaattgatcttttgctgcgagacgagctcaatttttatgaaaagactgttttcttatatgtgcatgggtattataaattaaagcaggaagaaatgtctggagaagaggacatgcggcaggccttgcagatttttaagtatcttggagaggactcattgtattatagttataaggaacattaccgtcaaatagtgctgggaggtaagggggatgaggactggtctgaggcagattta

SEQ ID NO: 628 - protein, 293 aa, Streptococcus pyogenes
VKVGKMEKELGKTLRRLRKGKQVSISFLADEYLSKSQISRFERGESEITCSRLLNLLDKLNITIDEFVSAHSKTHTHFFTLLSQARKCYAEKNVVKLTKLLKDYAHKDYERTMIKAILFSIDSSIAPSQEELTRLTDYLFKVEQWGYYEIILLGNCSRFMNYNTLFLLTKEMVASFAYSEQNKTNKMLVTQLSINCLIISIDHSCFEHSRYLINKIDLLLRDELNFYEKTVFLYVHGYYKLKQEEMSGEEDMRQALQIFKYLGEDSLYYSYKEHYRQIVLGGKGDEDWSEADL

SEQ ID NO: 629 - DNA, 1179 bp, Streptococcus agalactiae
atgaatattaatggtataaaattactatctagtcgagcagtcagtaaacttggtgatgtgttttatgattatggaaatagtacttggattgcttcgatgggtggtctaggacaaaagattttaggtatttatcagatagtagagttgttggtttctattgtcctcaacccttttggaggcgccttagctgatcgctttcaacgaagaaaaattttactaataacagatgctatctgtgctatcatgtgtttcttactttcttttattggagatgataaagtaatggtgtatggtctaatagttgctaatgctatcttagcggtttccaatgctttttcttctccggcttataaatcttatattcctgaaatagtagataaagctgatatcattacctataatgctaatctggaaaccattgtgcaaattattagtgtaagttcccctgttttaggtttccttatttttaataattttggtattaggattactttaattgttgatgcgattacttttttgatctctttcctgtttctttatgctattaaagtggaaagggtacagctttcaaaacaagaaaaggtagcgataaaaaatattttagctgatattgcagatggatttacttacatcaaaaaagaaaaagaaattatgttttttctaattattgctgctttattaaacactttcctagcaatgttcaattatcttttaccttttactaactccctattaaaaacttcaggtgcttatgcaacaatacttagtatatcagctatcggatcaattattggagcgcttattgctagaaaaattaaatctagtattaattctatgctatctatgctagtattcagtagtttgggagtcatagttatgggattcccatctctatttgaattaccgatatggataccttacagtggtagttttctttttaatagtcttctgacaatgtttaatattcattttttcagtcaggtacaaatcagggtcgatgaagcgtatatggggcgtgtgatgtcgactatatttactattgctattatgtttatgcctataggaacactatttatgactatcttttcatttgccttatcaaatgttagctttattgttataggatgtgccattgctatattgggaggattaggatttagctatagtaaaaaacaattt

SEQ ID NO: 630 - protein, 393 aa, Streptococcus agalactiae
MNINGIKLLSSRAVSKLGDVFYDYGNSTWIASMGGLGQKILGIYQIVELLVSIVLNPFGGALADRFQRRKILLITDAICAIMCFLLSFIGDDKVMVYGLIVANAILAVSNAFSSPAYKSYIPEIVDKADIITYNANLETIVQIISVSSPVLGFLIFNNFGIRITLIVDAITFLISFLFLYAIKVERVQLSKQEKVAIKNILADIADGFTYIKKEKEIMFFLIIAALLNTFLAMFNYLLPFTNSLLKTSGAYATILSISAIGSIIGALIARKIKSSINSMLSMLVFSSLGVIVMGFPSLFELPIWIPYSGSFLFNSLLTMFNIHFFSQVQIRVDEAYMGRVMSTIFTIAIMFMPIGTLFMTIFSFALSNVSFIVIGCAIAILGGLGFSYSKKQF

SEQ ID NO: 631 - DNA, 1206 bp, Streptococcus pyogenes
atgaacaataggaaaaaaaatattcaatatttagtgtatagtaaagttatatatcgaattggcgatgttatgtttgattttgctaacaatacttttcttgctgggcttaatccagcgtctctatcattagttgcagtatatcagtctctagaaagtgtcataggtgttctatttaatttatttggtggagtcattgcagacagtttcaagcggaaaaaaattattattactacaaatatcttatgtggcacagcttgcttagtactctcgttcctaacaaaagagcaatggttggtttatgccattgtactaactaatgttatcttggcatttatgagtgctttttctagtccatcctataaagcatttacaaaagaaattgttaaaaaagatagtatatcacaacttaattcattgctagagacaacaagtactgtaatcaaagtaacagttcctatggtagcaattttcttatataagctacttggtatacacggtgtattactattggatggactatcatttctaatagctgctttactaatttcctttattttacctgttaatgacgaagtggtgataaaggagaaggtgacaatcagagaaatatttaacgatttaaaaataggatttaaatacgtttacagccataagtccatctttattattaccgttctttctgcacttgttaatttttttctagccgcttataatttattgttgccctatagtaatcaaatgtttggagaaatttcaactggactttatggcacttttttaacagcagaagcaattggtggatttattggggcaatattaagtggttttgtgaataaagaattatcaagtatgagattgatattgtttctatctttatcaggactgatgttaatgttagctcccccattttatattatgtttcataatgcaattattttagctttgtcaccagctttattcagtttatttctttccatctttaatattcaatttttttctcttgtccagaaagatgttgataacgattttttagggagagtgtttggtattatctttacaataactattctttttatgcctattgggactggctttttctcggtggcattaaatcctaacaatagctttaatctttttattattggttcgtgcattactacattgtcattagtatttagaatattatttaaaaagtataatattcgt

SEQ ID NO: 632 - protein, 402 aa, Streptococcus pyogenes
MNNRKKNIQYLVYSKVIYRIGDVMFDFANNTFLAGLNPASLSLVAVYQSLESVIGVLFNLFGGVIADSFKRKKIIITTNILCGTACLVLSFLTKEQWLVYAIVLTNVILAFMSAFSSPSYKAFTKEIVKKDSISQLNSLLETTSTVIKVTVPMVAIFLYKLLGIHGVLLLDGLSFLIAALLISFILPVNDEVVIKEKVTIREIFNDLKIGFKYVYSHKSIFIITVLSALVNFFLAAYNLLLPYSNQMFGEISTGLYGTFLTAEAIGGFIGAILSGFVNKELSSMRLILFLSLSGLMLMLAPPFYIMFHNAIILALSPALFSLFLSIFNIQFFSLVQKDVDNDFLGRVFGIIFTITILFMPIGTGFFSVALNPNNSFNLFIIGSCITTLSLVFRILFKKYNIR

SEQ ID NO: 633 - DNA, 468 bp, Streptococcus agalactiae
atgggaatcgcaaatgtcatccaaaccattccttctttagctatgatctctatcattatgttaggtctagggctaggtattaaaacagtagttgcaactgtctttctttattctcttctgccaatcatcacaaatacttacactggtattagaaatgttgactccgacttactagatgctgctaaaggaatgggcatgactaagcgtcaacgtttatttatggttgagttaccactatctatttccgttatcatggctggacttagaaatgcccttgttgtagcaattggtattacagccattggtgctttcgtcgggggaggcggacttggagatatcatcataagaggaactaatgcaacaaatggtggtgctattatcttagcaggatctcttccaacagcccttatggcaattttctctgatttaatcctaggcggtatccaacgcatgcttgaaccaagaaaa

SEQ ID NO: 634 - protein, 156 aa, Streptococcus agalactiae
MGIANVIQTIPSLAMISIIMLGLGLGIKTVVATVFLYSLLPIITNTYTGIRNVDSDLLDAAKGMGMTKRQRLFMVELPLSISVIMAGLRNALVVAIGITAIGAFVGGGGLGDIIIRGTNATNGGAIILAGSLPTALMAIFSDLILGGIQRMLEPRK

SEQ ID NO: 635 - DNA, 1560 bp, Streptococcus pyogenes
atgcttttgtggtcaatttatttggaggtgatgagcatgcctagtttgtttgtaactttccaaaaccgttttaatgaatggctggcggctctgggggaacacctgcaaatttcccttttatctcttatgatcgccttgctaataggtgtgcctttagcagcccttctcagtcgcagcaaacgttggtcagacattatgttacaggtaacaggtgtttttcaaaccattccctcactggctttgcttggtcttttcatccctttaatgggaattggaacgttgcctgcagtgacagctttagttatctatgcgatttttccgattttacaaaacaccatcacaggattaaatggtattgacccaagtctcgtggaagcaggaatagcttttgggatgaccaaatgggagcgattgaaaacatttgagattccaattgccatgcctgttattatgtcaggtgtgcggacgtcagcagtcatgattatcggcacagctactttagcttccttgataggagccggtggacttggctctttcatcttattagggattgatcgtaataatgctaacctgattctgataggggctatttcttcagctctgctagctattattttcaatagtttgttacagtaccttgagaaagcttccttgcgacggattatgattagttttggaattaccttacttgcactgctagcatcgtatactcctatggcgcttagtcagttttcaaaaggaaaagatacagtggttattgccggtaaattgggagcagagcccgatattctgattaatctctataaggaattaattgaagaccaatcagatataagtgttgagttgaaatctaattttgggaaaactagcttcttatatgaagcccttaaatctggagatattgatatgtatcctgaatttacaggaaccataacatcaagtcttttacgcgacaaaccacctttgtctaatgaccctaagcaggtctatgaggatgctaaaaaaggcattgctaagcaagataaactgacccttctcaagccatttgcttaccaaaatacgtatgctgttgctatgccagaaaaattggctaaggaatatcagattgaaaccatttctgatttaaaagcgcatgctgatactttaaaggccggttttactttggaatttaaggacagagcagatggctataagggaatgcaatctcaatatggattacagctatctgtggcgacgatggagccagctcttcgttatcaagcaattcaatcaggagatatccaagtaacagatgcttactctacggatgctgaaattacgaaataccatttgaaagttttaaaggatgataaacagttgtttccaccttatcagggagctcctttgatgaaaacttccttattaacaaaacatccagaattaaaaggcattcttaatcaattagcgggaaaaattactgaaaaagagatgcaggacatgaactacgaggtatctgttaaaggagcagatgctaataaggtcgctcgagattatctgttgaaaacaggcttaatccagaaa

SEQ ID NO: 636 - protein, 520 aa, Streptococcus pyogenes
MLLWSIYLEVMSMPSLFVTFQNRFNEWLAALGEHLQISLLSLMIALLIGVPLAALLSRSKRWSDIMLQVTGVFQTIPSLALLGLFIPLMGIGTLPAVTALVIYAIFPILQNTITGLNGIDPSLVEAGIAFGMTKWERLKTFEIPIAMPVIMSGVRTSAVMIIGTATLASLIGAGGLGSFILLGIDRNNANLILIGAISSALLAIIFNSLLQYLEKASLRRIMISFGITLLALLASYTPMALSQFSKGKDTVVIAGKLGAEPDILINLYKELIEDQSDISVELKSNFGKTSFLYEALKSGDIDMYPEFTGTITSSLLRDKPPLSNDPKQVYEDAKKGIAKQDKLTLLKPFAYQNTYAVAMPEKLAKEYQIETISDLKAHADTLKAGFTLEFKDRADGYKGMQSQYGLQLSVATMEPALRYQAIQSGDIQVTDAYSTDAEITKYHLKVLKDDKQLFPPYQGAPLMKTSLLTKHPELKGILNQLAGKITEKEMQDMNYEVSVKGADANKVARDYLLKTGLIQK

SEQ ID NO: 637 - DNA, 984 bp, Streptococcus agalactiae
atgcttaaaaaatcgcactttttacagatatttacactttgcttagccctcttaacgatttctggttgtcaattaaccgatactaaaaagtctggtcataccacaattaaggttgctgcccaaagttctacagagtctagtattatggcaaatattatcaccgaattaattcatcacgaattaggatacaacacaactttaataagcaatcttggttcctctacggttactcaccaagctttgctccgtggtgatgctgacattgctgccacacgttatacaggaacagacatcacagggactcttggtttaaaagctgttaaagaccctaaagaagcttctaagattgtaaaaactgaattccaaaaacgctacaatcaaacttggtatcctacttatggtttttctgatacttatgcattcatggttactaaagagtttgccagacagaataaaatcactaagatctctgatcttaaaaaattatcaacaactatgaaggcaggggttgatagttcatggatgaatcgcgagggagatggatacactgatttcgctaaaacatacggttttgaattttcacatatttaccctatgcaaattggcttagtctatgatgcggttgaaagtaacaaaatgcaatctgtattaggctactccactgacggtcgtatttcgagctatgatttagaaattttaagggatgataaaaaattctttcctccttatgaagcctctatggttgtcaacaattctatcatcaaaaaagatcctaaactaaaaaaattactccatcgactcgatggtaaaatcaatttaaaaacgatgcaaaaccttaattatatggtagatgataaacttttagaaccttcagttgttgccaaacaatttttagaaaaaaaccattattttagrrgarrwwaawwaawkraammaawkaawwmyttccmammatttwtyywmywmytycmammwwawkgkwrk

SEQ ID NO: 638 - protein, 328 aa, Streptococcus agalactiae
  MISC_FEATURE (1)..(328): Xaa = Any Amino Acid
MLKKSHFLQIFTLCLALLTISGCQLTDTKKSGHTTIKVAAQSSTESSIMANIITELIHHELGYNTTLISNLGSSTVTHQALLRGDADIAATRYTGTDITGTLGLKAVKDPKEASKIVKTEFQKRYNQTWYPTYGFSDTYAFMVTKEFARQNKITKISDLKKLSTTMKAGVDSSWMNREGDGYTDFAKTYGFEFSHIYPMQIGLVYDAVESNKMQSVLGYSTDGRISSYDLEILRDDKKFFPPYEASMVVNNSIIKKDPKLKKLLHRLDGKINLKTMQNLNYMVDDKLLEPSVVAKQFLEKNHYFRXXXXXXXXXXFXXFXXXXXXXXX

SEQ ID NO: 639 - DNA, 633 bp, Streptococcus agalactiae
atggtcaatttcttatcacagtatggcatgcaaatattagtaaaaacatgggaacaagtctatatctcattctttgctatagcacttgggattgcaattgctgttccattgggtgtggtcttaacacgttttcccaaagtagccaaaattatcattgctatagctagcatgttacaaactataccaagtttagccttattagctttaatgattccattgtttggaattggaaaaatcccagctatcgttgctttatttatttattccttgcttcctatactaaggaatacttatataggtatgaataatgtcaatccaacacttaaagattgtgctaaagggatgggaatgaaacctattcaatctatatttcaagttgagttacctttagctactccaattattatggctggtattcgcttgtctactatttatgttattgcttgggctacattggcttcttatataggtgcaggtggacttggtgatctcatttttagcgggttaaatctttttcagtccaaattaattctagggggcacaattcctgttattatcctgtcacttattatagattatcttttaggattactggaaacagctctaacgcccagaacaacaagaagggaggct

SEQ ID NO: 640 - protein, 211 aa, Streptococcus agalactiae
MVNFLSQYGMQILVKTWEQVYISFFAIALGIAIAVPLGVVLTRFPKVAKIIIAIASMLQTIPSLALLALMIPLFGIGKIPAIVALFIYSLLPILRNTYIGMNNVNPTLKDCAKGMGMKPIQSIFQVELPLATPIIMAGIRLSTIYVIAWATLASYIGAGGLGDLIFSGLNLFQSKLILGGTIPVIILSLIIDYLLGLLETALTPRTTRREA

SEQ ID NO: 641 - DNA, 1143 bp, Streptococcus agalactiae
atgggccaagaacctatcatcgaatatcaaaatatcaataaagtgtatggggaaaatgttgcggttgaagacattaaccttaaaatttaccctggtgattttgtttgtttcatcggtacgagtggatcaggtaaaacaacattaatgcgtatggttaaccatatgttaaaaccaacaaatggtactctattatttaagggaaaagatatttctactattaaccccattgaattaagacgcagaattggatatgttatccaaaacattggtttaatgcctcatatgaccatttacgaaaatatagttcttgtaccaaaattattgaaatggtcagaagaagctaaaagagctaaagcaagggaacttattaaattagttgaattacccgaagaatatttggatcgctaccctagtgagttgtctggcggtcagcaacaacgtatcggtgtcattcgcgctcttgcagcagaccaagatattattttaatggatgagccttttggagctctggatcctattactagagaaggtattcaagacttagtcaagtctcttcaggaagaaatggggaaaactatcatcttagttactcatgatatggatgaagccctcaagttagcaacaaaaattattgttatggacaatggtaaaatggtccaagaagggacacccaatgatctcttacatcatcctgctactagtttcgttgaacaaatgattggagaagagcgtctccttcatgcgcaggctgatattactcctgttaaacagataatgttaaataatcctgtttcaataactgctgaaaaaacactaactgaagctattacactaatgcgccaaaaacgcgttgactcacttctagtaaccgataacggtaaattaattggttttattgacttagaatctctaagcagtaaatataagaaagatcgacttgtttctgatatcttaaaacatactgatttttatgttatggaagacgacttacttagaaatactgctgagcgtattttaaaacttggtttaaaatacgctccagttgttgaccatgagaataacttaaagggcattgttactcgtgcatccctagttgatatgttatacgatattatttggggcgatactgaaacggaggatcaa

SEQ ID NO: 642 - protein, 381 aa, Streptococcus agalactiae
MGQEPIIEYQNINKVYGENVAVEDINLKIYPGDFVCFIGTSGSGKTTLMRMVNHMLKPTNGTLLFKGKDISTINPIELRRRIGYVIQNIGLMPHMTIYENIVLVPKLLKWSEEAKRAKARELIKLVELPEEYLDRYPSELSGGQQQRIGVIRALAADQDIILMDEPFGALDPITREGIQDLVKSLQEEMGKTIILVTHDMDEALKLATKIIVMDNGKMVQEGTPNDLLHHPATSFVEQMIGEERLLHAQADITPVKQIMLNNPVSITAEKTLTEAITLMRQKRVDSLLVTDNGKLIGFIDLESLSSKYKKDRLVSDILKHTDFYVMEDDLLRNTAERILKLGLKYAPVVDHENNLKGIVTRASLVDMLYDIIWGDTETEDQ

SEQ ID NO: 643 - DNA, 726 bp, Streptococcus pyogenes
atgatacgttttaataatgtttctaaaacttttggtcagacaaaggttttgcaagagcagacctttcaaattaatgatcgtgaattttttgtgctggttggccccagcggatcgggcaagaccacacttttaaaaatgattaattgccttattgaaccaagctctggagatattttactaaataacgtcccacagacagagttagatttacgtgagatgaggctatctattggatacgtattgcagcaaattgctctgttccccaatctcacagtagctgaaaatattgcgattatccctgagatgaagcaatggtcagctgaagaaattagacaaaaaactgaagaattattggataaggtgggcctacctgctaaagattatcttgatcgttacccaagtgatttatcgggaggtgaacagcaacgtattggtattgtacgtgctatcatttctcatcctaaaattctattgatggatgaaccattttcagccttagatcctatttcacgtaaacaattgcaagagttaatgttgagtcttcacaaggaatttgacatgacgattgtatttgtgacacatgatattgatgaggccattaaattaggagaccgcgtagctattttaaatgagggagaaattgtgcaactggatcgcccagaaatgattaagacccaccctgctaatgcttttgtggtcaatttatttggaggtgatgagcatgcc

SEQ ID NO: 644 - protein, 242 aa, Streptococcus pyogenes
MIRFNNVSKTFGQTKVLQEQTFQINDREFFVLVGPSGSGKTTLLKMINCLIEPSSGDILLNNVPQTELDLREMRLSIGYVLQQIALFPNLTVAENIAIIPEMKQWSAEEIRQKTEELLDKVGLPAKDYLDRYPSDLSGGEQQRIGIVRAIISHPKILLMDEPFSALDPISRKQLQELMLSLHKEFDMTIVFVTHDIDEAIKLGDRVAILNEGEIVQLDRPEMIKTHPANAFVVNLFGGDEHA

SEQ ID NO: 645 - DNA, 111 bp, Streptococcus agalactiae
ttgatgggcacgagtggactcgaaccaccgacctcacgcttatcaggcgtgcgctctaaccacctgagctacgcgcccaagctattgcttggtttttactttcttataaag

SEQ ID NO: 646 - protein, 37 aa, Streptococcus agalactiae
MMGTSGLEPPTSRLSGVRSNHLSYAPKLLLGFYFLIK

SEQ ID NO: 647 - DNA, 495 bp, Streptococcus agalactiae
ttgatatataaaatttatattctaagaaaagagaacatgatgagaaaatatataaaatggttaattcccatatcaatttttgggatgatacttggaggctgtcaaatgaatagtgaacataaaattcagtcaaacgaagtaaaaaatagcaagcaatcagaagtgaagaaagataaaaaaatgacaaaaaaagaacaattagcctatctcaaagagcatgagcaagaaatcatagattatgtaaaattacataacaaccaaattgagtccgttcaattcgattggtcaagtgtaaaagtagaacaaagcgggaatggaactccacaagggggtgattataatctttcactgagaggaaagtttaatcatctacaaaattcaaaattaatagttgatttttatttagctcataaaaatgatatcccaaatatcaaatcaatgggaatgctaaataagccgtatatacataaaaatggtatttggcacatttatgaa

SEQ ID NO: 648 - protein, 165 aa, Streptococcus agalactiae
MIYKIYILRKENMMRKYIKWLIPISIFGMILGGCQMNSEHKIQSNEVKNSKQSEVKKDKKMTKKEQLAYLKEHEQEIIDYVKLHNNQIESVQFDWSSVKVEQSGNGTPQGGDYNLSLRGKFNHLQNSKLIVDFYLAHKNDIPNIKSMGMLNKPYIHKNGIWHIYE

SEQ ID NO: 649 - DNA, 804 bp, Streptococcus agalactiae
ttgagtaattggaacttagataattttgataacttacatagctctttagcagaaagtgcatataatagtcgacctaattcatttcctgaattatttgagactgactcagtaacagaagtaaaattttctcaaccctcagaagataacaaaggtcaaatcacacagggtggcactaacctccccaatgatggtattgtctacctgcaaccagataagtccttaaaatctattgatgaaaatgtaaaggtcctcattccagatgtcaatggaggctatcacactgagcattatgttactcattcttatcaaaaaggtgtgcttactgacgataaggcaggttttaatgcttactacctgtcagatactgaaaaaatagatagcactacaaagcacacttatctagccattcgtggtagtgatgggattggtctagatacactaaacgattgggttagtaacaatgcaatgtttgctgtctctaacaagtatattccacaagcgaaattggctaataaggctatgaaagaaaaaattgccgagctaaaaggaaaagcgcctggagctattatagatgttactggtcactcactcggtacgattgtatcttctcaagcagttgttaatcttagctatgcagaattggagaatgttggtcaagtagtccttttcgatggccctgatgtatcaagaagcttggaaaaaatggaaggcatttctgctaaaaaaatccaagaagctgggaagcatgttacctactatgtcaatccctttgatatagttagtatgcttaatcgtgaaaagcca

SEQ ID NO: 650 - protein, 268 aa, Streptococcus agalactiae
MSNWNLDNFDNLHSSLAESAYNSRPNSFPELFETDSVTEVKFSQPSEDNKGQITQGGTNLPNDGIVYLQPDKSLKSIDENVKVLIPDVNGGYHTEHYVTHSYQKGVLTDDKAGFNAYYLSDTEKIDSTTKHTYLAIRGSDGIGLDTLNDWVSNNAMFAVSNKYIPQAKLANKAMKEKIAELKGKAPGAIIDVTGHSLGTIVSSQAVVNLSYAELENVGQVVLFDGPDVSRSLEKMEGISAKKIQEAGKHVTYYVNPFDIVSMLNREKP

SEQ ID NO: 651 - DNA, 348 bp, Streptococcus agalactiae
atgctctatatggcaacgcaattagcagaatcagatgtttcagaaaaagtctctgcaacaaaaaaacatattagtgaagctaaggatacgattgtagaaatatcgacatccactatttcatcagctgaaataatggctatgcaccttgaccaatcagaagttgatgctctggtttcagatataaaaatgtcaacagtttggaatgatggcgtagagacttctgattatgaagcacttgatcactataaaacaaaaatgaccacatttacgaccaatttggtaacagttgcacaaaatttaacagctcaagatgagcaactagctggtgatattgtcacgaacttatcc

SEQ ID NO: 652 - protein, 116 aa, Streptococcus agalactiae
MLYMATQLAESDVSEKVSATKKHISEAKDTIVEISTSTISSAEIMAMHLDQSEVDALVSDIKMSTVWNDGVETSDYEALDHYKTKMTTFTTNLVTVAQNLTAQDEQLAGDIVTNLS

SEQ ID NO: 653 - DNA, 270 bp, Streptococcus agalactiae
atgtccaaagaattgaaattgcccttgaatgaaatgttgaaagaacaagaaagaatagctattaaggcaatagttgctacagcaaaaagcactattacggatactggaacaaatttaaaagcaactttagagtcagatgcccaagacctaaaaaactatgcatccacctataacgccaatatcacggatggtcttgaaggccagtcagctcaagcagcatctgatttcttgacacaacttccaaaaccagagttagataatccagtcaat

SEQ ID NO: 654 - protein, 90 aa, Streptococcus agalactiae
MSKELKLPLNEMLKEQERIAIKAIVATAKSTITDTGTNLKATLESDAQDLKNYASTYNANITDGLEGQSAQAASDFLTQLPKPELDNPVN

SEQ ID NO: 655 - DNA, 348 bp, Streptococcus agalactiae
atgatagatacaaaaaaactgcaagaactcgatcaagaatatgatcaaaatctcagaaacatttatcgtaacagagagcaactagaagatgactttcacttgtttatggcaagaacagacagcctaaaagagtctgtctatcaagcaactttaggacaaggttgggaattaccccaagaagctcatgcacacctatataatatggatgataataaggatacattcatatcagaattcaatgaatatatggaaaagcttgaagaaaaggaaatagatcttcgaagagtttataatgatagagtagatgaattgtatcagaaggctaagcaaaacgaagcaaaaaaagga

SEQ ID NO: 656 - protein, 116 aa, Streptococcus agalactiae
MIDTKKLQELDQEYDQNLRNIYRNREQLEDDFHLFMARTDSLKESVYQATLGQGWELPQEAHAHLYNMDDNKDTFISEFNEYMEKLEEKEIDLRRVYNDRVDELYQKAKQNEAKKG

SEQ ID NO: 657 - DNA, 96 bp, Streptococcus agalactiae
atgaaaattatgaaagaattagacaatataggaattaaccgtaagaatctttttcgggatcatgataatatagcaaaatatctaattgaaaaagta

SEQ ID NO: 658 - protein, 32 aa, Streptococcus agalactiae
MKIMKELDNIGINRKNLFRDHDNIAKYLIEKV

SEQ ID NO: 659 - DNA, 591 bp, Streptococcus agalactiae
ttgggagattttatgaacaataaaaacaaatggactataattttacttatttttactatcatcgtaattgatgttagcttactatttggcgggaatcgtttaagtttaccaatcaaattattaattttattagtaaccagtatagcagaattttgttcgatttttataatgataaaagttccgactcctcaaaaatataagaaagaaccatttggattaaaagcaaaattttattctattgtactctttctctcgactattctttatacaattgggatatggaatgtgacgccagcttccccatacaatgttaaagaatcaattcttggagttggcattttaatacaagtagttttcttcatttattttctattaaaaaaaattaacgaaagtcccgatgaacgcttttatagtaatttagcattgtcagcttctttgatgtttttgatatcaataatgttattaattcttatagctatttaccttaatatatatggaacgttagagttaaaatcaggctacctttatattatggtaggtttattattactaatgtttgctgttacatattactttcttgagggacggaga

SEQ ID NO: 660 - protein, 197 aa, Streptococcus agalactiae
MGDFMNNKNKWTIILLIFTIIVIDVSLLFGGNRLSLPIKLLILLVTSIAEFCSIFIMIKVPTPQKYKKEPFGLKAKFYSIVLFLSTILYTIGIWNVTPASPYNVKESILGVGILIQVVFFIYFLLKKINESPDERFYSNLALSASLMFLISIMLLILIAIYLNIYGTLELKSGYLYIMVGLLLLMFAVTYYFLEGRR

SEQ ID NO: 661 - DNA, 216 bp, Streptococcus agalactiae
atggggaaagaaacaaaaattatcagttctttaaaacaggttagagaagatatcggaatgactcaacaagagttagctattcggataggtgttaggagagaaacaattggtcatttagaaaataacaggtataatccttctctagagatggcacttaaaattgttaagattttcgacatgaagatagaagatatttttcaattaaggaaagaggat

SEQ ID NO: 662 - protein, 72 aa, Streptococcus agalactiae
MGKETKIISSLKQVREDIGMTQQELAIRIGVRRETIGHLENNRYNPSLEMALKIVKIFDMKIEDIFQLRKED

SEQ ID NO: 663 - DNA, 558 bp, Streptococcus agalactiae
ttgaataaattttttttagaatcagagagacttattataaggccactagaagaaagtgattatgatagttggtatactagttttatgaatcgtggaccatctttaactccatttgatgatgggatacttgatatgtctatgtgtgacattaattggtttaaaaatttagtaaatttacaaaggaaagaatgggaaagtgacatagtatatatatttggtgtttttctaaaaagcggtgagcacgtaggaatgttaaatattgttacccttgcaagagcagatatgcaatggggagaattgggatatgtttttcataatcaattttggagtaatggctatgcatttgagtcaatcttggcattacttaatagtacttatgaaaaattgggttttcatcatattgaagcacagattactcctgggaatgaacgatcggaaaagttggttagaagattgggattaacctatgagacaactcgaaaagatttttcatttgagaatggaaaatggacagataaactgatttatagtataaatttacataataataatttagaa

SEQ ID NO: 664 - protein, 186 aa, Streptococcus agalactiae
MNKFFLESERLIIRPLEESDYDSWYTSFMNRGPSLTPFDDGILDMSMCDINWFKNLVNLQRKEWESDIVYIFGVFLKSGEHVGMLNIVTLARADMQWGELGYVFHNQFWSNGYAFESILALLNSTYEKLGFHHIEAQITPGNERSEKLVRRLGLTYETTRKDFSFENGKWTDKLIYSINLHNNNLE

SEQ ID NO: 665 - DNA, 576 bp, Streptococcus agalactiae
atgaataatttggatacactatattgtaaattagcaatgtgcaacacagtactaacggaaagattacgactccagcctgttgaattaactaatgtaaatgattttttagaattttcatctgattctgaaacagtattctatatgcaacgttataaagctaataccgtagaagaagcacaagtcgttttagcaaatgtttgtatgaaatcaccattaggaatttatgcaatgattgaaaaagaatcacagaagatgataggtattattgaattagaaatcagagatgaattttctgcagaatttggttatattttaaataaaaattataatggaaaaggttatatgacagaagcttgttcaaaattgatgtcaattggatttgaacatctagacttggaaagaatttatgctagatttgacattaataataaaaaatctggaaatgttatggaacggataggtatgaaaaaagaaggcgagcttcgtcatcttgcaaaaaatccaaaaggtgagtggaaaacaagagcgtattattctattttaaaagaagaatattttaataaagttaatactaaa

SEQ ID NO: 666 - protein, 192 aa, Streptococcus agalactiae
MNNLDTLYCKLAMCNTVLTERLRLQPVELTNVNDFLEFSSDSETVFYMQRYKANTVEEAQVVLANVCMKSPLGIYAMIEKESQKMIGIIELEIRDEFSAEFGYILNKNYNGKGYMTEACSKLMSIGFEHLDLERIYARFDINNKKSGNVMERIGMKKEGELRHLAKNPKGEWKTRAYYSILKEEYFNKVNTK

SEQ ID NO: 667 - DNA, 540 bp, Streptococcus pyogenes
atggatatttggacaaagcttgcagtgtttgctttttttgagactccgaaagtaatattacggccttttcgctatgaagatcattgggatttttacagcatggttaacgacactaaaaacctttattatgtttttccagaacaaaaaactaaggcagcaagtgactatcttttagtacatagttttataaagtttcctttaggtcagtgggcaatagaagataaagcaacccaccaagtaataggttctattagaattgagcattatgatgctaaaacgcgttgtgctgatattggctattttttaaactatgccttttggggacaaggaattatgacagaagtcgtaataaaacttgtttatttatcttttcacgaatttggtctcaaaacgttgcgtattataactcatttagaaaataaggccagccagaaagtagctaaaaaagcaggttttcaactaaaaacctgttttaaaggaagtgatcgtaatactcataaaatctgcatttataaaatgtaccaactaactaatgatagg

SEQ ID NO: 668 - protein, 180 aa, Streptococcus pyogenes
MDIWTKLAVFAFFETPKVILRPFRYEDHWDFYSMVNDTKNLYYVFPEQKTKAASDYLLVHSFIKFPLGQWAIEDKATHQVIGSIRIEHYDAKTRCADIGYFLNYAFWGQGIMTEVVIKLVYLSFHEFGLKTLRIITHLENKASQKVAKKAGFQLKTCFKGSDRNTHKICIYKMYQLTNDR

SEQ ID NO: 669 - DNA, 678 bp, Streptococcus agalactiae
gtgggtgatgtcgttgaaaattttacggaaggtaaaaatccgaagattgatacacttaatgggaaaacagttagaatagaaaaaataaatccagatcattttgaagacttatttcaagtttatggagaattgtctactgaagatagtttaacttatatatcttttagcaaatttaatagtaagaatgaatttgatgtctttttccaaactctattaaaatcagaagatccttattatttagctattgttgataataatactggtaaagtattagggactttttcattaatgcgtattgatacaaaaaatagagttgttgaaatgggatgggtggtttattcatcaaaactaaaacaaacaaggatagcaacagaagctcaatatttggttatgaaatatgtttttgaagaactctgttaccgccgttatgagtggaaatgtgatagtttgaatgcaccatctaataattctgcaaaacgacttggttttacttttgaaggaacttttagacaagctgtcgtatataagggtcgtaacagagatacaaattggtattctattttagataaagagtggccagagaaaaaaacacggtttgaaaaatggctagatgattcaaactttgctgtaaatgggtatcaaatcagatcactatcaagcattgagcagaagacaaaa

SEQ ID NO: 670 - protein, 226 aa, Streptococcus agalactiae
MGDVVENFTEGKNPKIDTLNGKTVRIEKINPDHFEDLFQVYGELSTEDSLTYISFSKFNSKNEFDVFFQTLLKSEDPYYLAIVDNNTGKVLGTFSLMRIDTKNRVVEMGWVVYSSKLKQTRIATEAQYLVMKYVFEELCYRRYEWKCDSLNAPSNNSAKRLGFTFEGTFRQAVVYKGRNRDTNWYSILDKEWPEKKTRFEKWLDDSNFAVNGYQIRSLSSIEQKTK

SEQ ID NO: 671 - DNA, 945 bp, Streptococcus agalactiae
atgataaaaacaaagtttagtgatccactggaacaattagccaaaaaaaggaaaaggaaaacattattcaagaccgtagtattggcattaataactgtactattagtagttggaatagcttttaaagggtttacatatttaacttcaaaaaatggtcaaaaaacatatcataactttgaactactttctgaaatagcatatccaaatatttcctatgatagtctctattaccagccaagcggtcagtttactggtaaagtacatgctgatagatttaaagatatcgatggggttcaaattccatattctagttttgaagaaaattatagtatctcaggtacttttggcacaaatgctgatgaaaaatcagaaaagaatggcttgtatgatcgaggtactagacaaaaagttccacaatttttcaataaaaatgttaagtataaaaaaggagaagccaaaacaactccaacaaatgatttaaaatatgtaaataaattgaataatgatcttattgaaattgcaataacttttgataagtcctatagttacaaagaaataaaaacaatgataccaaataatataaaacaaaattggttatggataggtacaagcacagaattagatacatcatattggccaacaaagtatcaattcggtacagatcctgaaactttgaatacaccacaaatattcatagataaaataaaagaaaacttaaaaggtaactcaaaagtatactttaataatataaatatctactcagatttagaaaagtatgccaaaaaatacgacaaggtaaataatagcgacaaattaaaattttcgggaataatattaacaggtaaagccgaaaactttaaacaacttaaagaaaaagaatgggtacatgcttcaagtataggggcaaacatagaatataagccctattataaattagataaagaa

SEQ ID NO: 672 - protein, 315 aa, Streptococcus agalactiae
MIKTKFSDPLEQLAKKRKRKTLFKTVVLALITVLLVVGIAFKGFTYLTSKNGQKTYHNFELLSEIAYPNISYDSLYYQPSGQFTGKVHADRFKDIDGVQIPYSSFEENYSISGTFGTNADEKSEKNGLYDRGTRQKVPQFFNKNVKYKKGEAKTTPTNDLKYVNKLNNDLIEIAITFDKSYSYKEIKTMIPNNIKQNWLWIGTSTELDTSYWPTKYQFGTDPETLNTPQIFIDKIKENLKGNSKVYFNNINIYSDLEKYAKKYDKVNNSDKLKFSGIILTGKAENFKQLKEKEWVHASSIGANIEYKPYYKLDKE

SEQ ID NO: 673 - DNA, 162 bp, Streptococcus agalactiae
atgatgaaaaaatatataaaatggttaattcccatatctattattgggatgttactagtaggctgtcaaatgaataggggacctaaaagtcagtcaaacgaagtaaaaaatagcaagcaatcagaagtgaagaaaggtaaaaatatgataaaaaagaacagt

SEQ ID NO: 674 - protein, 54 aa, Streptococcus agalactiae
MMKKYIKWLIPISIIGMLLVGCQMNRGPKSQSNEVKNSKQSEVKKGKNMIKKNS

SEQ ID NO: 675 - DNA, 606 bp, Streptococcus agalactiae
atgaaaaataatattattttttctattgaacagtatattaatgaccaagagatgccaaaaggaaaacaaaaagttattttatccgctatagagctctttgcctcacaaggcttccatggaacttccactgctcaactagctaaaaatgcagaagttagccaagcaactatatataaatattttgaaactaaagacaagcttttggtctttattctcgagttaatcgtacaaactattggacgccccttctttacagaattatctacattttctactaaagaggaactaattcatttctttgtacaggaccgttttaaatttattgaaaaaaataatgatctcattaaaatattgatgcaagaattattaatcaatagtgaaacatcaactatttttactaagctaataaattcaactgatccaaacattactaaaattttcaactgtttaagtgaaggaaattcgttgaataaaatggaaatacttcgagcagtaatcggacagttcattactttctttattcaattatatatccttaatataaagcctgaaaatctagaggaagaactaaaacaaatagaaaaacaaatattaaaattactgagc

SEQ ID NO: 676 - protein, 202 aa, Streptococcus agalactiae
MKNNIIFSIEQYINDQEMPKGKQKVILSAIELFASQGFHGTSTAQLAKNAEVSQATIYKYFETKDKLLVFILELIVQTIGRPFFTELSTFSTKEELIHFFVQDRFKFIEKNNDLIKILMQELLINSETSTIFTKLINSTDPNITKIFNCLSEGNSLNKMEILRAVIGQFITFFIQLYILNIKPENLEEELKQIEKQILKLLS

SEQ ID NO: 677 - DNA, 192 bp, Streptococcus agalactiae
atgccgtatgataacatatatccaaatacaatatcactacgtttaacaggagttgcaaggagtcgatcaagtgtaccagaagtacgctcttttaataaagccattccagaaattaaaaaaacaaagaagaagaccataaatcccattagtattggtatcatttttgcaaaaaagcctgtatttttatttccg

SEQ ID NO: 678 - protein, 64 aa, Streptococcus agalactiae
MPYDNIYPNTISLRLTGVARSRSSVPEVRSFNKAIPEIKKTKKKTINPISIGIIFAKKPVFLFP

SEQ ID NO: 679 - DNA, 1095 bp, Streptococcus agalactiae
atgagaattattgcaataactgaaaaggttataaaagaactgtttcgtgataaaagaacacttgctatgatgtttttagcacctattttaattatgtttttgatgaatgttatgttttctgcgaatagtaatacaaaagttaagattggaactattaacgttaacacgaaggtcgtttcaaatttagataatattaagcatattcaagtgagatcatttaaatttaactcatctgctaaaaaagcactcaaatcaaataaaattgatgctcttatttcggaggacaataaatcttatactgtcttctatgcgaatacagattcttcaaagacgactttaacaagacaagcttttaaaaccgctgttaatacaatgaacagtaaggaactgatttcgcaagttaaaattttagctaataagaatccgaaactagcacaatccttacaaactcgctccaaatatatcaaagaaaaatataattacggaaataaaaatacaggcttttttgcaaaaatgataccaatactaatgggatttatggtcttcttctttgtttttttaatttctggaatggctttattaaaagagcgtacttctggtacacttgatcgactccttgcaactcctgttaaacgtagtgatattgtatttggatatatgttatcatacggcattctagcaattattcaaacgatagttatcgttttatcaactatttggctactagatattcaagttgtaggtagtatttttagtgtcatcattgtcaattttattttggctctggttgccttatcattaggaatcttaatgtctactctagcaaaatcagaatttcaaatgatgcaatttattcccttaattataatgcctcaattattcttttcaggaataatccctctagaaaatatggcaagttgggctcagacagtcggtaaaattctaccgctctcctactctggtgatgcacttacaaaaataattatgtacggtcaaggattacctaacgtttcttcaaatcttctggtacttcttctatttttaattattttaaccatcgcaaatatctttggactaaaacgataccgtaaagta

SEQ ID NO: 680 - protein, 365 aa, Streptococcus agalactiae
MRIIAITEKVIKELFRDKRTLAMMFLAPILIMFLMNVMFSANSNTKVKIGTINVNTKVVSNLDNIKHIQVRSFKFNSSAKKALKSNKIDALISEDNKSYTVFYANTDSSKTTLTRQAFKTAVNTMNSKELISQVKILANKNPKLAQSLQTRSKYIKEKYNYGNKNTGFFAKMIPILMGFMVFFFVFLISGMALLKERTSGTLDRLLATPVKRSDIVFGYMLSYGILAIIQTIVIVLSTIWLLDIQVVGSIFSVIIVNFILALVALSLGILMSTLAKSEFQMMQFIPLIIMPQLFFSGIIPLENMASWAQTVGKILPLSYSGDALTKIIMYGQGLPNVSSNLLVLLLFLIILTIANIFGLKRYRKV

SEQ ID NO: 681 - DNA, 1116 bp, Streptococcus pyogenes
atgatttgttttataaaaactctatttgttaagataaagcgcaaaaaaacaagttatgtgacattctttttaatgcctattttaacgacacttttggctttatctttgagtttttcaaataataatcaagctaaaattgggatattagataaagataatagtcagatatctaaacaatttattgctcaactaaagcaaaacaaaaagtacgacatttttaccaaaatcaaaaaagagcatattgatcactaccttcaagataaatctctagaagcggtattgactattgacaaagggttctcagataaagtgttgcaaggaaaatctcaaaaactcaatatacgttcgattgctaatagcgaaattacagagtgggtaaaggcacagaccaattatctattggaaaattataatattataggggatgtggctctaggtaacgaagatacttttaatagaattctccaaaaaaaccaacagttaaattatgatgttaagcaagtaactttgacagaccgatcacgtagcaaagcagtatcttccacaacgacaggatttttgcttattctaatgttaggtagtacgagcgtgatttacagtggtattttggcagataaatctagtcagttataccatcgattaatgttatcgaacttatctcgttttcgctatatgttgagttacgtctgtgtaggatttgttgcttttacgattcaaattgtcattatgctgagtttgttaaaagtatttaatattagtttttttgttccgacatcacttcttttgattatttttttcctttttagtttattagcgataggctttggcctgctgattggagctatcacacaaaattcccaacaaagtagccagttagctaatcttattgtaatgccgacttcaatgttggctggctgtttatggccattgtctattacgccttcttatatgcaagcaattggtaagttattaccacaaaattgggttttatcagccatagctatttttcaaagtggagggaccttatctcaggcttggccatacttgttagctctaatgggaacagcactagctttgattagtttttcaagtttattattaaaacctaccaaacta

SEQ ID NO: 682 - protein, 372 aa, Streptococcus pyogenes
MICFIKTLFVKIKRKKTSYVTFFLMPILTTLLALSLSFSNNNQAKIGILDKDNSQISKQFIAQLKQNKKYDIFTKIKKEHIDHYLQDKSLEAVLTIDKGFSDKVLQGKSQKLNIRSIANSEITEWVKAQTNYLLENYNIIGDVALGNEDTFNRILQKNQQLNYDVKQVTLTDRSRSKAVSSTTTGFLLILMLGSTSVIYSGILADKSSQLYHRLMLSNLSRFRYMLSYVCVGFVAFTIQIVIMLSLLKVFNISFFVPTSLLLIIFFLFSLLAIGFGLLIGAITQNSQQSSQLANLIVMPTSMLAGCLWPLSITPSYMQAIGKLLPQNWVLSAIAIFQSGGTLSQAWPYLLALMGTALALISFSSLLLKPTKL

SEQ ID NO: 683 - DNA, 642 bp, Streptococcus agalactiae
ttggaggtgtttaaaggcgaaataattggattaataggaccctctggagcagggaaatctaccttgattaaaactatgcttggcatggaaaaagcagataagggaacagctcttgttcttgatactcaaatgccagatcgtaatattttaaatcaaattggctatatggctcaatctgatgccttatacgagtctttaactggcttagaaaatttattattctttggaaaaatgaaaggtattcaaaaaactgaattaaaacagcagataactcatatttctaaagtagtagatctagaaaaccaacttgataaatttgtctcaggttactcaggaggtatgaaaagacggctttctctagccatcgccctacttggaaaccccacagttttaatcctagatgaacctaccgttggaattgatccatccttgaggagaaaaatctggcaagagctaattaatattaaggatgaaggacattctatctttattacaacccacgttatggatgaagcagaattaacaagtaaggttgcactactattacgtggaaacattattgcctttgatactccattacatttaaaaaaacaatttaatgtgagtactattgaggaagttttcttaaaagctgaaggagaa

SEQ ID NO: 684 - protein, 214 aa, Streptococcus agalactiae
MEVFKGEIIGLIGPSGAGKSTLIKTMLGMEKADKGTALVLDTQMPDRNILNQIGYMAQSDALYESLTGLENLLFFGKMKGIQKTELKQQITHISKVVDLENQLDKFVSGYSGGMKRRLSLAIALLGNPTVLILDEPTVGIDPSLRRKIWQELINIKDEGHSIFITTHVMDEAELTSKVALLLRGNIIAFDTPLHLKKQFNVSTIEEVFLKAEGE

SEQ ID NO: 685 - DNA, 921 bp, Streptococcus pyogenes
atgagttttgtacaattaacaaatgttgtcaagtcctacaaaaacggcaagaaagctgtcaatgatgtttccttgtctattgaagcaggtaatatttatggtttgttaggaccaaatggtgctggtaagtctaccttgattaatcttatcttaggcttgatccctttgagttccggtaaaattactgttttagggcaatcccaaaagactattcgaaaaataagttcgcagataggttatgttcctcaagacattgctgtttatccagacctaactgcttatgaaaatgtagaactatttgggtcactttatggcttaaagggagctcagcttaaaaaacaagttctaaaaagtttagaatttgtggggctacactcccaagctaagcagtttccaagtcaattctcaggaggaatgaagagacggttaaatatcgcttgtgcgctagttcattcacctaaattaatcatttttgacgaaccgactgtagggattgatcctcaatcacgtaatcatattttagagtcgattcgtttgctaaacaaagaaggtgctacagttatttatacgacccattatatggaagaagtagaggctctttgtgattatatttttattatggatcatggtcaagttattgaagaaggacctaaatttgaactggaaaaacgttacgttgcaaatctagcaaaccagattattgtaactctaacagattcacgtcatttggaactggcagataagcctgattggtctttgatagaagatggagaaaaactcatgttgaagattgataatagtgatatgacatcagttgttcatcagctcacacaggccaatattacttttagcgagattagacataaccatttgaatttagaagaaattttcttacacttaacaggtaagaagttacgagat

SEQ ID NO: 686 - protein, 307 aa, Streptococcus pyogenes
MSFVQLTNVVKSYKNGKKAVNDVSLSIEAGNIYGLLGPNGAGKSTLINLILGLIPLSSGKITVLGQSQKTIRKISSQIGYVPQDIAVYPDLTAYENVELFGSLYGLKGAQLKKQVLKSLEFVGLHSQAKQFPSQFSGGMKRRLNIACALVHSPKLIIFDEPTVGIDPQSRNHILESIRLLNKEGATVIYTTHYMEEVEALCDYIFIMDHGQVIEEGPKFELEKRYVANLANQIIVTLTDSRHLELADKPDWSLIEDGEKLMLKIDNSDMTSVVHQLTQANITFSEIRHNHLNLEEIFLHLTGKKLRD

SEQ ID NO: 687 - DNA, 105 bp, Streptococcus agalactiae
gtgagtaaacactcactcactgagagaggagcaaaaagttatcatgaaaaaagtcatcgatttaaaaaaactacaaaaagcatatgcctcagaaaccgttttaaa

SEQ ID NO: 688 - protein, 35 aa, Streptococcus agalactiae
MSKHSLTERGAKSYHEKSHRFKKTTKSICLRNRFK

SEQ ID NO: 689 - DNA, 387 bp, Streptococcus agalactiae
atgaaggctcaggcgattgtcacaagccaagggagaattgtttctttggatattgcagtgaactattgccacgatatgaagttgttcaaaatgagtcgcagaaacatcggacaagctgctaaaatcttggcagacagtggttatcaagggatcatgaagatgtattcacaagcgcaaactccgaggaaatcaagcaaacttaagccactaactcttgaagataaaacctataaccatacgctatccaaagagagaatcaaggttgagaatatttttgccaaagtaaaaacgtttaaaatattttcaacaacctatcgaaatcgacgcaaacggtttggattacgaatgaatttgattgctggaatgatcaaccgtgaactaggattt

SEQ ID NO: 690 - protein, 129 aa, Streptococcus agalactiae
MKAQAIVTSQGRIVSLDIAVNYCHDMKLFKMSRRNIGQAAKILADSGYQGIMKMYSQAQTPRKSSKLKPLTLEDKTYNHTLSKERIKVENIFAKVKTFKIFSTTYRNRRKRFGLRMNLIAGMINRELGF

SEQ ID NO: 691 - DNA, 381 bp, Streptococcus agalactiae
atgaattatgaagcaagcaaacaattaactgatgtacgatttaagcgccttgttggtgttcagcgcactacttttgaagagatgttagctgtgttaaaaacagcttatcaacgtaaacacgcaaaaggtggccgaacccctaagttaagcttagaagatctcctcatggctactcttcaatacatgcgagaataccgcacttatgaacaaattgcggctgattttggcattcacgaaagcaacttaatccgtcgaagtcaatgggttgaatcaactcttattcaaagtggttttacgatttcaaaaactcatcttagtgctgaggatacggtgattgtggatgcaacagaggtaaaaatcaatcgtcctaaaaaaatcaac

SEQ ID NO: 692 - protein, 127 aa, Streptococcus agalactiae
MNYEASKQLTDVRFKRLVGVQRTTFEEMLAVLKTAYQRKHAKGGRTPKLSLEDLLMATLQYMREYRTYEQIAADFGIHESNLIRRSQWVESTLIQSGFTISKTHLSAEDTVIVDATEVKINRPKKIN

SEQ ID NO: 693 - DNA, 669 bp, Streptococcus agalactiae
atggataaactgaaaaaattacaaaaagaaaatacgctattagaaggaagaattgataactctaataaccaaacctatacagatatgattgtctatttgcgaggtgctagcattagcccctaccatcaggagctcattcgaaatgatattgtcaatatgttattagaagcacaagagcgacaagcaagtttagttagtgtatttggagaagataggcatgactttataaaccaagttattaaatctacacctaaaatctctaagaaagaagaaacattacaacgttgggatttagccattttactactaactatccaaatgattatctttttaggaggatatctcattactgaagcacttcaacagtcagtaccagatctaatccctattactctattagatgttctttttgcaatctttatcagtattattgctgtcaagatagctgataccataatatatgctacatataacttcgataaatcgaaagaaaagaaatatttctttcgatatatatttctaattctttcgcttatcatagcttatatccttataggaaaatattatcatcttcctttcattaatatccccctttggatttatttaattatactgggacttagcttctctcttcatatcattgttaaaaaatacctgaataaacattat

SEQ ID NO: 694 - protein, 223 aa, Streptococcus agalactiae
MDKLKKLQKENTLLEGRIDNSNNQTYTDMIVYLRGASISPYHQELIRNDIVNMLLEAQERQASLVSVFGEDRHDFINQVIKSTPKISKKEETLQRWDLAILLLTIQMIIFLGGYLITEALQQSVPDLIPITLLDVLFAIFISIIAVKIADTIIYATYNFDKSKEKKYFFRYIFLILSLIIAYILIGKYYHLPFINIPLWIYLIILGLSFSLHIIVKKYLNKHY

SEQ ID NO: 695 - DNA, 711 bp, Streptococcus agalactiae
gtgagtatgaaaatagataaaaaagaacttttagcacttattgctagtattattttattaatttttgcttctgttacgtttttcttatttaaagatcatggcactactcaaatggatactgtagaaagcagtgttaaccatgtcagtgattctcaattaactgaggcacaagatatgttagataaatttgagaagaaaccttcagaaaaattattgaaggatgtcgaacttgctttaaataaattgtccaattcttctaaaaaagaagctttgcaaaaacgttttaagaaagcaaaagataagtatcttaaagacgaagcagataagaaagctaccaaagatgctacagatttagtagaaattctagaacaagccccttcagaagaaaatgtgttaaaagctgaagcagcagtcaataagttaactgtcaaagaatctaaagaagctttacaaaaacgtattgatactgttaagacacaatatggtttgattgggaatcaaactccctctagttcagtagctgaaactacagaacaagggacagctaatcctgctagtcaggatacttctagttacgttaatcagaatgtagcaccaacttatgagcaaccgcaagcgaataatacaccagttactccaggggttaacaatactgttccgactccaggaactggtactgtacctgctactaatgggacaggtgttgctcag

SEQ ID NO: 696 - protein, 237 aa, Streptococcus agalactiae
MSMKIDKKELLALIASIILLIFASVTFFLFKDHGTTQMDTVESSVNHVSDSQLTEAQDMLDKFEKKPSEKLLKDVELALNKLSNSSKKEALQKRFKKAKDKYLKDEADKKATKDATDLVEILEQAPSEENVLKAEAAVNKLTVKESKEALQKRIDTVKTQYGLIGNQTPSSSVAETTEQGTANPASQDTSSYVNQNVAPTYEQPQANNTPVTPGVNNTVPTPGTGTVPATNGTGVAQ

SEQ ID NO: 697 - DNA, 720 bp, Streptococcus pyogenes
atggctacgatgaaacaatatcataaaggagattccatgactaaatcacaaaaagaggcgctttattggatgttgagtgttctaactatcactctaataggtggctcctgccttatttttggatcccaccctcaaacgcaagataaggtagctaaacattctaaaagtgctgctagtttactaaaaaaagcagttaaagcagttaatgacgctgatcgtttagccactgcagctgctatccaagaagcccagaaagctgttgataaattagcagaatcttctaagaaaaaaacgctacaagaacagctaaacgttgccaaagcaaagcaagagcaagaagatgcagctactcaagcagttaaagctgctgaggagactctcaatcaaaatcttaaagatatcgcccaaaaagcagttaacgacttaagtaacaaaggtaaaaaagccgctttacaatctcggttagacgctattttaccagcgaaacccattattgatgaatttccaagacaaagtggagaaataacagataactcttactggacacctttcccaggagacgtctcagatacttatgataattcccagtcacctactttagacccaagctcagaatcttcagcttcagatgttacaccacaacctagtcatcctgatccaattccacctcagacctcttcagaaccttccgactcaggagacaagcaatcatcaaaagag

SEQ ID NO: 698 - protein, 240 aa, Streptococcus pyogenes
MATMKQYHKGDSMTKSQKEALYWMLSVLTITLIGGSCLIFGSHPQTQDKVAKHSKSAASLLKKAVKAVNDADRLATAAAIQEAQKAVDKLAESSKKKTLQEQLNVAKAKQEQEDAATQAVKAAEETLNQNLKDIAQKAVNDLSNKGKKAALQSRLDAILPAKPIIDEFPRQSGEITDNSYWTPFPGDVSDTYDNSQSPTLDPSSESSASDVTPQPSHPDPIPPQTSSEPSDSGDKQSSKE

SEQ ID NO: 699 - DNA, 165 bp, Streptococcus agalactiae
ttgcccgctactgccgcaactgatttagacgcctcttctagtcgctttgtatctgaagttagggttgtcggcaagaaagatgtgactccagtagatagtaagccagcactcattcgcaaaattccttctgaatcacaatccataacatcagcgccagcaaaacca

SEQ ID NO: 700 - protein, 55 aa, Streptococcus agalactiae
MPATAATDLDASSSRFVSEVRVVGKKDVTPVDSKPALIRKIPSESQSITSAPAKP

SEQ ID NO: 701 - DNA, 939 bp, Streptococcus agalactiae
  misc_feature (1)..(939): n = a, c, g, or t
atgagagtgaatggggggaagaagatgacgaagtacatcaaggctgaccgattcttttatgctgatcatgtaaaggaaaacggttatttagaaataaaagataatcactttggtaaatggatagaaaatatttctggacaagaggagattttagattattcaggttatcaaatagcacctggtttagttgatacacatattcatggttttgctggcgctgatgttatggattgtgattcagaaggaattttgcgaatgagtgctggcttactatctactggagtcacatctttcttgccgacaaccctaacttcagatacaaagcgactagaagaggcgtctaaatcagttgcggcagtagcgggcaaagaacaaggagcaaaaattcaaggcatctattttgagggaccatattttactgaggaatataaaggagctcaaaatccgatttatatgagaaatccaaacttggaagagtttgctcaatggcagaaggctgcaaaaggcttgattacaaaaattgctttggcaccagaacgtgagggagttgaggaatttgtctcagcaatcacaaagcaaggtgttacggtagctttaggtcattctaatgggacatataaagaagctaaaaaggcagtgaaggcgggtgcctcagtttgggtacatgcgtataatggtatgcgtggtttgacacaccgagaaccaggtatggttggtgcggtttataatttacctaatacctatgccgaactcatttgcgatggtcatcacgttgatcctgttgcttgtgacattttaatgacacaaaaaggccataatcatgtggcattaataacagattgtatggcagctggaggtgcccctgatggagattatatgttaggggaattgcccgtggttgtgtctaatggaactgcgcgtttgannnnnttaattaat

SEQ ID NO: 702 - protein, 313 aa, Streptococcus agalactiae
  MISC_FEATURE (1)..(313): Xaa = Any Amino Acid
MRVNGGKKMTKYIKADRFFYADHVKENGYLEIKDNHFGKWIENISGQEEILDYSGYQIAPGLVDTHIHGFAGADVMDCDSEGILRMSAGLLSTGVTSFLPTTLTSDTKRLEEASKSVAAVAGKEQGAKIQGIYFEGPYFTEEYKGAQNPIYMRNPNLEEFAQWQKAAKGLITKIALAPEREGVEEFVSAITKQGVTVALGHSNGTYKEAKKAVKAGASVWVHAYNGMRGLTHREPGMVGAVYNLPNTYAELICDGHHVDPVACDILMTQKGHNHVALITDCMAAGGAPDGDYMLGELPVVVSNGTARLXXLIN

SEQ ID NO: 703 - DNA, 1146 bp, Streptococcus pyogenes
atgacatgctatcttaaagcagattgtttttattacccaacagaggtgagaccggctggctacctaagtcttcatgatggtgtttttggggagtggacagaaattgttccggcagatgcgcaaatcattgactacaccggttatcaaattgcaccaggtcttgtggatacgcatatccatggctatgcgggagctgatgtcatggataattctgcccaagggattcatcaaatgagtgaaggactattagcaacaggagtaacgtcttttttaccgacgaccttaacttctacctttgagcagttagaaaaagtatcagggactattgcttcagttgctgatcaggtaaaaggtgctaaaatacaaggtatctactttgaaggtccttattttaccgaagaatataagggtgctcaaaacccaagttatatgaaaaccccacgcttggaggaatttgatgcttggcaaaaagctgctaaagggctcatcaaaaaaattgcccttgctcctgaacgtgatggtgtcaaagaatttgtgtctgcagtgacaaaacaaggcgtaacagtggccttagggcattcaaacggtacttatcaagaggctaaagaagctgttcaagctggtgctagtgtttgggttcatgcttataatggcatgcgaggattgacccaccgtgaaccaggaatggtgggagcggtttataatcttccaaatacttacgcagagttgatttgtgatggccaccatgtctcaccaattgcttgtgatattttgatgcagcaaaaagggcatgatcatgtagccatgattacggactgtatgcgagcaggtggttcaccagatggtgattacctcttgggggaattctctgtggttgtggcaaatggcactgctcgtcttaaagagagtggaaacttggcaggatctattttgaaattaaaagatggccttagaaatgtagtggcctggggaatcgcaactccggcagaagccattcatatggcaacttatgtgccagctgtttctgtcggtattgacgacgtatgtggtcaaatcaaagctgggcatgcggctgactttattgttcttgataaggatttaacacttgttgcaacctatttaaatgggcaaaaagcttttgatgcc

SEQ ID NO: 704 - protein, 382 aa, Streptococcus pyogenes
MTCYLKADCFYYPTEVRPAGYLSLHDGVFGEWTEIVPADAQIIDYTGYQIAPGLVDTHIHGYAGADVMDNSAQGIHQMSEGLLATGVTSFLPTTLTSTFEQLEKVSGTIASVADQVKGAKIQGIYFEGPYFTEEYKGAQNPSYMKTPRLEEFDAWQKAAKGLIKKIALAPERDGVKEFVSAVTKQGVTVALGHSNGTYQEAKEAVQAGASVWVHAYNGMRGLTHREPGMVGAVYNLPNTYAELICDGHHVSPIACDILMQQKGHDHVAMITDCMRAGGSPDGDYLLGEFSVVVANGTARLKESGNLAGSILKLKDGLRNVVAWGIATPAEAIHMATYVPAVSVGIDDVCGQIKAGHAADFIVLDKDLTLVATYLNGQKAFDA

SEQ ID NO: 705 - DNA, 771 bp, Streptococcus agalactiae
  misc_feature (1)..(771): n = a, c, g, or t
gtgaatagagaggttactatgtcaatagaatcagattttttccggaaaaaacgttttattttttcatcgcttgaggagtttggatttatcaaatctgaccaagagtatatctattgtcaaacatttatggataatgactttaaagctattatcacgatttcattggatggaaagatagctggtaaggttattgattcggcacttgaagaagaatatttaccgcttcgagcagcaaattataatggttcgtttgttggcgaagtacgatcggcttatatggctatattaggtgatatttcagattcttgttgtaaggacttattatttaccaaagatcaaagtaatcgtttagcggagaagatagctaaaacttttgaagattcagttgattatccatttgcgaagcacccacaatatgcttcctatcgtgtgtcaggtaaatggtatgctctgctttttccattgaagatggggaaactagaaaatgttccagctcaactgtcagaagatgaggttgaagttttgaatattaaagtcaatcctcaagatatggaaatacttttacaaaaagaaggtatttatccttcttatcatatgtctaaaaagacttgggtatctatcgttttagacaatactttgtctgatatagaaatttttaaattggtatcagatagtcgtaagcttgtttctcacaataaaaaatcaaattctgagccagagttttggattattcctgctaatcctaaattttacgatcnnnnnttaattaat

SEQ ID NO: 706 - protein, 257 aa, Streptococcus agalactiae
  MISC_FEATURE (1)..(257): Xaa = Any Amino Acid
MNREVTMSIESDFFRKKRFIFSSLEEFGFIKSDQEYIYCQTFMDNDFKAIITISLDGKIAGKVIDSALEEEYLPLRAANYNGSFVGEVRSAYMAILGDISDSCCKDLLFTKDQSNRLAEKIAKTFEDSVDYPFAKHPQYASYRVSGKWYALLFPLKMGKLENVPAQLSEDEVEVLNIKVNPQDMEILLQKEGIYPSYHMSKKTWVSIVLDNTLSDIEIFKLVSDSRKLVSHNKKSNSEPEFWIIPANPKFYDXXLIN

SEQ ID NO: 707 - DNA, 1077 bp, Streptococcus pyogenes
atgagtttagcaactgactattttagccgacagacccccatagttgaaaagctaatggcttacggttttgagaagcgagacaacggttatttctataacgaacggtttatggaaggggaatttgaggcgcagcttaggattgatgaggctggcaatatctgggatcgggttattgattgtgacttggaggaggattatttgcctttacaacaagcagcctggcaaggaacctatactgggcaggttagagcggcctatttggaacttttggagcgcttatcagtagcctgttttgaagccactccttttcagtcaatgcaagctaatagacttgctaagcatatcaccaaagaatggtctgacccaatggactatccttttgaaaagcacccagaccttgcaacctatcgggtagggggcaaatggtatgctatgattttttctctcttggctgataaattagaccagataccagagagattagtaggacagacatgtgaagtgatgactgtcaaagttaatcccaaggctttccctcagttactgcagcaagaaggcatttacccagcgtatcacatgtcaaagaaaaactggattagtattattttggatgataaggtaacagatgataagctttggacgttagtgactcaaagtcgtcaactagtcaacccaaacggtctttctaatcctaatggtcctgattattgggttattccagctaatttgaaatactatgacattgatgcagaatttgcagccaatgatgtgattttatggacccaaaaagctggtattgccgtgggagactacgtgctgatttatataacagccccagtcaaatccattcgctatgtctgccaagttctagaaactgatatacctaacgagggttatcgtaaaaatcctaacattgacaaactcatgcgtctccgaaaatgccaacagtacaaggatggtctcttgtcttttgaccttatgaaaaaacatggcgtagctgcagtgagagggccaagacgattaagccctcaattaattgcatttttaaaggaaaaagagtattttaaagagaacaac

SEQ ID NO: 708 - protein, 359 aa, Streptococcus pyogenes
MSLATDYFSRQTPIVEKLMAYGFEKRDNGYFYNERFMEGEFEAQLRIDEAGNIWDRVIDCDLEEDYLPLQQAAWQGTYTGQVRAAYLELLERLSVACFEATPFQSMQANRLAKHITKEWSDPMDYPFEKHPDLATYRVGGKWYAMIFSLLADKLDQIPERLVGQTCEVMTVKVNPKAFPQLLQQEGIYPAYHMSKKNWISIILDDKVTDDKLWTLVTQSRQLVNPNGLSNPNGPDYWVIPANLKYYDIDAEFAANDVILWTQKAGIAVGDYVLIYITAPVKSIRYVCQVLETDIPNEGYRKNPNIDKLMRLRKCQQYKDGLLSFDLMKKHGVAAVRGPRRLSPQLIAFLKEKEYFKENN

SEQ ID NO: 709 - DNA, 1206 bp, Streptococcus agalactiae
ttgcgagacttcactagaaagagatttattcccatgacccagtttaccacagaattacttaacttcctagctcaaaaacaagatattgatgaatttttccgttcgtctcttgaaactgccatgaatgaccttctccaagtggagctatccgccttccttggctatgaaccatacgataaggcaggttacaacaccggtaatagtcgtaatggtgcttatacacgtcgatttgagaccaagtatggtgttgttaatttgttgatccctagagatcgaaacggggagttcagtccagccttaatcccaagttacggtcgtcgagacaatcatttagaagaaatggttatcaagctttatcgaactggagtcacaacacgtgaaatcagcgacatcattgagcgtatgtatggtcatcattacagtccagcaacagtatctaatatctcgaaagcgacacaggaaaacgtggctagctttcatgaacgttccttagaagctaactataccgtattatatcttgatgggacttaccttcctctgagacgtggtacagttagtaaggaatgcatccacattgcactaggcgtcacatcatatgggcataaggctatccttggatatgacatcgcacccaatgaaaacaatgcttcgtggtcagaccttctagaaagatttaagggtcaaggtgtacaacaagtctctcttgttgtgagtgatggttttaatggacttgatcagcttatccagcaagccttcccaatggccaaacaacagcgttgccttgtccatattggccgaaatattgcaagtaaggtgaaacgagcagatcgtgctctaattttggagcagtttaaaacaatttatcgcgcgatcaatgtagaggaagcaaagcaagccttagatagctttatcaatgagtggaaaccacactacaagaaggtaatagagaccttagaatcaatcgaaaatctattgatcttttatgaatttcctcatcagatctggggaagtatctactcgaccaaccttattgaatcacttaacaaagaaatcaaacgtcaaaccaaaaagaaagtcgtctttcccaatgaagaatccctagaacgctatctcgtcacactatttagtgattacaacttcaagcaaggacaacgaatccacaaaggttttggccaatgtacggacacacttgaaagcctatttgat

SEQ ID NO: 710 - protein, 402 aa, Streptococcus agalactiae
MRDFTRKRFIPMTQFTTELLNFLAQKQDIDEFFRSSLETAMNDLLQVELSAFLGYEPYDKAGYNTGNSRNGAYTRRFETKYGVVNLLIPRDRNGEFSPALIPSYGRRDNHLEEMVIKLYRTGVTTREISDIIERMYGHHYSPATVSNISKATQENVASFHERSLEANYTVLYLDGTYLPLRRGTVSKECIHIALGVTSYGHKAILGYDIAPNENNASWSDLLERFKGQGVQQVSLVVSDGFNGLDQLIQQAFPMAKQQRCLVHIGRNIASKVKRADRALILEQFKTIYRAINVEEAKQALDSFINEWKPHYKKVIETLESIENLLIFYEFPHQIWGSIYSTNLIESLNKEIKRQTKKKVVFPNEESLERYLVTLFSDYNFKQGQRIHKGFGQCTDTLESLFD

SEQ ID NO: 711 - DNA, 420 bp, Streptococcus pyogenes
atgactcagtttaccacagaattacttaacttcctagcacaaaaacaagatattgatgaattctttcgctcctctttagaaatagctatgaatgacctcttgcaagttgaactatcagcttttcttggttatgaaccttatgaaaaagaaggttacaacacaggtaatagccgtaatgggacttattctcgtcagtttgaaacaaagtatggcttagtcaatttaatcatcccaagagatcgaaacggcgagttttcaccagttttattaccatcttatgctagacgagaggaccacttggaagagatagtgatcaaactctatcagactggcgttacgacacgcgaaatcagtgacattattaagcgcatgtatggtgaccacttgtttctgagtggaagcctcgttacaaaaaggtta

SEQ ID NO: 712 - protein, 140 aa, Streptococcus pyogenes
MTQFTTELLNFLAQKQDIDEFFRSSLEIAMNDLLQVELSAFLGYEPYEKEGYNTGNSRNGTYSRQFETKYGLVNLIIPRDRNGEFSPVLLPSYARREDHLEEIVIKLYQTGVTTREISDIIKRMYGDHLFLSGSLVTKRL

SEQ ID NO: 713 - DNA, 861 bp, Streptococcus agalactiae
atgttttcgagcgattttggatttgagataattaatgttgacgacctatccttgcaagaggagagatttttaccttcagaattgctggcttatgcacgtgatgaaaatgagtcttctttcgtacgtgatattgaggggcatttggcacttgtttaccagcttttggatacgcaaggtcacgttgatgatgttcgtcatgtgccgagagtgataccagtgactctatttttgaaagaagatggcttgtttgtattagctaatcataaaaatattaaccttgtaaaaaaagcacttaatcgtgttgaaaaggtagattctccgaaacacctcttattatcattagtgactgctttctcaaagcaatattttgatgttttagatactatttctgaagaaagagataaactaatcaatgatttgcgtaaaagaccaaacaaatcgaacttggcaaggctggcaaatttacaaagtggaacagtacacttaatgatgggaactaagcaaaattttgaaatgctgaccgatttacaaaacattgagcaagataaagagaacactagaaatgaaaagatgcaacttcaagatgctattattgaagcaagacaattatctaacatgtgttccttaaattcacaggttttccaagaactttcttcttataataatgtcctcagcaataaccttaacgacaatgtaactactttaacaattatttccattggtatttccattattgctatggttaccagtttttatggaatgaatgttaagttgccttttgatagtgtggatgctgtctgggtattgattattttaattacgactatcattactattatgctctctattgttatgtacatt

SEQ ID NO: 714 - protein, 287 aa, Streptococcus agalactiae
MFSSDFGFEIINVDDLSLQEERFLPSELLAYARDENESSFVRDIEGHLALVYQLLDTQGHVDDVRHVPRVIPVTLFLKEDGLFVLANHKNINLVKKALNRVEKVDSPKHLLLSLVTAFSKQYFDVLDTISEERDKLINDLRKRPNKSNLARLANLQSGTVHLMMGTKQNFEMLTDLQNIEQDKENTRNEKMQLQDAIIEARQLSNMCSLNSQVFQELSSYNNVLSNNLNDNVTTLTIISIGISIIAMVTSFYGMNVKLPFDSVDAVWVLIILITTIITIMLSIVMYI

SEQ ID NO: 715 - DNA, 942 bp, Streptococcus pyogenes
atgaaacaaatgtttctttcatcggcaattgaattcaaagaaatagaaacattcgagccaggagcttggattaaactggttaacccttcccaagaagagtctatgaagatcgccgatcaatttaacattgatatttctgacttgcgcgcccctttggacgtggaagaaacctcacgtattgccgtagaagatgattataccctaattatcgtagacgtcccgatatacgaagaacgtaacaataaaagttactatattactatgcctttaggcattattgtaacggaaaatgctgttatcacaacttgtctgcatgacatgacccttttcgatcattttcacaaccgccgggtcaaaaatttctataccttcatgaagacacgttttgtttttcagattctatatcgcaacgccgagctctttctgactgccttgaggaccattgatcgccaaagcgaacgtttggaagctcagcttgaagcagctactcgaaatgaagaacttatcgacatgatggaacttgaaaaatccattgtctacttaaaggcttccttgaaattcaacgaacgcatcgtcaagaaattatccagctcaacaagctctctcaagaaatacattgaggacgaggatttgctagaagataccttgattgaaacccaacaggcgattgagatggctggcatttatgaaaatgtcttgaatgccatgaccgaaaccactgcttctattatcaacaataaccagaacaccattatgaaaacactggccttgatgaccatggctttagatataccaactgtgattttctccgcctatggtatgaatttccaaaacaactggttaccactaaatggcctagaacatgctttttggtatatcaccttgattgctatgctccttagttcctttgttgtgatttactttattagaaaaaaatggttc

SEQ ID NO: 716 - protein, 314 aa, Streptococcus pyogenes
MKQMFLSSAIEFKEIETFEPGAWIKLVNPSQEESMKIADQFNIDISDLRAPLDVEETSRIAVEDDYTLIIVDVPIYEERNNKSYYITMPLGIIVTENAVITTCLHDMTLFDHFHNRRVKNFYTFMKTRFVFQILYRNAELFLTALRTIDRQSERLEAQLEAATRNEELIDMMELEKSIVYLKASLKFNERIVKKLSSSTSSLKKYIEDEDLLEDTLIETQQAIEMAGIYENVLNAMTETTASIINNNQNTIMKTLALMTMALDIPTVIFSAYGMNFQNNWLPLNGLEHAFWYITLIAMLLSSFVVIYFIRKKWF

SEQ ID NO: 717 - DNA, 957 bp, Streptococcus agalactiae
atgtcaaaggtaaggtatggtgttgtgtcaacggcaaaggtggcgcctcgttttattgaaggagtccgcttagcaggaaatggtgaagttgtggctgtatcgagtcgaactcttgagtctgcgcaagcttttgccaacaaatatcatctcccaaaggcttacgataagttagaggatatgttagcagatgagtcaattgatgtgatttatgtggcaacaattaatcaagaccattataaagttgctaaagcagctctgttagcgggaaaacatgtgttggtagaaaagcctttcacattgacttacgaccaagcgaatgaattattcgctttggcagaaagttgtaatctgtttttgatggaggcacaaaaatcggtatttattccgatgacacaagtgattaaaaaattacttgcctctggtgaaataggagaagtgatctccatctcatctacaacagcctacccaaacattgaccatgtaacatggtttagagaacttgagttaggtggaggaacagtgcattttatggcgccctacgccctgtcttatttacaatatctatttgatgcgactataactcatgctagtgggactgcgacttttccaaaaggtcaaagcgatagtcaatccaaactactcttgcaattatcaaatggggtcctcgtagatatcttcttgacaacacgtctaaatttaccgcatgaaatgattatttatggaactgaaggtcgtctaatcattccacatttttggaaaaccactcatgcaaaattggtgagaaatgatactagtgcgcgaacgattcaagttgacatggttagtgattttgagaaagaagcttatcatgttagtcaaatgattttagaagggcaaagggtaagtcatatcatgacgcctcagttgacgctgtcaggtgttaagattatagaagacttataccgttcatgggggaaa

SEQ ID NO: 718 - protein, 319 aa, Streptococcus agalactiae
MSKVRYGVVSTAKVAPRFIEGVRLAGNGEVVAVSSRTLESAQAFANKYHLPKAYDKLEDMLADESIDVIYVATINQDHYKVAKAALLAGKHVLVEKPFTLTYDQANELFALAESCNLFLMEAQKSVFIPMTQVIKKLLASGEIGEVISISSTTAYPNIDHVTWFRELELGGGTVHFMAPYALSYLQYLFDATITHASGTATFPKGQSDSQSKLLLQLSNGVLVDIFLTTRLNLPHEMIIYGTEGRLIIPHFWKTTHAKLVRNDTSARTIQVDMVSDFEKEAYHVSQMILEGQRVSHIMTPQLTLSGVKIIEDLYRSWGK

SEQ ID NO: 719 - DNA, 957 bp, Streptococcus pyogenes
atgaaattagcggttttggggacaggtatgattgttaaggaagttttgcctgtcttgcagaaaattgatggtattgatttagttgctatcttatcaacagttagaagtttaacgacagctaaagacctcgctaaggcacatcacatgcctctagctacgagtaaatatgaggctatcttaggcaatgaggagattgacacggtttatattggactgccgaatcacctgcattttgcctatgctaaggaggcccttctagctggcaaacatgtcatttgtgaaaagccctttaccatgacagcaggagaattagatgaactggtggtaatcgctagaaaacgaaaactcattttgttagaagcgattacgaatcagtacctgagtaacatgacctttatcaaagagcatcttgaccaacttggcgatatcaaaattgtagaatgcaattattcacaatattcttcacgctacgatgccttcaaacgaggtgatatcgcgccagcttttaatcctaaaatgggtggtggagctttacgtgatttaaacatctacaacattcattttgtggtagggttatttggtcgccctaaaacggttcaatatttagccaatgtcgaaaaaggcattgacacctcaggcatgcttgtcatggactatgagcagtttaaagtggtgtgtatcggggccaaagactgcactgcagaaatcaaatcaaccatccaaggtaacaaagggtcactggcagtgcttggagcaacaaataccctccctcaggttcagttaagtctacacggtcacgaaccacaagtgattaaccacaacaagcatgaccaccggatgtatgaagagtttgtcgcttttagggacatgattgaccaaagagactttgagaaagtgaatcaggctttggaacatagccgagctgtcatggctgtgttggagcgcgctgttcattcg

SEQ ID NO: 720 - protein, 319 aa, Streptococcus pyogenes
MKLAVLGTGMIVKEVLPVLQKIDGIDLVAILSTVRSLTTAKDLAKAHHMPLATSKYEAILGNEEIDTVYIGLPNHLHFAYAKEALLAGKHVICEKPFTMTAGELDELVVIARKRKLILLEAITNQYLSNMTFIKEHLDQLGDIKIVECNYSQYSSRYDAFKRGDIAPAFNPKMGGGALRDLNIYNIHFVVGLFGRPKTVQYLANVEKGIDTSGMLVMDYEQFKVVCIGAKDCTAEIKSTIQGNKGSLAVLGATNTLPQVQLSLHGHEPQVINHNKHDHRMYEEFVAFRDMIDQRDFEKVNQALEHSRAVMAVLERAVHS

SEQ ID NO: 721 - DNA, 2649 bp, Streptococcus agalactiae
atgtcaaaagaactatcaccaaaatacaatcctgccgaggttgaggaaggccgttatcaaacttggcttgaccaagatgttttcaagccatcaggggatactgaggctaagccttattctatcgtaattccaccaccaaacgttacgggtaaattgcacttgggtcacgcttgggatacaactctacaagatatcattattcgtcaaaagcgtatgcagggctttgatacactctggcttccaggtatggaccacgctggtatagccactcaagctaaggttgaggagcgccttcgtgagcaaggcatttcacgttatgatcttggtcgtgaaaaattcctagataaagtttgggaatggaaagacgagtatgcagcaactattaaatctcagtggggaaaaatgggtctttcggttgattatagccgtgagcgttttacccttgatgagggactttcaaaagcggtaagaaaagtctttgttgatttgtacaataaaggttggatctatcgtggggagttcatcattaactgggatccagcagctcgcacagccctttcagatattgaagttattcacaaggatgttgagggtgctttctatcatatgaattatatgctggaagatggctcacgcgccctagaagtagcaacaactcgtcctgagactatgtttggagatgtggctgtagcggtaaatccagaagatgcacgttacaaggatttgattggtcaaaatgttatccttcctatcatcaataaacctattccaatcgtcgctgatgaacacgctgatccagaatttggaacaggtgtggttaagattacgccggctcacgaccctaatgactttgctgtaggtcaacgccacaacttaccacaagttaacgttatgaacgatgatggtactatgaatgaacttgcggatgaatttaatggtatggatcgtttcgaagctcgtaaggcagtagtcgctaaattagaatcgttaggaaacttagtaaaaattaaaaaaacgactcattctgttggtcattcagaacgaacaggcgttgtggttgaaccacgtttatctactcaatggttcgtcaagatggatcaattggctaagaatgccattgccaaccaagatacagaagacaaggtagagttttatccaccacgatttaacgatacttttatgagctggatggaaaatgtccatgactgggttatctctcgtcaattatggtggggacaccaaattcctgcatggtacaacgtcaatggtgagatgtatgttggagaagatgccccagagggtgacggatggacacaggatgaagacgttctagacacatggtttagttctgctttatggccgttttcaacaatgggatggccagacaccgaagcagctgacttcaaacgctacttcccaacgtcaaccttggtaactggatacgatatcatcttcttctgggtatcgcgcatgattttccaatcccttgaatttacaggacgccaaccattctcaaatgttcttattcatggactcatccgtgatgaagaaggacgtaaaatgtctaaatcactcggcaacgggattgatccgatggatgtcattgagaaatatggtgcggatgcccttcgttggttcctctcaaatggttcagcccctggtcaagatgtgcgtttttcatacgaaaaaatggatgcttcgtggaatttcattaataagatttggaacatttcacgctatatccttatgaataacgaaggtttaacgttggatcaagccagagaaaatgtggaaaaagttgttaatagtcaagttggaaatgtaacagaccgttggattctccacaatttaaatgagactgtgggtaaagttactgaaaactttgacaagtttgaatttggtgttgctggtcacatcctttacaactttatctgggaagaatttgctaattggtacgttgagttaacaaaagaggttctttatagtgacaatgaagacgagaaagtcatcactcgctctgttcttctttataccttagatcaaatcttgcgtcttcttcatccaatcatgccatttgtgacagaagaaatttttggacaatatgcagaaggatcaattgtccttgcaagttatccacaagttaacgcgacatttgaaaatcaaacagctcacaaaggcgttgaaagcttgaaagatttgattcgttcagtgcgaaatagcagagcagaggtcaatgttgctccatctaaaccaatcactatcttggttaagacaagtgacagcgaactcgaaagcttcttcaaagacaatagcaactacatcaaacgcttcacaaacccagagacgcttgaaatcagctcagcaattgccacaccagaacttgccatgtcatcagtcatcacaggtgcagaaattttcctcccacttgctgacctccttaacgttgaagaagagttggcacgacttgaaaaagaacttgctaaatggcaaaaagaactagatatggttggcaaaaaactcagcaacgagcgctttgtagctaacgctaaaccagaagtcgtccaaaaagaaaaagataaacagaccgactaccaaactaaatacgacgcaaccatagcacgtattgaagaaatgaagaagttggtgagg

SEQ ID NO: 722 - protein, 883 aa, Streptococcus agalactiae
MSKELSPKYNPAEVEEGRYQTWLDQDVFKPSGDTEAKPYSIVIPPPNVTGKLHLGHAWDTTLQDIIIRQKRMQGFDTLWLPGMDHAGIATQAKVEERLREQGISRYDLGREKFLDKVWEWKDEYAATIKSQWGKMGLSVDYSRERFTLDEGLSKAVRKVFVDLYNKGWIYRGEFIINWDPAARTALSDIEVIHKDVEGAFYHMNYMLEDGSRALEVATTRPETMFGDVAVAVNPEDARYKDLIGQNVILPIINKPIPIVADEHADPEFGTGVVKITPAHDPNDFAVGQRHNLPQVNVMNDDGTMNELADEFNGMDRFEARKAVVAKLESLGNLVKIKKTTHSVGHSERTGVVVEPRLSTQWFVKMDQLAKNAIANQDTEDKVEFYPPRFNDTFMSWMENVHDWVISRQLWWGHQIPAWYNVNGEMYVGEDAPEGDGWTQDEDVLDTWFSSALWPFSTMGWPDTEAADFKRYFPTSTLVTGYDIIFFWVSRMIFQSLEFTGRQPFSNVLIHGLIRDEEGRKMSKSLGNGIDPMDVIEKYGADALRWFLSNGSAPGQDVRFSYEKMDASWNFINKIWNISRYILMNNEGLTLDQARENVEKVVNSQVGNVTDRWILHNLNETVGKVTENFDKFEFGVAGHILYNFIWEEFANWYVELTKEVLYSDNEDEKVITRSVLLYTLDQILRLLHPIMPFVTEEIFGQYAEGSIVLASYPQVNATFENQTAHKGVESLKDLIRSVRNSRAEVNVAPSKPITILVKTSDSELESFFKDNSNYIKRFTNPETLEISSAIATPELAMSSVITGAEIFLPLADLLNVEEELARLEKELAKWQKELDMVGKKLSNERFVANAKPEVVQKEKDKQTDYQTKYDATIARIEEMKKLVR

SEQ ID NO: 723 - DNA, 2646 bp, Streptococcus pyogenes
atgacagaactatcacctaaatacaatcctgccgaggttgaggcaggtcgctatcaaaaatggcttgatgcagatgttttcaagccatcaggagaccaaaaagcaaaaccgtattctatcgtgattccaccgccaaatgtgactggtaagttgcacttgggacatgcttgggacacaacacttcaagatattatcattcgtcaaaaacgcatgcagggctttgatacgctttggcttccagggatggaccatgcaggaattgcgacacaggctaaggtagaggagcgtctgcgcgagcaggggatttctcgttacgaccttggtcgtgacaaattcctagacaaggtctgggagtggaaagacgaatatgccactacgattaaagagcagtggggcaaaatggggctttctgtggactacagccgtgagcgcttcacccttgatgagggcttgtcaaaagcagttcgcaaggtttttgttgacctctacaaaaaaggctggatttaccgtggtgaattcatcatcaactgggatcctgctgccagaactgccctttctgacatcgaggttatccacaaggatgttgagggagctttctatcacatgaactatatgttggaagatggctcacgcgcccttcaagtggcaacaacgcgaccagaaaccatgtttggagacgttgccgttgccgtaaacccagaagatcctcgttacaaagatttgattggcaaaaatgttattttaccaatcgtgaataaattgattccaatcgtgggtgacgagcatgctgaccctgaatttgggactggagttgtgaaaatcacgcctgcccatgatcctaacgatttcgaggttggtcaacgccataatctaccacaagtgaatgtcatgaacgatgacggtaccatgaatgagttagctggcgactttgcaggcatggaccgttttgaagctcgtcaagctaccgttgctaaacttgaagaacttggcgccctagtaaacatcgaaaaacgtgttcactcagtaggtcactcagaacgttcaggtgcagtcgttgagcctcgtctatccactcaatggtttgtaaaaatggatgagcttgctaaacaagctatggacaaccaagaaacagatgaccgagtagatttctacccaccacgtttcaacgataccttcctccaatggatggaaaatgtccatgactgggtaatctctcgccaattatggtggggtcaccaaattcctgcttggtacaatgcagaaggtgagatttacgttggcgaagaagcaccagaaggtgatgactggactcaagatgaagatgttcttgacacttggttctcatctgctttatggccgttctcaactatggggtggcctgacacagatgtagaagatttcaaacgttatttcccaacctcaaccttagtaacaggttatgacatcattttcttctgggtgtcacgtatgattttccaatcgcttgaatttaccgggcgtcagccattccaaaatgtcctgattcacggtcttattcgtgacgaagaaggacgcaaaatgtctaaatcattggggaacgggattgatccgatggatgtcattgagaaatatggtgccgatagcttacgttggttcctctcaaacggctctgccccaggacaagacgtgcgtttctcatacgaaaaaatggacgcctcttggaatttcattaataaaatttggaatatttctcgctatatcctcatgaataatgaagggttgacattggaagatgctgaaagtaatgtggctaaggtagctgcctcagaagctggaaatgtgactgaccagtggattctccacaatctcaatgaaaccatcgctaaagtgacagaaaactttgacaagtttgagtttggtgtggcaggacacattctttacaactttatttgggaagaatttgccaactggtatgtggaattgaccaaggaagtgctgtatagcgacaacgaagctgaaaaagttatcacgcgctctgtccttctttatactttggacaagattttacgtctccttcacccaatcatgccatttgtaacagaagaaatttacgctcaatatgcccaaggttctattgtgacggtggactatcctgtggttcgcccagcttttgaaaatgaagctgcgcataaaggtgtggaaagtttgaaagacctgattcgtgcagttcgtaatgcgcgcgctgaagttaacgtggcaccatcaaaaccaatcaccattttggtgaagacagcagatagtgaattagaagactttttcaacagcaatatcaactacatcaaatgcttcactaaccctgaaaaattagaaatcagctcagccattgctgcgccagaactggctatgaccagcatcatcacaggtgctgaaatctacttgccactagcagatttgcttaacgtggaagaagaacttgctcgcctagataaagaactggctaaatggcaaaaagaactggacatggtcggcaaaaaactcggcaacgaacgctttgttgccaacgccaaaccagaagttgtccaaaaagaaaaagacaaacaagctgactaccaagctaagtacgacgcaacccaagaacggattgcagagatgaagaaaattaaatca

SEQ ID NO: 724 - protein, 882 aa, Streptococcus pyogenes
MTELSPKYNPAEVEAGRYQKWLDADVFKPSGDQKAKPYSIVIPPPNVTGKLHLGHAWDTTLQDIIIRQKRMQGFDTLWLPGMDHAGIATQAKVEERLREQGISRYDLGRDKFLDKVWEWKDEYATTIKEQWGKMGLSVDYSRERFTLDEGLSKAVRKVFVDLYKKGWIYRGEFIINWDPAARTALSDIEVIHKDVEGAFYHMNYMLEDGSRALQVATTRPETMFGDVAVAVNPEDPRYKDLIGKNVILPIVNKLIPIVGDEHADPEFGTGVVKITPAHDPNDFEVGQRHNLPQVNVMNDDGTMNELAGDFAGMDRFEARQATVAKLEELGALVNIEKRVHSVGHSERSGAVVEPRLSTQWFVKMDELAKQAMDNQETDDRVDFYPPRFNDTFLQWMENVHDWVISRQLWWGHQIPAWYNAEGEIYVGEEAPEGDDWTQDEDVLDTWFSSALWPFSTMGWPDTDVEDFKRYFPTSTLVTGYDIIFFWVSRMIFQSLEFTGRQPFQNVLIHGLIRDEEGRKMSKSLGNGIDPMDVIEKYGADSLRWFLSNGSAPGQDVRFSYEKMDASWNFINKIWNISRYILMNNEGLTLEDAESNVAKVAASEAGNVTDQWILHNLNETIAKVTENFDKFEFGVAGHILYNFIWEEFANWYVELTKEVLYSDNEAEKVITRSVLLYTLDKILRLLHPIMPFVTEEIYAQYAQGSIVTVDYPVVRPAFENEAAHKGVESLKDLIRAVRNARAEVNVAPSKPITILVKTADSELEDFFNSNINYIKCFTNPEKLEISSAIAAPELAMTSIITGAEIYLPLADLLNVEEELARLDKELAKWQKELDMVGKKLGNERFVANAKPEVVQKEKDKQADYQAKYDATQERIAEMKKIKS

SEQ ID NO: 725 - DNA, 618 bp, Streptococcus agalactiae
ttgtggcgatatgcgctttggtttactgcgaagcgagtgggagaaaaaaagaagatgaatattattatcatcggagcacaagcttctgggaaaatgacaattggtcaggaaatcgcaaaacagacaggcatgaccttattccataaccatgattctatagattttgttttacgcttcatgccatggtctccagatagtattgctctaacggagtctattcgctttaaattttttgaaacgtttgctaagactggtcaagaaatgatttttactattgtaattgatttcaatgattcaagagatgtagtatttctagaaaagattcaaatagtttttcaatctcacaaccaagaggtattatttgtagaattagaaacagagctaagtgagcgtctcaaacgaaatcgcacagaaaatcgcctcaagcataagccttcaaaacgtgatatcaaatggtcagagagcgatatttgttcaaccatggattacgctatctttaatcctgaagtagccccagaagcgcttacatattatcataaaatcaataatacttgcttaactgctactgaaacagcatatcttattattcaaaaaataaaccaaatcaaggagaaaaac

SEQ ID NO: 726 - protein, 206 aa, Streptococcus agalactiae
MWRYALWFTAKRVGEKKKMNIIIIGAQASGKMTIGQEIAKQTGMTLFHNHDSIDFVLRFMPWSPDSIALTESIRFKFFETFAKTGQEMIFTIVIDFNDSRDVVFLEKIQIVFQSHNQEVLFVELETELSERLKRNRTENRLKHKPSKRDIKWSESDICSTMDYAIFNPEVAPEALTYYHKINNTCLTATETAYLIIQKINQIKEKN

SEQ ID NO: 727 - DNA, 582 bp, Streptococcus pyogenes
gtgggaggagcagaaacaaaaatgaaccttatcatcattggtgctcaagcgtcgggcaagatgaccattgggcaagaagttgccaggcagacaggcatgactttgtttcataatcacgattctattgactttgttttacggtttatgccttggtctcaagagagcactgccttgattgaacgtatccgttttgctttttttgaaacctttgctaagacaggtcaagacatgatttttactattgtaattgacttcaatgatccaaatgatgtagcaatgcttgaaaagattcaggctgtttttcagtcttatgaccaagaggttctctttgtcgaattaaaaacagatatagaggaacgtcttaaacgcaatcgcacagaaaatcgtctcaaacataaacctcttaaacgcaacatcgagtggtcagaacaagatattcaatccacgatggcatatgctgtttttaatccagaagaaccacccaaaacgctcacgcattaccaaaaaatcaataatacccagctcaccgctgctgaaacagcgcagcttattatccaaaaaatgactcatatcaaggagaac

SEQ ID NO: 728 - protein, 194 aa, Streptococcus pyogenes
VGGAETKMNLIIIGAQASGKMTIGQEVARQTGMTLFHNHDSIDFVLRFMPWSQESTALIERIRFAFFETFAKTGQDMIFTIVIDFNDPNDVAMLEKIQAVFQSYDQEVLFVELKTDIEERLKRNRTENRLKHKPLKRNIEWSEQDIQSTMAYAVFNPEEPPKTLTHYQKINNTQLTAAETAQLIIQKMTHIKEN

SEQ ID NO: 729 - DNA, 582 bp, Streptococcus agalactiae
atgattaagatacttggagaaatcgtagataaccagctacctgttgtggaaacgaatcgtctgttgttgcgtcaacgcaagttagaagatgctaaggagatatttgaatttgtcaaacttgatgaggtgagttatccagcaggttttccggctgttaaaagcttggaagaagagataacctatattcaagagatttatccaactaatcttgaaaaagaaaagttaccctctggttatgctattactctaaaaggcgatgataaggtaattggttcagtagattttaaccatcgccacgaagatgacatttttgaaattggctacctgctccaccctgattattggggacaaggcattgtgccagaagcagcttcagcccttgtggagataggtttcacactgctaggactacataagattgagctgggatgctatgactataataagcaaagtcaggcggttgcgcgcaaattaggttttactttagaggctaatattcgtgatcgaagagatgcccaggggaaacgttgtggcgatatgcgctttggtttactgcgaagcgagtgggagaaaaaaagaaga

SEQ ID NO: 730 - protein, 194 aa, Streptococcus agalactiae
MIKILGEIVDNQLPVVETNRLLLRQRKLEDAKEIFEFVKLDEVSYPAGFPAVKSLEEEITYIQEIYPTNLEKEKLPSGYAITLKGDDKVIGSVDFNHRHEDDIFEIGYLLHPDYWGQGIVPEAASALVEIGFTLLGLHKIELGCYDYNKQSQAVARKLGFTLEANIRDRRDAQGKRCGDMRFGLLRSEWEKKRR

SEQ ID NO: 731 - DNA, 177 bp, Streptococcus pyogenes
ttgcataaaattgagctgggttgctacgactacaacaagcaaagtcaggcagtggctcgcaaattaggctttaccttagaagccaatgcccgtgaccgtaaggacgttcaaggtcgccgctgtggcgacatgcgttttgggttactgagaagtgagtgggaggagcagaaacaaaaa

SEQ ID NO: 732 - protein, 59 aa, Streptococcus pyogenes
LHKIELGCYDYNKQSQAVARKLGFTLEANARDRKDVQGRRCGDMRFGLLRSEWEEQKQK

SEQ ID NO: 733 - DNA, 696 bp, Streptococcus agalactiae
ttgaaacaaaacgagttgcggatgttatcatccgaatttgggtggtaccgcggaaatcgtaacacgaaattcgtccctgtcagaattgacagggattttttgtatttaggagtgaggagattgaagtatatgcagattctagaagatttcgatggcaaagcattaccaaaactagaaacggatcggcttatcttgcgtcagcgaacggtgggggatgtcccagccatgtttgattacgtttgcttggaagaggttgcctatccagcaggactcagcccaatagcttctttagaagatgagtacgattattttgaaaatcgctactatcaaaatctggaaaaggcaaaattaccatctggttatggtattaccgttaaaggaagtgatcgtattatcggatcctgcgcctttaaccatcgccatgaagacgatgttttcgagatttgctatctgcttcatcctgactactggggtcatggctatatgacagaagctgtcgccgctttgattgaagtcggttttacccttctcaatctccacaaaatcgaaatccgctgctatgattacaataagcaaagccggcgcgtggcagaaaaactaggattcacccttgaagctaccattcgtgatcgtaaggataatcaagacaatcgctgtgtcaatttgatatatggtttgctgaggagtgagtgggag

SEQ ID NO: 734 - protein, 232 aa, Streptococcus agalactiae
MKQNELRMLSSEFGWYRGNRNTKFVPVRIDRDFLYLGVRRLKYMQILEDFDGKALPKLETDRLILRQRTVGDVPAMFDYVCLEEVAYPAGLSPIASLEDEYDYFENRYYQNLEKAKLPSGYGITVKGSDRIIGSCAFNHRHEDDVFEICYLLHPDYWGHGYMTEAVAALIEVGFTLLNLHKIEIRCYDYNKQSRRVAEKLGFTLEATIRDRKDNQDNRCVNLIYGLLRSEWE

SEQ ID NO: 735 - DNA, 300 bp, Streptococcus agalactiae
atgggatttcaaaacacctctaagttaatttattctagcaaaataaggctactttcgcaaggtaaatcaaattattttgcaaaaacaacaccattatcaactaactgtttaatagctgctggaccaataccttttagtgctaaaacatctgcttcacttactttcgcaaatgcttcaaggctgacaaggccagcttcttttaaaacatcttgtttattagcagttaaaccttctaaaagatcgactgcctttggcgcttcaggagccgtctttttcggtaatgcgacttcttgtaaagtt

SEQ ID NO: 736 - protein, 100 aa, Streptococcus agalactiae
MGFQNTSKLIYSSKIRLLSQGKSNYFAKTTPLSTNCLIAAGPIPFSAKTSASLTFANASRLTRPASFKTSCLLAVKPSKRSTAFGASGAVFFGNATSCKV

SEQ ID NO: 737 - DNA, 330 bp, Streptococcus agalactiae
atgaggagaaagcattatacaatggcaaagcgtattaaaccgaataaaaaaagagagcttttgaaagctaaagggatcaattggaaggatgttcgactatctcaaactttacaagaagtcgcattaccgaaaaagacggctcctgaagcgccaaaggcagtcgatcttttagaaggtttaactgctaataaacaagatgttttaaaagaagctggccttgtcagccttgaagcatttgcgaaagtaagtgaagcagatgttttagcactaaaaggtattggtccagcagctattaaacagttagttgataatggtgttgtttttgcaaaa

SEQ ID NO: 738 - protein, 110 aa, Streptococcus agalactiae
MRRKHYTMAKRIKPNKKRELLKAKGINWKDVRLSQTLQEVALPKKTAPEAPKAVDLLEGLTANKQDVLKEAGLVSLEAFAKVSEADVLALKGIGPAAIKQLVDNGVVFAK

SEQ ID NO: 739 - DNA, 393 bp, Streptococcus pyogenes
gtggcaaaacaaaaaaatcgtaaaaaagcattgaaattagaaatgaagcgtaatggcttgttaaaaaaagcaggtcaagtttttgataaggcagttgaaagtgttgaaacagctgtggataaaaccatttctgctggtaaaaatcttgtggaaaaaggcagccaaacagttgaaaacctgacagcaagcaaggaaagacttactcttgatgagtttgcagggcagccagttgtagctggtatccgctctgaccttgtcgaaaccctatatgcagaaggcatccattcagcgcaagcttttaaggagtggacagaaaaagacctccttgctcttaagggcattggtccagcaacggttaaaaaattggtcgaaaatggtgcaagctttaaaaaa

SEQ ID NO: 740 - protein, 131 aa, Streptococcus pyogenes
VAKQKNRKKALKLEMKRNGLLKKAGQVFDKAVESVETAVDKTISAGKNLVEKGSQTVENLTASKERLTLDEFAGQPVVAGIRSDLVETLYAEGIHSAQAFKEWTEKDLLALKGIGPATVKKLVENGASFKK

SEQ ID NO: 741 - DNA, 252 bp, Streptococcus agalactiae
atgtcatacgaacaagaatttttaaaagactttgaagagtggttacaatcgcaaataagtatcaaccaaatggcaatggacagtgcaaagaaagttttagaggaagataaggatgagcgagcagcagatgcgtatattcgttatgagagtaagttagacgcttatcgctttttgcaagggaaatttaataactatcataaccaaaaatctttccatgatttgcctgatggtctttttggacaacgtcattat

SEQ ID NO: 742 - protein, 84 aa, Streptococcus agalactiae
MSYEQEFLKDFEEWLQSQISINQMAMDSAKKVLEEDKDERAADAYIRYESKLDAYRFLQGKFNNYHNQKSFHDLPDGLFGQRHY

SEQ ID NO: 743 - DNA, 252 bp, Streptococcus pyogenes
atgtcttatgaaaaagaatttttaaaagattttgaagactgggttaaaactcagattcaagtcaatcagctagccatggcaaccagtcaagaagttgcccaagaagatggcgatgaaagggctaaagatgcctttattcgttatgaaagtaagttagacgcctacgaatttttactaggtaaatttgacaattataaaaatggtaaagcctttcacgatattccagatgagttatttggagcaaggcattat

SEQ ID NO: 744 - protein, 84 aa, Streptococcus pyogenes
MSYEKEFLKDFEDWVKTQIQVNQLAMATSQEVAQEDGDERAKDAFIRYESKLDAYEFLLGKFDNYKNGKAFHDIPDELFGARHY

SEQ ID NO: 745 - DNA, 246 bp, Streptococcus agalactiae
atgtccccgttaggaatgattaaagatgaaggtttattcaataccattaaaatcatcagccggggactgaaaaatgaacgatgccctcatccaaaattaataaatgttttggaaagaaaacttgaaattatccttggtgatcagaaacatatccttgaaaaagatagccttattagcctctctccacaagaaacacaccatttaagagctattgaaaatagtaaatttctccaaatagaattagac

SEQ ID NO: 746 - protein, 82 aa, Streptococcus agalactiae
MSPLGMIKDEGLFNTIKIISRGLKNERCPHPKLINVLERKLEIILGDQKHILEKDSLISLSPQETHHLRAIENSKFLQIELD

SEQ ID NO: 747 - DNA, 303 bp, Streptococcus pyogenes
atgattgaaaatctctctcaattggtgcaatatcatgatcatcaggtggctagccgatccttgagccgtctactgggattatctcaatctattgttttatatgccatggcccaaggagaaagcattagtcaagagactagtccaagagataaagtaatacttgttttagaaggtcagctcattttcgatttagaggatcaaaaacaggtcctaactcaagaaagtctcatagccatacctgcccaaaaagtccatcatttagaagctaaaaccgattgtaaactattacaagtgcttttagat

SEQ ID NO: 748 - protein, 101 aa, Streptococcus pyogenes
MIENLSQLVQYHDHQVASRSLSRLLGLSQSIVLYAMAQGESISQETSPRDKVILVLEGQLIFDLEDQKQVLTQESLIAIPAQKVHHLEAKTDCKLLQVLLD

SEQ ID NO: 749 - DNA, 297 bp, Streptococcus agalactiae
ttgcttgaactaaaatttcaacaagaaagaatgctgaaaggtttgcatataaaaaatacagatcaattgattttttatgactataggtttggtatgatatcaaatgatgctgttaacaaattcttggcaagctcattggaaaaattagaaatagaatctaagatgtcatcaacaggtgctagacatacttatggaagttatttgttggctaacggagtagatatttgggcggttgcaaaattaatggggcataaagatatcaaacaattaatagaaacatatggtcatttgcttctg

SEQ ID NO: 750 - protein, 99 aa, Streptococcus agalactiae
MLELKFQQERMLKGLHIKNTDQLIFYDYRFGMISNDAVNKFLASSLEKLEIESKMSSTGARHTYGSYLLANGVDIWAVAKLMGHKDIKQLIETYGHLLL

SEQ ID NO: 751 - DNA, 369 bp, Streptococcus agalactiae
atgaaaaagaaattattaggattgatgattttagctatatctacagtatttttagttgcttgttcgactaattcgttaaatgtaaagtattataaagtatatgatggtgaaaaaatgttagttttagaaattaatgatgaatcaggaatttatcataatgaaggaaactttgtagtaactaatattgatactaaaagtaaaagttttgtacttaaaggtgggtctgctaagtatactgttttatatgatgttaaaagtgatggtaaattgaatgttgatttagggaacttttattataatgcttctggtaaggagacatattataaagaaggtagcaaggctttagaaaaagcattaagagataaagaa

SEQ ID NO: 752 - protein, 123 aa, Streptococcus agalactiae
MKKKLLGLMILAISTVFLVACSTNSLNVKYYKVYDGEKMLVLEINDESGIYHNEGNFVVTNIDTKSKSFVLKGGSAKYTVLYDVKSDGKLNVDLGNFYYNASGKETYYKEGSKALEKALRDKE

SEQ ID NO: 753 - DNA, 291 bp, Streptococcus agalactiae
atgtcaacagtagcagtaagagttgatgatcaattaaaagatgatgctacagaactttttcaatccttagggttggatatgagcacagcagtaaaaatgtttttgattcaatctgttaaaactcaaagtattccttttgaaataaaaaataaatcatctgtttctgatgaagaatttcaaaatttggtagaaacaaaattaaagggaatacgagttaaggctagtgatccagaaagtgtaaatgcgttttttggagatgaagatttttcagaatatgaggaatattttaaa

SEQ ID NO: 754 - protein, 97 aa, Streptococcus agalactiae
MSTVAVRVDDQLKDDATELFQSLGLDMSTAVKMFLIQSVKTQSIPFEIKNKSSVSDEEFQNLVETKLKGIRVKASDPESVNAFFGDEDFSEYEEYFK

SEQ ID NO: 755 - DNA, 312 bp, Streptococcus pyogenes
atgtcgttacaaaaaaggaggataaccatggctaaaacgggaactttgaatttacgagttgatgattcagtaaaaagtgcggcagatgatattttgaaacgcttaggtattcctatgtcaactgcgattgatatgtttttgaatcagattattttgactgggggtatcccatttgatgtttctctacctgaagcgcctcaacgagttaatgttgattacatgagtcaggagaagttttatgataagcttatcaccagctttgaagatgcgaaaacttgcaaccctcaggatgtcgggaaattctatttccaa

SEQ ID NO: 756 - protein, 104 aa, Streptococcus pyogenes
MSLQKRRITMAKTGTLNLRVDDSVKSAADDILKRLGIPMSTAIDMFLNQIILTGGIPFDVSLPEAPQRVNVDYMSQEKFYDKLITSFEDAKTCNPQDVGKFYFQ

SEQ ID NO: 757 - DNA, 1176 bp, Streptococcus agalactiae
gtgacttacccagatggttcaaaagatactgtagatgtgactgttaaggttgtcgatccacgtacagatgccgataagaatgatccagcaggtaaagatcagcaagtcaatgtaggtgagacaccgaaggcagaagattctattggtaacttaccagatcttccgaaaggtacaacagtagcctttgaaactccagttgatacggcaacaccgggagacaaaccagcaaaagttgttgtgacttacccagatggttcaaaagatactgtagatgtgactgttaaggttgtcgatccacgtacagatgccgataagaatgatccagcaggtaaagatcagcaagtcaatgtaggtgagacaccgaaggcagaagattctattggtaacttaccagatcttccgaaaggtacaacagtagcctttgaaactccagttgatacggcaacaccgggagacaaaccagcaaaagttgttgtgacttacccagatggttcaaaagatactgtagatgtgactgttaaggttgtcgatccacgtacagatgccgataagaatgatccagcaggtaaagatcagcaagtcaatgtaggtgagacaccgaaggcagaagattctattggtaacttaccagatcttccgaaaggtacaacagtagcctttgaaactccagttgatacggcaacaccgggagacaaaccagcaaaagttgttgtgacttacccagatggttcaaaagatactgtagatgtgactgttaaggttgtcgatccacgtacagatgccgataagaatgatccagcaggtaaagatcagcaagtcaatgtaggtgagacaccgaaggcagaagattctattggtaacttaccagatcttccgaaaggtacaacagtagcctttgaaactccagttgatacggcaacaccgggagacaaaccagcaaaagttgttgtgacttacccagatggttcaaaagatactgtagatgtgactgttaaggttgtcgatccacgtacagatgccgataagaatgatccagcaggtaaagatcagcaagtcaatggtaaaggaaataaactaccagcaacaggtgagaatgcaactccattctttaatgttgtagctttgacaattatgtcatcagttggtttattatctgtttctaagaaaaaagaggat

SEQ ID NO: 758 - protein, 392 aa, Streptococcus agalactiae
MTYPDGSKDTVDVTVKVVDPRTDADKNDPAGKDQQVNVGETPKAEDSIGNLPDLPKGTTVAFETPVDTATPGDKPAKVVVTYPDGSKDTVDVTVKVVDPRTDADKNDPAGKDQQVNVGETPKAEDSIGNLPDLPKGTTVAFETPVDTATPGDKPAKVVVTYPDGSKDTVDVTVKVVDPRTDADKNDPAGKDQQVNVGETPKAEDSIGNLPDLPKGTTVAFETPVDTATPGDKPAKVVVTYPDGSKDTVDVTVKVVDPRTDADKNDPAGKDQQVNVGETPKAEDSIGNLPDLPKGTTVAFETPVDTATPGDKPAKVVVTYPDGSKDTVDVTVKVVDPRTDADKNDPAGKDQQVNGKGNKLPATGENATPFFNVVALTIMSSVGLLSVSKKKED

SEQ ID NO: 759 - DNA, 1137 bp, Streptococcus pyogenes
atgcgtagagcagaaaataacaaacacagccgctattccattcgcaaactgagcgttggggtaacgagtatagcaattgcgagtctctttttaggaaaggttgcctatgccgtagatggcatccctccaatctctcttactcaaaagactacagccactacatcagaaaattggcatcatattgataaggatggccttattcctttaggtataagcttagaagctgccaaagaggaatttaaaaaagaagtagaagaatcacgtttatctgaagcacaaaaagaaacgtataaacaaaaaattaaaactgcaccagacaaagataagctattattcacgtatcatagtgagtatatgacagccgttaaggatcttccagcgtctactgagtctactactcagccagttgaggcacccgtgcaggagacacaggcatcagcttcagattcgatggtgacaggtgattcaacatcagttacgactgattctcctgaggaaaccccatcttcggaaagtccagtggccccagctttatctgaggctccagctcaaccagctgagagtgaggaaccttcagtagcagcatcttctgaggaaaccccatctccatcaactccagcggccccagaaactcctgaagaaccagcagctccatctccatcacctgagagtgaggaaccttcagtagcagctccttctgaggaaaccccatctccagaaactcctgaagaaccagcagctccatctcaaccagctgagagtgaagaatcttcagtagcagctacgacaagcccgtctccatcaactccagctgaatcagagactcagacgccaccagctgttactaaagactctgataagccatcttcagcagctgaaaaaccagcagcctcttcacttgtttcagaacaaaccgttcaacaaccaacttcaaagagatcttctgataaaaaagaagagcaagaacagtcttactctccaaatcgctcattgtcaagacaggttagggcccatgagtcaggtaagtacttgccttcaacaggtgaaaaagcacagccactctttatagctactatgactttgatgtctctatttggcagtcttttagtcacaaaacgccaaaaagaaactaaaaaa

SEQ ID NO: 760 - protein, 379 aa, Streptococcus pyogenes
MRRAENNKHSRYSIRKLSVGVTSIAIASLFLGKVAYAVDGIPPISLTQKTTATTSENWHHIDKDGLIPLGISLEAAKEEFKKEVEESRLSEAQKETYKQKIKTAPDKDKLLFTYHSEYMTAVKDLPASTESTTQPVEAPVQETQASASDSMVTGDSTSVTTDSPEETPSSESPVAPALSEAPAQPAESEEPSVAASSEETPSPSTPAAPETPEEPAAPSPSPESEEPSVAAPSEETPSPETPEEPAAPSQPAESEESSVAATTSPSPSTPAESETQTPPAVTKDSDKPSSAAEKPAASSLVSEQTVQQPTSKRSSDKKEEQEQSYSPNRSLSRQVRAHESGKYLPSTGEKAQPLFIATMTLMSLFGSLLVTKRQKETKK

SEQ ID NO: 761 - DNA, 219 bp, Streptococcus agalactiae
  misc_feature (1)..(219): n = a, c, g, or t
gtgactgttaaggttgtcgatccacgtacagatgccgataagaatgatacagcaggtaaagatcagcaagtcaatgtaggtgagacaccgaaggcagaagattctattggtaacttaccagatcttccgaaaggtacaacagtagcctttgaaactccagttgatacggcaacaccgggagacaaaccagcaaaagttgttgaaacttacccannnnnt

SEQ ID NO: 762 - protein, 73 aa, Streptococcus agalactiae
  MISC_FEATURE (1)..(73): Xaa = Any Amino Acid
MTVKVVDPRTDADKNDTAGKDQQVNVGETPKAEDSIGNLPDLPKGTTVAFETPVDTATPGDKPAKVVETYPXX

SEQ ID NO: 763 - DNA, 1401 bp, Streptococcus agalactiae
atgtatagagctatacagaataaagtaaaggagaatattatgtttagaaggtctaaaaataacagttatgatactttacagacgaaacaacggttttcaattaagaagtttaagtttggtgcagcttctgtactaattggtattagttttttaggaggttttactcaagggcaatttaatatttctacagatactgtgtttgcagctgaagtaatttcaggaagtgctgttacgttaaacacaaatatgactaaaaatgttcagaatggtagagcatatatagatttatatgatgtgaaaaatgggaaaatagatccattacaattaattacgttaaattcacctgatttaaaagctcagtatgtcattaggcaaggcggcaattatttcacacaaccttctgaattgactactgttggtgcagctagtattaattatacagtattgaagacagatggaagtcctcatacgaagcctgatggacaagtggatattgtaaacgtttcattgactatttacaattcttcagctttgagagataaaatagatgaagttaaaaagaaagcggaagaccctaaatgggacgagggaagtcgcgataaagttttgataagtttagatgatatcaaaacagatattgataataatcctaagacgcaatcagacattgccaataaaataactgaagttactaatttagaaaaaatactagtacctcgaatcccagatgccgataagaatgatccagcaggtaaagatcagcaagtcaatgtaggtgagacaccgaaggcagaagattctattggtaacttaccagatcttccgaaaggtacaacagtagcctttgaaactccagttgatacggcaacaccgggagacaaaccagcaaaagttgttgtgacttacccagatggttcaaaagatactgtagatgtgactgttaaggttgtcgatccacgtacagatgccgataagaatgatccagcaggtaaagatcagcaagtcaatgtaggtgagacaccgaaggcagaagattctattggtaacttaccagatcttccgaaaggtacaacagtagcctttgaaactccagttgatacggcaacaccgggagacaaaccagcaaaagttgttgtgacttacccagatggttcaaaagatactgtagatgtgactgttaaggttgtcgatccacgtacagatgccgataagaatgatccagcaggtaaagatcagcaagtcaatgtaggtgagacaccgaaggcagaagattctattggtaacttaccagatcttccgaaaggtacaacagtagcctttgaaactccagttgatacggcaacaccgggagacaaaccagcaaaagttgttgtgacttacccagatggttcaaaagatctg

SEQ ID NO: 764 - protein, 467 aa, Streptococcus agalactiae
MYRAIQNKVKENIMFRRSKNNSYDTLQTKQRFSIKKFKFGAASVLIGISFLGGFTQGQFNISTDTVFAAEVISGSAVTLNTNMTKNVQNGRAYIDLYDVKNGKIDPLQLITLNSPDLKAQYVIRQGGNYFTQPSELTTVGAASINYTVLKTDGSPHTKPDGQVDIVNVSLTIYNSSALRDKIDEVKKKAEDPKWDEGSRDKVLISLDDIKTDIDNNPKTQSDIANKITEVTNLEKILVPRIPDADKNDPAGKDQQVNVGETPKAEDSIGNLPDLPKGTTVAFETPVDTATPGDKPAKVVVTYPDGSKDTVDVTVKVVDPRTDADKNDPAGKDQQVNVGETPKAEDSIGNLPDLPKGTTVAFETPVDTATPGDKPAKVVVTYPDGSKDTVDVTVKVVDPRTDADKNDPAGKDQQVNVGETPKAEDSIGNLPDLPKGTTVAFETPVDTATPGDKPAKVVVTYPDGSKDL

SEQ ID NO: 765 - DNA, 1203 bp, Streptococcus agalactiae
gtggtaactcatatgattgattttctactgttgaaatcattacacagtcttctaggtctaactattactgtttgtgatcaaaatttttctgttatcagagagtataaatccgagaaaactatttcacttttttacaatcattaccttattttaagtaactttagtaaaactcaacatgattttttatttcattatggctctttaggagaactttttcttgtccaccatattcaacaatattatattatcatcggtccctggcgtagcaatgttattgaccctttacttcttaagaaaaagctgactgaaacacaaatcaatgctagtgaacaagactactttattgatagactatcccaattacctttcttctcacttagtcaaatccgagaattactaatagtaaccaattattgtctaactggggttgtgaaagataaattatcagagcccttacattactacacgaaagggtggagcaactcctttgatctagataaaattaagcaattttctaaacagaatatgagttcttacaaatatcagtatcattttgaaaataatattctaaaagctgttaaatcaggtagtgaatttcttttgaaagaaacagtggaacaatttagcaattctatcgtacctataatcagtggagatgaattgcgatctgaaaaaaactactccatcatgatttatgatcgtctctcacaggctaccatccaagcaggacttgatatcgaaacagcttatcgagcacgagatcgttttataaaagaaaacgagtcaactataagtctaaatgaagttttaaaattacgtgatactgctatcttattctatactcaacaagttcattctttaaaaaaacatctcgaaacccctcattctcaaactattgtcgcagtgattcgatatcttgaaaataatctaaatcgctttattaaaacagaagaaatagctaaagaatgtcacatgagtgaatcgaagttacgaaaactatttaagcaagaaaaacacatcactattcaacaatattttctaaacttaaaaatcgaagctgctaagcaattactagatgaaaataagaaagtagaagaagtttccaatttacttggattttccacttcttctaatttttcaaggacatttaaaaaaatagtgggaattagcccactagaatataagcaaaagcctaagacaata

SEQ ID NO: 766 - protein, 401 aa, Streptococcus agalactiae
MVTHMIDFLLLKSLHSLLGLTITVCDQNFSVIREYKSEKTISLFYNHYLILSNFSKTQHDFLFHYGSLGELFLVHHIQQYYIIIGPWRSNVIDPLLLKKKLTETQINASEQDYFIDRLSQLPFFSLSQIRELLIVTNYCLTGVVKDKLSEPLHYYTKGWSNSFDLDKIKQFSKQNMSSYKYQYHFENNILKAVKSGSEFLLKETVEQFSNSIVPIISGDELRSEKNYSIMIYDRLSQATIQAGLDIETAYRARDRFIKENESTISLNEVLKLRDTAILFYTQQVHSLKKHLETPHSQTIVAVIRYLENNLNRFIKTEEIAKECHMSESKLRKLFKQEKHITIQQYFLNLKIEAAKQLLDENKKVEEVSNLLGFSTSSNFSRTFKKIVGISPLEYKQKPKTI

SEQ ID NO: 767 - DNA, 531 bp, Streptococcus agalactiae
gtgtcctatatggtaaaagatagacaaattcagaaaacaaaagtagcgatttataatgcttttataagcttgctacaggaaaatgattattctaaaataacggttcaagatgtaatcggacttgcaaatgtaggaagatcaactttttactctcactatgaaagcaaagaagtgttactcaaggagctctgtgaagacctttttcaccacttatttaagcagggtagagatgttacgtttgaagagtatttagttcatatcttaaaacattttgaacaaaatcaagatagtatcgctacgttattattatctgacgatccctattttttattacgctttagaagtgaattagaacacgatgtttaccctagattgcgtgaggagtatattacaaaggtggacattcctgaagatttcttaaaacaatttcttttatccagttttatcgagaccttaaagtggtggcttcatcaaagacagaaaatgactgttgaagatttactaaaatattatttaactatggtagagagg

SEQ ID NO: 768 - protein, 177 aa, Streptococcus agalactiae
MSYMVKDRQIQKTKVAIYNAFISLLQENDYSKITVQDVIGLANVGRSTFYSHYESKEVLLKELCEDLFHHLFKQGRDVTFEEYLVHILKHFEQNQDSIATLLLSDDPYFLLRFRSELEHDVYPRLREEYITKVDIPEDFLKQFLLSSFIETLKWWLHQRQKMTVEDLLKYYLTMVER

SEQ ID NO: 769 - DNA, 528 bp, Streptococcus pyogenes
gtgtccgatatgacaaaagacagacaaatcaaaaaaacaaaaacagctatctatagtgcttttattgctttattacaaaaaaaagaatattcgaaaataactgttcgagatatgattacacttgctaatgtagggagatcaaccttttatgcacattatgaaagcaaagaaatgttactaaaagaactctgtgaagaactttttcatcatttgtttaggcaaaaaagaaatgtgacttttgaggactatttggtacatattttaaagcattttgaacaaaataaagacagcattgcgacgttgttactttctaatgatccctattttttattaagatttaaaaacgaactagaacatgatgtttaccctaacttgcgctgcaagtatatcgacaaaacgactattccagaagtattcctaaaacaatttgttctatctagttttatagaaaccttaaaatggtggctccatcaaaggcaaaggatgtctgcaaatgaactattaaagtattatttagagctcataaaa

SEQ ID NO: 770 - protein, 176 aa, Streptococcus pyogenes
VSDMTKDRQIKKTKTAIYSAFIALLQKKEYSKITVRDMITLANVGRSTFYAHYESKEMLLKELCEELFHHLFRQKRNVTFEDYLVHILKHFEQNKDSIATLLLSNDPYFLLRFKNELEHDVYPNLRCKYIDKTTIPEVFLKQFVLSSFIETLKWWLHQRQRMSANELLKYYLELIK

SEQ ID NO: 771 - DNA, 183 bp, Streptococcus agalactiae
atggaatctggaacaccatctaaaaaaagtttcagggttgatagtaatttaggaagtgctttagataagatgaaagtagatatggcaactgataataatggatcaaggatatacaacggtttccaatttaagataagagatataacaataatagctaaccaccctagaatatcttccaaaaaa

SEQ ID NO: 772 - protein, 61 aa, Streptococcus agalactiae
MESGTPSKKSFRVDSNLGSALDKMKVDMATDNNGSRIYNGFQFKIRDITIIANHPRISSKK

SEQ ID NO: 773 - DNA, 861 bp, Streptococcus agalactiae
atgacatcaaacaaaaaagtggctatcgcttttatattaaatatcagcttttccgtccttgaattcatctttggaagtctattcttctcaggagctatcttagccgatgctgttcatgattttggtgatgcaatagctattggcatctcagctactttagaaaaaaaatctaagaaagatgaagatacgatattttcattaggttataaacgttttagccttttaggagctcttatcacaagtctaattcttataagtggatctatcttagtcatgatagaaaatatcccaaaattgtggcatcctactcctgttaattatcacggcatgtttattctagctgtcatcgctattatcattaatggtctagctagttttattctccattctggtcaaagtaaacatgaggaaatattaagccttcattttttggaagatattctagggtggttagctattattgttatatctcttatcttaaattggaaaccgttgtatatccttgatccattattatcagttgccatatctactttcatcttatctaaagcacttcctaaattactatcaaccctgaaactttttttagatggtgttccagattccatagattacgctgcattacatgatgaacttaagggactttcgcaagtaagatctatcaatcaactcaatatctggtcaatggatggtattgataatcgagcaatcattcactgttgcttaaatcaattgatatctgaaaaagattgtaaaagagctattcgaacgatttgccaacattataagataaacgatgttactgttgaaatcgattattctttaagagaacatcaaaatcattgcaaaccattaaaaaac

SEQ ID NO: 774 - protein, 287 aa, Streptococcus agalactiae
MTSNKKVAIAFILNISFSVLEFIFGSLFFSGAILADAVHDFGDAIAIGISATLEKKSKKDEDTIFSLGYKRFSLLGALITSLILISGSILVMIENIPKLWHPTPVNYHGMFILAVIAIIINGLASFILHSGQSKHEEILSLHFLEDILGWLAIIVISLILNWKPLYILDPLLSVAISTFILSKALPKLLSTLKLFLDGVPDSIDYAALHDELKGLSQVRSINQLNIWSMDGIDNRAIIHCCLNQLISEKDCKRAIRTICQHYKINDVTVEIDYSLREHQNHCKPLKN

SEQ ID NO: 775 - DNA, 873 bp, Streptococcus pyogenes
atgccagcaagtaaaaaagtcaccattatttttatattaaatcttagtttttccctcattgaatttatttttgggacattattcttttcgggtgctattttagcagatgctgtccacgattttggagatgccattgctattggtatctcagctatcttagaaagaaaggctgttaaaaaagagagtccaaatttttcactaggctataagcgatttagccttttaggagcgctaacgacaaatctaatacttattagcgggtcattattagtaatgattgaaacgataccaaaattatggcatcctactattgttaattatgacggtatgttcgttttagctatttttgcaattataatcaatggatttgctagcttcatcattcactctaaccagacaaaaaatgaagaaatattaagccttcactttttagaagatatccttgggtggttagccattatcatactgtcactgatcttaaaatggaaaccttggtacattcttgatcctttattatcaattgccattgcttcttttatattatctaaagctcttccaaagttagtagcaactgctaacatttttttagatggtgttcctgattctatagactattgcactttgcaccatgaactcagccaacttcctcatatagtgtctgttaatcagcttaatgtttggtcgatggatggtattgatcatagagcaactatacattgctgcttgagagaatctaccactgaaaaacattgcaaaaaatctattagactgatttgtcaaaggtacaatataaactcagtcactgtggaaatcgatacttctttaaacgaacaccaacatcactgttcttctctttctagtattgaagtcaac

SEQ ID NO: 776 - protein, 291 aa, Streptococcus pyogenes
MPASKKVTIIFILNLSFSLIEFIFGTLFFSGAILADAVHDFGDAIAIGISAILERKAVKKESPNFSLGYKRFSLLGALTTNLILISGSLLVMIETIPKLWHPTIVNYDGMFVLAIFAIIINGFASFIIHSNQTKNEEILSLHFLEDILGWLAIIILSLILKWKPWYILDPLLSIAIASFILSKALPKLVATANIFLDGVPDSIDYCTLHHELSQLPHIVSVNQLNVWSMDGIDHRATIHCCLRESTTEKHCKKSIRLICQRYNINSVTVEIDTSLNEHQHHCSSLSSIEVN

SEQ ID NO: 777 - DNA, 852 bp, Streptococcus agalactiae
atgacagatacaatgatattaaatgacaatcataaaataccaactttaggtttaggtacgtggatgatagataatgatagggtagctcaagttgttaaagatgctatcgaattaggctaccgccatattgatactgcacaagcatacaacaatgaaaaaggtgtcggtgtagggattaaagagtctggtattacacgtgaatctttatttgttacgactaaaattgccgctgaacataaagattatgaaagtgctacaaaatcaattgatcaatcactagaagctttagggcttgattatattgatttaatgattattcatagtccacagccttggaaggaatggcgtgaaacagataaacattttgaccaaggaaatttagaagcttggagagctttagaggatgctcaaaaatctggtaagatgaaatccatcggtgtctcaaactttttagaaaaagacttagaaaatatcttaaaaaatggtcatgttaaacctgctgtcaatcaaatcttagctcacatcggaaatacacctttcgacttgattgattactgtcaaagtaaaggtattcaagttgaagcctattcaccaattgcacatggacaagcattgaaatctgatggtattcaaaaaatggctgaaaaatatggggttagtgttgctcaattatgtattcaatatttactacaattaaacctgatcgttttaccaaaggcttctagtaaagaacatttacagtctaatctagactttgactttgtaattagtgacgaagatatgtcgatattaaaatcacttatgtttgacgattatggggaattttctaacttccctgtttttagtggaaaa

SEQ ID NO: 778 - protein, 284 aa, Streptococcus agalactiae
MTDTMILNDNHKIPTLGLGTWMIDNDRVAQVVKDAIELGYRHIDTAQAYNNEKGVGVGIKESGITRESLFVTTKIAAEHKDYESATKSIDQSLEALGLDYIDLMIIHSPQPWKEWRETDKHFDQGNLEAWRALEDAQKSGKMKSIGVSNFLEKDLENILKNGHVKPAVNQILAHIGNTPFDLIDYCQSKGIQVEAYSPIAHGQALKSDGIQKMAEKYGVSVAQLCIQYLLQLNLIVLPKASSKEHLQSNLDFDFVISDEDMSILKSLMFDDYGEFSNFPVFSGK

SEQ ID NO: 779 - DNA, 840 bp, Streptococcus pyogenes
gtgatggtaacaacagtaaaaatgacaagtggctatgagattcccgttttaggatttggaacttaccaagcagccgatggtgaggaagcttaccaatctaccttagcagccatcaaggctggctatcgtcatattgatactgcagctatttataaaaatgaagaaagtgtgggtcgtgccatcaaggattctggggttctacgagaagacttatttattacaactaaactctggaatgacgcccatagttatgaaggggcaaaagacgctttagctgcttctcttgaccgtcttggtctggattatgtggatctctatcttatccattggccaaacccaaaagctctgcgtaacacttggaaagaggcaaatgcccaagcatggcaatatatggaagaggcggttgaagcagggcttattaaaagcattggcgtcagcaattttatggtgcatcatctagaagctcttcaagagacagctaaaataactccagcaattaatcagattcgattagccccaggttgctatcaaaaggaagtggttgattattgtaaggcaaatgagattttattggaagcttggagtcctctaggacaaggggagatttttgataatgagactatgcagcagttagctaataaatatgacaaaacagtggcacaagttgccttagcttggtcgctggcagaaggttttattcccttgccaaaatcggtgcatgatgagcgcatcaaggaaaatatggctatttttgatgtgagcttgacacaagaagataaaaaaacaattcgctatctctcaggaatgtcagcgattcctaaccctgatactacaagtttt

SEQ ID NO: 780 - protein, 280 aa, Streptococcus pyogenes
VMVTTVKMTSGYEIPVLGFGTYQAADGEEAYQSTLAAIKAGYRHIDTAAIYKNEESVGRAIKDSGVLREDLFITTKLWNDAHSYEGAKDALAASLDRLGLDYVDLYLIHWPNPKALRNTWKEANAQAWQYMEEAVEAGLIKSIGVSNFMVHHLEALQETAKITPAINQIRLAPGCYQKEVVDYCKANEILLEAWSPLGQGEIFDNETMQQLANKYDKTVAQVALAWSLAEGFIPLPKSVHDERIKENMAIFDVSLTQEDKKTIRYLSGMSAIPNPDTTSF

SEQ ID NO: 781 - DNA, 102 bp, Streptococcus agalactiae
gtgattttgttattgttccctttacacatggctgtggccaatgtccgtcttgtaaggctggatttgatggaaattgtacaaatcatcaagctgcaaaaaatg

SEQ ID NO: 782 - protein, 34 aa, Streptococcus agalactiae
MILLLFPLHMAVANVRLVRLDLMEIVQIIKLQKM

SEQ ID NO: 783 - DNA, 1035 bp, Streptococcus agalactiae
atgaaagtagctacatttattgaacctggcaaaatggttataactgatacaccaaaaccagtcattgaacaagagacagatgctgttatcaaaattgttagagcctgtgtttgtggttcagacttgtggtggtatcgtggtatttcaaaacgtgaaagtggttcttttgcaggtcatgaggctattggtatcgttgaggaagttggtactaaagtaactgacgtgtcaaaaggtgattttgttattgttccctttacacatggctgtggccaatgtccgtcttgtaaggctggatttgatggaaattgtacaaatcatcaagctgcaaaaaatgtaggataccaaggtcaatatctacgttatactaatgcaaactgggcattggttaagatcccaggacaaccttctgattatgataatgagactcttaactctctgctcaccttatcagatgtaatggcaactggttatcatgctgcagcaactgcagaagttaaagaaggtgacacggtagttgtcatgggagatggtgctgttggactctgtggtgttatcgctgctaaaatgttaggtgctaaccgtatcattgcaatgagtcgtcacaaagataggcaggaactagcattgacttttggtgcaacggatattgtcgaagaacggggtgacgaagccgttaaacgtgttttagatttaaccaatcaagcaggtgccgatgctgttttagaatgtgttggtacagagcagtctgttgatacagctacccaaattgctaggcctggtgctgtcataggacgtgttggtatcccacaaaatccagacatgaataccaataatttattctggaaaaatatcggccttagaggtggcattgcttctgtaacaacatttgataagtctgtccttttagatgctgttctaactcataaaattaacccaggcttagtttttacaaaatcctttgtattagatgatattcaaaaggcttatgaagcaatggataaacgtgacgctatcaaatccttagtgattgttgac

SEQ ID NO: 784 - protein, 345 aa, Streptococcus agalactiae
MKVATFIEPGKMVITDTPKPVIEQETDAVIKIVRACVCGSDLWWYRGISKRESGSFAGHEAIGIVEEVGTKVTDVSKGDFVIVPFTHGCGQCPSCKAGFDGNCTNHQAAKNVGYQGQYLRYTNANWALVKIPGQPSDYDNETLNSLLTLSDVMATGYHAAATAEVKEGDTVVVMGDGAVGLCGVIAAKMLGANRIIAMSRHKDRQELALTFGATDIVEERGDEAVKRVLDLTNQAGADAVLECVGTEQSVDTATQIARPGAVIGRVGIPQNPDMNTNNLFWKNIGLRGGIASVTTFDKSVLLDAVLTHKINPGLVFTKSFVLDDIQKAYEAMDKRDAIKSLVIVD

SEQ ID NO: 785 - DNA, 1089 bp, Streptococcus pyogenes
atgaattggttgattacctctcaaccttataagaagttaaatatgaaagcagcaacttacctttcaaccggaaatctacagctcatagacaaaccaaaaccagtcattataaagcctacagatgctatcgtccagttggtaaaaaccactatttgtggaactgatttgcatatcttaggtggggatgttcccgcatgtaaagaaggaacaatccttggtcatgaaggaattggaattgttaaggaggtcggtgatgcggttactaactttaaaatcggagataaagtgattatttcttgcgtcacatcatgtcatacctgttattattgtaaacgaggcctttcgtcacattgtcaagatggcggttggattcttggccatttaattaatggaacacaagcagaatatgtccatatcccacatgcagatggtagtctctatcatgctcctgatacgattgatgatgaggcacttgtcatgctttctgatattttaccaacttcatatgaaattggtgtcttgccatcacatgtcaagcctggagataatgtttgtattgttggtgccggtccagtaggactcgcagccctactaaccgttcaatttttctctccagccaatattattatggtcgacttatctcaaaatcgccttgaagcagctaaaacatttggagccacacacacgatttgttcaggaagtagtgaagaagtcaaggctatcattgacgatataaccaatggacgtggtgtcgatatttccatggagtgtgttggttatcccgcgacatttgatatttgtcaaaaaattatatcagtaggtgggcatattgctaacgttggggttcatgggaaaccagttgatttcaacctggatgaattatggattaaaaatatcaccttaaacactggacttgttaatgccaatacaactgaaatgctactaaatgtcttgaaaactggaaagattgacgcaacaagacttattacacatcattttaaactttcagaagttgaaaaagcttatgaaacctttaaacatgctggtgcaaataacgccttgaaagttattattgataatgatattagc

SEQ ID NO: 786 - protein, 363 aa, Streptococcus pyogenes
MNWLITSQPYKKLNMKAATYLSTGNLQLIDKPKPVIIKPTDAIVQLVKTTICGTDLHILGGDVPACKEGTILGHEGIGIVKEVGDAVTNFKIGDKVIISCVTSCHTCYYCKRGLSSHCQDGGWILGHLINGTQAEYVHIPHADGSLYHAPDTIDDEALVMLSDILPTSYEIGVLPSHVKPGDNVCIVGAGPVGLAALLTVQFFSPANIIMVDLSQNRLEAAKTFGATHTICSGSSEEVKAIIDDITNGRGVDISMECVGYPATFDICQKIISVGGHIANVGVHGKPVDFNLDELWIKNITLNTGLVNANTTEMLLNVLKTGKIDATRLITHHFKLSEVEKAYETFKHAGANNALKVIIDNDIS

SEQ ID NO: 787 - DNA, 393 bp, Streptococcus agalactiae
atgcaagaaacaactaagtctatctttcctaagggtgaaaaaaatccatatggtgaattctttattgggcaatcctatctcgcagcattagcaaaatctccagatgggaatgtttcagttggaaatgtaacctttgaagcaggctgtcgtaataattggcatgttcatttggacggttatcaaatccttctcgttacagaaggttcaggttggtaccaagaagaaggaaaagaagcagtgtcattaaaaccaggcgacgttatcgttacagataaaggtgttagacattggcatggtgctaaaaaagattctgaatttgcacatattgcgattacagctggtaagagtgagttttatgaagctgttagtgatgaagaatattcaagactaggt

SEQ ID NO: 788 - protein, 131 aa, Streptococcus agalactiae
MQETTKSIFPKGEKNPYGEFFIGQSYLAALAKSPDGNVSVGNVTFEAGCRNNWHVHLDGYQILLVTEGSGWYQEEGKEAVSLKPGDVIVTDKGVRHWHGAKKDSEFAHIAITAGKSEFYEAVSDEEYSRLG

SEQ ID NO: 789 - DNA, 315 bp, Streptococcus agalactiae
atgaaagaaaaacaaacagccggacgtcgtcaattagaagaatttgcacctgaatttgccagatataatgatgatattttatttggtgaggtttgggcaaaagaggatcatttaacagataaaacacgttctattattactatatctgccttaattagcggaggaaatcttgaacagttagagcatcatcttcaatttgccaaacaaaacggagttactaaagaagaaattgctgacattatcactcacctcgctttttatgttggatggccaaaagcttggtcagcctttaataaagctaaggaaatttggata

SEQ ID NO: 790 - protein, 105 aa, Streptococcus agalactiae
MKEKQTAGRRQLEEFAPEFARYNDDILFGEVWAKEDHLTDKTRSIITISALISGGNLEQLEHHLQFAKQNGVTKEEIADIITHLAFYVGWPKAWSAFNKAKEIWI

SEQ ID NO: 791 - DNA, 282 bp, Streptococcus agalactiae
atgcttactattcaagaaatgaaagatacaacctttgaattacaagaaaattttagaaggttaaattatcctattaaacaagttgctaaagacttgcaacttaatatcagtgaagttgaatctcttttaagtcttgatgttacttatcctggagatgtttgtatgctgagagattatctagaagatatgttgaaaaaagagggtaaagaagtttatccattttctagattagcatctcattcagcaaatcgttggtacccttatgagacaccatggcgttat

SEQ ID NO: 792 - protein, 94 aa, Streptococcus agalactiae
MLTIQEMKDTTFELQENFRRLNYPIKQVAKDLQLNISEVESLLSLDVTYPGDVCMLRDYLEDMLKKEGKEVYPFSRLASHSANRWYPYETPWRY

SEQ ID NO: 793 - DNA, 429 bp, Streptococcus agalactiae
atgctatcatttcaaattgttgaaaagccagcaatgatacttgctggagtaactttagaaaatgtaaagtcaaatcaagaaggtatccagcaagccattggcatttgtaaaacacaacctgattttcgtttcgattacagtgccacttatcaagtagagacaagtgtccaagccccaaaagggttagaaattattaggatcccaagcgctacctatgcagtcatttctgttaaaggtccaatgccatcgagtcttcaagaaacatggcgaaaaataatacaaggattttttcaagagaataatctaaaaccagctaactcgccaaacttagaaatttattcatctcaacatccacaagatactgattatcaaatggaaatttggcttgctatcgcagatattactaataactcgaaaacaaacttaatc

SEQ ID NO: 794 - protein, 143 aa, Streptococcus agalactiae
MLSFQIVEKPAMILAGVTLENVKSNQEGIQQAIGICKTQPDFRFDYSATYQVETSVQAPKGLEIIRIPSATYAVISVKGPMPSSLQETWRKIIQGFFQENNLKPANSPNLEIYSSQHPQDTDYQMEIWLAIADITNNSKTNLI

SEQ ID NO: 795 - DNA, 387 bp, Streptococcus agalactiae
atgattacacaagaaatgaaagagattattaatagtcagttagcaatggtcgcgacggttgatgctaaaggtcaacccaatattggcccaaaacgttctatgcgtctctgggatgataaaacgtttatttataatgaaaatacagatggtcaaactcgtattaacattgaagataatgggaaaattgaaattgcctttgttgatcgtgaacgtcttttaggttacaggtttgtgggaactgctgaaattcaaacagaaggtacttattacgaagcagcgaaaaaatgggcagaaggacgcatgggggttccgaaagcagttggtattattcatgtcgagcgtatttttaatttacaatctggtgctaatgcaggtaaagaaatcact

SEQ ID NO: 796 - protein, 129 aa, Streptococcus agalactiae
MITQEMKEIINSQLAMVATVDAKGQPNIGPKRSMRLWDDKTFIYNENTDGQTRINIEDNGKIEIAFVDRERLLGYRFVGTAEIQTEGTYYEAAKKWAEGRMGVPKAVGIIHVERIFNLQSGANAGKEIT

SEQ ID NO: 797 - DNA, 399 bp, Streptococcus pyogenes
atgataacacaagaaatgaaagatcttattaataaccaattagcaatggttgcgacggttgatgccaaaggtcaacccaatattggtccaaaacgttctatgcgtctctgggatgataaaacatttatttataatgaaaatacagatggtcaaactcgtattaacattgaagataatgggaaaattgaaattgcctttgttgatcgtgagcgccttttaggttacaggtttgtaggaactgctgaaattcaaacagaaggtgcttattacgaagcagcgaaaaaatgggcacaaggacgcatgggggtaccaaaagcagttggtattattcatgtcgagcgtatttttaatttacaatctggtgctaatgcaggtaaagaaataaacagtgaaagtaac

SEQ ID NO: 798 - protein, 133 aa, Streptococcus pyogenes
MITQEMKDLINNQLAMVATVDAKGQPNIGPKRSMRLWDDKTFIYNENTDGQTRINIEDNGKIEIAFVDRERLLGYRFVGTAEIQTEGAYYEAAKKWAQGRMGVPKAVGIIHVERIFNLQSGANAGKEINSESN

SEQ ID NO: 799 - DNA, 3165 bp, Streptococcus agalactiae
atgacaaaaaaacatcttaaaacgcttgccttggcacttactacagtatcagtagtgacatacagccaggaggtatatggattagaaagagaggaatcggtcaaacaagaacaaacccagtcagcttcagaagatgattggttcgaagaagataatgagaggaaaacaaatgtttctaaagagaattctactgttgatgaaacagttagtgatttattttctgatggaaatagtaataactctagttctaaaaccgagtcagtggtaagtgaccctaaacaagtccccaaagcaaaaccagaggttacacaagaagcaagcaattctagtaatgatgctagcaaagtagaagtaccaaaacaggatacagcttcaaaaaaggaaactctagaaacatcaacttgggaggcaaaagatttcgtaactagaggggatactttagtaggtttttcaaaatctggaattaataagttatctcaaacatcacacttggttttaccaagtcatgcagcagatggaactcaattgacacaagtagctagctttgcttttactccagataaaaagacggccattgcagaatatacaagtaggctaggagaaaatgggaaaccgagtcgtttagatattgatcagaaggaaattattgatgagggagaaatatttaatgcttaccagttgactaagcttactattccaaatggttataagtctattggtcaagatgcttttgtggacaataagaatattgctgaggttaaccttcctgagagtctcgagactatttcagactatgcttttgctcacatgtctttaaaacaagtaaagttaccagataacctaaaggtcattggagaattagctttttttgataatcagattggtggtaagctttacttgccacgtcacttgataaaattagcagaacgcgctttcaaatctaatcgtattcaaacagttgaatttttgggaagtaagcttaaggttataggagaagcaagttttcaagataataatctgaggaatgttatgcttccggatggacttgaaaaaatagaatcagaagcttttacaggaaatccaggagatgaacattacaacaatcaggttgtattgcgcacaaggacaggccaaaatccacatcaacttgcgactgagaatacttacgtcaatccggacaaatcattgtggcgtgcaacacctgatatggattataccaaatggttagaggaagattttacctatcaaaaaaatagtgttacaggtttttcaaataaaggcttacaaaaggtaagacgtaataaaaacttagaaattccaaaacaacacaatggtattactattactgaaattggtgataacgcttttcgcaatgttgattttcaaagtaaaactttacgtaaatatgatttggaagaaataaagctcccctcaactattcggaaaataggtgcttttgcttttcaatctaataacttgaaatcctttgaagcaagtgaagatttagaagagattaaagagggagcctttatgaataatcgtattggaactctagacttgaaagacaaacttatcaaaataggtgatgctgctttccatattaatcatatttatgccattgttcttccagaatctgtacaagaaataggacgttcagcttttcgacaaaatggtgcgcttcaccttatgtttatcggaaataaggttaaaacaattggtgaaatggcttttttatccaataaactggaaagtgtaaatctctctgagcaaaaacaattaaagacaattgaggtccaagctttttcggataatgcccttagtgaagtagtcttaccgccaaatttacagactattcgtgaagaggctttcaaaaggaatcatttgaaagaagtgaagggttcatctacattatctcagattacttttaatgcttttgatcaaaatgatggggacaaacgctttggtaagaaagtggttgttaggacacataataattctcatatgttagcagatggtgagcgttttatcattgatccagataagctatcttctacaatggtagaccttgaaaaggttttaaaaataatcgaaggtttagattactctacattacgtcagactactcaaactcagtttagagaaatgactactgcaggtaaagcgttgttatcaaaatctaacctccgacaaggagaaaaacaaaaattccttcaagaagcacaatttttccttggtcgcgttgatttggataaagccatagctaaagctgagaaggctttagtgaccaagaaggcaacaaagaatggtcatttgcttgagaggagtattaacaaagcggtattagcttataataatagtgctattaaaaaagctaatgttaagcgcttggaaaaagagttagacttgctgacggatttagtcgagggaaaaggaccattagcgcaagctacaatggtacaaggagtttatttattaaagacgcctttaccattgccagaatattatatcggattgaacgtttattttgacaagtctggaaaattgatttatgcacttgatatgagtgatactattggcgagggacaaaaagatgcatatggtaatcctatattaaatgttgacgaggataatgaaggttatcataccttggcagttgccactttagctgattatgaaggtctttatattaaagatattttaaatagttcccttgataagattaaagcaatacgccagattcctttggcaaaatatcatagattaggaattttccaagctattcgaaatgcagcggcagaagcagaccgattgcttcctaagacacctaaggggtacctaaatgaagtcccaaattatcgtaaaaaacaagtggagaaaaatttaaaaccagttgattataaaacgccgatttttaataaggctttacctaatgaaaaggtagacggtgatagagcggctaaaggtcataatataaatgcggagactaataattctgtagctgtaacaccaataaggtccgagcagcaattacataagtcacagtctgatgtaaatttacctcaaacaagttctaaaaataattttatatacgagattctaggatacgttagtttatgtttgcttttcctagtaactgctgggaaaaaaggaaaacgagcaagaaaa

SEQ ID NO: 800 - protein, 1055 aa, Streptococcus agalactiae
MTKKHLKTLALALTTVSVVTYSQEVYGLEREESVKQEQTQSASEDDWFEEDNERKTNVSKENSTVDETVSDLFSDGNSNNSSSKTESVVSDPKQVPKAKPEVTQEASNSSNDASKVEVPKQDTASKKETLETSTWEAKDFVTRGDTLVGFSKSGINKLSQTSHLVLPSHAADGTQLTQVASFAFTPDKKTAIAEYTSRLGENGKPSRLDIDQKEIIDEGEIFNAYQLTKLTIPNGYKSIGQDAFVDNKNIAEVNLPESLETISDYAFAHMSLKQVKLPDNLKVIGELAFFDNQIGGKLYLPRHLIKLAERAFKSNRIQTVEFLGSKLKVIGEASFQDNNLRNVMLPDGLEKIESEAFTGNPGDEHYNNQVVLRTRTGQNPHQLATENTYVNPDKSLWRATPDMDYTKWLEEDFTYQKNSVTGFSNKGLQKVRRNKNLEIPKQHNGITITEIGDNAFRNVDFQSKTLRKYDLEEIKLPSTIRKIGAFAFQSNNLKSFEASEDLEEIKEGAFMNNRIGTLDLKDKLIKIGDAAFHINHIYAIVLPESVQEIGRSAFRQNGALHLMFIGNKVKTIGEMAFLSNKLESVNLSEQKQLKTIEVQAFSDNALSEVVLPPNLQTIREEAFKRNHLKEVKGSSTLSQITFNAFDQNDGDKRFGKKVVVRTHNNSHMLADGERFIIDPDKLSSTMVDLEKVLKIIEGLDYSTLRQTTQTQFREMTTAGKALLSKSNLRQGEKQKFLQEAQFFLGRVDLDKAIAKAEKALVTKKATKNGHLLERSINKAVLAYNNSAIKKANVKRLEKELDLLTDLVEGKGPLAQATMVQGVYLLKTPLPLPEYYIGLNVYFDKSGKLIYALDMSDTIGEGQKDAYGNPILNVDEDNEGYHTLAVATLADYEGLYIKDILNSSLDKIKAIRQIPLAKYHRLGIFQAIRNAAAEADRLLPKTPKGYLNEVPNYRKKQVEKNLKPVDYKTPIFNKALPNEKVDGDRAAKGHNINAETNNSVAVTPIRSEQQLHKSQSDVNLPQTSSKNNFIYEILGYVSLCLLFLVTAGKKGKRARK

SEQ ID NO: 801 - DNA, 3024 bp, Streptococcus pyogenes
atgaagaaacatcttaaaacagttgccttgaccctcactacagtatcggtagtcacccacaatcaggaagtttttagtttagtcaaagagccaattcttaaacaaactcaagcttcttcatcgatttctggcgctgactacgcagaaagtagcggtaaaagcaagttaaagattaatgaaacttctggccctgttgatgatacagtcactgacttattttcggataaacgtactactcctgaaaaaataaaagataatcttgctaaaggtccgagagaacaagagttaaaggcagtaacagagaatacagaatcagaaaagcagatcacttctggatctcaactagaacaatcaaaagagtctctttctttaaataaaacagtgccatcaacgtctaattgggagatttgtgattttattactaaggggaatacccttgttggtctttcaaaatcaggtgttgaaaagttatctcaaactgatcatctcgtattgcctagtcaagcagcagatggaactcaattgatacaagtagctagttttgcttttactccagataaaaagacggcaattgcagaatataccagtagggctggagaaaatggggaaataagccaactagatgtggatggaaaagaaattattaacgaaggtgaggtttttaattcttatctactaaagaaggtaacaatcccaactggttataaacatattggtcaagatgcttttgtggacaataagaatattgctgaggttaatcttcctgaaagcctcgagactatttctgactatgcttttgctcacctagctttgaaacagatcgatttgccagataatttaaaagcgattggagaattagctttttttgataatcaaattacaggtaaactttctttgccacgtcagttaatgcgattagcagaacgtgcttttaaatcaaaccatatcaaaacaattgagtttagaggaaatagtctaaaagtgataggggaagctagttttcaagataatgatctgagtcaactaatgctacctgacggtcttgaaaaaatagaatcagaagcttttacaggaaatccaggagatgatcactacaataaccgtgttgttttgtggacaaaatctggaaaaaatccttctggtcttgctactgaaaatacctatgttaatcctgataagtcactatggcaggaaagtcctgagattgattatactaaatggttagaggaagattttacctatcaaaaaaatagtgttacaggtttttcaaataaaggcttacaaaaagtaaaacgtaataaaaacttagaaattccaaaacagcacaatggtgttactattactgaaattggtgataatgcttttcgcaatgttgattttcaaaataaaactttacgtaaatatgatttggaagaagtaaagcttccctcaactattcggaaaataggtgcttttgcttttcaatctaataacttgaaatcttttgaagcaagtgacgatttagaagagattaaagagggagcctttatgaataatcgtattgaaaccttggaattaaaagataaattagttactattggtgatgcggctttccatattaatcatatttatgccattgttcttccagaatctgtacaagaaatagggcgttcagcatttcggcaaaatggtgcaaataatcttatttttatgggaagtaaggttaagaccttaggtgagatggcatttttatcaaatagacttgaacatctggatctttctgagcaaaaacagttaacagagattcctgttcaagccttttcagacaatgccttgaaagaagtattattaccagcatcactgaaaacgattcgagaagaagccttcaaaaagaatcatttaaaacaactggaagtggcatctgccttgtcccatattgcttttaatgctttagatgataatgatggtgatgaacaatttgataataaagtggttgttaaaacgcatcataattcctacgcactagcagatggtgagcattttatcgttgatccagataagttatcttctacaatagtagaccttgaaaagattttaaaactaatcgaaggtttagattattctacattacgtcagactactcaaactcagtttagagacatgactactgcaggtaaagcgttgttgtcaaaatctaacctccgacaaggagaaaaacaaaaattccttcaagaagcacaatttttccttggccgcgttgatttggataaagccatagctaaagctgagaaggctttagtgaccaagaaggcaacaaagaatggtcagttgcttgaaagaagtattaacaaagcggtattagcttataataatagcgctattaaaaaagctaatgttaagcgcttggaaaaagagttagacttgctaacaggattagttgagggaaaaggaccattagcgcaagctacaatggtacaaggagtttatttattaaagacgcctttgccattgccagaatattatatcggattgaacgtttattttgacaagtctggaaaattgatttatgcacttgatatgagtgatactattggcgagggacaaaaagacgcttatggtaatcctatattaaatgttgacgaggataatgaaggttatcatgccttggcagttgccactttagctgattatgaggggctcgacatcaaaacaattttaaatagtaagcttagtcaattaacatctattcgtcaggtaccgactgcagcctatcatagagccggtattttccaagctatccaaaatgcagcggcagaagcagagcagttattgcctaaaccaggtacgcactctgagaagtcaagctcaagtgaatctgctaactctaaagatagaggattgcaatcaaacccaaaaacgaatagaggacgacactctgcaatattgcctaggacagggtcaaaaggcagctttgtctatggaatcttaggttacactagcgttgctttactgtcactaataactgctataaaaaagaaaaaatat

SEQ ID NO: 802 - protein, 1008 aa, Streptococcus pyogenes
MKKHLKTVALTLTTVSVVTHNQEVFSLVKEPILKQTQASSSISGADYAESSGKSKLKINETSGPVDDTVTDLFSDKRTTPEKIKDNLAKGPREQELKAVTENTESEKQITSGSQLEQSKESLSLNKTVPSTSNWEICDFITKGNTLVGLSKSGVEKLSQTDHLVLPSQAADGTQLIQVASFAFTPDKKTAIAEYTSRAGENGEISQLDVDGKEIINEGEVFNSYLLKKVTIPTGYKHIGQDAFVDNKNIAEVNLPESLETISDYAFAHLALKQIDLPDNLKAIGELAFFDNQITGKLSLPRQLMRLAERAFKSNHIKTIEFRGNSLKVIGEASFQDNDLSQLMLPDGLEKIESEAFTGNPGDDHYNNRVVLWTKSGKNPSGLATENTYVNPDKSLWQESPEIDYTKWLEEDFTYQKNSVTGFSNKGLQKVKRNKNLEIPKQHNGVTITEIGDNAFRNVDFQNKTLRKYDLEEVKLPSTIRKIGAFAFQSNNLKSFEASDDLEEIKEGAFMNNRIETLELKDKLVTIGDAAFHINHIYAIVLPESVQEIGRSAFRQNGANNLIFMGSKVKTLGEMAFLSNRLEHLDLSEQKQLTEIPVQAFSDNALKEVLLPASLKTIREEAFKKNHLKQLEVASALSHIAFNALDDNDGDEQFDNKVVVKTHHNSYALADGEHFIVDPDKLSSTIVDLEKILKLIEGLDYSTLRQTTQTQFRDMTTAGKALLSKSNLRQGEKQKFLQEAQFFLGRVDLDKAIAKAEKALVTKKATKNGQLLERSINKAVLAYNNSAIKKANVKRLEKELDLLTGLVEGKGPLAQATMVQGVYLLKTPLPLPEYYIGLNVYFDKSGKLIYALDMSDTIGEGQKDAYGNPILNVDEDNEGYHALAVATLADYEGLDIKTILNSKLSQLTSIRQVPTAAYHRAGIFQAIQNAAAEAEQLLPKPGTHSEKSSSSESANSKDRGLQSNPKTNRGRHSAILPRTGSKGSFVYGILGYTSVALLSLITAIKKKKY

SEQ ID NO: 803 - DNA, 2163 bp, Streptococcus agalactiae
atgacacaatcagatgcatatctctcgttgaacgcgaagacacgctttagagatcgcacaggtaattatcattttacttcggataaagaggctgttgaacaatatatgatagaacatgttgaacctaatacgatggtgttcacatcactaattgaaaagctagattatttggtttctaataactactatgaatcggaccttctaaaacaatataaccttgagtttatttgccaaatttttgagcatgcatacgctaagaaatttgcttttctaaattttatgggggctttaaaattttataatgcttatgctcttaaaacagaagacaatcgttattatttggaacactatgaagatcgtgttgtaatgaatgctctgtttttagctgctggtgatgaaaaagctgcctatgacctagtagatgacatgctagcaaatcgctttcaaccagcaacacctacctttttaaatgcagggaaaaaacgtcgtggtgaatatatctcttgctatttgttgcgcattgaagacaatatggaatctatttctcgtgctattagtacaagccttcagttatcaaaacgaggtggtggggtagcactttgcttaaccaacttacgggaatttggtgctccaataaaaggtattaaaaatcaagctactggtattgtacctgtcatgaaattactagaagattcgttttcttacgccaatcaattaggacaaagacaaggagctggtgcagtttacttacacgctcaccatcctgaagtattaacgtttttagatactaaacgtgagaatgccgatgagaaaattcgaattaaatctctttccctaggacttgttattcctgatattacttttgaattggctaaggcaaataaagatatggccttgttttcaccgtatgacattgagcgagtatatggtaaaccaatgtctgatatctctatcacagaagaatatgaaactttattagccaatgcggatattcgtaaaacctttattagtgcacgaaaactatttcaaacgatagcagagcttcattttgaatctggttatccttatatcttatttgaagatactgtaaatgctaaaaaccctcacaaaaaagagggacgaattgttatgtctaatttatgttctgagattgcacaagttaatacagctagtcaattttcagaagacctgactttcactaaggttggacatgatgtttgttgtaatttaggttctattaatattgcgcgtgctatggatcaagcggcggattttgaaaaattaattgctaatagcattagagcccttgatcgtgtatctcgaacttctgatttagatagtgctccatctattaaaaaaggtaatgcagctaatcatgctgttggtttaggtgctatgaatttgcatggatttttggcgactaaccatatttattacgattctcaagaggctattgattttacagattgcttcttttacgctatggcttattatgcctttaaagcttctaaccatttagcaaaagaaaaaggaacctttgagggcttctcggaatcaagttatgctgatggcagttatttctatcaatataccgaacaaaactttgagccaaaaacacagcgtgttaaaaatctactagctgagtatggtctgactctaccaagccaagaggattggagaaagcttgtgcaaagtattaaagagataggattagctaatgcgcatttattagctgttgctccgacagggtcaatcagttatctttcttcttgtactccgagccttcaaccggttgtatcacctgtcgaagtacgcaaggaaggagcactggggagggtttatgtacctgcttataagattgatgcagataattatgtctactacaaaaaaggagcttatgaagtgggatctgaggcgattatcaatattgcagctgccgctcaaaaacacattgatcaagctatttcgttaacgcttttcatgacagatcaagcaactacgcgagatttaaataaagcctatattcaagcatttaaacaaaaatgtgcctctatttattatgtacgagtgagacaggacatcctagaaggtagcgagagttatgatgatatgctggatgatttcacttcatcggacttagaagactgtcaatcctgcatgatt

SEQ ID NO: 804 - protein, 721 aa, Streptococcus agalactiae
MTQSDAYLSLNAKTRFRDRTGNYHFTSDKEAVEQYMIEHVEPNTMVFTSLIEKLDYLVSNNYYESDLLKQYNLEFICQIFEHAYAKKFAFLNFMGALKFYNAYALKTEDNRYYLEHYEDRVVMNALFLAAGDEKAAYDLVDDMLANRFQPATPTFLNAGKKRRGEYISCYLLRIEDNMESISRAISTSLQLSKRGGGVALCLTNLREFGAPIKGIKNQATGIVPVMKLLEDSFSYANQLGQRQGAGAVYLHAHHPEVLTFLDTKRENADEKIRIKSLSLGLVIPDITFELAKANKDMALFSPYDIERVYGKPMSDISITEEYETLLANADIRKTFISARKLFQTIAELHFESGYPYILFEDTVNAKNPHKKEGRIVMSNLCSEIAQVNTASQFSEDLTFTKVGHDVCCNLGSINIARAMDQAADFEKLIANSIRALDRVSRTSDLDSAPSIKKGNAANHAVGLGAMNLHGFLATNHIYYDSQEAIDFTDCFFYAMAYYAFKASNHLAKEKGTFEGFSESSYADGSYFYQYTEQNFEPKTQRVKNLLAEYGLTLPSQEDWRKLVQSIKEIGLANAHLLAVAPTGSISYLSSCTPSLQPVVSPVEVRKEGALGRVYVPAYKIDADNYVYYKKGAYEVGSEAIINIAAAAQKHIDQAISLTLFMTDQATTRDLNKAYIQAFKQKCASIYYVRVRQDILEGSESYDDMLDDFTSSDLEDCQSCMI

SEQ ID NO: 805 - DNA, 2178 bp, Streptococcus pyogenes
atgtcacaaaccaatgcgtcatacctctcattaaatgcactgacccgttttaaaaaaccagacggcagctaccattttgatagcgataaagaagctgttaggcgctacctggaagaacatgtctctcccaatcaaatggcttttaactcactagaagataagctagcttacctcatcaatgaagggtattatgagcaggccatttttgatgcctatcctaatgaccttatcaaggaggcctttcattatgcctatcaacaaggctatcgctttttaaatctcatgggcgctatgaaattttaccagtcctatgccttaaaaaccttggacggtaagcagtatctagaaacatttgaagaccgtgctgtgatgaatgcactctttttagctgatggagatcaaacctttgtctttgacgtgattgatgccatcttgcaccgacgctttcaaccagctaccccaacgtttttaaatgccggaaaaaaacgccgtggcgaatacatttcgtgctatcttcttcgtgtcgaagacaatatggaatctatctctcgcgccattagcaccagcttgcaactctcaaaaagaggaggcggagtcgccttgtgcctcaccaacctcagagaaatcggagcaccgataaaagggattgaaaatcaggcaacaggcatcgttcctgtcatgaaactactagaggactctttttcctatgccaatcaactaggtcagcgccaaggagcaggtgcggtttaccttcatgcccatcaccctgaggttttgacctttttagacaccaaacgtgaaaatgccgatgagaaaattcgcattaagtccctagcattgggacttgtgatcccagatattaccttccagttagccaaagaaaacaaagacatggcactcttttcaccctatgatatcaagcgtgcctatggcaaggacatgtcagacatctccatcacagaggaatacgataaactgctagccaatccagccatcaaaaagacctacatcagtgctagaaagttctttcagttaattgcagagctacattttgagtcaggctacccttacctcttgtttgatgacacggtcaataagcgcaaccctcatgccaaaaaaggcagaatcgtcatgtctaacctgtgttctgaaatcgctcaagttagcaccccaagcactttcaaagaagatttgagttttgaaaccattggagaggatatctgctgtaatttagggtctatcaatattgcccaggctatggcagatgcgccacactttgaacagctcatcacaacgagcatcagagcacttgatcgtgtctctagagtgtctgacctgaattgtgcgccttctgttgagacaggcaatgcagccaaccatgcagtaggattaggcgccatgaacctacatggttttttggcaaccaaccacatctactatgatacaaaagaagccgttgactttacagatctgtttttccatgccatggcctattatgcttttaaagcctcttgccaattagccaaagaaaaaggcgcttttgcaggattttcgttatcaacctattcagatggcacttattttgccaagtatttgcaagaagatgccaagccacaaacagccaaggttgccacattgttgcaagattacggcttcacgttgccaacggtggcggattggcaagccctagtagcagatatcaagcagtttggcctagccaatgcgcacttgctagcggttgctccgacaggctccatcagctacttatcatcctgcactccgagtctacaaccagtcgttgctcctgttgaggtccgaaaagaaggtagcctgggcaggatttacgtccctgcctatcagattgaccaggctaactatgcttactatgaacgtggtgcctatgaggtcggcccaaaagccatcatcgacgttgtagctgctgcccaaaaacacgttgaccaagccatctcattgaccctgtttatgaccgatcaagcgaccacacgtgacctgaaccgctcctatatccaagcttttaagcaaaattgtgcatcgatctattatgtgcgagtgaggcaagacgtcctagcaggcagcgaacagtatgacgaggatagtcttgtgacagctcctggagctagtgatgagaccaccacagagtgtcaaagctgtatgatc

SEQ ID NO: 806 - protein, 726 aa, Streptococcus pyogenes
MSQTNASYLSLNALTRFKKPDGSYHFDSDKEAVRRYLEEHVSPNQMAFNSLEDKLAYLINEGYYEQAIFDAYPNDLIKEAFHYAYQQGYRFLNLMGAMKFYQSYALKTLDGKQYLETFEDRAVMNALFLADGDQTFVFDVIDAILHRRFQPATPTFLNAGKKRRGEYISCYLLRVEDNMESISRAISTSLQLSKRGGGVALCLTNLREIGAPIKGIENQATGIVPVMKLLEDSFSYANQLGQRQGAGAVYLHAHHPEVLTFLDTKRENADEKIRIKSLALGLVIPDITFQLAKENKDMALFSPYDIKRAYGKDMSDISITEEYDKLLANPAIKKTYISARKFFQLIAELHFESGYPYLLFDDTVNKRNPHAKKGRIVMSNLCSEIAQVSTPSTFKEDLSFETIGEDICCNLGSINIAQAMADAPHFEQLITTSIRALDRVSRVSDLNCAPSVETGNAANHAVGLGAMNLHGFLATNHIYYDTKEAVDFTDLFFHAMAYYAFKASCQLAKEKGAFAGFSLSTYSDGTYFAKYLQEDAKPQTAKVATLLQDYGFTLPTVADWQALVADIKQFGLANAHLLAVAPTGSISYLSSCTPSLQPVVAPVEVRKEGSLGRIYVPAYQIDQANYAYYERGAYEVGPKAIIDVVAAAQKHVDQAISLTLFMTDQATTRDLNRSYIQAFKQNCASIYYVRVRQDVLAGSEQYDEDSLVTAPGASDETTTECQSCMI

SEQ ID NO: 807 - DNA, 411 bp, Streptococcus agalactiae
atggatagtacagtgaaggtggtctatttttcatcgaaatctaacaatacccatcgttttgttcaaaagttggcttgttctaaccagcgtattccatcagatggtagtagtatattggttactgaggattatattttgattgtgcctacttacgctggaggaggagatgataccaaaggcgcagttccaaaacaagttgtacagtttttaaatgttcgacaaaatcgggaacattgccaaggggttatttcttctggaaataccaattttggtgacacttatgccattgctggacctattattgctcgaaaattaaatgttcctttgcttcatcaatttgaattactgggaacacaagaagatgttacaagggtaaaggagttactttgccaattcactagaaaggataaa

SEQ ID NO: 808 - protein, 137 aa, Streptococcus agalactiae
MDSTVKVVYFSSKSNNTHRFVQKLACSNQRIPSDGSSILVTEDYILIVPTYAGGGDDTKGAVPKQVVQFLNVRQNREHCQGVISSGNTNFGDTYAIAGPIIARKLNVPLLHQFELLGTQEDVTRVKELLCQFTRKDK

SEQ ID NO: 809 - DNA, 486 bp, Streptococcus pyogenes
atggcagagctgattattgtgtatttttcatctaagtccaataacacccatcgcttcgtccaaaaattaggcctgcctgctcagcgcataccagtagataataggccacttgaagtttccacccattaccttttgattgtgcctacctatgcagctggtggctcagatgccaaaggagccgtttctaaacaagtgattcgttttttgaataatcctaacaatcgtaaacattgtaagggagtgatttcttctggaaataccaattttggcgatacctttgccttagcaggccctatcatttctcaaaaattgcaggtccccttattacaccaatttgaactattaggcactgctacagatgtcaaaaaggtacaggcgatttttgcccgcttaaagcatcacacacacgacaagcaaaaacaaaccaacaacctgattacagaaaggacacacccatgtcacaaaccaatgcgtcatacctctcat

SEQ ID NO: 810 - protein, 162 aa, Streptococcus pyogenes
MAELIIVYFSSKSNNTHRFVQKLGLPAQRIPVDNRPLEVSTHYLLIVPTYAAGGSDAKGAVSKQVIRFLNNPNNRKHCKGVISSGNTNFGDTFALAGPIISQKLQVPLLHQFELLGTATDVKKVQAIFARLKHHTHDKQKQTNNLITERTHPCHKPMRHTSH

SEQ ID NO: 811 - DNA, 1008 bp, Streptococcus agalactiae
atgcaatcatactatgatcgttctcaatcgccacttgactatgccttgtcagaaaaagcttttcctatgcgttctgttaattggaataagctaaacgatgacaaagacttagaggtatggaacagagtaactcaaaatttctggttacctgaaaagatcccagtttctaatgaccttaattcttggagaacattggatgctgattggcagcaattaattactcggacttttactggtctaaccttattagattctgtgcaggctactgttggtgatattgctcagattaagcattctcagacagatcatgaacaagttatttatgctaactttgcctttatggtagctattcatgcgcgatcttatggaacgattttttcaaccttatgcactagccaacaaattgaggaagcacatgaatgggtagtggatactgaaagtctacaagctcgatcacgtatacttattcctttttatactggtgacgatcctttgaaatctaaggttgctgcagccatgatgccaggatttttgttatatggtggcttttaccttcctttttacctttcagccagaggaaaattaccaaatacgtctgatattattcgtttaattttacgagataaggtaattcataactattacagtggctataagtatcaacagaaagttgctaaattatctgtagaaaagcaagccgaaatgaagacatttgtctttgacctcctctatcagttgattgatttagaaaaagcctatctttacgaactatatgatggttttgatttggctgaagatgcaatcagatttagcatttacaatgctggtaaatttttacaaaatttaggatatgattctccatttacagaagaagagactcgtatatctcctgaggtttttgcacaactttcggcgcgtgcagatgaaaatcatgatttcttctcaggaaacggctcttcatatattatggggattacagaagaaacattggatgaagattgggagttt

SEQ ID NO: 812 - protein, 336 aa, Streptococcus agalactiae
MQSYYDRSQSPLDYALSEKAFPMRSVNWNKLNDDKDLEVWNRVTQNFWLPEKIPVSNDLNSWRTLDADWQQLITRTFTGLTLLDSVQATVGDIAQIKHSQTDHEQVIYANFAFMVAIHARSYGTIFSTLCTSQQIEEAHEWVVDTESLQARSRILIPFYTGDDPLKSKVAAAMMPGFLLYGGFYLPFYLSARGKLPNTSDIIRLILRDKVIHNYYSGYKYQQKVAKLSVEKQAEMKTFVFDLLYQLIDLEKAYLYELYDGFDLAEDAIRFSIYNAGKFLQNLGYDSPFTEEETRISPEVFAQLSARADENHDFFSGNGSSYIMGITEETLDEDWEF

SEQ ID NO: 813 - DNA, 1011 bp, Streptococcus pyogenes
atgacccaacattattatgaacgttcgcaatccccaattgaatacgccctatctgaaacacaaaaacagttgcgctccatcaattggaattaccttaatgatgacaaagatttagaagtgtggaaccgtgtcactcaaaatttttggttgcctgaaaaggttcctgtttctaatgatttaaattcttggcgctccttgggtgaggattggcaacagctcatcacaaggacctacactgggttgaccttactagatacagtacaagcaacggttggtgatgtggcacaaattcagcattcacaaaccgaccacgaacaagtcatctatacgaactttgcctttatggtggggattcatgcccgctcttacgggacgattttttcgaccctttgcagcagcgagcaaatcgaagaagcacatgaatgggtggtctcaacacagagcttgcaagaccgtgcccgtgtcttgattccttactatacgggtgatgaccctttgaaatcaaaagtagcagcagctatgatgccaggatttttgctgtatggcggcttttaccttcctttttacctatcagcacgtggtaaaatgccaaacacatctgatatcatccgcctgattttacgcgacaaagttattcacaactattacagcggttacaaataccaacaaaaagtagcacgtcttagcccagaaaaacaggctgaaatgaaggcctttgtctttgacttgctctatgaactcatcgaccttgaaaaagcttacttgagagaactgtatgcaggctttgatttggcagaagatgctatccgttttagcctttataacgctggaaaattccttcaaaatttaggctatgagtcgcccttcacagatgaagaaacgcgcgtttcaccagaagtatttgctcagctatcagcgcgtgcagacgaaaaccatgactttttctcaggcaatggctcatcttatgtgatggggatcaccgaagaaaccacagatgacgattgggagttt

SEQ ID NO: 814 - protein, 337 aa, Streptococcus pyogenes
MTQHYYERSQSPIEYALSETQKQLRSINWNYLNDDKDLEVWNRVTQNFWLPEKVPVSNDLNSWRSLGEDWQQLITRTYTGLTLLDTVQATVGDVAQIQHSQTDHEQVIYTNFAFMVGIHARSYGTIFSTLCSSEQIEEAHEWVVSTQSLQDRARVLIPYYTGDDPLKSKVAAAMMPGFLLYGGFYLPFYLSARGKMPNTSDIIRLILRDKVIHNYYSGYKYQQKVARLSPEKQAEMKAFVFDLLYELIDLEKAYLRELYAGFDLAEDAIRFSLYNAGKFLQNLGYESPFTDEETRVSPEVFAQLSARADENHDFFSGNGSSYVMGITEETTDDDWEF

SEQ ID NO: 815 - DNA, 915 bp, Streptococcus agalactiae
ttgatagcaatgaaaacgataaaagattggcaaataaatatttgcttagcgacctataatggtcaaaaataccttcgccagcaattagatagcataatacaacaaggttatactgactggatttgtttaataagggacgatggatctactgatgatacagtagctattattaaagaatatgttaatagagattcacgttttatatttattaattctaacgatgacagaaagttaggaagtcaccgcagtttttacgagttggttaactataaaaaagcagatttttatgttttctcagaccaggatgatgtttggaaagaaaatcgtttagaacgttaccttgaagaagcagagaaatttaaccaagaactaccattgcttgtttattcgaactggacttctgtagatgaaaaattaacagtattgaaagaacataatccagcaacagttattcaagaacaaattgcctttaaccaaataaatggtatggttatcatgatgaatcatgagttagcaaagctttgggaatatcgtcaaattggcgcccatgattcttatgttggaactctagcttacgccgttggaaatgtggcttatatttctgacagtacagtcctttggcgtagacaagtaggggcagagtcgctaaacaattacgggagacaatatggggtggctacgttttggcagatgataaatacttcttttgatcgtgcttcgcttatttttgctcaagtatccgataaaatgtccctggagcgtaaactcttctttagtcgttttatagaattaaaaaatgccaatctaatgagaaggatttatcttttatcaaaattaaaactccgtcggaaatcattgaaagaaacagttgctatgactatcctacttttaacaggttacggtaaaccaaaagca

SEQ ID NO: 816 - protein, 305 aa, Streptococcus agalactiae
MIAMKTIKDWQINICLATYNGQKYLRQQLDSIIQQGYTDWICLIRDDGSTDDTVAIIKEYVNRDSRFIFINSNDDRKLGSHRSFYELVNYKKADFYVFSDQDDVWKENRLERYLEEAEKFNQELPLLVYSNWTSVDEKLTVLKEHNPATVIQEQIAFNQINGMVIMMNHELAKLWEYRQIGAHDSYVGTLAYAVGNVAYISDSTVLWRRQVGAESLNNYGRQYGVATFWQMINTSFDRASLIFAQVSDKMSLERKLFFSRFIELKNANLMRRIYLLSKLKLRRKSLKETVAMTILLLTGYGKPKA

SEQ ID NO: 817 - DNA, 930 bp, Streptococcus pyogenes
atgaacattaatattttactatccacctacaatggagaacgcttcttagcagaacaaattcaaagtatccaaaggcaaacagttaacgactggaccttattgattagagatgatggttcaactgatggcacccaggatattattcgcacatttgtcaaggaagacaaacgaattcagtggatcaatgaggggcagacagaaaatctgggagttattaagaatttttacaccctcttaaagcaccaaaaagcagatgtctattttttcagtgaccaagatgatatatggttagacaataaactggaagtgaccttattggaggctcaaaaacatgaaatgacagctcctttattggtttatacagacctcaaagtggtaacccaacatttagctgtttgccatgacagtatgattaagacccaatctggtcatgcaaacacaagcctacttcaagaattaaccgaaaataccgtaacaggcggcacaatgatgattactcatgctctggctgaggaatggaccacttgtgacggtttattgatgcatgactggtatttagctttactagcttctgctattgggaaattagtttaccttgatattccaacagaattataccgtcagcacgatgctaacgtgttgggagctagaacttggtctaaacgcatgaaaaattggttaaccccccatcatttagtcaacaaatattggtggttgattacttcaagccaaaaacaggctcaattactattagatttaccattaaaaccaaatgaccatgaattggtaacggcctatgtttctttattggatatgccttttaccaaacgcttagctaccttgaaaaggtacggttttagaaaaaatcgcatctttcacacctttatttttcgtagtttagttgttaccttatttggttacaggagaaag

SEQ ID NO: 818 - protein, 310 aa, Streptococcus pyogenes
MNINILLSTYNGERFLAEQIQSIQRQTVNDWTLLIRDDGSTDGTQDIIRTFVKEDKRIQWINEGQTENLGVIKNFYTLLKHQKADVYFFSDQDDIWLDNKLEVTLLEAQKHEMTAPLLVYTDLKVVTQHLAVCHDSMIKTQSGHANTSLLQELTENTVTGGTMMITHALAEEWTTCDGLLMHDWYLALLASAIGKLVYLDIPTELYRQHDANVLGARTWSKRMKNWLTPHHLVNKYWWLITSSQKQAQLLLDLPLKPNDHELVTAYVSLLDMPFTKRLATLKRYGFRKNRIFHTFIFRSLVVTLFGYRRK

SEQ ID NO: 819 - DNA, 3717 bp, Streptococcus agalactiae
ttggaggaaataggaaaagtggataaacatcactcaaaaaaggctattttaaagttaacacttataacaactagtattttattaatgcatagcaatcaagtgaatgcagaggagcaagaattaaaaaaccaagagcaatcacctgtaattgctaatgttgctcaacagccatcgccatcggtaactactaatactgttgaaaaaacatctgtaacagctgcttctgctagtaatacagcgaaagaaatgggtgatacatctgtaaaaaatgacaaaacagaagatgaattattagaagagttatctaaaaaccttgatacgtctaatttgggggctgatcttgaagaagaatatccctctaaaccagagacaaccaacaataaagaaagcaatgtagtaacaaatgcttcaactgcaatagcacagaaagttccctcagcatatgaagaggtgaagccagaaagcaagtcatcgcttgctgttcttgatacatctaaaataacaaaattacaagccataacccaaagaggaaagggaaatgtagtagctattattgatactggctttgatattaaccatgatatttttcgtttagatagcccaaaagatgataagcacagctttaaaactaagacagaatttgaggaattaaaagcaaaacataatatcacttatgggaaatgggttaacgataagattgtttttgcacataactacgccaacaatacagaaacggtggctgatattgcagcagctatgaaagatggttatggttcagaagcaaagaatatttcgcatggtacacacgttgctggtatttttgtaggtaatagtaaacgtccagcaatcaatggtcttcttttagaaggtgcagcgccaaatgctcaagtcttattaatgcgtattccagataaaattgattcggacaaatttggtgaagcatatgctaaagcaatcacagacgctgttaatctaggagcaaaaacgattaatatgagtattggaaaaacagctgattctttaattgctctcaatgataaagttaaattagcacttaaattagcttctgagaagggcgttgcagttgttgtggctgccggaaatgaaggcgcatttggtatggattatagcaaaccattatcaactaatcctgactacggtacggttaatagtccagctatttctgaagatactttgagtgttgctagctatgaatcacttaaaactatcagtgaggtcgttgaaacaactattgaaggtaagttagttaagttgccgattgtgacttctaaaccttttgacaaaggtaaggcctacgatgtggtttatgccaattatggtgcaaaaaaagactttgaaggtaaggactttaaaggtaagattgcattaattgagcgtggtggtggacttgattttatgactaaaatcactcatgctacaaatgcaggtgttgttggtatcgttatttttaacgatcaagaaaaacgtggaaattttctaattccttaccgtgaattacctgtggggattattagtaaagtagatggcgagcgtataaaaaatacttcaagtcagttaacatttaaccagagttttgaagtagttgatagccaaggtggtaatcgtatgctggaacaatcaagttggggcgtgacagctgaaggagcaatcaagcctgatgtaacagcttctggctttgaaatttattcttcaacctataataatcaataccaaacaatgtctggtacaagtatggcttcaccacatgttgcaggattaatgacaatgcttcaaagtcatttggctgagaaatataaagggatgaatttagattctaaaaaattgctagaattgtctaaaaacatcctcatgagctcagcaacagcattatatagtgaagaggataaggcgttttattcaccacgtcagcaaggtgcaggtgtagttgatgctgaaaaagctatccaagctcaatattatattactggaaacgatggcaaagctaaaattaatctcaaacgaatgggagataaatttgatatcacagttacaattcataaacttgtagaaggtgtcaaagaattgtattatcaagctaatgtagcaacagaacaagtaaataaaggtaaatttgcccttaaaccacaagccttgctagatactaattggcagaaagtaattcttcgtgataaagaaacacaagttcgatttactattgatgctagtcaatttagtcagaaattaaaagaacagatggcaaatggttatttcttagaaggttttgtacgttttaaagaagccaaggatagtaatcaggagttaatgagtattccttttgtaggatttaatggtgattttgcgaacttacaagcacttgaaacaccgatttataagacgctttctaaaggtagtttctactataaaccaaatgatacaactcataaagaccaattggagtacaatgaatcagctccttttgaaagcaacaactatactgccttgttaacacaatcagcgtcttggggctatgttgattatgtcaaaaatggtggggagttagaattagcaccggagagtccaaaaagaattattttaggaacttttgagaataaggttgaggataaaacaattcatcttttggaaagagatgcagcgaataatccatattttgccatttctccaaataaagatggaaatagggacgaaatcactccccaggcaactttcttaagaaatgttaaggatatttctgctcaagttctagatcaaaatggaaatgttatttggcaaagtaaggttttaccatcttatcgtaaaaatttccataataatccaaagcaaagtgatggtcattatcgtatggatgctcttcagtggagtggtttagataaggatggcaaagttgtagcagatggtttttatacttatcgcttacgttacacaccagtagcagaaggagcaaatagtcaggagtcagactttaaagtacaagtaagtactaagtcaccaaatcttccttcacgagctcagtttgatgaaactaatcgaacattaagcttagccatgcctaaggaaagtagttatgttcctacatatcgtttacaattagttttatctcatgttgtaaaagatgaagaatatggggatgagacttcttaccattatttccatatagatcaagaaggtaaagtgacacttcctaaaacggttaagataggagagagtgaggttgcggtagaccctaaggccttgacacttgttgtggaagataaagctggtaatttcgcaacggtaaaattgtctgatctcttgaataaggcagtagtatcagagaaagaaaacgctatagtaatttctaacagtttcaaatattttgataacttgaaaaaagaacctatgtttatttctaaaaaagaaaaagtagtaaacaagaatctagaagaaataatattagttaagccgcaaactacagttactactcaatcattgtctaaagaaataactaaatcaggaaatgagaaagtcctcacttctacaaacaataatagtagcagagtagctaagatcatatcacctaaacataacggggattctgttaaccataccttacctagtacatcagatagagcaacgaatggtctatttgttggtactttggcattgttatctagtttacttctttatttgaaacccaaaaagactaaaaataatagtaaa

SEQ ID NO: 820 - protein, 1239 aa, Streptococcus agalactiae
MEEIGKVDKHHSKKAILKLTLITTSILLMHSNQVNAEEQELKNQEQSPVIANVAQQPSPSVTTNTVEKTSVTAASASNTAKEMGDTSVKNDKTEDELLEELSKNLDTSNLGADLEEEYPSKPETTNNKESNVVTNASTAIAQKVPSAYEEVKPESKSSLAVLDTSKITKLQAITQRGKGNVVAIIDTGFDINHDIFRLDSPKDDKHSFKTKTEFEELKAKHNITYGKWVNDKIVFAHNYANNTETVADIAAAMKDGYGSEAKNISHGTHVAGIFVGNSKRPAINGLLLEGAAPNAQVLLMRIPDKIDSDKFGEAYAKAITDAVNLGAKTINMSIGKTADSLIALNDKVKLALKLASEKGVAVVVAAGNEGAFGMDYSKPLSTNPDYGTVNSPAISEDTLSVASYESLKTISEVVETTIEGKLVKLPIVTSKPFDKGKAYDVVYANYGAKKDFEGKDFKGKIALIERGGGLDFMTKITHATNAGVVGIVIFNDQEKRGNFLIPYRELPVGIISKVDGERIKNTSSQLTFNQSFEVVDSQGGNRMLEQSSWGVTAEGAIKPDVTASGFEIYSSTYNNQYQTMSGTSMASPHVAGLMTMLQSHLAEKYKGMNLDSKKLLELSKNILMSSATALYSEEDKAFYSPRQQGAGVVDAEKAIQAQYYITGNDGKAKINLKRMGDKFDITVTIHKLVEGVKELYYQANVATEQVNKGKFALKPQALLDTNWQKVILRDKETQVRFTIDASQFSQKLKEQMANGYFLEGFVRFKEAKDSNQELMSIPFVGFNGDFANLQALETPIYKTLSKGSFYYKPNDTTHKDQLEYNESAPFESNNYTALLTQSASWGYVDYVKNGGELELAPESPKRIILGTFENKVEDKTIHLLERDAANNPYFAISPNKDGNRDEITPQATFLRNVKDISAQVLDQNGNVIWQSKVLPSYRKNFHNNPKQSDGHYRMDALQWSGLDKDGKVVADGFYTYRLRYTPVAEGANSQESDFKVQVSTKSPNLPSRAQFDETNRTLSLAMPKESSYVPTYRLQLVLSHVVKDEEYGDETSYHYFHIDQEGKVTLPKTVKIGESEVAVDPKALTLVVEDKAGNFATVKLSDLLNKAVVSEKENAIVISNSFKYFDNLKKEPMFISKKEKVVNKNLEEIILVKPQTTVTTQSLSKEITKSGNEKVLTSTNNNSSRVAKIISPKHNGDSVNHTLPSTSDRATNGLFVGTLALLSSLLLYLKPKKTKNNSK

SEQ ID NO: 821 - DNA, 3543 bp, Streptococcus pyogenes
ttgcgtaaaaaacaaaaattaccatttgataaacttgccattgcgctcatgtctacgagcatcttgctcaatgcacaatcagacattaaagcaaatactgtgacagaagacactcctgctaccgaacaagctgtagaaaccccacaaccaacagcggtttctgaggaagcaccatcatcaaaggaaaccaaaaccccacaaactcctgatgacgcagaagaaacaatagcagatgacgctaatgatctagcccctcaagctcctgctaaaactgctgatacaccagcaacctcaaaagcgactattagggatttgaacgacccttctcaggtcaaaaccctgcaggaaaaagcaggcaaaggagctgggactgttgttgcagtgattgatgctggttttgataaaaatcatgaagcgtggcgcttaacagacaaaaccaaagcacgttaccaatcaaaagaagatcttgaaaaagctaaaaaagagcacggtattacctatggcgagtgggtcaatgataaggttgcttattaccacgactatagtaaagatggtaaaaccgctgtcgatcaagagcacggcacacacgtgtcagggatcttgtcaggaaatgctccatctgaaacgaaagaaccttaccgcctagaaggtgcgatgcctgaggctcaattgcttttgatgcgtgtcgaaattgtaaatggactagcagactatgctcgtaactacgctcaagctatcatagatgctgtcaacttgggagctaaggtgattaatatgagctttggtaatgctgcactagcctatgccaaccttccagacgaaaccaaaaaagcctttgactatgccaaatcaaaaggtgttagcattgtgacctcagctggtaatgatagtagctttgggggcaagacccgtctacctctagcagatcatcctgattatggggtggttgggacacctgcagcggcagactcaacattgacagttgcttcttacagcccagataaacagctcactgaaactgctacggtcaaaacagccgatcagcaagataaagaaatgcctgttctttcaacaaaccgttttgagccaaacaaggcttacgactatgcttatgctaatcgtgggatgaaagaggatgattttaaggatgtcaaaggtaagattgcccttattgaacgtggcgatattgatttcaaagataagattgcaaacgctaaaaaagctggtgctgtaggagtcttgatctatgacaatcaggacaagggcttcccgattgaattgccaaatgttgatcagatgcctgcggcctttatcagtcgaaaagatggtctcttattaaaagagaatccccaaaaaaccatcaccttcaatgcgacacctaaggtattgccaacagcaagtggcaccaaactaagccgcttctcaagctggggtctgacagctgacggcaatattaagccagatattgcagcacccggccaagatattttgtcatcagtggctaacaacaagtatgccaaactttctggaactagtatgtctgcgccattagtagcgggtatcatgggactgttgcaaaagcaatatgagacacagtatcctgatatgacaccatcagagcgtcttgatttagctaaaaaagtattgatgagctcagcaactgccttatatgatgaagatgaaaaagcttatttttctcctcgccaacaaggagcaggagcagtcgatgctaaaaaagcttcagcagcaacgatgtatgtgacagataaggataatacctcaagcaaggttcacctgaacaatgtttctgataaatttgaagtaacagtaacagttcacaacaaatctgataaacctcaagagttgtattaccaagcaactgttcaaacagataaagtagatggaaaactctttgccttggctcctaaagcattgtatgagacatcatggcaaaaaatcacaattccagccaatagcagcaaacaagtcaccattccaatcgatgttagtcaatttagcaaggacttgcttgccccaatgaaaaatggctatttcttagaaggttttgttcgtttcaaacaagatcctacaaaagaagagcttatgagtattccctatattggtttccgaggtgattttggcaatctgtcagccttagaaaaaccaatctatgatagcaaagacggtagcagctactatcatgaagcaaatagtgatgccaaagaccaattagatggtgatggattacagttttacgctctgaaaaataactttacagcacttactacagagtctaatccatggacgattattaaagctgtcaaagaaggggttgaaaacatagaggatatcgaatcttcagagatcacagaaaccatttttgcaggtacttttgcaaaacaagacgatgatagccactactatatccaccgtcacgctaatggcaagccatatgctgcgatctctccaaatggggacggtaacagagattatgtccaattccaaggtactttcttgcgtaatgctaaaaaccttgtggctgaagtcttggacaaagaaggaaatgttgtttggacaagtgaggtaaccgagcaagttgttaaaaactacaacaatgacttggcaagcacacttggttcaacccgttttgaaaaaacgcgttgggacggtaaagataaagacggcaaagttgttgctaacggaacatacacctatcgtgttcgctacactccgattagctcaggtgcaaaagaacaacacactgattttgatgtgattgtagacaatacgacacctgaagtcgcaacatcggcaacattctcaacagaagatcgtcgtttgacacttgcatctaaaccaaaaaccagccaaccggtttaccgtgagcgtattgcttacacttatatggatgaggatctgccaacaacagagtatatttctccaaatgaagatggtacctttactcttcctgaagaggctgaaacaatggaaggcgctactgttccattgaaaatgtcagactttacttatgttgttgaagatatggctggtaacatcacttatacaccagtgactaagctattggaaggccactctaataaaccagaacaagacggttcagatcaagcaccagacaaaaaaccagaaactaaaccagaacaagacggttcaggtcaagcaccagataaaaaaccagaaactaaaccagaacaagacggttcaggtcaaacaccagacaaaaaaccagaaactaaaccagaacaagacggttcaggtcaaacaccagataaaaaaccagaaactaaaccagaaaaagatagttcaggtcaaacaccaggtaaaactcctcaaaaaggtcaaccttctcgtactctagagaaacgatcttctaagcgtgctttagctacaaaagcatcaacaaaagatcagttaccaacgactaatgacaaggatacaaatcgtttacatctccttaagttagttatgaccactttcttcttgggattagtagctcatatctttaaaacaaaacgcactgaagat

SEQ ID NO: 822 - protein, 1181 aa, Streptococcus pyogenes
LRKKQKLPFDKLAIALMSTSILLNAQSDIKANTVTEDTPATEQAVETPQPTAVSEEAPSSKETKTPQTPDDAEETIADDANDLAPQAPAKTADTPATSKATIRDLNDPSQVKTLQEKAGKGAGTVVAVIDAGFDKNHEAWRLTDKTKARYQSKEDLEKAKKEHGITYGEWVNDKVAYYHDYSKDGKTAVDQEHGTHVSGILSGNAPSETKEPYRLEGAMPEAQLLLMRVEIVNGLADYARNYAQAIIDAVNLGAKVINMSFGNAALAYANLPDETKKAFDYAKSKGVSIVTSAGNDSSFGGKTRLPLADHPDYGVVGTPAAADSTLTVASYSPDKQLTETATVKTADQQDKEMPVLSTNRFEPNKAYDYAYANRGMKEDDFKDVKGKIALIERGDIDFKDKIANAKKAGAVGVLIYDNQDKGFPIELPNVDQMPAAFISRKDGLLLKENPQKTITFNATPKVLPTASGTKLSRFSSWGLTADGNIKPDIAAPGQDILSSVANNKYAKLSGTSMSAPLVAGIMGLLQKQYETQYPDMTPSERLDLAKKVLMSSATALYDEDEKAYFSPRQQGAGAVDAKKASAATMYVTDKDNTSSKVHLNNVSDKFEVTVTVHNKSDKPQELYYQATVQTDKVDGKLFALAPKALYETSWQKITIPANSSKQVTIPIDVSQFSKDLLAPMKNGYFLEGFVRFKQDPTKEELMSIPYIGFRGDFGNLSALEKPIYDSKDGSSYYHEANSDAKDQLDGDGLQFYALKNNFTALTTESNPWTIIKAVKEGVENIEDIESSEITETIFAGTFAKQDDDSHYYIHRHANGKPYAAISPNGDGNRDYVQFQGTFLRNAKNLVAEVLDKEGNVVWTSEVTEQVVKNYNNDLASTLGSTRFEKTRWDGKDKDGKVVANGTYTYRVRYTPISSGAKEQHTDFDVIVDNTTPEVATSATFSTEDRRLTLASKPKTSQPVYRERIAYTYMDEDLPTTEYISPNEDGTFTLPEEAETMEGATVPLKMSDFTYVVEDMAGNITYTPVTKLLEGHSNKPEQDGSDQAPDKKPETKPEQDGSGQAPDKKPETKPEQDGSGQTPDKKPETKPEQDGSGQTPDKKPETKPEKDSSGQTPGKTPQKGQPSRTLEKRSSKRALATKASTKDQLPTTNDKDTNRLHLLKLVMTTFFLGLVAHIFKTKRTED

SEQ ID NO: 823 - DNA, 426 bp, Streptococcus agalactiae
atgtggaatgtaaaaacttttgataatttaactacacatgagttgtttcaaatatataaattaagagtatctgtatttgtggttgaacaagattgtccttatcaagaggttgatgatgaagatttgatttgtttgcatgggatgaattgggtagatggtcaattggcagcttattatagattgataccagaagatgataaggtgcatttgggacgtgtgattgttaatccagactttagaaaaaagggattaggaaatcaattagtggaatatgcgattaaatttagtgaggcaaattaccctaataaacctatttatgctcaggcccaagcttatttacaagatttttatcaatctttcggatttcaacctgtctcagatatctatctagaagataatattcctcatcttgatatggttttatta

SEQ ID NO: 824 - protein, 142 aa, Streptococcus agalactiae
MWNVKTFDNLTTHELFQIYKLRVSVFVVEQDCPYQEVDDEDLICLHGMNWVDGQLAAYYRLIPEDDKVHLGRVIVNPDFRKKGLGNQLVEYAIKFSEANYPNKPIYAQAQAYLQDFYQSFGFQPVSDIYLEDNIPHLDMVLL

SEQ ID NO: 825 - DNA, 117 bp, Streptococcus agalactiae
atggatgtctcctcaattgacgaatcaaggacgccacatgttccaaaaacaattaaactttccattccaaatactataatatcttccaagattgctacgcaagctgaagcaccaaca

SEQ ID NO: 826 - protein, 39 aa, Streptococcus agalactiae
MDVSSIDESRTPHVPKTIKLSIPNTIISSKIATQAEAPT

SEQ ID NO: 827 - DNA, 1353 bp, Streptococcus agalactiae
atgaatgtggttttaaaacagcgaattcctttaaaaattaaacgaatgggaattaatggtgaaggaataggtttttataaaaaaacactaatctttgttccaggggccctcaagggagaagaggtgttttgtcagatttcttctgttagacgtaattttgcagaagctaaactgttaaagataaataaaaaatctaaaaatagggtagaacccccttgttctatttataaagaatgtgggggatgccaaataatgcaccttcaatatgataagcagctagagtttaaaacggatgttattcgacaggctctaatgaaatttaaaccagagggatatgagaattatgaaatccgtaaaacgataggtatgtcggaacctgaacactatcgtgctaaattacaatttcaagtgcgttcgtttggagggaatgtaaaggcaggtttatatgcacaagggacacatcgattgattgatatcaaagattgtttagtgcaagatagccttactcaggaaatgataaatcgagttgcagaacttttaggaaaatataaattgcctatttataatgaacgtaaaatagctggtgtccgtactgttatgattcgacgagcacaagcgagtggagaggttcaactgatctttatcacaagtaaaagacttgattttgatgatgttgttattgaattagttcgagagtttcctgagttaaagacagttgctgtaaatatcaacgctagtaaaacaagtgatatctatggtcaaataacagaagttatttggggtcaagaatccatcaatgaagaagtattagattatggtttttcgttatcaccacgtgctttttatcaacttaatcctaaacaaacacaaattttatatagtgaggcagttaaggccttagatgtgaaggaagatgatgatttaattgacgcttattgtggagtaggaacgattggacttgcttttgctggaaaagttaaaagtgttcgtggaatggatattatccctgaggctattcaggatgctaaagagaacgcactttatatgggttttactaatacacattacgaagctggaaaggcagaggatattatccctaggtggtatagtgagggatttcgcgctaatgcgttaatcgtggatcctcctcgcacaggtttagatgataaattgctaaatactatactaaaaatgcctccagaaaaaatggtttacgtttcttgtaatacatccacgcttgctagagacttagtaacattaacaaaagtataccatgtccactacatccaatccgttgacatgtttccacatacagcaaggaccgaggctgtagtgaaactacaacgtaaggaa

SEQ ID NO: 828 - protein, 451 aa, Streptococcus agalactiae
MNVVLKQRIPLKIKRMGINGEGIGFYKKTLIFVPGALKGEEVFCQISSVRRNFAEAKLLKINKKSKNRVEPPCSIYKECGGCQIMHLQYDKQLEFKTDVIRQALMKFKPEGYENYEIRKTIGMSEPEHYRAKLQFQVRSFGGNVKAGLYAQGTHRLIDIKDCLVQDSLTQEMINRVAELLGKYKLPIYNERKIAGVRTVMIRRAQASGEVQLIFITSKRLDFDDVVIELVREFPELKTVAVNINASKTSDIYGQITEVIWGQESINEEVLDYGFSLSPRAFYQLNPKQTQILYSEAVKALDVKEDDDLIDAYCGVGTIGLAFAGKVKSVRGMDIIPEAIQDAKENALYMGFTNTHYEAGKAEDIIPRWYSEGFRANALIVDPPRTGLDDKLLNTILKMPPEKMVYVSCNTSTLARDLVTLTKVYHVHYIQSVDMFPHTARTEAVVKLQRKE

SEQ ID NO: 829 - DNA, 1353 bp, Streptococcus pyogenes
atggtcgtaaaggttaaacagaaaattcctttaaaaattaagcgaatgggaattaacggtgaggggattggtttttatcagaaaactttggtatttgtccctggtgctttaaagggagaagatattttttgccaaatcacggcggttaaacggaattttgcagaggccaaactgttaacggtaaacaaggcttctaagaatcgtgtcaaaccagcttgttctgtttatgaaacttgtggtggttgccaaatcatgcatctagcctatcctaaacagctagatttcaaagatgatgtgattaggcaggcccttaaaaagttcaaaccaactggctatgaacaatttgagattagaccgactttaggaatgaaaaagccagatcactatcgggccaaattgcagtttcagctgcggtcatttggcgggacggtcaaggctggtttattttcccagggaagtcatcgcttggttcctattgacaattgcttggtacaggatcaactaacgcaagatattatcaataagattacgcagttagtggacaagtacaagttgcccatttacaatgagcgcaagattgctgggattcggacgataatggttcgtaaggcacaggctagtgatcaggtacagattattgttgtgagtagcaaagaagttaggttagcgaatttcattggcgaattgactaaggcatttcctcaggttaaaacggttgccttgaatagtaatcgttctaaatcgagtgagatttatggggacgaaacggaaattctatggggacaagaggcgattcatgaagaagttttagactatggatttgcgttatcaccgagagctttttaccaacttaatccacagcagacagaagttttgtatggtgaggtggtgaaggccttggatgtagggagcaaagatcatattattgatgcctattgtggggttggctcgattggctttgcttttgcagggaaggtcaagtctgtgcgggggatggatattatcccagaagcgattgaagatgcacaaaaaaatgccaaagccatgggctttgacaacgcttactatgaggcagggaaggcagaggatattatttctaaatggtataaacaaggttaccgcgcggatgccgtcattgtggacccaccaagaactggtttagatgataaattattaaaaacgattcttcattaccagcctaaacagatggtttatgtgtcttgtaatacctccactttggcccgcgacttggtgcagctaacaaaggtttacgatgttcactatatccaaagtgtagacatgttcccccatacagctaggaccgaggctgtcgtgaagttacaaaaacgtgta

SEQ ID NO: 830 - protein, 451 aa, Streptococcus pyogenes
MVVKVKQKIPLKIKRMGINGEGIGFYQKTLVFVPGALKGEDIFCQITAVKRNFAEAKLLTVNKASKNRVKPACSVYETCGGCQIMHLAYPKQLDFKDDVIRQALKKFKPTGYEQFEIRPTLGMKKPDHYRAKLQFQLRSFGGTVKAGLFSQGSHRLVPIDNCLVQDQLTQDIINKITQLVDKYKLPIYNERKIAGIRTIMVRKAQASDQVQIIVVSSKEVRLANFIGELTKAFPQVKTVALNSNRSKSSEIYGDETEILWGQEAIHEEVLDYGFALSPRAFYQLNPQQTEVLYGEVVKALDVGSKDHIIDAYCGVGSIGFAFAGKVKSVRGMDIIPEAIEDAQKNAKAMGFDNAYYEAGKAEDIISKWYKQGYRADAVIVDPPRTGLDDKLLKTILHYQPKQMVYVSCNTSTLARDLVQLTKVYDVHYIQSVDMFPHTARTEAVVKLQKRV

SEQ ID NO: 831 - DNA, 774 bp, Streptococcus agalactiae
atgaaaataaccaaaatcgaaaagaaaaaaagactttacactctagagctagacaataccgaaaatttatatataacagaagatactatcgttcattttatgttaagtaaagggatgataattaatgccgagaaacttgaaaatattaaaaaatttgcccaactatcatacggtaaaaatctaggtctttattatatttctttcaagcagagaaccgagaaagaagttattaaatatcttcaacaacatgatattgattctaaaattattccacaaattattgataatctaaaaagtgagaattggataaacgataaaaactacgtgcaatctttcatacagcaaaatctaaatactggcgataagggaccatacgtgataaaacaaaaattattgcaaaaaggtatcaaaagtaaaataattgaatctgaacttcaagctataaactttcaagacttagcatccaaaataagccaaaaactctataaaaaatatcaaaacaaacttccactaaaagcattaaaagataaattgatgcagagcttaactacaaaaggatttgattatcagatagtgcataccgtaattcaaaaccttgaaattgaaaaagatcaagaacttgaagaagacctcatttataaagaattagataaacaataccaaaaattatcaaaaaaacatgaccagtatgaattaaagcaacgtataatcaatgccttaatgcgtaaaggataccagtacgaagatatcaaaagtgctttaagagaatattta

SEQ ID NO: 832 - protein, 258 aa, Streptococcus agalactiae
MKITKIEKKKRLYTLELDNTENLYITEDTIVHFMLSKGMIINAEKLENIKKFAQLSYGKNLGLYYISFKQRTEKEVIKYLQQHDIDSKIIPQIIDNLKSENWINDKNYVQSFIQQNLNTGDKGPYVIKQKLLQKGIKSKIIESELQAINFQDLASKISQKLYKKYQNKLPLKALKDKLMQSLTTKGFDYQIVHTVIQNLEIEKDQELEEDLIYKELDKQYQKLSKKHDQYELKQRIINALMRKGYQYEDIKSALREYL

SEQ ID NO: 833 - DNA, 774 bp, Streptococcus pyogenes
atgaaaatcactaaaattgaaaagaaaaaacgcctctaccttatcgaattggataatgacgaatccctttatgtaacagaagatactattgttcggtttatgttgagtaaagataaagtccttgacaatgatcagcttgaagacatgaaacattttgcccaactgtcctacggcaaaaatttagccctttattttctttcctttcaacaacgcagcaacaagcaagttgctgattacctgcgcaagcatgagattgaagaacacattattgctgacatcatcactcaactccaagaagaacaatggatagacgacaccaaattggctgatacctacattcgccaaaatcagttaaatggtgataaaggtccccaagtcttaaaacaaaaattattacaaaaaggcattgcaagtcatgacattgatcctatcttatctcaaactgactttagccaactcgctcaaaaagtaagccaaaaactctttgacaaatatcaagaaaaattgccaccaaaagccttgaaagataaaatcacccaagcattactgaccaaaggcttttcatacgatctagctaaacatagcctcaatcaccttaattttgaccaagataatcaagaaatagaagatcttcttgacaaagaattagacaaacaatatcgtaaactcagtcgcaaatatgatggttataccttaaagcaaaagctctatcaggctctctaccgaaaaggctacaacagcgacgacattaattgcaagttaagaaattattta

SEQ ID NO: 834 - protein, 258 aa, Streptococcus pyogenes
MKITKIEKKKRLYLIELDNDESLYVTEDTIVRFMLSKDKVLDNDQLEDMKHFAQLSYGKNLALYFLSFQQRSNKQVADYLRKHEIEEHIIADIITQLQEEQWIDDTKLADTYIRQNQLNGDKGPQVLKQKLLQKGIASHDIDPILSQTDFSQLAQKVSQKLFDKYQEKLPPKALKDKITQALLTKGFSYDLAKHSLNHLNFDQDNQEIEDLLDKELDKQYRKLSRKYDGYTLKQKLYQALYRKGYNSDDINCKLRNYL

SEQ ID NO: 835 - DNA, 531 bp, Streptococcus agalactiae
atgagattacctaaagaaggcgactttattacaattcaaagttacaaacatgatggtagtttacaccgaacttggcgtgacaccatggtattaaaaacaaccgaaaatgccctcattggtgttaatgatcatactttagtaacagaaaatgatggtcgacgctgggtgacacgagagcctgcaatagtatactttcataaaaaatactggtttaacattatcgctatgatacgtgaaactggtgtctcctactattgtaatctagcaagtccgtatatcttggaccctgaagcactcaagtatattgactatgaccttgatgtcaaagtatttgcagatggtgaaaaaagactactagatgtggacgaatatgaacagcataaagctcagatgaactatcctaccgatattgattatatattaaaggaaaatgtaaaaatattggtagaatggataaatgagaataaaggccccttttcatcatcatatatcaatatctggtataaacggtaccttgaattgaaaaagcgc

SEQ ID NO: 836 - protein, 177 aa, Streptococcus agalactiae
MRLPKEGDFITIQSYKHDGSLHRTWRDTMVLKTTENALIGVNDHTLVTENDGRRWVTREPAIVYFHKKYWFNIIAMIRETGVSYYCNLASPYILDPEALKYIDYDLDVKVFADGEKRLLDVDEYEQHKAQMNYPTDIDYILKENVKILVEWINENKGPFSSSYINIWYKRYLELKKR

SEQ ID NO: 837 - DNA, 531 bp, Streptococcus pyogenes
atgaaattacctaaagaaggcgactttattacaattcaaagttataagcatgatggtagtttgcaccgtacttggcgcgatactatggtactaaaaacaactgaaaatgccctcattggagttaatgatcacactcttgtcacagaaagtgacggtagacgatgggtgacccgcgaacctgcaatcgtttactttcataaaaaatactggtttaacattatagccatgattcgagataatggcgtctcttattactgtaacttagctagtccatacatgatggacactgaggcccttaaatacattgattacgatttagatgtcaaagtctttgcggatggtgaaaagagattacttgatgttgatgaatacgagattcataaaaaagagatgcagtattcagccgatatggactttatcctaaaagaaaatgtcaaaatattggttgattggattaatcatgaaaaaggaccattttccaaggcctatatcactatttggtacaaacgttatcttgaactgaagaatcgt

SEQ ID NO: 838 - protein, 177 aa, Streptococcus pyogenes
MKLPKEGDFITIQSYKHDGSLHRTWRDTMVLKTTENALIGVNDHTLVTESDGRRWVTREPAIVYFHKKYWFNIIAMIRDNGVSYYCNLASPYMMDTEALKYIDYDLDVKVFADGEKRLLDVDEYEIHKKEMQYSADMDFILKENVKILVDWINHEKGPFSKAYITIWYKRYLELKNR

SEQ ID NO: 839 - DNA, 885 bp, Streptococcus agalactiae
atgaaaaagaacaaagagttaaacgtgctaagagaaaagcaagtaagaaaagaaagtaggaaaaccatggtattatttacaggagcgactgtagaagaagctattgaaaaaggactacaagagttaaacatttcacgattgagggcacatataaaagttgtatcacgtgagaaaaaaggttttttgggctttggtaaaaagccagcaaaagttgaaatagaaggtatcaccgacgaagtaactgatattaatgaatcggtagcgttaaaaaatattaagaatgtaccgtctagcgtagatgtggtggaagaatatatagaggaggttgatgaaacgcttgaaaaagaagacgtatcacaaccagaacttccaaaaattgatgataaaaacgttgtaactacaagtgaagctattgaaaaaattgacctacttcctaatattgaagtagcagctgctcaggtgactaaatacgttgaaaatatcatctatgagatggatttagatgcaacaatagaaactacgacaagtaagcgacaaataaatctccaaatagaaacgccagaagctgggcgcatcattggttatcatggaaaagtattaaaatcgttgcagttgttagcacaaaattatcttcatgaccgcttttctaagagtttttcagtatccattaatgtccatgactacgttgagcatcgtacagaaactttaattgatttttctaaaaaaatagctaggcgtgttttagagactaatgaaccttaccatatggatcctatgagtaacagtgagcgaaaaactgttcataaaacaattgcaactatagagggtgttgaaagttattctgaaggtaacgatcctaatagatttgtagtagttactaagaaa

SEQ ID NO: 840 - protein, 295 aa, Streptococcus agalactiae
MKKNKELNVLREKQVRKESRKTMVLFTGATVEEAIEKGLQELNISRLRAHIKVVSREKKGFLGFGKKPAKVEIEGITDEVTDINESVALKNIKNVPSSVDVVEEYIEEVDETLEKEDVSQPELPKIDDKNVVTTSEAIEKIDLLPNIEVAAAQVTKYVENIIYEMDLDATIETTTSKRQINLQIETPEAGRIIGYHGKVLKSLQLLAQNYLHDRFSKSFSVSINVHDYVEHRTETLIDFSKKIARRVLETNEPYHMDPMSNSERKTVHKTIATIEGVESYSEGNDPNRFVVVTKK

SEQ ID NO: 841 - DNA, 912 bp, Streptococcus pyogenes
atggtattatttacaggaaaaacagtcgaagaagctatcgaaacaggacttcaagagttagggttatcacgccttaaagcgcatatcaaagtcatttcaaaagagaaaaaaggtttcctcgggtttggtaaaaagccagcccaagttgatatcgaaggtatcagcgacaagacggtttataaggctgataaaaaagccactcgaggtgttccagaggatattaatcgtcaaaatactcccgcggtcaattctgctgatgtagaacctgaagaaataaaagccactcaaaggttagaagcagaagataccaaagtggttcctctcatgtctgaagatagtccagcgcaaaccccttctaatcttgctgagacagtcactgaaacaaaagcacaacaaccgtcaatcccagtcgaagaatcagaagtgccccaagatgctggtaatgatggtttcagcaaagatattgaaaaagctgctcaggaagtgtccgattatgtgactaaaattatctatgaaatggatatcgaagctaccgttgaaaccagcaacaatcgtcgccaaatcaatttgcagattgaaacgccagaggcgggacgtgtgattggttaccatggtaaggtcttgaaatccttgcagttgttagctcaaaatttcttgcacgaccgctattcaaaaaatttttcagtatccttgaatgtccatgattatgtggaacatcgaacagaaaccttgattgactttacgcaaaaagttgccaaacgcgttttggaatctggtcaagattacaccatggatcccatgagtaacagtgagcgtaaaatcgttcataaaaccgtttcatccattgaaggggttgatagttattctgaaggcaatgaccctaaccgctatgtggtagtcagtcttcaacgt

SEQ ID NO: 842 - protein, 304 aa, Streptococcus pyogenes
MVLFTGKTVEEAIETGLQELGLSRLKAHIKVISKEKKGFLGFGKKPAQVDIEGISDKTVYKADKKATRGVPEDINRQNTPAVNSADVEPEEIKATQRLEAEDTKVVPLMSEDSPAQTPSNLAETVTETKAQQPSIPVEESEVPQDAGNDGFSKDIEKAAQEVSDYVTKIIYEMDIEATVETSNNRRQINLQIETPEAGRVIGYHGKVLKSLQLLAQNFLHDRYSKNFSVSLNVHDYVEHRTETLIDFTQKVAKRVLESGQDYTMDPMSNSERKIVHKTVSSIEGVDSYSEGNDPNRYVVVSLQR

SEQ ID NO: 843 - DNA, 813 bp, Streptococcus agalactiae
ttgaagaaaaaacttaaaacatttagcttaatattgctgacaggctctttattggttgcttgcggacgaggagaagtatctagtcattcagccacattatgggagcaaatagtttatgcatttgctaaatcaatacaatggctctcctttaaccattcaattggtttgggaataatcttattcactctaataatcagagcgattatgatgccgctttataatatgcaaatgaaatccagccaaaagatgcaggaaattcagccaaggctcaaggaattacaaaaaaaatatccagggaaagatcctgataaccgtttaaagctaaatgatgaaatgcaatctatgtataaagctgagggagttaacccatatgcaagtgtattacctcttctaattcagttacctgtcctatgggctcttttccaagctttgactagggtttctttcttaaaagtaggaacatttttgagcctagaattatcacagccggacccatattatattttacctgtactggcggccttatttacctttttatcaacttggttaactaacaaagcagctgttgaaaaaaatattgctttaactcttatgacttatgttatgccgtttatcatattggtaacaagctttaactttgctagtggtgttgttttatactggacggtgtctaatgcttttcaagtatttcaaattctattattgaacaacccatacaagattataaaggttcgagaagaagcagtaagagtggcacatgaaaaagaacaaagagttaaacgtgctaagagaaaagcaagtaagaaaagaaag

SEQ ID NO: 844 - protein, 271 aa, Streptococcus agalactiae
MKKKLKTFSLILLTGSLLVACGRGEVSSHSATLWEQIVYAFAKSIQWLSFNHSIGLGIILFTLIIRAIMMPLYNMQMKSSQKMQEIQPRLKELQKKYPGKDPDNRLKLNDEMQSMYKAEGVNPYASVLPLLIQLPVLWALFQALTRVSFLKVGTFLSLELSQPDPYYILPVLAALFTFLSTWLTNKAAVEKNIALTLMTYVMPFIILVTSFNFASGVVLYWTVSNAFQVFQILLLNNPYKIIKVREEAVRVAHEKEQRVKRAKRKASKKRK

SEQ ID NO: 845 - DNA, 825 bp, Streptococcus pyogenes
ttgagaaaggttttgagagtgaagaaaaacattaaaattgcaagaatagtccccttagttctattattagtggcctgtggtcgtggtgaggtaacggcacaatcatctagtggttgggaccagttggtttacttatttgccagagcaattcaatggctttcctttgatggttcaattggtgttggcattattctttttacccttactatccgtctcatgctcatgcctttgtttaacatgcaaatcaaatcaagccagaagatgcaagacatccaacctgagcttagagaattgcaaaggaaatacgctggtaaagacacacaaacgcggatgaagttggctgaagaaagtcaagccctttacaaaaaatatggggttaacccttatgctagtctcttacccctcttaattcagatgccagttatgattgccttattccaagccttgacacgggtatctttcttaaaaacagggactttcttgtgggtggaattggcacaacatgatcatttgtaccttttaccagttttggcagctgtcttcactttcttgtccacttggttgaccaatctagcggctaaagaaaaaaatgtcatgatgactgttatgatttatgtgatgccgctaatgatctttttcatgggctttaacttggctagtggagtagtgctctattggacggtctccaatgcctttcaagtggtacaactactgttattaaacaatccttttaagattattgcggaaagacaacgtcttgccaatgaagaaaaagaacgccgtcttcgtgaacgtcgtgctcgtaaaaaagcaatgaagagaaaa

SEQ ID NO: 846 - protein, 275 aa, Streptococcus pyogenes
LRKVLRVKKNIKIARIVPLVLLLVACGRGEVTAQSSSGWDQLVYLFARAIQWLSFDGSIGVGIILFTLTIRLMLMPLFNMQIKSSQKMQDIQPELRELQRKYAGKDTQTRMKLAEESQALYKKYGVNPYASLLPLLIQMPVMIALFQALTRVSFLKTGTFLWVELAQHDHLYLLPVLAAVFTFLSTWLTNLAAKEKNVMMTVMIYVMPLMIFFMGFNLASGVVLYWTVSNAFQVVQLLLLNNPFKIIAERQRLANEEKERRLRERRARKKAMKRK

SEQ ID NO: 847 - DNA, 387 bp, Streptococcus agalactiae
ttgagtcttttaggttatttatggtataataaaaccaatttagataaatggagcactattttgaaaaaaacctatcgggtaaaaagtgataaggattttcaaatgattttcagcagaggtaaaaatgttgctaatcgaaaatttgttatctactatttagaaaaagaacaaaaacactttcgtgtgggaatctctgttagtaagaaattaggaaatgctgttgttcgtaacgctattaaaagaaaaattaggcatgttttactctctcagaaaacagcgctgcaagattatgattttgtcgtgattgcgcgtaaaggtgtagaggaattggactatcaagcattagaaaaaaatcttatacacgttttaaaaatagcaggactcatc

SEQ ID NO: 848 - protein, 129 aa, Streptococcus agalactiae
MSLLGYLWYNKTNLDKWSTILKKTYRVKSDKDFQMIFSRGKNVANRKFVIYYLEKEQKHFRVGISVSKKLGNAVVRNAIKRKIRHVLLSQKTALQDYDFVVIARKGVEELDYQALEKNLIHVLKIAGLI

SEQ ID NO: 849 - DNA, 357 bp, Streptococcus pyogenes
ttgaagaagacctatcgtgtcaagcgtgagaaagatttccaagccatatttaaggatggaaaaagtacagcaaatcgaaaatttgtcatttatcatttaaatagaggccaagaccacttccgtgtgggtatttctgtcggtaaaaaaataggaaatgcagtcaccagaaatgcagtcaaacgaaagatacgtcatgttatcatggcattagggcatcagctgaagtcagaggatttcgtggtgattgcccgtaagggtgtccactctttggagtatcaagagcttcaacaaaatttacatcatgttttaaagttagcacaattgcttgagaaaggttttgagagtgaagaaaaacat

SEQ ID NO: 850 - protein, 119 aa, Streptococcus pyogenes
LKKTYRVKREKDFQAIFKDGKSTANRKFVIYHLNRGQDHFRVGISVGKKIGNAVTRNAVKRKIRHVIMALGHQLKSEDFVVIARKGVHSLEYQELQQNLHHVLKLAQLLEKGFESEEKH

SEQ ID NO: 851 - DNA, 1056 bp, Streptococcus agalactiae
atgttagcgctatatgccttattattagaaagaaggaataagatgacaaaacaaaaaattgccgttcttggacctggttcatgggggactgctcttgcacaagtattaaatgacaatggacatgaggtacgcttatggggaaacgtggttgaacaaatagaagagattaatactaaccatactaatcaacgttacttcaaagatattaccttagattccaaaataaaagcctacactaatcttgaggaagcgattaataatgttgacagcattttattcgtcgtcccaactaaagttacaagacttgttgctaaacaagtggctaatcttttaaagcataaagttgttcttatgcatgcttctaagggactagaacctggtactcatgaacgactttctacaattttagaagaagaaatctctgaacaatatcgtagtgatatcgttgttgtttcaggtcccagtcatgctgaagaagccatcgttcgtgatattactttgattactgctgcttcaaaagatattgaagcagctaagtatgtccaaaaattgtttagtaatcattattttagactttatactaacactgatgtcgtaggagtagaaacagctggtgctctaaaaaatattattgctgttggtgctggagcactacacggtcttggttatggtgataatgctaaagcagctattattacgcgtggtttagctgagataacacgtcttggtgtacaattaggggccgaccctctcactttcagtggtttatccggagttggagatttaattgtgactggtacatctgttcattctcgcaactggagagcgggagatgctttaggacgtggtgagaaacttgaagatattgaaaaaaatatggggatggttattgaaggtatctcaacaactaaagttgcttacgaaatcgcccaaaacttaaatgtttacatgcccattacagaagctatttataaatcaatatatgaaggggctaatatcaaagatagcattttagatatgatgtccaatgaatttcgttcagagaatgaatggcac

SEQ ID NO: 852 - protein, 352 aa, Streptococcus agalactiae
MLALYALLLERRNKMTKQKIAVLGPGSWGTALAQVLNDNGHEVRLWGNVVEQIEEINTNHTNQRYFKDITLDSKIKAYTNLEEAINNVDSILFVVPTKVTRLVAKQVANLLKHKVVLMHASKGLEPGTHERLSTILEEEISEQYRSDIVVVSGPSHAEEAIVRDITLITAASKDIEAAKYVQKLFSNHYFRLYTNTDVVGVETAGALKNIIAVGAGALHGLGYGDNAKAAIITRGLAEITRLGVQLGADPLTFSGLSGVGDLIVTGTSVHSRNWRAGDALGRGEKLEDIEKNMGMVIEGISTTKVAYEIAQNLNVYMPITEAIYKSIYEGANIKDSILDMMSNEFRSENEWH

SEQ ID NO: 853 - DNA, 1014 bp, Streptococcus pyogenes
atgacaaaacaaaaagtagctattttaggacctggttcttggggaactgccctttctcaggttcttaatgacaatggccatgacgtccgtttatggggaaatattcctgatcaaattgaagagataaataccaagcataccaatagacactacttcaaagacattgtgttagacaaaaacattacggcaactcttgatttaggtcaagccctatcagatgttgatgcggtgctttttgttgtgccaactaaagtaacacgattagttgctagacaagttgccgccattttagatcataaagtagtggtcatgcatgcctcaaaaggtctagaaccagagacccacgaacgtttatcaactatcctagaagaagaaattccagctcattttcgtagtgaagtggtcgttgtatcaggtcctagtcatgctgaagaaactatcgttcgcgatattactctcatcacggcagcctcaaaagatattgaagctgcaaagtatgttcagtccctctttagtaaccactacttccgactttataccaataccgacgtcatcggagttgaaacagctggtgccctcaaaaacattattgctgttggagcaggagctctccatggacttgggtatggagataatgccaaagcagcggtaattactcgtgggttagctgaaatcacccgtctaggcgtcaagcttggtgctgacccgttaacctacagtgggttatctggtgttggtgatctaattgtaacaggtacttctgtccattcacgtaactggcgggctggagctgcccttggacgtggtgaaaaattagaagatattgaacgcaacatgggtatggttatcgaaggtatcgcaacaactaaggtagcctatgaaattgcccaagacctcggagtttacatgccaattacaacagctatttataagtccatctacgagggcgctgatatcaaagaaagcatcctcggcatgatgtcaaatgaatttcgttctgaaaatgaatggcat

SEQ ID NO: 854 - protein, 338 aa, Streptococcus pyogenes
MTKQKVAILGPGSWGTALSQVLNDNGHDVRLWGNIPDQIEEINTKHTNRHYFKDIVLDKNITATLDLGQALSDVDAVLFVVPTKVTRLVARQVAAILDHKVVVMHASKGLEPETHERLSTILEEEIPAHFRSEVVVVSGPSHAEETIVRDITLITAASKDIEAAKYVQSLFSNHYFRLYTNTDVIGVETAGALKNIIAVGAGALHGLGYGDNAKAAVITRGLAEITRLGVKLGADPLTYSGLSGVGDLIVTGTSVHSRNWRAGAALGRGEKLEDIERNMGMVIEGIATTKVAYEIAQDLGVYMPITTAIYKSIYEGADIKESILGMMSNEFRSENEWH

SEQ ID NO: 855 - DNA, 897 bp, Streptococcus agalactiae
atgaaagtcagaaaagcagttatccctgccgctggtttaggaacacgttttttacctgctactaaagctttagctaaagaaatgcttccaatcgttgataaaccaactattcaatttattgttgaagaagcactaaaatctggaattgaagatattttagttgtaactggtaaatcaaaacgttctatagaagaccactttgattcaaattttgaattagaatataacctaaaagagaaagggaaaaacgaacttctcaaacttgttgatgaaacaactggcattcgactccattttattcgacaaagtcatcctcgtgggcttggagatgctgtgctacaagcaaaagccttcgttggtaatgaaccttttgttgttatgctaggtgatgatctaatggatattaccaataataaagttattcctctcaccaaacaattaattaatgactttgaagctactcatgcatcaacaattgctgttatggaagttccacatgaagatgtttctgcttatggtgttattgctccacaaggagaaggagttaatggtctatatagcgttaacactttcgttgaaaaaccttctcccgaagaggctccaagtaatttggcaatcattggtcgctacttgttaactccagaaatttttaatattttagaaactcaaaaacctggtgcaggaaatgagattcaactaaccgatgctatcgatactttaaataaaacgcaacgtgtttttgctagaaaatttacaggagaccgttacgacgttggtgacaagtttggttttatgaaaacatctattgattatgctcttcaacacccacaagttaaagatgacttgaagaaatatatcattgatttaggaaaatctctagaaaaaacatctaagaag

SEQ ID NO: 856 - protein, 299 aa, Streptococcus agalactiae
MKVRKAVIPAAGLGTRFLPATKALAKEMLPIVDKPTIQFIVEEALKSGIEDILVVTGKSKRSIEDHFDSNFELEYNLKEKGKNELLKLVDETTGIRLHFIRQSHPRGLGDAVLQAKAFVGNEPFVVMLGDDLMDITNNKVIPLTKQLINDFEATHASTIAVMEVPHEDVSAYGVIAPQGEGVNGLYSVNTFVEKPSPEEAPSNLAIIGRYLLTPEIFNILETQKPGAGNEIQLTDAIDTLNKTQRVFARKFTGDRYDVGDKFGFMKTSIDYALQHPQVKDDLKKYIIDLGKSLEKTSKK

SEQ ID NO: 857 - DNA, 912 bp, Streptococcus pyogenes
atgaccaaagtcagaaaagccattattcctgctgcaggtctaggaacacgttttttacctgctaccaaagctcttgccaaagagatgttgcccatcgttgataaaccaaccatccagtttatcgtcgaagaagcgctaaaatctggcatcgaggaaatccttgtggtgaccggaaaagctaaacgctctatcgaggaccattttgattcaaactttgaattagaatacaacctccaagctaaggggaaaaatgaactgttgaaattagtggatgaaaccactgccattaaccttcattttatccgtcaaagccacccaagagggctgggagatgctgtcttacaagccaaagcctttgtgggcaatgaaccctttgtggtcatgcttggagatgacttaatggacattacaaatgcatccgctaaacctctcaccaaacaactcatggaggactatgacaagacgcatgcatccactatcgctgtgatgaaagttcctcatgaagatgtgtctagctatggggttatcgctcctcaaggcaaggctgtcaagggcctttacagtgtagacacctttgttgaaaaaccacaaccagaagatgcgcctagtgatttggctattattggtcgttacctcctaacccctgaaatttttggtattttggaaagacagacccctggagcaggtaacgaagtgcaactcacagatgctatcgataccctcaataaaactcagcgtgtctttgcacgagaatttaaaggcaatcgttacgatgttggggataaatttggattcatgaaaacatctatcgactatgccttagaacacccacaggtcaaagaggacttgaaaaattacattatcaaactaggaaaagctttggaaaaaagtaaagtaccaacacattcaaag

SEQ ID NO: 858 - protein, 304 aa, Streptococcus pyogenes
MTKVRKAIIPAAGLGTRFLPATKALAKEMLPIVDKPTIQFIVEEALKSGIEEILVVTGKAKRSIEDHFDSNFELEYNLQAKGKNELLKLVDETTAINLHFIRQSHPRGLGDAVLQAKAFVGNEPFVVMLGDDLMDITNASAKPLTKQLMEDYDKTHASTIAVMKVPHEDVSSYGVIAPQGKAVKGLYSVDTFVEKPQPEDAPSDLAIIGRYLLTPEIFGILERQTPGAGNEVQLTDAIDTLNKTQRVFAREFKGNRYDVGDKFGFMKTSIDYALEHPQVKEDLKNYIIKLGKALEKSKVPTHSK

SEQ ID NO: 859 - DNA, 1110 bp, Streptococcus agalactiae
atgatttttttatgttatgatagaaatctgtttttatgtgactataacttattaggaggttcattctcggtgaacagaaaaattattggcttaactctactatctttatctgtactaacattaacagcatgtggtaatcgttcagataagtctgcaaataaatcagatatcaaagttgcgatggtaactaatcaaggtggagtagacgataaatcgtttaatcaatcagcttgggaagggctacaaaagtggggaaaaaagaaggggttgacaaaaggtaatggctttgattatttccagtcatctaatgaatcagatcatgctaataaccttgatacggcagcctctagtggttataatttaatttttggtattggatttggtcttcatgatactattgaaaaagtatcagaaaataataaagatgttaaatacgttattgtagatgatatcattaaaggtaaagaaaatgtagctagtgttacttttgcagacaatgaagctgcttacttagctggagttgctgcagctaagacaactaagacaaaaacagttggttttatcggagggatggaaggcgtcgttgttaagcgatttgaagcaggatttaaggctggagtaaaatcaattgatccggctattaaagttgcggtatcttatgcaggctcatttacagatgcagctaaaggtaaaacgattgctgccacacagtatgcaacaggtgttgatgttatttaccaggctgctggtggtacaggagcaggaatttttagtgaggctaaaactgaaaatgagacccgcaaggaatctaacaaagtctgggtaattggtgttgacagagatcaaagtcaagaaggcaattatgtttcaaaagatggtaagaaagcaaactttgttctggcatctactataaaagaggtggggaaatctctccaatctgtagcagaattaacagagaaaaaacaatatccaggagggaaagtaacagtttttggtctaaaggatagtggtgtagatattaaagagcatcaattgtctagtgagggatctgttgctgtcaaaaaagctaaagaggatattgtttcagggaaaatacaagttcctatgaaa

SEQ ID NO: 860 - protein, 370 aa, Streptococcus agalactiae
MIFLCYDRNLFLCDYNLLGGSFSVNRKIIGLTLLSLSVLTLTACGNRSDKSANKSDIKVAMVTNQGGVDDKSFNQSAWEGLQKWGKKKGLTKGNGFDYFQSSNESDHANNLDTAASSGYNLIFGIGFGLHDTIEKVSENNKDVKYVIVDDIIKGKENVASVTFADNEAAYLAGVAAAKTTKTKTVGFIGGMEGVVVKRFEAGFKAGVKSIDPAIKVAVSYAGSFTDAAKGKTIAATQYATGVDVIYQAAGGTGAGIFSEAKTENETRKESNKVWVIGVDRDQSQEGNYVSKDGKKANFVLASTIKEVGKSLQSVAELTEKKQYPGGKVTVFGLKDSGVDIKEHQLSSEGSVAVKKAKEDIVSGKIQVPMK

SEQ ID NO: 861 - DNA, 1050 bp, Streptococcus pyogenes
atgaacaagaaatttattggtcttggtttagcgtcagtggctgtgctgagtttagctgcttgtggtaatcgtggtgcttctaaaggtggggcatcaggaaaaactgatttaaaagttgcaatggttaccgatactggtggtgtagatgacaaatcattcaaccaatcagcatgggaaggcctgcaatcttggggtaaagaaatgggccttcaaaaaggaacaggtttcgattattttcaatctacaagtgaatctgagtatgcaactaatctcgatacagcagtttcaggagggtatcaactgatttatggtatcggctttgcattgaaagatgctattgctaaagcagctggagataatgaaggagttaagtttgttattatcgatgatattatcgaaggaaaagataatgtagccagtgttacctttgccgaccatgaagctgcttatcttgcaggaattgcagctgcaaaaacaacaaaaacaaaaacagttggtttcgtgggcggtatggaaggaactgtcataactcgatttgaaaaaggttttgaagcaggagttaagtctgttgacgatacaatccaagttaaagttgattatgctggatcatttggtgacgctgcaaaaggaaaaacaatcgcagcagctcagtatgcagcaggtgctgatgttatttaccaggcagcaggaggcactggagcaggtgtatttaatgaagcaaaagctattaatgaaaaacgtagtgaagctgataaagtttgggttattggtgttgaccgtgatcaaaaagacgaaggaaaatacacttctaaagatggcaaagaagcaaactttgtacttgcatcatcaatcaaagaagtcggtaaagctgttcagttaatcaacaagcaagtagcagataaaaaattccctggaggaaaaacaactgtctatggtctaaaagatggcggtgttgaaatcgcaactacaaatgtttcaaaagaagctgttaaagctattaaagaagcgaaagcaaaaattaaatctggtgacattaaagttcctgaaaaa

SEQ ID NO: 862 - protein, 350 aa, Streptococcus pyogenes
MNKKFIGLGLASVAVLSLAACGNRGASKGGASGKTDLKVAMVTDTGGVDDKSFNQSAWEGLQSWGKEMGLQKGTGFDYFQSTSESEYATNLDTAVSGGYQLIYGIGFALKDAIAKAAGDNEGVKFVIIDDIIEGKDNVASVTFADHEAAYLAGIAAAKTTKTKTVGFVGGMEGTVITRFEKGFEAGVKSVDDTIQVKVDYAGSFGDAAKGKTIAAAQYAAGADVIYQAAGGTGAGVFNEAKAINEKRSEADKVWVIGVDRDQKDEGKYTSKDGKEANFVLASSIKEVGKAVQLINKQVADKKFPGGKTTVYGLKDGGVEIATTNVSKEAVKAIKEAKAKIKSGDIKVPEK

SEQ ID NO: 863 - DNA, 675 bp, Streptococcus agalactiae
atgtctatgaagaagttcgctaaagagtatccgacgacagtactcttggtcagtctgacaacccttgtttttttattgatgcaactaacttatggaagtcaagcggagtctagccaagttatttttcaatttggtggaatacaaggtgattatctaaaagcatatccaacaaatctatggagactaataagtcctatctttgttcatattggttgggaacattttttattaaatggtttagctctgtatttcgtaggacaaatgggggaaagtatttggggaagtttgagatttctaattctctatattttatctggcttaatgggtaatatttttacgctattttttactccacatgtggtggcagcaggagcctcaacgtctttatttggtgttttttctgctatagcaatcgcagggtattttggaaaaaatccttatttaaaacaagttggaaaatcatatcaagtgatgatcttgttaaatttattttttaatatcttcacacccggagtgagtttagcaggtcatgttggtggtttagttggtggagtattggtggctatttttttgacaaaacaaaatggttctttattatttaaaacttggcaaagtattttagctttaatgatatttattattgtatcgatcagcttaataggtctatcgttggta

SEQ ID NO: 864 - protein, 225 aa, Streptococcus agalactiae
MSMKKFAKEYPTTVLLVSLTTLVFLLMQLTYGSQAESSQVIFQFGGIQGDYLKAYPTNLWRLISPIFVHIGWEHFLLNGLALYFVGQMGESIWGSLRFLILYILSGLMGNIFTLFFTPHVVAAGASTSLFGVFSAIAIAGYFGKNPYLKQVGKSYQVMILLNLFFNIFTPGVSLAGHVGGLVGGVLVAIFLTKQNGSLLFKTWQSILALMIFIIVSISLIGLSLV

SEQ ID NO: 865 - DNA, 699 bp, Streptococcus pyogenes
atgatattgctgtttaggaggtttatcttagatgacacagttattaaaacgatatcctattactattttccttttagggttaacaggcttaatttttatagcaatgcaagtggtatatggacatttagcaactggtgctcaagctatttatcaagttggaggtatgtttggattactagtaaaagcaatgccagaccagttgtggcgattggtgactccgatatttattcatatcggctttggtcatttttttgtcaatggattaacactatattttgttggtcaaatcgtcgaagacctctggggctcacgccttttttattactttatgttttatcaggtgttatgggcaatgcctttactttttggttgactcctgaaacagtagctgcaggagcatcgacgtcgttatttggactttttgctgctattgtagtattgagttttttgggtaagaaccaagcgttgaaagatttgggcaagtcataccagacgttaattgtagtcaatttactgatgaatctttttatgccaaacgtgagtatggcaggccatattggcggtgtcgtgggtggtgcgttactgagtatagtttttccaactaagatgagagtgataacagtgaagaaaaccaagcgaatgttggctttagtgagctatggtattattttggttggtgtgttagtgcttgggttttta

SEQ ID NO: 866 - protein, 233 aa, Streptococcus pyogenes
MILLFRRFILDDTVIKTISYYYFPFRVNRLNFYSNASGIWTFSNWCSSYLSSWRYVWITSKSNARPVVAIGDSDIYSYRLWSFFCQWINTIFCWSNRRRPLGLTPFLLLYVLSGVMGNAFTFWLTPETVAAGASTSLFGLFAAIVVLSFLGKNQALKDLGKSYQTLIVVNLLMNLFMPNVSMAGHIGGVVGGALLSIVFPTKMRVITVKKTKRMLALVSYGIILVGVLVLGFL

SEQ ID NO: 867 - DNA, 525 bp, Streptococcus agalactiae
atggaaaagaaattattaagaaaagaagttttgataaccttaaaatctcaacctcaagcttacaaatcagaagttgactgtaaacttttagaggcttttataaaaactaaagcttatcaaaatagttgtgtaattgctacttacctatcttttgactacgaatacaatacacaacttcttattaaacaagctttatgtgatggcaaacgtgtccttgttcccaaaacttatccaaaaggtaaaatgatttttgtggactatcaaaaagataacttgaggacaacaccgtttggcttattagaacctgttaatgatagagctgttgaaaaagctagtatagacttaattcatgtgcccggacttatctttaacaataaaggttttcgtataggttatggtgcaggttattttgatcgctatttgagtgattttgaaggtgatactattagtactatttataggtgtcagagacaggattttgtagaagagaagcatgacgtagcagttaaggaggtattatgtcta

SEQ ID NO: 868 - protein, 175 aa, Streptococcus agalactiae
MEKKLLRKEVLITLKSQPQAYKSEVDCKLLEAFIKTKAYQNSCVIATYLSFDYEYNTQLLIKQALCDGKRVLVPKTYPKGKMIFVDYQKDNLRTTPFGLLEPVNDRAVEKASIDLIHVPGLIFNNKGFRIGYGAGYFDRYLSDFEGDTISTIYRCQRQDFVEEKHDVAVKEVLCL

SEQ ID NO: 869 - DNA, 1203 bp, Streptococcus agalactiae
atggacctcccagaaaactatgacaaagaagaattttctcgcattcaaaaagccgctgaaaagattaaatcagatagcgaagtactcgtggttattggtattggtggttcgtaccttggcgcaaaagcagcaattgactttttgaataatcattttgctaatttgcaaaccgcagaagaacgtaaagcgcctcagattctttatgctggaaattctatttcatctacttaccttgccgatttagttgaatacgtccaagataaagaattctcagtaaatgtcatttcaaaatcaggtacaacaactgaaccagcgattgctttccgtgtatttaaagaacttctagttaaaaagtacggtcaagaagaagctaataaacgtatctacgctacaactgataaagttaaaggtgccgtaaaagttgaagcagatgctaacaattgggaaacatttgtagttcctgataatgttggtggtcgtttctcagtactgacagccgtaggtcttcttccaattgctgcttcaggagcagatattactgctcttatggaaggcgcaaatgctgctcgtaaagatttatcttcagataaaatctctgaaaacattgcttatcagtacgctgcagttcgtaatgttctttatcgcaaaggttatatcacagagattttagctaactacgaaccatcattacaatactttggtgaatggtggaaacaattagcaggtgaatcagaaggtaaagatcaaaaaggtatctatcctacatcagcaaacttctcaactgatcttcactcacttggtcaatttattcaagaaggttaccgtaacctctttgagacagttgttcgcgttgagaaacctcgtaaaaatgtgactattcctgaattaaccgaagatttagatggtcttggttatcttcaaggaaaagatgtagattttgttaataaaaaagcaacagatggtgtactccttgctcatacagatggtggggttccaaatatgtttgtaacgcttcctacacaagacgcttacacccttggttacactatttacttctttgagttagcaattggcctttcaggttatcttaactcagtaaatccatttgatcaaccaggggtagaagcatataaacgtaatatgtttgctcttctaggtaaacctggattcgaagagcttagcgctgaattgaatgcacgtctt

SEQ ID NO: 870 - protein, 401 aa, Streptococcus agalactiae
MDLPENYDKEEFSRIQKAAEKIKSDSEVLVVIGIGGSYLGAKAAIDFLNNHFANLQTAEERKAPQILYAGNSISSTYLADLVEYVQDKEFSVNVISKSGTTTEPAIAFRVFKELLVKKYGQEEANKRIYATTDKVKGAVKVEADANNWETFVVPDNVGGRFSVLTAVGLLPIAASGADITALMEGANAARKDLSSDKISENIAYQYAAVRNVLYRKGYITEILANYEPSLQYFGEWWKQLAGESEGKDQKGIYPTSANFSTDLHSLGQFIQEGYRNLFETVVRVEKPRKNVTIPELTEDLDGLGYLQGKDVDFVNKKATDGVLLAHTDGGVPNMFVTLPTQDAYTLGYTIYFFELAIGLSGYLNSVNPFDQPGVEAYKRNMFALLGKPGFEELSAELNARL

SEQ ID NO: 871 - DNA, 1347 bp, Streptococcus pyogenes
atgtcacatattacatttgattattcaaaagtcctcgagtcatttgcgggacaacatgaaattgattttttacaaggccaagtaacagaagctgacaagttattgcgtgaaggaactggaccaggttcagatttcttgggctggcttgatcttccagaaaactatgataaagatgaatttgcacgtatcttgactgctgctgaaaagattaaggcagacagcgaagttcttgtggtgatcggtatcggtgggtcataccttggtgccaaagcagcgattgattttttaaatcatcattttgctaacttgcaaactgccaaagagcgcaaagccccacaaattctttacgctggaaactctatttcatctacttaccttgccgatttagttgaatacgttcaagacaaagagttctcagtaaacgtgatctctaaatcaggtacaaccactgaaccagctattgcctttcgcgtgttcaaagaacttttggttaaaaaatatggccaagaagaagctaacaaacgtatctacgctaccacagacaaagttaagggtgctgttaaggtagaagctgacgctaacaactgggaaacatttgtggtgccagataatgttggtggtcgtttctcagtcttgactgctgttggtttgcttccaattgctgcatcaggtgcagatattactgctcttatggaaggggcaaatgctgctcgtaaagacctttcttcagacaaaatctctgaaaacattgcttaccaatacgctgctgttcgtaatgtgctttaccgtaaaggctacatcactgaaatcttggctaactacgagccatctcttcagtactttggcgaatggtggaaacaattagctggtgaatcagaaggaaaagatcaaaaagggatttacccaacttcagctaacttctcaacagaccttcactcacttggtcaatttatccaagaaggttaccgtaatctctttgaaacagttattcgtgttgataatcctcgtaaaaatgttatcattcctgaattagcagaagacctagatggacttggttaccttcaaggtaaagacgttgatttcgttaacaagaaagctacagatggtgtgcttcttgcccacacagatggcggcgtgccaaacatgtttgtcactcttccagctcaagacgagtttacccttggttacactatttacttctttgagcttgccatcgctgtttcaggctacatgaatgctgttaacccatttgatcaaccaggtgttgaagcttacaaacgtaacatgtttgcgcttcttggaaaaccaggttttgaagcattatcagcagagcttaatgctcgcctc

SEQ ID NO: 872 - protein, 449 aa, Streptococcus pyogenes
MSHITFDYSKVLESFAGQHEIDFLQGQVTEADKLLREGTGPGSDFLGWLDLPENYDKDEFARILTAAEKIKADSEVLVVIGIGGSYLGAKAAIDFLNHHFANLQTAKERKAPQILYAGNSISSTYLADLVEYVQDKEFSVNVISKSGTTTEPAIAFRVFKELLVKKYGQEEANKRIYATTDKVKGAVKVEADANNWETFVVPDNVGGRFSVLTAVGLLPIAASGADITALMEGANAARKDLSSDKISENIAYQYAAVRNVLYRKGYITEILANYEPSLQYFGEWWKQLAGESEGKDQKGIYPTSANFSTDLHSLGQFIQEGYRNLFETVIRVDNPRKNVIIPELAEDLDGLGYLQGKDVDFVNKKATDGVLLAHTDGGVPNMFVTLPAQDEFTLGYTIYFFELAIAVSGYMNAVNPFDQPGVEAYKRNMFALLGKPGFEALSAELNARL

SEQ ID NO: 873 - DNA, 2673 bp, Streptococcus agalactiae
gtgaaacatttaacaaatcaaaaggagtctcaaatgactgaaaaaactaaagcagtagaaactacagatgttgctcttgcaattgatacattggttcaaaatggtttaaaagcacttgatgagatgcgtcaacttaatcaagaacaagttgattatattgtagctaaagcttctgttgcagccttggatgcccatggagaacttgctcttcatgcagtagaagaaactggtcgtggtgtctttgaagataaagcgacaaaaaatttatttgcatgtgaacacgtcgttaacaacatgcgtcatacaaagacagtgggagttattgaagaagacgatgtcacaggcttgacattaattgctgaaccagtgggagttgtctgtggtatcacgccaacaaccaacccaacttcaactgctattttcaagtcattaatctctcttaaaacacgtaatccaattatttttgccttccacccatcagcacaagaatcatcagcacatgcagcacgtattgttcgtgatgctgctattgctgctggagctcctgaaaattgtgtccaatggattgaacaaccatcaattgatgcaactaatgctttgatgaaccatgatggtattgccactatccttgcgacaggtggtaatgcgatggttaaagctgcctactcatgtgggaaacctgcccttggtgtaggtgctgggaatgttccagcttatgttgaaaaatcagctaatatccgacaagccgctcacgatattgttatgtctaaatcatttgataacggtatggtatgtgcatcagaacaggctgttattattgataaagaaatttataaagaatttgttgaagaatttaaatcttatcatacctatttcgttaataagaaagaaaaagctcttcttgaagaattctgttttggtgcaaaagcaaatagcaaaaactgtgctggtgcaaaattaaatccaaatattgttggaaaatcagcagtttggattgctgaacaagctggatttactgttccagaaggaacaaatattcttgccgcagaatgtactgaagttagtgaaaaagaacctttgacacgtgaaaaactatcacctgttattgcagtattgaaagctgaatctacagaagatggtgttgaaaaagctcgtcaaatggttgagtttaatggtctagggcactcagctgctattcatacaaaagatgcagacttagctcgtgaatttggaactagaattcgtgctatccgtgttatttggaattctccttctacttttggtggtattggggatgtttacaatgctttcttgccatcattgactcttggttgtggttcgtatggacgtaactcagttggtgataacgttagtgctataaatctcttgaatatcaaaaaagtaggaagacgtagaaataatatgcaatggtttaaagtcccttcaaaaacatacttcgaacgtgattctattcaatatttgcaaaaatgtcgcgatgttgaacgtgtcatgattgttacagatcacgccatggttgagcttggtttcttggatcgtatcattgaacaacttgatcttcgtcgcaataaagttgtttatcagatttttgctgaagtagaaccagatccagacattacaacagtaatgaaaggaacagatttgatgcgtaccttcaaaccagacactattattgcattaggtggtggttctcctatggatgctgcgaaagttatgtggctcttctatgaacaaccagaagttgatttccatgacctcgttcaaaaattcatggatatccgtaaacgtgcgttcaaattcccagaacttggtaagaaaacaaaatttgttgctattccaacaacttctggaacaggttctgaagtgacaccatttgccgttatctctgacaaagcaaataatcgtaaatatccaatcgctgattattcattaacaccaactgtagctatcgttgatccggcccttgttatgactgttcctggttttattgcggctgatacgggtatggatgtattgacacatgcaacagaggcttatgtttcacagatggcaaatgattatacagacggacttgctcttcaagcaattaaaattgtgtttgactacttagaacgctcagtaaaagatgctgattttgaagcacgtgaaaagatgcacaatgcgtcaactatggcaggtatggctttcgccaatgcattcttaggtatttctcactcaatggcgcataaaattggcgcacaattccataccgtacacggacgtacaaatgcaattcttttgccgtatgttatccgctataatggaactcgtccagctaaaacagcaacatggcctaagtacaattactatcgtgctgacgaaaagtatcaagatatcgctaaattactcggcttaccagcagcaacaccagaagaagctgtcgaatcatatgcaaaagctgtgtatgaccttggaacacgtttaggtattaagatgaatttccgcgaccaaggcattgatgaaaaagaatggaaagaaaaatctcgtgaactagctttcttagcatatgaagatcaatgttcaccagcaaatccacgccttccgatggtagatcacatgcaagaaatcatcgaagatgcttattatggttatgaggaacgtccaggacgtcgtaag

SEQ ID NO: 874 - protein, 891 aa, Streptococcus agalactiae
MKHLTNQKESQMTEKTKAVETTDVALAIDTLVQNGLKALDEMRQLNQEQVDYIVAKASVAALDAHGELALHAVEETGRGVFEDKATKNLFACEHVVNNMRHTKTVGVIEEDDVTGLTLIAEPVGVVCGITPTTNPTSTAIFKSLISLKTRNPIIFAFHPSAQESSAHAARIVRDAAIAAGAPENCVQWIEQPSIDATNALMNHDGIATILATGGNAMVKAAYSCGKPALGVGAGNVPAYVEKSANIRQAAHDIVMSKSFDNGMVCASEQAVIIDKEIYKEFVEEFKSYHTYFVNKKEKALLEEFCFGAKANSKNCAGAKLNPNIVGKSAVWIAEQAGFTVPEGTNILAAECTEVSEKEPLTREKLSPVIAVLKAESTEDGVEKARQMVEFNGLGHSAAIHTKDADLAREFGTRIRAIRVIWNSPSTFGGIGDVYNAFLPSLTLGCGSYGRNSVGDNVSAINLLNIKKVGRRRNNMQWFKVPSKTYFERDSIQYLQKCRDVERVMIVTDHAMVELGFLDRIIEQLDLRRNKVVYQIFAEVEPDPDITTVMKGTDLMRTFKPDTIIALGGGSPMDAAKVMWLFYEQPEVDFHDLVQKFMDIRKRAFKFPELGKKTKFVAIPTTSGTGSEVTPFAVISDKANNRKYPIADYSLTPTVAIVDPALVMTVPGFIAADTGMDVLTHATEAYVSQMANDYTDGLALQAIKIVFDYLERSVKDADFEAREKMHNASTMAGMAFANAFLGISHSMAHKIGAQFHTVHGRTNAILLPYVIRYNGTRPAKTATWPKYNYYRADEKYQDIAKLLGLPAATPEEAVESYAKAVYDLGTRLGIKMNFRDQGIDEKEWKEKSRELAFLAYEDQCSPANPRLPMVDHMQEIIEDAYYGYEERPGRRK

SEQ ID NO: 875 - DNA, 2640 bp, Streptococcus pyogenes
atgactgaaggacataatactgttgaaacaacctctgtttctgtgacaattgatgctcttgttcaaaaaggtttagctgctcttgaagagatgcgtaagcttgaccaagaacaagttgattatatcgtagccaaagcttctgttgctgctttggatgctcacggtgaacttgctaaacatgcttatgaagaaacaggtcgcggtgtctttgaagataaagcaacaaaacatctatttgcttgtgagcatgtggttaataacatgcgccatcaaaaaacagtaggaattattgaagaagatgatgtgacaggtttgacattaattgctgagccggtgggtgttatctgtgggattacaccaacaactaacccaacttcaacagctatctttaaatctttgatttcgttaaaaacacgtaatccaattatttttgcctttcacccatcagcacaagaatcatcagcacatgccgctcgtattgttcgtgatgctgctattgccgctggtgctcctgaaaattgtgtgcagtgggttgaaacaccatcacttgaagcaacaaatgctttgatgaatcatgacggcattgccactatccttgcgacaggtggaaatgcgatggttaaagcggcatactcatgtgggaaacctgcccttggggtaggtgctggtaacgttccagcttatgttgaaaaatcagctaatatccgtcaagccgctcatgatattgtgatgtctaaatcatttgataatggtatggtctgtgcctctgaacaagctgttatcatcgataaagaaatctatgacgattttgtagcagaattcaaatcttaccatacttattttgtaaataaaaaagaaaaagcccttcttgaagaattctgttttggtgccaaagcaaatagcaaaaactgtgctggtgcaaaattaaatccaaatattgtaggaaaaccagctacttggattgcagaacaagctggatttactgttccagaaggaaccaatattcttgctgcagaatgtaaagaagtttcagaaaatgagcctttaacacgtgaaaaattatctccagtcattgctgttttaaaatctgaatcacgtgaagacggtgttgaaaaagctcgtcaaatggttgaatttaatggactcggtcactcagctgccattcatacagcagatgcagaattggcaaaagaatttggaactagaatccgtgctatccgcgtcatctggaattcaccttctacatttggtggtatcggggatgtttacaatgctttcttaccatcattgactcttggttgtggttcgtatggacgtaacgcagttggtgataacgttagtgctataaatctcttgaacatcaaaaaagtaggaagacgtagaaataatatgcaatggtttaaagttccttcaaaaacatacttcgaacgtgattcaattcaatatttgcaaaaatgtcgtgacgttgaacgtgtcatgattgttacagatcacgctatggttgagcttggtttcttggatcgtatcattgaacaacttgatcttcgtcgcaataaagttgtttatcagatctttgctgaagtagaaccagatccagacattacaactgttatgaaaggtactgaattaatgcgtaccttcaaaccagacaccattattgcccttggcgggggatcccctatggatgcagccaaagttatgtggctcttctacgagcaaccagaagttgatttccatgacctcgttcaaaaattcatggatatccgcaaacgtgcgttcaaattcccagaacttggtaagaaaacaaaatttgttgctatcccaacaacttctggaacaggttcagaggtgacaccatttgccgttatctctgacaaagcaaataatcgtaaatatccaatcgctgattactcattaacaccaactgtagccattgttgacccagctttggtattgactgttccaggctttattgctgctgatactggtatggacgttttgacacacgcaaccgaagcttacgtgtcacaaatggccaatgactttacggatggtttagctcttcaagccattaaaattgtttttgataatcttgaaaaatcagttaaaacagccgattttgaagcacgtgaaaagatgcataatgcgtcaactatggcaggtatggctttcgccaatgcattcttaggtatttctcactcaatggcgcataaaattggcgcacaattccataccgtacacggacgtacaaatgcaattcttttgccgtatgttatccgctataatgggactcgtccagctaaaacggcgacatggcctaagtataattactaccgtgcggatgaaaaataccaagacattgcgaaattgttagggcttccagcttctacaccagaagaagcagtggaatcttatgcgaaagctgtttatgatctgggttgccgagttggtattcaaatgaacttcaaagctcaaggtatcgacgaaaacgaatggaaagaacattctcgtgaattggcttaccttgcttatgaagaccaatgttcacctgctaacccacgtcttccaatggttgatcacatgcaagaaattattgaagatgcttactatggttatgctgaacgtccaggacgacgtaag

SEQ ID NO: 876 - protein, 880 aa, Streptococcus pyogenes
MTEGHNTVETTSVSVTIDALVQKGLAALEEMRKLDQEQVDYIVAKASVAALDAHGELAKHAYEETGRGVFEDKATKHLFACEHVVNNMRHQKTVGIIEEDDVTGLTLIAEPVGVICGITPTTNPTSTAIFKSLISLKTRNPIIFAFHPSAQESSAHAARIVRDAAIAAGAPENCVQWVETPSLEATNALMNHDGIATILATGGNAMVKAAYSCGKPALGVGAGNVPAYVEKSANIRQAAHDIVMSKSFDNGMVCASEQAVIIDKEIYDDFVAEFKSYHTYFVNKKEKALLEEFCFGAKANSKNCAGAKLNPNIVGKPATWIAEQAGFTVPEGTNILAAECKEVSENEPLTREKLSPVIAVLKSESREDGVEKARQMVEFNGLGHSAAIHTADAELAKEFGTRIRAIRVIWNSPSTFGGIGDVYNAFLPSLTLGCGSYGRNAVGDNVSAINLLNIKKVGRRRNNMQWFKVPSKTYFERDSIQYLQKCRDVERVMIVTDHAMVELGFLDRIIEQLDLRRNKVVYQIFAEVEPDPDITTVMKGTELMRTFKPDTIIALGGGSPMDAAKVMWLFYEQPEVDFHDLVQKFMDIRKRAFKFPELGKKTKFVAIPTTSGTGSEVTPFAVISDKANNRKYPIADYSLTPTVAIVDPALVLTVPGFIAADTGMDVLTHATEAYVSQMANDFTDGLALQAIKIVFDNLEKSVKTADFEAREKMHNASTMAGMAFANAFLGISHSMAHKIGAQFHTVHGRTNAILLPYVIRYNGTRPAKTATWPKYNYYRADEKYQDIAKLLGLPASTPEEAVESYAKAVYDLGCRVGIQMNFKAQGIDENEWKEHSRELAYLAYEDQCSPANPRLPMVDHMQEIIEDAYYGYAERPGRRK

SEQ ID NO: 877 - DNA, 93 bp, Streptococcus agalactiae
gtgcattatagtgatagcgatactacaggggctgatttatatgttagtaacgtcaaaaaagctattcaaaaatcagctcaacgagctgcaaaa

SEQ ID NO: 878 - protein, 31 aa, Streptococcus agalactiae
MHYSDSDTTGADLYVSNVKKAIQKSAQRAAK

SEQ ID NO: 879 - DNA, 1773 bp, Streptococcus pyogenes
atgagaataaaatggttttcgtttgttagggtaacaggacttttactggttttactctaccacttttttaaaaatgtatttccaggaggttttattggtgttgacattttcttcaccttttcaggatatctaatcacagccctcttgattgatgaatacacaaaaaaagagtctatcgatattatcggttttttaaaaagacgcttttatcgaattgttcctcctttggtgttaatgattttattgaccattccttttacgtttttaattaagaaggatttcattgctaatataggaagtcagattacagctgttttaggatttaccactaatatttatgaaatattgacgggaagtagttatgaaagccaatttattccacatctctttgttcatacgtggagcttagctattgaagttcatttttacttgttttggggtgtatttgtttggttattagctagacgcaaggagactcagaaacaactgagaggactactgtttttgatttctttgggaatatttgctattagtttcttgagcatgtttataagatcttttatgacctcaaatttttccctgatttatttttcgagtctttctcacagttttcccttctttttaggggcgatgtttgccacgataacaggtattaacgagactactgttcgatttcaaaaaaatgtacgtttatggccgcgccagtatgtccttgctgctatgattggagcatttacacttttgcttgtgctaacggtcacattggattttaaccatatcacgacctatctatttggctttgctttggctagcttattcgcatcaattatgatttatgcagcgcgtgttcttcatgagcaaacaccagatgtacaagagcctaaagctatcacttatatagctgatattagctatgggatttacctcttccattggccattttacattatttttagccaattaatgtctcatattttggcagttattctaacagttttcttttcaatcttgtttgccactgtgtcttactatattgtggaacctttggtccaagggagaaaaccaaacctgcttggtttagaaattgactgttctccttactataagtggattgtaggagggtctctcgccttagcattattaactttaggaacttgtatgatagcgcctaaagttggtaagtttgagaaacaattgttggtcagttccctacaacaggctcaaagtaatatggagcggacacatacactagctgcaggagacgctaatgctttgagtgacgtaggtattattggtgattctgtagcattacgctctagtgcagcattctcacaaattatgccacaagcgcaactggatgcagcggtcagtcggaattttaaagaagctttcgatttatttaataaccaaattaaatctaagagtctatctaagactgttgtcttagcagtaggtgttaactcgcttgacaactattctcaagcagttcagtcttttattgaggcattgccaaaaggtcatcgtttagttttggtttctccatataatgccaaaaatgccagtcaggttgcagaagctagagactatggtcttaaattgtccaaaaaatacaagtatgtcactattgcagactggtataaagttgctgttgaacatccagatatttggtatggcagtgatggtgttcattatagtgaagatagtcaaggagcagaactatatgtctccacaatccagactgctgttgagaagtcagctaaaaaaccagctaaa

SEQ ID NO: 880 - protein, 591 aa, Streptococcus pyogenes
MRIKWFSFVRVTGLLLVLLYHFFKNVFPGGFIGVDIFFTFSGYLITALLIDEYTKKESIDIIGFLKRRFYRIVPPLVLMILLTIPFTFLIKKDFIANIGSQITAVLGFTTNIYEILTGSSYESQFIPHLFVHTWSLAIEVHFYLFWGVFVWLLARRKETQKQLRGLLFLISLGIFAISFLSMFIRSFMTSNFSLIYFSSLSHSFPFFLGAMFATITGINETTVRFQKNVRLWPRQYVLAAMIGAFTLLLVLTVTLDFNHITTYLFGFALASLFASIMIYAARVLHEQTPDVQEPKAITYIADISYGIYLFHWPFYIIFSQLMSHILAVILTVFFSILFATVSYYIVEPLVQGRKPNLLGLEIDCSPYYKWIVGGSLALALLTLGTCMIAPKVGKFEKQLLVSSLQQAQSNMERTHTLAAGDANALSDVGIIGDSVALRSSAAFSQIMPQAQLDAAVSRNFKEAFDLFNNQIKSKSLSKTVVLAVGVNSLDNYSQAVQSFIEALPKGHRLVLVSPYNAKNASQVAEARDYGLKLSKKYKYVTIADWYKVAVEHPDIWYGSDGVHYSEDSQGAELYVSTIQTAVEKSAKKPAK

SEQ ID NO: 881 - DNA, 684 bp, Streptococcus agalactiae
  misc_feature (1)..(684): n = a, c, g, or t
atgagaataaaatggttttctttggtacgtataacaggactactacttgttttactttaccatttctttaagaatagttttccaggaggatttgttggcgttgacatcttctttacattttctggttttctgattacggccttattgattgatgaattttctaaaacgaaaaaaattgattttgttagtttttgtcgtagacgtttttaccgtattttcccaccattagtattgatggttttggtgacaataccttttgtatttctggttaaaagcgattttagagcaagtattggctctcaaattatgactgctttaggttttaccagcaacttttacgaaatcttgactggtggtaactacgaaagtcaatttatccctcacttatttgtgcatacctggagtctttctattgaagtccatttttatgttttatggggcttaacggtatggctcttatcgaaaagatcaaaagatcaaaagcaattgagggggactttgttccttatttccatgggaatttttggagtcagcttccttaccatgtttgttagagcctttttcgttgataatttttcaacgatatatttctctacattatcacatatatttccgttctttttaggagcgatggtggctacaatatctggtattcgagagattaccggacgattcaagnnnnnt

SEQ ID NO: 882 - protein, 228 aa, Streptococcus agalactiae
  MISC_FEATURE (1)..(228): Xaa = Any Amino Acid
MRIKWFSLVRITGLLLVLLYHFFKNSFPGGFVGVDIFFTFSGFLITALLIDEFSKTKKIDFVSFCRRRFYRIFPPLVLMVLVTIPFVFLVKSDFRASIGSQIMTALGFTSNFYEILTGGNYESQFIPHLFVHTWSLSIEVHFYVLWGLTVWLLSKRSKDQKQLRGTLFLISMGIFGVSFLTMFVRAFFVDNFSTIYFSTLSHIFPFFLGAMVATISGIREITGRFKXX

SEQ ID NO: 883 - DNA, 378 bp, Streptococcus agalactiae
atgaagaattttaaaataacacgaactcatctagaaatattatctttgataattattgttgtttttggtttatcagtatttaccttaacgacttctagtcaaggagtctttagctatgatggcggcaagataaaatatgtgggctctattgttaatcaccatatgactggtaaaggtaaattaacctatgagaatggggattactataagggcgattttgtaaatggagtctttgaagggaaaggaacatttgtttcagttcatggctggtcttatacaggtgactttaaaaaaggtcaacctgatggacaaggtcgcctcaatgctaaaaataagaaagtctataaggggacatttaaacaggggatttatcaaaaa

SEQ ID NO: 884 - protein, 126 aa, Streptococcus agalactiae
MKNFKITRTHLEILSLIIIVVFGLSVFTLTTSSQGVFSYDGGKIKYVGSIVNHHMTGKGKLTYENGDYYKGDFVNGVFEGKGTFVSVHGWSYTGDFKKGQPDGQGRLNAKNKKVYKGTFKQGIYQK

SEQ ID NO: 885 - DNA, 399 bp, Streptococcus pyogenes
atgatagatatgcaagatatagtaaaaaaatggagtattacacgggcgaagttggaaattgtctcggtgattgtcatattggtttgtgcaatttctgtttttagcgtaagaatttcgaataagacaagtttgacctatgataaagggcgtatgcactatactggttacgtgattaaccataaaatgaatggagaagggaagcttgtctaccccaacggtgatatctatgagggtacttttaaggatggcctatttgaaggaaaaggaacttttactgctaagacgggctggttatataacggggagtttcataaaggacaagcaaatggcaaaggtgtgttaaaagcaaagaataataaagtctataaagggatttttaaacaggggatatttcaaaaa

SEQ ID NO: 886 - protein, 133 aa, Streptococcus pyogenes
MIDMQDIVKKWSITRAKLEIVSVIVILVCAISVFSVRISNKTSLTYDKGRMHYTGYVINHKMNGEGKLVYPNGDIYEGTFKDGLFEGKGTFTAKTGWLYNGEFHKGQANGKGVLKAKNNKVYKGIFKQGIFQK

SEQ ID NO: 887 - DNA, 996 bp, Streptococcus agalactiae
atgacaagatttttagatagtgatgcaatgggtgacgaagaattggtagaacgtacacttcgtccgcagtatttaagagagtatattggacaagataaggttaaagatcagctaaaaatatttattgaagctgctaaattgcgtgatgagtcattggatcatgtgttattatttggccctcctggtttagggaaaacaaccatggcatttgtaattgctaatgagttgggtgtcaatctcaaacaaacatcaggtcccgcaattgaaaaatcaggggatttagtagccattttaaatgatttagaaccaggtgatgttctttttattgatgaaattcatcgtatgccgatggcggttgaagaggtactttatagtgcaatggaagacttctatattgacattatgatcggtgcaggagaaactagtagaagtgttcatctagatttgccgccctttaccttaattggtgcaacgacacgtgcaggtatgttatctaatcccttacgtgctcgctttggtattacagggcatatggagtattatgaagaaaatgatttgacagaaattattgagcgtacagcagacatttttgaaatgaaaattacttatgaagctgcttctgaattagcgcgtcgcagtcgtggaacgccacgtatcgctaaccgtttattgaaacgtgttcgagattatgctcaaatcatgggagatggtttgatagatgacaatattacagataaagcattaacgatgttagatgttgatcacgaggggcttgattacgtcgatcaaaaaatcttaagaaccatgattgaaatgtataatggaggtcctgttggtttaggaactctatccgttaatattgctgaagaacgagatactgttgaagacatgtacgaaccttatttaattcaaaaaggttttattatgcgtacccgtaccggtcgtgtagctacggttaaggcatatgaacatttaggttatcagcgatttgataaa

SEQ ID NO: 888 - protein, 332 aa, Streptococcus agalactiae
MTRFLDSDAMGDEELVERTLRPQYLREYIGQDKVKDQLKIFIEAAKLRDESLDHVLLFGPPGLGKTTMAFVIANELGVNLKQTSGPAIEKSGDLVAILNDLEPGDVLFIDEIHRMPMAVEEVLYSAMEDFYIDIMIGAGETSRSVHLDLPPFTLIGATTRAGMLSNPLRARFGITGHMEYYEENDLTEIIERTADIFEMKITYEAASELARRSRGTPRIANRLLKRVRDYAQIMGDGLIDDNITDKALTMLDVDHEGLDYVDQKILRTMIEMYNGGPVGLGTLSVNIAEERDTVEDMYEPYLIQKGFIMRTRTGRVATVKAYEHLGYQRFDK

SEQ ID NO: 889 - DNA, 1068 bp, Streptococcus pyogenes
gtgctgttgactggtggcgattataataaaagtaggccactgctctcttttactttatgttataatagtcttatggctagaattttagacaataatgtaatgggaaatgaggagttttcggatcggactcttcgccctcaatatctacacgaatatattggacaagataaagttaaggaacaattcgctatttttatagaagcagctaaaagacgtgacgaatctttagaccatgttttattatttggacctccaggactgggaaaaacaacaatggcatttgtgattgccaatgaattgggagttaatttaaagcaaacttcaggtcctgccgttgagaaagctggagatttggtagctattttaaatgaattagaaccaggggatattttgtttattgatgaaattcaccgcatgccaatgtctgtcgaggaagtactatatagtgctatggaagacttctatattgatattatgattggcgctggagatactagtcgtagtattcatttggatctgcctccatttacattgattggtgctactacacgtgcaggcatgttatctaatcccctcagagctcgttttggtatcactggtcacatggaatactatcaagaaaaggatttgacagagattgtggagcgtacagctactatttttgaaataaaaatagaccatgaagctgcacggaaattagcttgtcgcagtagaggaacgccccgcattgctaatcgattactaaaacgagtgcgtgactatgctcaaattattggtgatggcatcataacggctcaaataactgatagagctttgactatgttagatgttgaccgcgaaggtctcgattacattgatcagaaaattttacgaacgatgattgagatgtatcagggagggccagttggtttggggacattatctgtgaatattgccgaggagcgtaatacagttgaagagatgtatgaaccctacttaattcaaaaaggctttctcatgcgaacacgaacaggtcgtgtagcgacgcaaaaggcttatcgtcatcttggctatccctatcaaaacact

SEQ ID NO: 890 - protein, 356 aa, Streptococcus pyogenes
VLLTGGDYNKSRPLLSFTLCYNSLMARILDNNVMGNEEFSDRTLRPQYLHEYIGQDKVKEQFAIFIEAAKRRDESLDHVLLFGPPGLGKTTMAFVIANELGVNLKQTSGPAVEKAGDLVAILNELEPGDILFIDEIHRMPMSVEEVLYSAMEDFYIDIMIGAGDTSRSIHLDLPPFTLIGATTRAGMLSNPLRARFGITGHMEYYQEKDLTEIVERTATIFEIKIDHEAARKLACRSRGTPRIANRLLKRVRDYAQIIGDGIITAQITDRALTMLDVDREGLDYIDQKILRTMIEMYQGGPVGLGTLSVNIAEERNTVEEMYEPYLIQKGFLMRTRTGRVATQKAYRHLGYPYQNT

SEQ ID NO: 891 - DNA, 909 bp, Streptococcus agalactiae
atgttaaaacattttggtagtaaagtaagaaatttgagagtaactagaaatattactcgcgaagatttttgtggtgatgaaactgagttatctgtaagacaattagctaggattgaaagtggacagtcaattccaaacttgactaaagctcactacatagctaaacaattgaatgtaaaattggatattttaacaggaggagagagcttagaattacctaaacggtataaagagttgaagtatttgattttaagaattccaacttatgcagatgctgaacgattaaaattaagagaatgtcagtttgatcatattttcgaagaattctatgataatcttccagaagacgagtgcttagcaattgacagtttacaagctaaatttgaagtctatcaaacaggagacattaattttggtgtggaggttttatgcgaatgctttgataaagtaaaatataaagaaaaatatactcttaatgatttgattatcatagatttgtttttaacttgtgcagttgtatctaaatttaacaatagagcatttactaaagaagtatttcaaactatatgtaaaactttgataagtcagaaccacaaacttacagcagaagatttgttttggtttaatcatgtactcctgaattgtgtatttgttggactttgtttaaatagtgaagagtgtcttgcagaaatgttagaagttagccgacaaacgatggtgtcaacacatgattttcataaaatgcctttatattttatgtaccaatggaaatacttcattacaattgacaatgatataaagtctgcagaaaatgcttaccaacaatcaattatgttttcaaaaatgattgatgacaagcatctaattaaaaaattagaattggagtggcaagaagatataacaggacat

SEQ ID NO: 892 - protein, 303 aa, Streptococcus agalactiae
MLKHFGSKVRNLRVTRNITREDFCGDETELSVRQLARIESGQSIPNLTKAHYIAKQLNVKLDILTGGESLELPKRYKELKYLILRIPTYADAERLKLRECQFDHIFEEFYDNLPEDECLAIDSLQAKFEVYQTGDINFGVEVLCECFDKVKYKEKYTLNDLIIIDLFLTCAVVSKFNNRAFTKEVFQTICKTLISQNHKLTAEDLFWFNHVLLNCVFVGLCLNSEECLAEMLEVSRQTMVSTHDFHKMPLYFMYQWKYFITIDNDIKSAENAYQQSIMFSKMIDDKHLIKKLELEWQEDITGH

SEQ ID NO: 893 - DNA, 909 bp, Streptococcus pyogenes
atgttagaacattttggtggaaaagtaaaagtgttaagacttgaaaagaggattagtcgcgaggacttgtgtggggatgagtctgaactttctgttcgtcaattagcacggatagaactaggtcaatccataccaagtttaagtaaggttatttttattgcaaaagccttaaacgttagtgtcggttacttaactgatggtgctgatttagaactacctaagcgttacaaagaattaaaataccttatcttaaggacaccaacttacatggatgatggaaaattacaagtacgagaagagcagtttgatgaaatttttgaggattattatgataaattaccagaggaagagaaaataatcattgattgtttacaggcaactttagatactttattgagtgagaatactaactttggcattgacttacttcaagaatattttaatcaaataaagactaaggtacgctttaggcaaaatgatttaatacttctagaattatatttagcttatcttgatattgagggaatggatggacaatattcagataagattttttatgattctttattagataatctatcagaacaatttgaacaatttgaattagatgaattatttatagttaataagattatcattgatatttcatcactaagcttaaaaaataaccgacttgataatttagaaaaagcgattgaaatgagtcaaaaaattatggcgaaaattcaagattggaatagaatgcctattttaaaactaatagaatggaaatattttttaatcaaacaaaaagatataataaaagcagaacaatcatttatgaaggcatgtttgttcgcccaaatgacagctgatcagtatttggaaaacaagttaattcaagagtgggaaaaagatgttaaaagttat

SEQ ID NO: 894 - protein, 303 aa, Streptococcus pyogenes
MLEHFGGKVKVLRLEKRISREDLCGDESELSVRQLARIELGQSIPSLSKVIFIAKALNVSVGYLTDGADLELPKRYKELKYLILRTPTYMDDGKLQVREEQFDEIFEDYYDKLPEEEKIIIDCLQATLDTLLSENTNFGIDLLQEYFNQIKTKVRFRQNDLILLELYLAYLDIEGMDGQYSDKIFYDSLLDNLSEQFEQFELDELFIVNKIIIDISSLSLKNNRLDNLEKAIEMSQKIMAKIQDWNRMPILKLIEWKYFLIKQKDIIKAEQSFMKACLFAQMTADQYLENKLIQEWEKDVKSY

SEQ ID NO: 895 - DNA, 1296 bp, Streptococcus agalactiae
atgatcgaacgttattcacgccctgagatggcggcaatttggacagaggaaaataaataccgtgcttggttggaggtcgagattttggctgacgaggcatgggctgagttgggtgagattcctaaggaggatgtggctaagattcgtgagaaggcggattttgacattgaccgcattcttgagattgagcaggacacgcgtcacgatgtggtggctttcactcgtgcggtttctgagacgcttggtgaggagcgcaagtgggtgcactacggtttgacgtcgactgacgtggtggacactgcctacggttacctctacaagcaggctaacgatattatccgtcgtgaccttgagaatttcacaaatattgtggctgataaggctaaggagcacaagttcaccatcatgatgggtcgtacccacggtgttcacgctgagccaacgactttcggtcttaagttggcgacctggtacagcgagatgaaacgtaatattgagcgttttgaacatgctgccgcaggtgtggaagctggtaagatttcaggtgccgttggtaactttgctaacattcctccatttgtggaacaatatgtttgtgacaaattgggcatccgtccgcaagagatttcaacacaggttcttccacgtgacctccacgcagaatattttgcagtgcttgcaagcattgcaacttctatcgaacgtatggcgacagagattcgtggtctgcaaaaatcagaacaacgtgaagttgaagaattctttgccaaaggtcagaaaggtagctctgctatgcctcacaaacgcaacccaatcggttcagagaacatgactgggctagcgcgcgtgattcgtggtcacatggtgacggcttatgagaacgtggcactttggcacgagcgtgatatttcgcactcatctgctgagcgtatcatcacacctgacacaacgatcttgattgactacatgctcaaccgttttggcaatatcgttaagaacttgactgtcttcccggaaaatatgatgcgcaatatggaatcaacttttggtttgatttatagtcaacgtgttatgctcaaattgattgaaaaaggaatgacacgagaagaagcttatgacttagttcaacctaagacagcttattcctgggacaatcaagtggatttcaaaccacttttagaagaagacaccaaagttacctcttgtcttacacaggaagaaattgatgaactatttaatccgatttattacacaaaacgtgttgatgatatttttgaaagactaggattagaaaaa

SEQ ID NO: 896 - protein, 432 aa, Streptococcus agalactiae
MIERYSRPEMAAIWTEENKYRAWLEVEILADEAWAELGEIPKEDVAKIREKADFDIDRILEIEQDTRHDVVAFTRAVSETLGEERKWVHYGLTSTDVVDTAYGYLYKQANDIIRRDLENFTNIVADKAKEHKFTIMMGRTHGVHAEPTTFGLKLATWYSEMKRNIERFEHAAAGVEAGKISGAVGNFANIPPFVEQYVCDKLGIRPQEISTQVLPRDLHAEYFAVLASIATSIERMATEIRGLQKSEQREVEEFFAKGQKGSSAMPHKRNPIGSENMTGLARVIRGHMVTAYENVALWHERDISHSSAERIITPDTTILIDYMLNRFGNIVKNLTVFPENMMRNMESTFGLIYSQRVMLKLIEKGMTREEAYDLVQPKTAYSWDNQVDFKPLLEEDTKVTSCLTQEEIDELFNPIYYTKRVDDIFERLGLEK

SEQ ID NO: 897 - DNA, 1290 bp, Streptococcus pyogenes
atgctagaacgttattcacgccctgagatggcggcaatttggacagaggaaaataaataccatgcttggttggaggtcgagattttggctgacgaggcatgggctgagttgggtgagattcctaaggaggatgtggctaagattcgtgagaaggcggattttgacattgaccgcattcttgaaattgagcaggacacgcgtcacgatgtggtggctttcacgcgtgcggtttctgaaacgcttggtgaggagcgcaagtgggtgcactacggtttgacctcgactgacgtggtggacactgcctatggttacctctacaagcaagctaacgacattatccgtcgcgatcttgagaatttcaccaatatcgtggcagacaaggcgcgtgagcacaaaatgaccatcatgatgggtcgtacccacggtgttcacgccgagccaacgactttcggtcttaagttggcgacttggtacagcgagatgaaacgtaatattgagcgttttgaacatgctgccgcaggtgtggaagctggtaagatttcaggtgccgttggtaactttgccaacatcccaccttttgtggaagaatatgtctgtgacaaattaggcattcgtccgcaagaaatttcaacacaagttcttccacgtgaccttcacgcagaatattttgcagtgcttgcaagtattgcaacttctatcgaacgtatggcgacagagattcgaggtctgcaaaagtcagaacaacgtgaagttgaagaattctttgccaaaggtcagaaaggtagctctgctatgcctcacaaacgcaacccaatcggttcagagaacatgacagggctagcgcgcgtgattcgtggtcacatggtgacagcttatgagaacgtgtcactttggcatgagcgtgacatttcgcactcatcagctgagcgtatcatcacacctgacacaactatcttgattgactacatgctcaaccgctttggtaatatcgttaagaacttgactgtcttcccggaaaatatgatgcgcaatatggaatcaacttttggtttgatttatagtcaacgtgttatgctcaaattgattgaaaaaggaatgacacgagaagaagcttatgacttagttcaacctaagacagcttattcctgggacaatcaagtggatttcaaaccacttttagaagaagacaccaaagttacctcttgtcttacacaagaagaaattgatgaactatttaatccgatttattacacaaaacgtgttgatgatatttttaagcgtttagggatt

SEQ ID NO: 898 - protein, 430 aa, Streptococcus pyogenes
MLERYSRPEMAAIWTEENKYHAWLEVEILADEAWAELGEIPKEDVAKIREKADFDIDRILEIEQDTRHDVVAFTRAVSETLGEERKWVHYGLTSTDVVDTAYGYLYKQANDIIRRDLENFTNIVADKAREHKMTIMMGRTHGVHAEPTTFGLKLATWYSEMKRNIERFEHAAAGVEAGKISGAVGNFANIPPFVEEYVCDKLGIRPQEISTQVLPRDLHAEYFAVLASIATSIERMATEIRGLQKSEQREVEEFFAKGQKGSSAMPHKRNPIGSENMTGLARVIRGHMVTAYENVSLWHERDISHSSAERIITPDTTILIDYMLNRFGNIVKNLTVFPENMMRNMESTFGLIYSQRVMLKLIEKGMTREEAYDLVQPKTAYSWDNQVDFKPLLEEDTKVTSCLTQEEIDELFNPIYYTKRVDDIFKRLGI

SEQ ID NO: 899 - DNA, 1389 bp, Streptococcus agalactiae
atgaatagaataataaacagggatattttacctagaatttcaaagatttctaaaaataataaagagaaagatttactatctatagcttatattacttggctaatctttataatatttgctttgggagtagttacagttaatgatttaaaaccgatgtttaatcaattaatagtaaacctcttaaatatttattattatatggaagccttcatattgggtatggacagctatttacaatataaccttccatacagttttgatttttggagtatttttgtagaggctataaatttatttgtaaaagtatttttaattgcttttattccttctgttattagaaaagtattgaaaaaagaaagttttttcaatgaagttgttattttactaggagcgattgttactataattgtaagtttccatttatatttagagatattgatagtagtgggactaatacttttattaattgcttttgtttcaataggtaagaatcgtgtttataattttgttcaaaatttaaactactttgaagaagtgatttggaattattttgaagaaaatccggttaaaataaaagaaaaatcattgattattaaatttttacttactatttcttttgtttttgtaattgattttgcaatggttagattgttgaattttaatataaaattttctacaatattagcttgttctgctattttattagcatggttataccaaaataagtctgttacagaacccttcctattaaaaaagttagttatctattttatttttttcattgccactttaattggtaatttaaaaaatgagttgtcaatcttagaaacaccattactttttattagtatattttttactatggatagaattattgctctatctaaagaaatgcgtgatttgattatatctaagagtattttattttattatgatcatgaaaatataaagccatcaatattacttagtgagataaaagaaattaagtatcttgaaaatgtagatattggagaacttgaacttgttaggcaaatggtaattaggttgcgtctagagttagaggaagaatttttgattttatcagatatatatatgaaaaatggctatgaaaaatatatacaatttgttcaaggaaatgtttattttatcaacttagaattggataaaattcccaactacactaacttgaaattaatactagaatcaatatttgatcataataatcaaaagatatttatacctaaactttatgaggaatacatatacatcttaatttctttaggagaagttgaaaaagctaaagaaatattaaaagaagtgtcggattatttaactgaagaatctttgaattattttgaaaaagaatatgataaagctaagggtagtaat

SEQ ID NO: 900 - protein, 463 aa, Streptococcus agalactiae
MNRIINRDILPRISKISKNNKEKDLLSIAYITWLIFIIFALGVVTVNDLKPMFNQLIVNLLNIYYYMEAFILGMDSYLQYNLPYSFDFWSIFVEAINLFVKVFLIAFIPSVIRKVLKKESFFNEVVILLGAIVTIIVSFHLYLEILIVVGLILLLIAFVSIGKNRVYNFVQNLNYFEEVIWNYFEENPVKIKEKSLIIKFLLTISFVFVIDFAMVRLLNFNIKFSTILACSAILLAWLYQNKSVTEPFLLKKLVIYFIFFIATLIGNLKNELSILETPLLFISIFFTMDRIIALSKEMRDLIISKSILFYYDHENIKPSILLSEIKEIKYLENVDIGELELVRQMVIRLRLELEEEFLILSDIYMKNGYEKYIQFVQGNVYFINLELDKIPNYTNLKLILESIFDHNNQKIFIPKLYEEYIYILISLGEVEKAKEILKEVSDYLTEESLNYFEKEYDKAKGSN

SEQ ID NO: 901 - DNA, 240 bp, Streptococcus agalactiae
atgtcaccaccttatagggagcgacagtcacgccagccttatttgccagaaagtctttttcaaagatacggttttgagaaatgcggagcagatcagtcccctgcggtagctgaccagctgacacaacggcatccagaccatcggcatcgacattctcaaactcataggtcaaaacatcgcaacgcgcagctaatgttcccaaagcctcaacatcatcgtaaggtgccacaatcacctcgc

SEQ ID NO: 902 - protein, 80 aa, Streptococcus agalactiae
MSPPYRERQSRQPYLPESLFQRYGFEKCGADQSPAVADQLTQRHPDHRHRHSQTHRSKHRNAQLMFPKPQHHRKVPQSPR

SEQ ID NO: 903 - DNA, 1125 bp, Streptococcus agalactiae
atgaggaacaaggaaaaatcgcagaggagtcaagcaatgaactcatttaagaccattgggattattggtggtggtcagctggggcagatgatggcgattgcggctatctacatgggccacaaggtcattacgctggatccagctagcgactgccctgcctcccgcgttagcgaggtgattgtggcaccttacgatgatgttgaggctttgggaacattagctgcgcgttgcgatgttttgacctatgagtttgagaatgtcgatgccgatggtctggatgccgttgtgtcagctggtcagctaccgcaggggactgatctgctccgcatttctcaaaaccgtatctttgaaaaagactttctggcaaataaggctggcgtgactgtcgctccctataaggtggtgacatctagccttgacctagaggggcttgacttgaccaagacctatgtcctcaagacagcgacaggtggttatgacggtcatgggcaaaaggttatccgctcagcagaagacctgccagaggcgcagcaattagccaactcagctcagtgtgtcttggaagagtttgtcaacttcgaccttgaaatatcagtcatcgtgtctggaaatggtcaggatgtgacggtctttcccgttcaggaaaatatccaccgcaacaatatcctgtcaaaaaccatcgtaccagctcgcatctcagaccaactagctgacaaggctaaggaaatggctgtgcagattgccaagaaactccagctatcaggaaccctctgtgtggaaatgtttgcgaccgcagatgacatcatcgtcaatgaaattgccccacgtccccacaactcagggcactactctatcgaagcctgcgacttttcacagtttgacacccacatcttgggcgtactgggcgcaccgcttccgccaatcaaactccatgctccagccgttatgttcaatgtcctaggacaacatgtccagcaggcaattgaccatgttgcccaaaaccctagcgcccacctccacatgtatggtaaactagaagcaaaacataaccgcaaaatgggacacgtgacggtgtttagcgatgtacctgatgaggtggaagagtttgaagaaaggatggatttc

SEQ ID NO: 904 - protein, 375 aa, Streptococcus agalactiae
MRNKEKSQRSQAMNSFKTIGIIGGGQLGQMMAIAAIYMGHKVITLDPASDCPASRVSEVIVAPYDDVEALGTLAARCDVLTYEFENVDADGLDAVVSAGQLPQGTDLLRISQNRIFEKDFLANKAGVTVAPYKVVTSSLDLEGLDLTKTYVLKTATGGYDGHGQKVIRSAEDLPEAQQLANSAQCVLEEFVNFDLEISVIVSGNGQDVTVFPVQENIHRNNILSKTIVPARISDQLADKAKEMAVQIAKKLQLSGTLCVEMFATADDIIVNEIAPRPHNSGHYSIEACDFSQFDTHILGVLGAPLPPIKLHAPAVMFNVLGQHVQQAIDHVAQNPSAHLHMYGKLEAKHNRKMGHVTVFSDVPDEVEEFEERMDF

SEQ ID NO: 905 - DNA, 1107 bp, Streptococcus pyogenes
atgaggaacaaggaaaaatcgcagaggagtcaagtggtgaactcatttaagaccattgggattatcggtggtggtcagctggggcagatgatggccattgcggctatctatatgggtcacaaggtcatcacgctggatcctgctagcgacagccctgcctcccgcgttagcgaggtaattgtggcgccttacgatgatgttgaggctttgggacaattggctgcgcgttgcgatgtgttgacttatgagtttgagaatgttgatgcggacggtttggatgccgttgtgtcagcttgtcagctaccgcaggggaccgatctgctccgcatttcccaaaaccgtatcgttgaaaaagactttctggcaaataaggctggtgtgacagtcgctccctataaggtggtgacgtctagccttgacctaggggggcttgatttgaccaagacctatgtcctcaagacagagacaggtggttatgacggtcatgggcaaaagattatccgctcagcagaagatttgccagaggcgcagcaattagctaactcagctcagtgtgtcttggaagagtttgtcaactttgaccttgaaatctcagtcatcgtgtctggaaatggcaaggatgtgacggtctttcccgttcaggaaaatatccaccgcaacaatatcctgtcaaaaaccatcgtaccagctcgcatctcagatcaactggctgataaggctaagaaaacggcggtgcagattgccaagaaactccagctgtcaggaactctctgtgtggaaatgtttacgaccgcagatgatatcattgtcaatgaaattgccccacgcccccacaactcagggcgctattctatcgaagcctgcgacttttcacagtttgacacccacatcttgggtgtgttgggcgcaccacttcctcagattcagctccacgccccagccgtcatgctcaatgtcctaggacaacatgtccagcaggcaactgactatgttgccaaaaaccctagcgcccacctccacatgtatggtaaactagaagcgaaacataaccgcaaaatgggacatgtgacggtgtttgcaaaagatgcggatgaggtgaaggagttt

SEQ ID NO: 906 - protein, 369 aa, Streptococcus pyogenes
MRNKEKSQRSQVVNSFKTIGIIGGGQLGQMMAIAAIYMGHKVITLDPASDSPASRVSEVIVAPYDDVEALGQLAARCDVLTYEFENVDADGLDAVVSACQLPQGTDLLRISQNRIVEKDFLANKAGVTVAPYKVVTSSLDLGGLDLTKTYVLKTETGGYDGHGQKIIRSAEDLPEAQQLANSAQCVLEEFVNFDLEISVIVSGNGKDVTVFPVQENIHRNNILSKTIVPARISDQLADKAKKTAVQIAKKLQLSGTLCVEMFTTADDIIVNEIAPRPHNSGRYSIEACDFSQFDTHILGVLGAPLPQIQLHAPAVMLNVLGQHVQQATDYVAKNPSAHLHMYGKLEAKHNRKMGHVTVFAKDADEVKEF

SEQ ID NO: 907 - DNA, 582 bp, Streptococcus agalactiae
gtgggtacgtcttcgaaatcaaagatttcggacttaccgcatatttttctacgaaaattttcgacaagtcgaaacgtccctttgtatcttaatattatgcaaccaattatttctattatcatgggttccaaatccgactggacaaccatgcaaaaaacggctgaagttctagataactttggcattgcttacgagaagaaagtcgtctctgcccaccgtacgccagacctcatgttcaagcatgctgaggaggcgcgtggtcgtggtatcaagattatcatcgctggagcaggtggagcagcccacttgccgggtatggtagcagctaaaacaaccctgcctgttatcggtgtgcctgtcaaatcacgtgccctctcaggtttggattcgctctactctattgtgcagatgcctggtggtgtgcctgtggcgaccatggctatcggagaagcaggagcgactaacgctgccctgacagccctccgtatcctctctatcgaggatcaaaatctggctgatgcgctagctcatttccatgaggaacaaggaaaaatcgcagaggagtcaagcaatgaactcatt

SEQ ID NO: 908 - protein, 194 aa, Streptococcus agalactiae
MGTSSKSKISDLPHIFLRKFSTSRNVPLYLNIMQPIISIIMGSKSDWTTMQKTAEVLDNFGIAYEKKVVSAHRTPDLMFKHAEEARGRGIKIIIAGAGGAAHLPGMVAAKTTLPVIGVPVKSRALSGLDSLYSIVQMPGGVPVATMAIGEAGATNAALTALRILSIEDQNLADALAHFHEEQGKIAEESSNELI

SEQ ID NO: 909 - DNA, 609 bp, Streptococcus pyogenes
atgctaaagcacctagtcgccctgacgtgggttcgtcttcgaaatcaaagatttcggacttacctcatatttttctacggaaagtttcgacaagtcgaaacgcccctttgtatcttaattatgaaaactccaattatttctattatcatgggctccaaatctgactgggcaaccatgcaaaaaacggctgaagttctagacaactttggcattgcttacgagaagaaagtcgtctctgcccaccgtacgccagacctcatgttcaagcatgctgaggaagcacgtggtcgtggcatcaaaatcatcatcgcaggagcaggtggggcagctcacttgcctggtatggtggcagctaaaacaacgctgcctgttatcggtgtgcctgtcaaatcacgtgccctttcaggtttggattcgctatattccattgtgcagatgcctggcggtgtgcctgtggcaaccatggctatcggagaagcgggagcgactaacgctgccctgacagccctccgtatcctctctatcgaggaccaaaatctggctgatgcgctagctcatttccatgaggaacaaggaaaaatcgcagaggagtcaagtggtgaactcatt

SEQ ID NO: 910 - protein, 203 aa, Streptococcus pyogenes
MLKHLVALTWVRLRNQRFRTYLIFFYGKFRQVETPLCILIMKTPIISIIMGSKSDWATMQKTAEVLDNFGIAYEKKVVSAHRTPDLMFKHAEEARGRGIKIIIAGAGGAAHLPGMVAAKTTLPVIGVPVKSRALSGLDSLYSIVQMPGGVPVATMAIGEAGATNAALTALRILSIEDQNLADALAHFHEEQGKIAEESSGELI

SEQ ID NO: 911 - DNA, 1263 bp, Streptococcus agalactiae
atgaaattgcttgttgttggttctggtggtcgtgagcatgcgattgctaagaagttgttagcgtctaaggatgtggatcaggtttttgtggcacctggtaatgatggtatgaccttggatggtctagacttggtaaatatcggaatttccgaacattctagactgattgactttgttaaggagaatgagattgcttggacccttattggtcctgatgatgcgctagcagctggtatcgttgatggttttaatagtgctggactcagagcatttggtccaaccaaggcagccgcggagctagagtggtcaaaagactttgccaaggaaatcatggtcaaatacaatgttccaacagcagcctatggcacattttcagattttgaaaaagctaaagcctacatcgaagagcagggcgcaccaatcgtggtcaaggctgacggattggcgttaggcaagggcgtggtcgtggctgaaaccgttgagcaggcggtagaggcggcgcaagagatgcttttggacaacaagtttggcgactcgggtgcgcgcgtggttatcgaggaattcttggatggtgaagagttctcccttttcgccttcgctaatggcgataagttctacatcatgccgacagctcaggatcacaagcgtgcctatgatggtgacaaggggctaaataccggtggtatgggtgcctatgcgccagttccccacctgcctcagagcgtggtggatacagcagttgagactatcgttaagcctgtccttgaaggcatgattgccgaagggcgtccttatctaggtgtcctctatgctgggcttatcctgacggctgatggccctaaggttatcgagttcaactcacgttttggtgaccctgaaactcagattatcctccctcgcctgacttccgatttcgctcagaacatcgacgacatcatgatgggcatcgagccttacatcacttggcagaaggacggcgtgactctgggcgttgtcgttgcctcagaaggctatccgctcgattacgagaaaggtgtgccactgcctgaaaagaccgacggcgacatcatcacctactatgcgggagctaagtttgcggaaaatagcaaagcactgctctcaaacggaggacgtgtctacatgcttgtcaccacagaagacagcgtcaaagcagggcaggacaaaatctatacccaactcgcccaacaagacacaacaggcctcttctaccgaaacgacatcggaagcaaagctattaaggaa

SEQ ID NO: 912 - protein, 421 aa, Streptococcus agalactiae
MKLLVVGSGGREHAIAKKLLASKDVDQVFVAPGNDGMTLDGLDLVNIGISEHSRLIDFVKENEIAWTLIGPDDALAAGIVDGFNSAGLRAFGPTKAAAELEWSKDFAKEIMVKYNVPTAAYGTFSDFEKAKAYIEEQGAPIVVKADGLALGKGVVVAETVEQAVEAAQEMLLDNKFGDSGARVVIEEFLDGEEFSLFAFANGDKFYIMPTAQDHKRAYDGDKGLNTGGMGAYAPVPHLPQSVVDTAVETIVKPVLEGMIAEGRPYLGVLYAGLILTADGPKVIEFNSRFGDPETQIILPRLTSDFAQNIDDIMMGIEPYITWQKDGVTLGVVVASEGYPLDYEKGVPLPEKTDGDIITYYAGAKFAENSKALLSNGGRVYMLVTTEDSVKAGQDKIYTQLAQQDTTGLFYRNDIGSKAIKE

SEQ ID NO: 913 - DNA, 1410 bp, Streptococcus pyogenes
ttggctaatagagtgttccttatttcaagaattgtggtctactatcacatttttacaatgtttcaattattgataactaatacattatgtaaaaaagcgaacgtttatgatataatatctaattataatacgaaagaggtggatgttttgaaattacttgttgttggttcaggtggtcgtgaacatgcgattgctaagaagttgttagcgtctaagggtgtggatcaggtttttgtggcacctggtaatgatggtatgaccttggatggtctggacttggtgaatatagtagtttccgaacattccaggttgattgcctttgctaaggagaatgagatttcttgggcctttattggtcctgatgatgcgctagcagctggtatcgttgatgatttcaacagtgctggactcagagcttttggtccaacaaaggcagcagcggagctagagtggtcaaaagactttgccaaggaaatcatggtcaaatacaatgtcccaacagcagcctatggcacattttcagactttgaaaaagccaaagcctacatcgaagagcagggcgcacctatcgtggtcaaggctgatggcttggcgctaggtaagggtgtggtcgtggctgaaaccgttgagcaggcggtagaggcggcgcaagagatgcttctggacaataagtttggcgattcaggagcgcgtgtggttatcgaggaattcttggatggcgaggagttttccctctttgcctttgctaatggcgataagttctacatcatgccgacagctcaggatcacaagcgtgcctttgacggagacaaggggccaaacactggtggtatgggtgcctatgcgccagttcctcatctacctcagagcgtggtagacacagcggttgagatgatcgttaggcctgtccttgagggcatggttgccgaagggcgtccttatctaggtgtcctctatgtggggcttatcctgacagctgatggacctaaggttatcgagttcaactcacgtttcggtgaccctgaaactcagattatcctccctcgcctgacttctgatttcgctcagaatattgacgatatcatgatgggcattgagccttacatcacttggcagaaggacggtgtgactttgggtgttgtcgttgcctcagaaggctatccattcgattatgagaaaggtgtgccactgcctgaaaagaccgacggcgatatcatcacctactacgcaggagttaagttttcggaaaatagcgagctacttctctcaaacggaggacgtgtctatatgctcgtcaccacagaagacagcgtcaaagcagggcaggacaaaatctatacccaactggcccaacaagacacaacaggtctcttctaccgaaatgatatcggaagcaaagctataagagaa

SEQ ID NO: 914 - protein, 470 aa, Streptococcus pyogenes
LANRVFLISRIVVYYHIFTMFQLLITNTLCKKANVYDIISNYNTKEVDVLKLLVVGSGGREHAIAKKLLASKGVDQVFVAPGNDGMTLDGLDLVNIVVSEHSRLIAFAKENEISWAFIGPDDALAAGIVDDFNSAGLRAFGPTKAAAELEWSKDFAKEIMVKYNVPTAAYGTFSDFEKAKAYIEEQGAPIVVKADGLALGKGVVVAETVEQAVEAAQEMLLDNKFGDSGARVVIEEFLDGEEFSLFAFANGDKFYIMPTAQDHKRAFDGDKGPNTGGMGAYAPVPHLPQSVVDTAVEMIVRPVLEGMVAEGRPYLGVLYVGLILTADGPKVIEFNSRFGDPETQIILPRLTSDFAQNIDDIMMGIEPYITWQKDGVTLGVVVASEGYPFDYEKGVPLPEKTDGDIITYYAGVKFSENSELLLSNGGRVYMLVTTEDSVKAGQDKIYTQLAQQDTTGLFYRNDIGSKAIRE

SEQ ID NO: 915 - DNA, 801 bp, Streptococcus agalactiae
atgactatttatgaccaaattgagtctgctcttgatttaatgactgatttagaacgtgaaattgcttgttattttatggggcagcccatttcaaaagacgctcttgcttctaccattgtcactaagcaactacacatttcacaagcagccttaacgcgttttgctaaaaaatgtgggtttaaaggctatcgtgaatttgtttttgaatatttaaaaagccatgagaccatcagtcaacaattatacggtcttcaaaatgacaacactaagaaagtatttatgaattatcaagagatgatttctaaatctgctgatattattgatgaagaacagcttctagaagtatcacatatgattgagcaagctgatcgtgtttatttttatggcaaagggagctcatcgctagtagctaaagaatttaaaatacgccttatgaggctgggagtgatttgtgaggctctggatgatacagatagtttctcatggactaatagtattgttaatgatagatgcctcgtcattgccttctcactttctgggaacaccaactctgttattggtgccttaaaaatcgcaagttgtcacggagctaaaaccgttctatttacaaaacaacctcacacaattgactatgcttttgacaagattattcaggtggcttctgctaggcatttagactacggcaatagaatttcgcctcagatcccaatgttaatcatggtagatattatctatgcacaatttttagatattaataaaatagaaaaagagcgaatttttagagaaaccattattcaacgc

SEQ ID NO: 916 - protein, 267 aa, Streptococcus agalactiae
MTIYDQIESALDLMTDLEREIACYFMGQPISKDALASTIVTKQLHISQAALTRFAKKCGFKGYREFVFEYLKSHETISQQLYGLQNDNTKKVFMNYQEMISKSADIIDEEQLLEVSHMIEQADRVYFYGKGSSSLVAKEFKIRLMRLGVICEALDDTDSFSWTNSIVNDRCLVIAFSLSGNTNSVIGALKIASCHGAKTVLFTKQPHTIDYAFDKIIQVASARHLDYGNRISPQIPMLIMVDIIYAQFLDINKIEKERIFRETIIQR

SEQ ID NO: 917 - DNA, 840 bp, Streptococcus pyogenes
gtgtgctttgctatgcctaaaaaccaccgcctaattaccaaaatcgaagcatcattggaacatatgaccagtttagaaaaagggattgctcatttttttattacaaccgatctgacacctcaagagttgaccgcatccgagatagttaagcgactacacatctctcaagccgccttgactcgatttgcaaaaaaatgtggttttactggttatcgtgcttttgcctttgattaccttcacagtcttcaagaatcacaagagactttccaatctattcacttagaattgacaaagcgcgtgctgatggactacgacgctcttattaataaaacctatgagctcgttaatgaggaaaaattactgaacttagccaagctgatcgattcttctgagcgagtctatttctttggcaaaggatcttctggactagtagcaagagaaatgaagctacgctttatgcgacttggtttaatctgtgatgcttattcagacactgatggttttacttgggcaaatagcctcgtcaatgaaaattgccttgtttttggtttttctttatctggcaaaacaaactctgtcatcacagcacttcatcaagctagtcagcgaggagccaaaactgtcctcttaacaacagataatcaaaccgaatttgacgactccttagatattattcccgtatcatcaactcaccaactacattatgggaatcgtgtgtcaccacaatttcctcttcttattatgatggacattatttatgcttacgttttagcgattgacaaaccgcacaaagaaaaaatcttcaaaaacactattattgacaaagaaaataacgacctt

SEQ ID NO: 918 - protein, 280 aa, Streptococcus pyogenes
VCFAMPKNHRLITKIEASLEHMTSLEKGIAHFFITTDLTPQELTASEIVKRLHISQAALTRFAKKCGFTGYRAFAFDYLHSLQESQETFQSIHLELTKRVLMDYDALINKTYELVNEEKLLNLAKLIDSSERVYFFGKGSSGLVAREMKLRFMRLGLICDAYSDTDGFTWANSLVNENCLVFGFSLSGKTNSVITALHQASQRGAKTVLLTTDNQTEFDDSLDIIPVSSTHQLHYGNRVSPQFPLLIMMDIIYAYVLAIDKPHKEKIFKNTIIDKENNDL

SEQ ID NO: 919 - DNA, 975 bp, Streptococcus agalactiae
atgattgaaacaatgtcgctagatgacatgagagaatacctaggtcaagaccaaattcccgaggattttgatgacttctggaaaaaacaaacaatgaaatatcaagggaatattgagtatcgtctagacaaaaaagatttcaatattacttttgcacaagcttatgatcttcattttaaaggcagcaataactctattgtctatgccaaatgtttattccctaaaacaaataaaccctatcctgtagttttttattttcatggttaccaaaaccaaagtcctgactggagtgaccaacttaattatgtagcagcaggttacggcgttgtttcaatggatgttcgaggtcaagctggacagtctcaagacaaggggcattttgatggcattacagttaagggccagattgtgcgaggaatgatctcaggaccaaatcatcttttttataaagacatttatcttgatgttttccaattgattgatatcattgctacattagagagtgttgatagtaatcaactttatagttatggctggtctcaaggtggagcacttgctttgatagctgcagctcttaatcccaaaatcgtcaagaccgttgctgtttacccatttttgtcagactttagacgagtattagatttagggggtgtcagtgagccctatgatgaactcttccgctattttaaatatagtgatccttttcataaaacagagaataatgtgttaaaaactttggcttatattgatgttaaaaattttgcacataggatttcttgccccgttgttttactaacagccttaaaagatgatatttgtcctccatcaactcaatttgccatttttaatcgtctgacatcaactaaaaagcatcttttattaccagattatggacatgatccaatgacagtgcaagtaaaagaccatatttttgatcaactgacaggaagtcaatttacaaagcaaaaaatcgag

SEQ ID NO: 920 - protein, 325 aa, Streptococcus agalactiae
MIETMSLDDMREYLGQDQIPEDFDDFWKKQTMKYQGNIEYRLDKKDFNITFAQAYDLHFKGSNNSIVYAKCLFPKTNKPYPVVFYFHGYQNQSPDWSDQLNYVAAGYGVVSMDVRGQAGQSQDKGHFDGITVKGQIVRGMISGPNHLFYKDIYLDVFQLIDIIATLESVDSNQLYSYGWSQGGALALIAAALNPKIVKTVAVYPFLSDFRRVLDLGGVSEPYDELFRYFKYSDPFHKTENNVLKTLAYIDVKNFAHRISCPVVLLTALKDDICPPSTQFAIFNRLTSTKKHLLLPDYGHDPMTVQVKDHIFDQLTGSQFTKQKIE

SEQ ID NO: 921 - DNA, 879 bp, Streptococcus agalactiae
atgaccagaacagtagcaattgatattggcggtacaatgattaagcatggcattgtggataatttaggttgtattgttgaggcaagtgagcttgccacagaagcctacaaaggtggtccaggcattttacaaaaagtttgtcaaattatcgataactatctagcagaagggagcattgatggaattgctatctcatctgctggcatggtagatccagatgaaggatgtatattttactctggtcctcaaattccaaactatgctgggacacaatttaagaaagttttagaagacacttatcaagtacgcacagaaattgaaaatgatgttaattgtgcaggattagctgaagctgtctcaggtagtgccaaagatagttcaatagcgctttgtcttactattggaacaggtattggtggttgtctgattattgataaaacagtttttcatggctttagtaattctgcttgtgaagttggctatatgcacctttcagatggtgattttcaagatttagcctctacaactgcactgattgctgatgttgccaaagcgcatggagatgaaattagccgatgggatggacgtcgtatttttcaggaggctaaaaaaggcaatgaaaaatgtattgcaagtatagaccgtatgataaactaccttggccaaggaatcgctaatatggtttatgtggtaaatcctgaaaaagttgttttaggtggtggaatcatggctcaaaaagattatttacaagataaacttagtgaatctttgaaacgaaatcttgtgacaagtcttgctgaaaaaacagcaatagtctttgcacaacacgaaaaccaagctggtatgctaggagcttactaccattttaaaaacaggggg

SEQ ID NO: 922 - protein, 293 aa, Streptococcus agalactiae
MTRTVAIDIGGTMIKHGIVDNLGCIVEASELATEAYKGGPGILQKVCQIIDNYLAEGSIDGIAISSAGMVDPDEGCIFYSGPQIPNYAGTQFKKVLEDTYQVRTEIENDVNCAGLAEAVSGSAKDSSIALCLTIGTGIGGCLIIDKTVFHGFSNSACEVGYMHLSDGDFQDLASTTALIADVAKAHGDEISRWDGRRIFQEAKKGNEKCIASIDRMINYLGQGIANMVYVVNPEKVVLGGGIMAQKDYLQDKLSESLKRNLVTSLAEKTAIVFAQHENQAGMLGAYYHFKNRG

SEQ ID NO: 923 - DNA, 936 bp, Streptococcus pyogenes
atgaagcattatttagcaattgatattggtggtactgctatcaagtatggcttgatttctgaaacaggagacctgttggaaaaagaggaaatggccactgaggcttataaaggtggtccctctattttggaaaaggtcaagggcttggtaaagacctatcaagaccaaatggatctggctggagtggccatttcttctgcaggaatggttaatcctgatgagggagaaatcttttatgccggccctcagattcctaactatgctggaactcagtttaaaaaagagattgaagagactttcgggttaccgtgtgaagtggaaaacgatgttaactgtgctggtctggccgaagctatttctggtagtgccaaggattatcctgtggctctttgcttgacaattgggacgggaatcggtggctgtttattgtttaattcccaagtttttcatggtagtagtcattcagcttgcgaagttggttaccttcatttgtcagatggtcagtttcaggatctggcatctaccacagctcttgttcaagaggtggtcttagcttatggcgatgacattagccaatgggatggtcgtcgtatttttgagcaggctaaagcgggtgatgcgatttgtatagcagccattagtaagcaggtggattacttaggacaaggtattgctaatatctgctacgttgttaacccaaatgtggtggtgcttggtggcggtatcatggcgcaaaaagactatttagctgataaattaaagacagctcttgatagctacttggtttctagtcttgccaagaaaactcagctgaagtttgctagtcatggaaataatgctggtatattaggagcttactaccattttaaacaaaagaatgagcgatcttgttcatttataactcttgagaaaatcgaaaataatttagcgagtagc

SEQ ID NO: 924 - protein, 312 aa, Streptococcus pyogenes
MKHYLAIDIGGTAIKYGLISETGDLLEKEEMATEAYKGGPSILEKVKGLVKTYQDQMDLAGVAISSAGMVNPDEGEIFYAGPQIPNYAGTQFKKEIEETFGLPCEVENDVNCAGLAEAISGSAKDYPVALCLTIGTGIGGCLLFNSQVFHGSSHSACEVGYLHLSDGQFQDLASTTALVQEVVLAYGDDISQWDGRRIFEQAKAGDAICIAAISKQVDYLGQGIANICYVVNPNVVVLGGGIMAQKDYLADKLKTALDSYLVSSLAKKTQLKFASHGNNAGILGAYYHFKQKNERSCSFITLEKIENNLASS

SEQ ID NO: 925 - DNA, 915 bp, Streptococcus agalactiae
atgaaagatttacaaaaatatcaaggaattattcctgcattttatgcttgctatgatgataagggtgatatttgtcccgaacgagtaaaagccctgaccaattattttattgataaaggtgttcaaggactttatgttaatggttcatccggagaatgtatttaccaaagtgtagcagatcgtaaacttgtactggaaaatgttatgtccgttgctaagggtaaactaacagtaatagcgcatgtggcatgtaataatactaaggatagcgtagagttggctatgcatgctgaagctataggtgttgatgctattgcagcaattccaccaatttattttcgattaccagagtatgccatagcagattattggaatactattagtcaagcagcaccacaaactgattttattatttacaatattcctcaattggcaggggttgctttgacatcggatttatatcgaaaaatgttacaaaatccgcaagtaattggtgttaaaaattcttccatgccagttcaagacattcagaattttgtggctattggaggagaaaatcatattgtttttaatggtccagatgaacaatttttgggtggtcgtctcatgggagccgctgcaggtattggtggtacctatggcgtaatgccagaattatacttgactttaaatcagttaattgttgataaagatttagaaaaagcgcgtgaacttcaatttacaattaacgatattatcacaaagctttgttcgggtcatggtaatatgtatgctgtgatcaaagctgtattggaaatcaatgagcaactaactataggttccgttcggttacctttagcatctgtaacagaagaagataaacctattattaaagaggcagcagaaatgattagacatgctaaaaaacagttttgt

SEQ ID NO: 926 - protein, 305 aa, Streptococcus agalactiae
MKDLQKYQGIIPAFYACYDDKGDICPERVKALTNYFIDKGVQGLYVNGSSGECIYQSVADRKLVLENVMSVAKGKLTVIAHVACNNTKDSVELAMHAEAIGVDAIAAIPPIYFRLPEYAIADYWNTISQAAPQTDFIIYNIPQLAGVALTSDLYRKMLQNPQVIGVKNSSMPVQDIQNFVAIGGENHIVFNGPDEQFLGGRLMGAAAGIGGTYGVMPELYLTLNQLIVDKDLEKARELQFTINDIITKLCSGHGNMYAVIKAVLEINEQLTIGSVRLPLASVTEEDKPIIKEAAEMIRHAKKQFC

SEQ ID NO: 927 - DNA, 912 bp, Streptococcus pyogenes
atgacagatcttacgaaataccaaggcattattcctgccttttacgcttgttacgatgaccaggggaatatcagccctgagcgtgtgcgtgccttgacccagtactatattgacaaaggggttcaggggctttacattaatggctcttctggagagtgtatttaccagagcgtttttgaccgtcaattggtgttagaaaatgtcatggcagtcgctaagggcaagctgacgattattaatcacgttgcctgcaacaacactaaagatagtattgaattggcagctcattcagaacgtttgggcgtggatgccattgcagctattccgcctatttatttccggttaccagaatatgcggttgctgattattggaatgctatttcttcggctgctcctcacacagattttatcatctataatattcctcaactggcaggggttgccttgacgccaagcctttataagactatgttggctaataagcgcgtgattggcgttaaaaattcatctatgccagtgcaggatattcaaaccttctgtgcgattggtggggacgatcatattgtttttaatggcccagatgaacaatttctaggagggcgcttgatgggtgctgctgcaggcattggtggtacctacggggctatgccagaattatttttaaggctgaaccaacttattgctgacaaggatttagaaaaggccaaggcccttcaatatactattaatgagattatcggtgtccttgtttctgctcacggcaatatgtatggggttattaaagaagtacttcgtattaatgagggtcttgatattggttctgttcgatcacctttagctgagttggtcgaggaagatagggttatttgccaacgggctgctgctctgattaatcaggctaaggaaaccttt

SEQ ID NO: 928 - protein, 304 aa, Streptococcus pyogenes
MTDLTKYQGIIPAFYACYDDQGNISPERVRALTQYYIDKGVQGLYINGSSGECIYQSVFDRQLVLENVMAVAKGKLTIINHVACNNTKDSIELAAHSERLGVDAIAAIPPIYFRLPEYAVADYWNAISSAAPHTDFIIYNIPQLAGVALTPSLYKTMLANKRVIGVKNSSMPVQDIQTFCAIGGDDHIVFNGPDEQFLGGRLMGAAAGIGGTYGAMPELFLRLNQLIADKDLEKAKALQYTINEIIGVLVSAHGNMYGVIKEVLRINEGLDIGSVRSPLAELVEEDRVICQRAAALINQAKETF

SEQ ID NO: 929 - DNA, 660 bp, Streptococcus agalactiae
gtgaaaaaagcaaatcaattaatagcagcgatttttgatgttaacaacccctttatgcaaggttgcaatgttgtttttgatctggcattactaaaccttctctttatgataacttgcctaccattggtaactattggtgctgctaaaattagtttgtatcgaacgttgtggcaaaaattagaaggtgatcagacaaatcttttaatattgtatataaaacacctaaaaaaagagtggttccaaggtatgcttttaggtttggttgaactaagtattttggttgtgatcatatttgatttaacaattcttcattatcaaataggtttcattgtgtctttcttgaagataacttgttacgcctttttgttattgactgtgatgacgagcatatacctatttcctatggctgcccgctacgaaatgtctcttttagataccgtgaaaaagagctttataatggcatgtttaaacttgaaatggactggtgtattgatgtttttattaatcatgacttggtttattatggtgcagtctagtctcttatttatgcttacagtgtcagctatatttatttttgcttataccgcctttgcttactttaaaattattattttacaaaaacaatttgcctatttcagcaaacaacaaggagattatcaa

SEQ ID NO: 930 - protein, 220 aa, Streptococcus agalactiae
MKKANQLIAAIFDVNNPFMQGCNVVFDLALLNLLFMITCLPLVTIGAAKISLYRTLWQKLEGDQTNLLILYIKHLKKEWFQGMLLGLVELSILVVIIFDLTILHYQIGFIVSFLKITCYAFLLLTVMTSIYLFPMAARYEMSLLDTVKKSFIMACLNLKWTGVLMFLLIMTWFIMVQSSLLFMLTVSAIFIFAYTAFAYFKIIILQKQFAYFSKQQGDYQ

SEQ ID NO: 931 - DNA, 660 bp, Streptococcus pyogenes
ttgacatcgaaaaaacagggacttttacactctctcttcaagcttgatagtaaatggatgagggctagcgcagcactgtttgatttgctcgtgtttaatctcttatttgtcttgtcctgccttccccttctaacgattggggttgctaaaatggctttgtatgcgagtttgttggattggcgagaaggtcaagttagtcagcttgttactacttatagctctcattttaaatattactttaaaagtgggctacgccttggccttattgagcttgggataatgactatttgtctcttagatcttttcttaattcgaaaccaatcaggcctagtttttcaagggtttaaagtactttgcgttgctgttttatttttggtggttatactctttttgtacgcttatcctcaggccgtcaaaagagacctttccctatctacgctgtttaagcgaagctttttattagcaggactcttttttccatggagttttgctttcttggcttttatttgtctcacgatatttagcctacaattgtctctgttaacgttatttggaggcgtgtctttgctagctatcatcggcatcagtagtctaacttatctctacttgattatcatggaatctcttcttaggcgattcccacttaataatgacattgaa

SEQ ID NO: 932 - protein, 220 aa, Streptococcus pyogenes
LTSKKQGLLHSLFKLDSKWMRASAALFDLLVFNLLFVLSCLPLLTIGVAKMALYASLLDWREGQVSQLVTTYSSHFKYYFKSGLRLGLIELGIMTICLLDLFLIRNQSGLVFQGFKVLCVAVLFLVVILFLYAYPQAVKRDLSLSTLFKRSFLLAGLFFPWSFAFLAFICLTIFSLQLSLLTLFGGVSLLAIIGISSLTYLYLIIMESLLRRFPLNNDIE

SEQ ID NO: 933 - DNA, 441 bp, Streptococcus agalactiae
atgatttacgatcatttattgaatttaacgcattataaagatattaatcctaatttagatttagcgattgattatctactaagtcatgatttaaggaatttagatataggcacctatcatattagcccagaagtgatactcatggtccaatcaaatcaacttagtgagtcatttgatcatatttttgaataccataaaaaataccttgatatacattatgtcattgaaggacatgaagttatcaaattgggaaaaggtgataaggtagaggtggaggaatacttaggcgatataggatttatcaagtgctcagaagagacttcttttgatttgagagataattatatagccttctttttcccagaagaagctcatcagccaaatggtatgggaagtctaggtaattatgtcaaaaaaggggtattgaaagtgttaatggcg

SEQ ID NO: 934 - protein, 147 aa, Streptococcus agalactiae
MIYDHLLNLTHYKDINPNLDLAIDYLLSHDLRNLDIGTYHISPEVILMVQSNQLSESFDHIFEYHKKYLDIHYVIEGHEVIKLGKGDKVEVEEYLGDIGFIKCSEETSFDLRDNYIAFFFPEEAHQPNGMGSLGNYVKKGVLKVLMA

SEQ ID NO: 935 - DNA, 828 bp, Streptococcus agalactiae
atgaaaaagaaaacattcagtgcttataactttttaacggctcttatcctttgtcttttgacagtgctttttatctttccattttattggattatgacaggagcttttaaatctcaacctgatactattatcatccccccacaatggtggcccaaagcaccgaccttagaaaattttaaagctttaactgtacaaaacccagctttgagatggctttggaatagtgtctttatctcaattatgacaatgttcctagtttgctgtacatcgtcaatggcaggctatgttttagctaagaaacgattttacggtcaaaaaatattgttctccctttttattgctgctatggctttacctaaacaagttgttttagtgccattagttagaattatcaattttatggggatacatgataccttatgggcggttattttacctcttgttggttggccttttggggtcttcttgatgaaacagttttctgaaaatattccaacagaattactggaatcagctaaaattgatggttgtggagagattcgaacatttattaatgtagcatttccaattgtcaaacctggatttgctgccctagctattttcacatttatcaatacttggaatgactattttatgcaattagttatgctaacttctagaaataatctgaccatttctcttggggtagctactatgcaggctgaaatggcaacaaactatggcttaattatggcaggtgcagccttagctgctgttcctattgtgacagtattcttagttttccaaaaatcctttactcaggggattacaatgggagctgttaaagga

SEQ ID NO: 936 - protein, 276 aa, Streptococcus agalactiae
MKKKTFSAYNFLTALILCLLTVLFIFPFYWIMTGAFKSQPDTIIIPPQWWPKAPTLENFKALTVQNPALRWLWNSVFISIMTMFLVCCTSSMAGYVLAKKRFYGQKILFSLFIAAMALPKQVVLVPLVRIINFMGIHDTLWAVILPLVGWPFGVFLMKQFSENIPTELLESAKIDGCGEIRTFINVAFPIVKPGFAALAIFTFINTWNDYFMQLVMLTSRNNLTISLGVATMQAEMATNYGLIMAGAALAAVPIVTVFLVFQKSFTQGITMGAVKG

SEQ ID NO: 937 - DNA, 828 bp, Streptococcus pyogenes
atgacgaaaaagaaactaaccgcatcagatatcttaaccactgtgatgctatgtgttttgaccattttgtttatttttccattttattggattatgacaggagcatttaaggctcaagccgataccattatgattccaccgcaatggtggccaaaggcgcctactattgaaaattttaaggccttggtagtgcaaaatccagccttaaaatggttgtggaatagtgtctttatttcggtggcgaccatgttcttggtttgtggaacctcctcgttggctggctatgctttggccaaaaagcggttttatggacagcggcttttgttttcgatttttattgctgctatggccttgccaaaacaggttgttctagtgcctcttgtgcggattgttaattttatgggaatccatgacactttggcggctgttattttgcctcttgtgggctggccatttggtgttttccttatgaaacagttctcagaaaatattccaaccgagttattggaatccgccaagattgatggatgtggcgaaattcgtacctttttcaatgtggctttccctattgtcaaaccaggctttgcagcgctagcgatttttacctttatcaatacttggaatgattattttatgcagttagtgatgttaacctctcgagaaaatttaacgatttcacttggggttgccactatgcaagctgaaatggctactaattatggcttgattatggcaggggctgccatggctgcagtgcctattgtaacagtctttcttgtcttccaaaaatcatttacccaaggcattactatgggtgctgtgaaaggt

SEQ ID NO: 938 - protein, 276 aa, Streptococcus pyogenes
MTKKKLTASDILTTVMLCVLTILFIFPFYWIMTGAFKAQADTIMIPPQWWPKAPTIENFKALVVQNPALKWLWNSVFISVATMFLVCGTSSLAGYALAKKRFYGQRLLFSIFIAAMALPKQVVLVPLVRIVNFMGIHDTLAAVILPLVGWPFGVFLMKQFSENIPTELLESAKIDGCGEIRTFFNVAFPIVKPGFAALAIFTFINTWNDYFMQLVMLTSRENLTISLGVATMQAEMATNYGLIMAGAAMAAVPIVTVFLVFQKSFTQGITMGAVKG

SEQ ID NO: 939 - DNA, 885 bp, Streptococcus agalactiae
atgcgtactaataagttaaagatgagggaaacgatgatagcttatgcttttctagcacctattctcttatttttcttaatttttgtttttgcaccgatggttatgggctttgtcactagtttttttaattattctatgacacagttcacttttattgggttagctaattacaatcgtatgtttcatgattctattttcatgaaatccttgataaatacagtaatcattgtgattggctctgtgccagtagtggttttcttctcactttttgttgctgccaatacttatgaaaaaaatgttttttcacgctctttctaccgttgtgtcttcttcttgccagtagtaactggtagtgttgcagttacagttgtttggaaatggatttatgaccctatgtccggaattttaaattacatcttgaaatcaggtcatgtcattgaacagaatattagctggcttggggataagcactgggcattgcttgctattattattattttgctaacgacctcagttggtcaacctattattctatatattgcggcgatgggaaatattgataattctctttgcgaagctgcgcgtgttgatggagccaatgaaatgcaagttttttggcaaattaaatggccgagtctcttaccaactacactctatattgcagttataacaacaattaattcatttcaatgttttgccttaatccagctcctaacatctggtggaccaaattattcaacaagcactttgatgtattatctttatgaaaaagcctttaaactatcagaatatggctatgctaatactatgggagtattcctagcagtaatgattgctttaataagttttgctcaatttaagatcttaggaaatgatgtggaatat

SEQ ID NO: 940 - protein, 295 aa, Streptococcus agalactiae
MRTNKLKMRETMIAYAFLAPILLFFLIFVFAPMVMGFVTSFFNYSMTQFTFIGLANYNRMFHDSIFMKSLINTVIIVIGSVPVVVFFSLFVAANTYEKNVFSRSFYRCVFFLPVVTGSVAVTVVWKWIYDPMSGILNYILKSGHVIEQNISWLGDKHWALLAIIIILLTTSVGQPIILYIAAMGNIDNSLCEAARVDGANEMQVFWQIKWPSLLPTTLYIAVITTINSFQCFALIQLLTSGGPNYSTSTLMYYLYEKAFKLSEYGYANTMGVFLAVMIALISFAQFKILGNDVEY

SEQ ID NO: 941 - DNA, 987 bp, Streptococcus pyogenes
gtgttcctaacaagtggcttcttttcaatgcacatgtcaaatggtcactggaaagaagcttttctttttagaaaagttgaacagaaaaaagaggtatttcaagtgaacgtcaataaattaaaaatgagagagacgctcatctcatacgctttcttagctccggtcttggttttctttgtgatttttgtcttgataccgatgattatgggctttgtgacgagctttttcaattattccatgacagagtttacctttgttggttttgctaattatgctaggatgtttcaagatcccattttcatgaagtctcttattaacaccttgattattgttattggttcggtacctgttgtagttttcttttccctctttgtggcggctaaaacctacgacaaaaatgtagtggcgcgttcgttttaccgggcagttttctttctgcctgttgttaccggaagtgttgcggtgacggtggtttggaaatggatctatgatccaatgtcagggattttgaattatgtcttaaaatatgctcatgtgattgaacaaaatattagttggctgggagataagcactgggctttgttggctattattgttattttattaaccacatctgttgggcagcctattattctatatattgctgctatgggaaatattgataactctttggtagaagctgcgcgtgtggacggcgccacagaatttcaggtgttttggaatatcaagtggccaagtctgctgccaacaaccttatatattgctgtcataacaaccattaattccttccaatgttttgctttgattcaacttttgacgtctggagggccaaattattcaaccagtaccctcatgtactatttgtatgaaaaggcctttaagctctctgaatacggctatgccaacacaatgggtgtattcttggcagtcatgattgcaatcatcagctttgctcaatttaaaattttaggtaatgatgtggaatat

SEQ ID NO: 942 - protein, 329 aa, Streptococcus pyogenes
VFLTSGFFSMHMSNGHWKEAFLFRKVEQKKEVFQVNVNKLKMRETLISYAFLAPVLVFFVIFVLIPMIMGFVTSFFNYSMTEFTFVGFANYARMFQDPIFMKSLINTLIIVIGSVPVVVFFSLFVAAKTYDKNVVARSFYRAVFFLPVVTGSVAVTVVWKWIYDPMSGILNYVLKYAHVIEQNISWLGDKHWALLAIIVILLTTSVGQPIILYIAAMGNIDNSLVEAARVDGATEFQVFWNIKWPSLLPTTLYIAVITTINSFQCFALIQLLTSGGPNYSTSTLMYYLYEKAFKLSEYGYANTMGVFLAVMIAIISFAQFKILGNDVEY

SEQ ID NO: 943 - DNA, 1314 bp, Streptococcus agalactiae
atgagtatcaaaaaaagtgtgattggtttttgcctcggagctgcagcattatcaatgtttgcttgtgtagacagtagtcaatctgttatggctgccgagaaggataaagtcgaaattacgtggtgggcttttccaacctttactcaagaaaaggctaaggatggagtaggtacttatgagaaaaaagtcatcaaggcttttgaaaagaaaaatcctaatataaaagtaaaactagagacaattgatttcacatctggacctgaaaaaatcactacagcgattgaagcagggacagcacctgatgtgctttttgatgcaccagggcgaattattcaatatggtaaaaatggtaaattagcagatttgaatgatttatttacagaccaatttattaaggatgtcaataataagaatatcattcaagcttctaagtctggcgataaagcctacatgtatccaataagttctgccccattttatatggcgttcaataaaaaaatgcttaaagatgcaggagttttgaaactcgtaaaagaaggttggactactagtgattttgaaaaagtactaaaagcactaaaaaataaaggctatacaccaggttcattctttgcaaacgggcaaggaggagatcaaggaccacgtgcattttttgctaatctttatagtgctccaataacagataaagaagtaacaaaatataccactgacactaaaaattctgtaaaatcaatgaaaaaaatagttgaatggattaagaaaggctacttgatgaatgggtctcagtatgatggctcagctgacattcaaaactttgccaatggacaaactgctttcactatcctatgggctccagctcaacccaaaactcaagcaaaattattagagtcaagtaaagtggattaccttgaagtgccattcccatcagaagatggaaaaccagatttagaataccttgttaatggttttgcggtctttaataataaagatgaaaacaaagtaaaagcctctaagaaatttatcacttttattgctgacgataaaaaatggggaccaaaagatgttatacgtacaggtgctttcccagttagaacatcatttggagatctttataaaggtgataaacgtatgatgaagatttcaaaatggactcaatattattcaccatattacaacactatcgatggattttctgaaatgagaaccttatggttcccaatggttcaatctgtatccaatggtgacgaaaaaccagcagatgctttgaaagactttactcaaaaagcaaatgataccattaaaaaagcagctaaa

SEQ ID NO: 944 - protein, 438 aa, Streptococcus agalactiae
MSIKKSVIGFCLGAAALSMFACVDSSQSVMAAEKDKVEITWWAFPTFTQEKAKDGVGTYEKKVIKAFEKKNPNIKVKLETIDFTSGPEKITTAIEAGTAPDVLFDAPGRIIQYGKNGKLADLNDLFTDQFIKDVNNKNIIQASKSGDKAYMYPISSAPFYMAFNKKMLKDAGVLKLVKEGWTTSDFEKVLKALKNKGYTPGSFFANGQGGDQGPRAFFANLYSAPITDKEVTKYTTDTKNSVKSMKKIVEWIKKGYLMNGSQYDGSADIQNFANGQTAFTILWAPAQPKTQAKLLESSKVDYLEVPFPSEDGKPDLEYLVNGFAVFNNKDENKVKASKKFITFIADDKKWGPKDVIRTGAFPVRTSFGDLYKGDKRMMKISKWTQYYSPYYNTIDGFSEMRTLWFPMVQSVSNGDEKPADALKDFTQKANDTIKKAAK

SEQ ID NO: 945 - DNA, 1317 bp, Streptococcus pyogenes
atgaacatgaagaagttagcttcattagcgatgcttggtgcatctgttttaggactagcagcttgtggcggaaagagccagaaagaggctggtgcaagtaaatctgatactgctaagacagaaatcacatggtgggctttcccggtcttcacgcaagaaaaagctgaagatggtgtgggaacctatgagaagaaattgattgctgcctttgagaaagctaatccagaaatcaaggtaaaattggaaaccattgattttacatctggtcctgagaaaatcacaactgctattgaagctggaacagctcctgatgtcctctttgatgctccaggtcgtatcattcaatatggtaaaaatgggaaattggctgacttgaatgacttgttcacagaagagtttaccaaagatgttaacaatgacaaattgattcaagcctcaaaagcaggagatacagcttacatgtatcctatcagctctgctccattctacatggcgttgaataaaaaaatgctcaaagatgctggcgtccttgatcttgtgaaagagggttggacaacagatgattttgaaaaagtcttgaaagcattgaaggacaaaggatataacccaggttctttctttgctaatggtcaaggtggtgaccaaggaccacgtgccttctttgctaacctttatagtagtcatattaccgatgacaaagtaaccaaatacaccacagatgatgctaactctattaaagccatgaccaagatttccaattggattaaagatggtttaatgatgaatggctctcagtacgatggttcagctgatattcaaaactttgcgaatggccaaacttcctttaccattctttgggcgcctgcacaaccaggcatccaagctaaattgttagaagctagtaaagtggattaccttgaaatcccattcccatcagatgatggcaaaccagaactagaatacctcgtaaatggttttgcggtctttaataacaaagatgaacaaaaagtcgctgcctctaagacatttatccaatttatcgctgatgataaagaatggggacctaaaaatgttgttcgtacaggtgctttccctgtaagaacttcttatggggatctttacaaagacaaacgaatggaaaaaattgctgaatggacaaaattctactcaccatactataacacgattgatgggtttgctgaaatgagaactctttggttcccaatggttcaagccgtctctaatggtgatgaaaagccagaagatgctttgaaagccttcactgaaaaagcaaacaagacaatcaaaaaaacacaa

SEQ ID NO: 946 - protein, 439 aa, Streptococcus pyogenes
MNMKKLASLAMLGASVLGLAACGGKSQKEAGASKSDTAKTEITWWAFPVFTQEKAEDGVGTYEKKLIAAFEKANPEIKVKLETIDFTSGPEKITTAIEAGTAPDVLFDAPGRIIQYGKNGKLADLNDLFTEEFTKDVNNDKLIQASKAGDTAYMYPISSAPFYMALNKKMLKDAGVLDLVKEGWTTDDFEKVLKALKDKGYNPGSFFANGQGGDQGPRAFFANLYSSHITDDKVTKYTTDDANSIKAMTKISNWIKDGLMMNGSQYDGSADIQNFANGQTSFTILWAPAQPGIQAKLLEASKVDYLEIPFPSDDGKPELEYLVNGFAVFNNKDEQKVAASKTFIQFIADDKEWGPKNVVRTGAFPVRTSYGDLYKDKRMEKIAEWTKFYSPYYNTIDGFAEMRTLWFPMVQAVSNGDEKPEDALKAFTEKANKTIKKTQ

SEQ ID NO: 947 - DNA, 696 bp, Streptococcus agalactiae
atgccacatctaagtaaagaagcttttaaaaagcaaataaaaaatggcattattgtgtcatgtcaagctttgcccggggagcctctttatactgaaagtggaggtgttatgcctcttttagctttggcagctcaagaagcaggagcggttggtataagagccaatagtgtccgcgacattaaggaaattcaagaggttactaatttacctatcatcggcattattaaacgtgaatatcctccacaagaaccatttatcactgctacgatgacagaggtggatcaattagctagtttagatattgcagtaatagccttagattgtacacttagagagcgtcatgatggtttgagtgtagttgagtttattcaaaagataaaaaggaaatatcctgaacagttgttaatggctgatataagtacttttgaagaaggcaaaaatgcttttgaagcaggagttgattttgtgggtacaactctatctggatacacagattacagccgccaagaagaaggaccggatatagaactccttaataagctctgtcaagccggtatagatgtgattgcggaaggtaaaattcatactcctaagcaggctaatgaaattaatcatataggtgttgcaggaattgtagttggtggtgctatcactagaccaaaagaaatagcggagcgtttcatctcaggacttagt

SEQ ID NO: 948 - protein, 232 aa, Streptococcus agalactiae [sequence omitted]

SEQ ID NO: 949 - DNA, 702 bp, Streptococcus pyogenes
atgcctgataaaccaaccaaagaaaagctcatggagcagttaaagggtgggattatcgtttcttgtcaggctttgccaggtgagcctctctattcagagactgggggtattatgccactgatggcaaaagctgctcaagaagctggtgctgtcggcatcagagctaattcggttagagacattaaagaaattcaagccataacagacctaccaattatcggtatcatcaaaaaagattacccgccgcaagagccttttattacggcaacgatgaccgaagtggatcaattagctgccttaaatattgcagtgattgctatggattgtaccaagcgtgaccgacatgatggcttggatattgctagctttattcgacaagttaaggaaaagtaccccaatcagcttttgatggcagatattagtacctttgatgaaggactagtggcccatcaggctggcattgattttgttggaaccaccttgtcaggctacaccccgtatagccgtcaggaagcaggtcctgatgtggcattgatagaagctctttgcaaagcaggcattgctgtcattgccgaaggaaagattcattccccagaagaagccaagaaaattaatgacttaggtgtggcaggtattgttgttggaggggccatcacaaggcctaaggaaattgcagagcgttttatcgaagcgctcaaatcc

SEQ ID NO: 950 - protein, 234 aa, Streptococcus pyogenes
MPDKPTKEKLMEQLKGGIIVSCQALPGEPLYSETGGIMPLMAKAAQEAGAVGIRANSVRDIKEIQAITDLPIIGIIKKDYPPQEPFITATMTEVDQLAALNIAVIAMDCTKRDRHDGLDIASFIRQVKEKYPNQLLMADISTFDEGLVAHQAGIDFVGTTLSGYTPYSRQEAGPDVALIEALCKAGIAVIAEGKIHSPEEAKKINDLGVAGIVVGGAITRPKEIAERFIEALKS

SEQ ID NO: 951 - DNA, 1302 bp, Streptococcus agalactiae
atgaaaatgaataaaaaggtactattgacatcgacaatggcagcttcgctattatcagtcgcaagtgttcaagcacaagaaacagatacgacgtggacagcacgtactgtttcagaggtaaaggctgatttggtaaagcaagacaataaatcatcatatactgtgaaatatggtgatacactaagcgttatttcagaagcaatgtcaattgatatgaatgtcttagcaaaaataaataacattgcagatatcaatcttatttatcctgagacaacactgacagtaacttacgatcagaagagtcatactgccacttcaatgaaaatagaaacaccagcaacaaatgctgctggtcaaacaacagctactgtggatttgaaaaccaatcaagtttctgttgcagaccaaaaagtttctctcaatacaatttcggaaggtatgacaccagaagcagcaacaacgattgtttcgccaatgaagacatattcttctgcgccagctttgaaatcaaaagaagtattagcacaagagcaagctgttagtcaagcagcagctaatgaacaggtatcaccagctcctgtgaagtcgattacttcagaagttccagcagctaaagaggaagttaaaccaactcagacgtcagtcagtcagtcaacaacagtatcaccagcttctgttgccgctgaaacaccagctccagtagctaaagtagcaccggtaagaactgtagcagcccctagagtggcaagtgttaaagtagtcactcctaaagtagaaactggtgcatcaccagagcatgtatcagctccagcagttcctgtgactacgacttcaccagctacagacagtaagttacaagcgactgaagttaagagcgttccggtagcacaaaaagctccaacagcaacaccggtagcacaaccagcttcaacaacaaatgcagtagctgcacatcctgaaaatgcagggctccaacctcatgttgcagcttataaagaaaaagtagcgtcaacttatggagttaatgaattcagtacataccgtgcgggagatccaggtgatcatggtaaaggtttagcagttgactttattgtaggtactaatcaagcacttggtaataaagttgcacagtactctacacaaaatatggcagcaaataacatttcatatgttatctggcaacaaaagttttactcaaatacaaacagtatttatggacctgctaatacttggaatgcaatgccagatcgtggtggcgttactgccaaccactatgaccacgttcacgtatcatttaacaaa

SEQ ID NO: 952 - protein, 434 aa, Streptococcus agalactiae
MKMNKKVLLTSTMAASLLSVASVQAQETDTTWTARTVSEVKADLVKQDNKSSYTVKYGDTLSVISEAMSIDMNVLAKINNIADINLIYPETTLTVTYDQKSHTATSMKIETPATNAAGQTTATVDLKTNQVSVADQKVSLNTISEGMTPEAATTIVSPMKTYSSAPALKSKEVLAQEQAVSQAAANEQVSPAPVKSITSEVPAAKEEVKPTQTSVSQSTTVSPASVAAETPAPVAKVAPVRTVAAPRVASVKVVTPKVETGASPEHVSAPAVPVTTTSPATDSKLQATEVKSVPVAQKAPTATPVAQPASTTNAVAAHPENAGLQPHVAAYKEKVASTYGVNEFSTYRAGDPGDHGKGLAVDFIVGTNQALGNKVAQYSTQNMAANNISYVIWQQKFYSNTNSIYGPANTWNAMPDRGGVTANHYDHVHVSFNK

SEQ ID NO: 953 - DNA, 1167 bp, Streptococcus pyogenes
atgattattactaaaaagagcttatttgtgacaagtgtcgctttgtcgttagtacctttggcgacagcgcaggcacaagagtggacaccacgatcggttacagaaatcaagtctgaactcgtcctagttgataatgtttttacttatactgtaaaatacggtgacactttaagcacaattgctgaagcaatggggattgatgtgcatgtcttaggagatattaatcatattgctaatattgacctaatttttccagacacgatcctaacagcaaactacaatcaacacggtcaggcaacgaatttgacggttcaagcacctgcttctagtccagctagcgttagtcatgtacctagcagtgagccattaccccaagcatctgccacctctcaaccgactgttcctatggcaccacctgcgacaccatctgatgtcccaacgacaccattcgcatctgcaaagccagatagttctgtgacagcgtcatctgagctcacatcgtcaacgaatgatgtttcgactgagttgtctagcgaatcacaaaagcagccagaagtaccacaagaagcagttccaactcctaaagcagctgaaacgactgaagtcgaacctaagacagacatctcagaagccccaacttcagctaataggcctgtacctaacgagagtgcttcagaagaagtttcttctgcggccccagcacaagccccagcagaaaaagaagaaacctctgcgccagcagcacaaaaagctgtagctgacaccacaagtgttgcaacctcaaatggcctttcttacgctccaaaccatgcctacaatccaatgaatgcagggcttcaaccacaaacagcagccttcaaagaagaagtggcttctgcctttggtattacgtcatttagtggttaccgtccaggtgatccaggagatcatggtaaaggtttggccattgattttatggtgcctgaaaattctgctcttggtgatcaagttgctcaatatgccattgaccatatggcagagcgtggtatttcatacgttatttggaaacagcgattctatgcgccatttgcaagtatttacggaccagcctacacatggaaccccatgccagatcgcggcagtattacagaaaaccattatgatcatgttcatgtctcctttaatgct

SEQ ID NO: 954 - protein, 389 aa, Streptococcus pyogenes
MIITKKSLFVTSVALSLVPLATAQAQEWTPRSVTEIKSELVLVDNVFTYTVKYGDTLSTIAEAMGIDVHVLGDINHIANIDLIFPDTILTANYNQHGQATNLTVQAPASSPASVSHVPSSEPLPQASATSQPTVPMAPPATPSDVPTTPFASAKPDSSVTASSELTSSTNDVSTELSSESQKQPEVPQEAVPTPKAAETTEVEPKTDISEAPTSANRPVPNESASEEVSSAAPAQAPAEKEETSAPAAQKAVADTTSVATSNGLSYAPNHAYNPMNAGLQPQTAAFKEEVASAFGITSFSGYRPGDPGDHGKGLAIDFMVPENSALGDQVAQYAIDHMAERGISYVIWKQRFYAPFASIYGPAYTWNPMPDRGSITENHYDHVHVSFNA

SEQ ID NO: 955 - DNA, 897 bp, Streptococcus agalactiae
ttgaataaatggttagttaaggcaagttccttagttgttttaggtggtatggttttatctgcgggttcccgagttttagcggatacttatgtccgtccaattgataatggtagaattacaacaggtttcaatggttatcctggacattgtggggtggattatgctgttccgactggaacgattattagggcagtggcagatggtactgtgaaatttgcaggagctggagccaacttttcttggatgacagacttagcaggaaattgtgtcatgattcaacatgcggatggaatgcatagtggttacgctcatatgtcacgtgtggtggctaggactggggaaaaagtcaaacaaggagatatcatcggttacgtaggagcaactggtatggcgacgggacctcaccttcattttgaatttttaccagctaaccctaattttcaaaatggtttccatggacgtatcaatccaacgtcactaattgctaatgttgcgacctttagtggaaaaacgcaagcatcagctccaagcattaagccattacaatcagctcctgtacagaatcaatctagtaaattaaaagtgtatcgagtagatgaattacaaaaggttaatggtgtttggttagtcaaaaataacaccctaacgccgactgggtttgattggaacgataatggtataccagcatcagaaattgatgaggttgatgctaatggtaatttgacagctgaccaggttcttcaaaaaggtggttactttatctttaatcctaaaactcttaagactgtagaaaaacccatccaaggaacagctggtttaacttgggctaagacacgctttgctaatggtagttcagtttggcttcgcgttgacaacagtcaagaactgctttacaaa

SEQ ID NO: 956 - protein, 299 aa, Streptococcus agalactiae
MNKWLVKASSLVVLGGMVLSAGSRVLADTYVRPIDNGRITTGFNGYPGHCGVDYAVPTGTIIRAVADGTVKFAGAGANFSWMTDLAGNCVMIQHADGMHSGYAHMSRVVARTGEKVKQGDIIGYVGATGMATGPHLHFEFLPANPNFQNGFHGRINPTSLIANVATFSGKTQASAPSIKPLQSAPVQNQSSKLKVYRVDELQKVNGVWLVKNNTLTPTGFDWNDNGIPASEIDEVDANGNLTADQVLQKGGYFIFNPKTLKTVEKPIQGTAGLTWAKTRFANGSSVWLRVDNSQELLYK

SEQ ID NO: 957 - DNA, 1545 bp, Streptococcus agalactiae
atgactaaacgtgctttaatctcagtttctgacaaatcaggaattattgactttgcaaaagaattgaaaaacttgggttgggatattatctcaactggtgggactaaggttgcccttgatgatgctggtgttgagaccattgccatcgacgatgtgactggattcccagaaatgatggacggtcgtgttaagaccctccacccaaacattcacggtgggcttctggctcgtcgcgacgctgacagccaccttcaggctgctaaggacaacaatattgagttgattgacctcgtggttgtcaacctctatcccttcaaggagaccatccttcgcccagacgtgacctacgatttggcggtggaaaatatcgacatcggcggtccatcaatgcttcgctcagctgctaaaaaccacgctagcgtaaccgttgtggttgattcagctgactatgccactgttttgggagaattggctgacgctagtcagacgacatttaaaactcgtcaacgcttggcagctaaggccttccgtcatacggcagcctacgacgctttgattgctgagtacttcacagctcaagtgggagaggctaagcctgaaaaattgaccatcacttatgaccttaaacaggctatgcgttacggagaaaatccacagcaagacgctgatttctaccaaaaagccttaccaacagactactcaatcgcttcagctaaacagctcaatggaaaagaattgtccttcaataatatccgtgatgctgatgcagcaatccgtattatccgcgatttcaaagacagtccaacggttgttgccctcaaacacatgaacccatgtggtatcggacaggctgatgatattgagacagcttgggattacgcttatgaagctgatccagtttcaatctttggtggaattgttgtccttaaccgtgaagttgacgcagcgacagctgagaagatgcaccctatcttcttggaaatcatcatcgcaccatcatactcagaagaagcgctagctattctcacaaataaaaagaaaaacttgcgtatccttgagttgccgtttgatgcccaagctgccagcgaagtggaagctgagtacactggcgtagttggtggacttttggtgcaaaaccaagacgttgtggctgaaaatccatctgactggcaagtggtgacagaccgccagccaacagaacaagaggcgactgcccttgagtttgcctggaaggctatcaagtatgttaagtctaacgggattattattactaacgatcacatgacgcttggactcggtgcaggtcaaaccaaccgtgtcggctcagtcaagattgctatcgagcaggctaaggaccaccttgacggtgccgttctagcatcagatgccttcttcccatttgcggacaacattgaagaaatcgctgccgcagggatcaaagcaatcatccaaccaggtggttcagttcgtgaccaagaatctattgacgccgcaaacaaacatggcttgaccatgatcttcacaggcgtgagacattttagacat

SEQ ID NO: 958 - protein, 515 aa, Streptococcus agalactiae
MTKRALISVSDKSGIIDFAKELKNLGWDIISTGGTKVALDDAGVETIAIDDVTGFPEMMDGRVKTLHPNIHGGLLARRDADSHLQAAKDNNIELIDLVVVNLYPFKETILRPDVTYDLAVENIDIGGPSMLRSAAKNHASVTVVVDSADYATVLGELADASQTTFKTRQRLAAKAFRHTAAYDALIAEYFTAQVGEAKPEKLTITYDLKQAMRYGENPQQDADFYQKALPTDYSIASAKQLNGKELSFNNIRDADAAIRIIRDFKDSPTVVALKHMNPCGIGQADDIETAWDYAYEADPVSIFGGIVVLNREVDAATAEKMHPIFLEIIIAPSYSEEALAILTNKKKNLRILELPFDAQAASEVEAEYTGVVGGLLVQNQDVVAENPSDWQVVTDRQPTEQEATALEFAWKAIKYVKSNGIIITNDHMTLGLGAGQTNRVGSVKIAIEQAKDHLDGAVLASDAFFPFADNIEEIAAAGIKAIIQPGGSVRDQESIDAANKHGLTMIFTGVRHFRH

SEQ ID NO: 959 - DNA, 1545 bp, Streptococcus pyogenes
atgactaaacgtgctttaatctcagtgtctgacaagtcaggaattgttgactttgcaaaagaattgaaaaacttgggttgggatattatctcaactggtgggactaaggttacccttgacgatgctggtgttgagaccattgccatcgacgatgtgactagattcccagagatgatggacggtcgtgttaagaccctccacccaaacattcacggtgggcttttggctcgtcgcgacgctgacagccaccttcaggctgctaaggacaacaatatcgagctgattgacctcgtggttgtcaacctctatcccttcaaggagactatccttcgtccagacataacctatgatttggcggtggaaaacatcgacatcggcggtccatcaatgcttcgctcagccgctaaaaatcacgctagcgtgaccgttgtggttgacccagcggattatgcgactgttttgggagaattggctgacgctggtcagacgacatttgaaacgcgtcaacgcttggcagctaaggtctttcgtcacacagcagcctacgacgctttgattgctgagtacttcacaactcaagtgggagaggctaagcctgaaaaattaaccatcacttacgaccttaaacaggctatgcgttacggagaaaatccacaacaagacgctgatttctatcaaaaagccttgccaacagactactcaattgcttctgctaaacagctcaacggaaaagaattgtctttcaataatatccgtgatgccgatgcggcaatccgtattatccgcgatttcaaagaccgtccaactgttgttgctctcaaacacatgaacccatgtggtatcggacaggctgatgacattgagactgcttgggattacacttataaagctgacccagtttcaatctttggcggaattattgtccttaaccgtgaagttgacgcagcgacagccaagaagatgcaccctatcttcttggaaatcatcatcgcaccatcatactcagaagaagcgctagctattctcacaaataaaaagaaaaacttgcgaatccttgagttgccgtttgatgcccaagctgccagcgaagtggaagctgagtacactggcgtagttggtggacttttggtgcaaaaccaagacgttgtggctgaaaatccatctgactggcaagtggtgacagaccgccaaccaacagaacaagaggcgactgcccttgagtttgcctggaaggctatcaagtatgttaagtctaacgggattattattactaacgatcacatgacgcttggactcggtgcaggtcaaaccaaccgtgtcggctcagtcaagattgctatcgagcaggctaaagaccaccttgacggtgccgttctagcatcagatgccttcttcccatttgcggacaacattgaagaaatcgctgccgcagggatcaaagcaatcatccaaccaggtggttcagttcgtgaccaagactctattgacgccgcaaacaaacatggcttgaccatgatcttcacaggtgtgagacattttaggcat

SEQ ID NO: 960 - protein, 515 aa, Streptococcus pyogenes
MTKRALISVSDKSGIVDFAKELKNLGWDIISTGGTKVTLDDAGVETIAIDDVTRFPEMMDGRVKTLHPNIHGGLLARRDADSHLQAAKDNNIELIDLVVVNLYPFKETILRPDITYDLAVENIDIGGPSMLRSAAKNHASVTVVVDPADYATVLGELADAGQTTFETRQRLAAKVFRHTAAYDALIAEYFTTQVGEAKPEKLTITYDLKQAMRYGENPQQDADFYQKALPTDYSIASAKQLNGKELSFNNIRDADAAIRIIRDFKDRPTVVALKHMNPCGIGQADDIETAWDYTYKADPVSIFGGIIVLNREVDAATAKKMHPIFLEIIIAPSYSEEALAILTNKKKNLRILELPFDAQAASEVEAEYTGVVGGLLVQNQDVVAENPSDWQVVTDRQPTEQEATALEFAWKAIKYVKSNGIIITNDHMTLGLGAGQTNRVGSVKIAIEQAKDHLDGAVLASDAFFPFADNIEEIAAAGIKAIIQPGGSVRDQDSIDAANKHGLTMIFTGVRHFRH

SEQ ID NO: 961 - DNA, 750 bp, Streptococcus agalactiae
atgaaactagtgaaaaatttagagatagtagagtctatttttggtgattgggacgagaccataatctggtcgtgtgtccaaggtattatgggagaagtttttgtagatagtttagaccaaccaaaatcttctttggcaaaattgggaaggaaatcatcttttggttttctagcaggtcagcctactttatttctactagaagtttgctctggggaggatattatccttgttcctcagcataaaggatggtcagatttgattgaatcaacttatggtcagaatgctcattcttttaagcgttatgcgacgaaaaaagatactttgtttgagcgaagtaggttagagaagtttgttactcagttgccaaatggttttgaattacgtgctattgatgagaaagtttacaactcttgcttagaaaaggaatggtcacaggatttagtagcaaattacgctacttatcagtactataaaaaacaaggtataggttatgttgtatattatcaggggaatatcattgcaggagcttcatcttattcaacctataaaaatgggattgagatagaagtagatacgcatccagattttcgtcggcgtggtttagcaacaatagttgcagctcagttaatactaacttgtttagataagggaatttatcctagctgggatgctcatacaaggacttcattgaatttatctgaaaaactcggttatgaattttctcatgaatacatagcctatgaaatagat

SEQ ID NO: 962 - protein, 250 aa, Streptococcus agalactiae
MKLVKNLEIVESIFGDWDETIIWSCVQGIMGEVFVDSLDQPKSSLAKLGRKSSFGFLAGQPTLFLLEVCSGEDIILVPQHKGWSDLIESTYGQNAHSFKRYATKKDTLFERSRLEKFVTQLPNGFELRAIDEKVYNSCLEKEWSQDLVANYATYQYYKKQGIGYVVYYQGNIIAGASSYSTYKNGIEIEVDTHPDFRRRGLATIVAAQLILTCLDKGIYPSWDAHTRTSLNLSEKLGYEFSHEYIAYEID

SEQ ID NO: 963 - DNA, 546 bp, Streptococcus agalactiae
atgaaaatcgctgtttttgcttctggtaatggttccaactttcaggtcatagcagagcagtttcaagttagttttgtcttttcagatcatcgtgatgcctatgttttagagcgtgctcagaacttagccattccaagcttcgcttttgaactcaaagagtttgagaataaggcggcttacgagcaagccgtcgttgatttgttggacaaacacgagattgacttggtctgtctggcgggctacatgaagattgtcggagaaaccttgctctcagcctatgaagggcgtatcatcaatattcacccaacctatctgcctgaatttccaggtgctcacggtatcaaggatgcttgggaggcaggtgttgaccagtctggtgtgaccatccattgggtggactctggtgtggataccggtcaggtcatccaacaagtgcacgtgccacgcctagcagatgatagtctagaaagctttgaaacccgcatccacgaaaccgaataccaactctacccagctgtcttagatagcttgggcataaagagaaaa

SEQ ID NO: 964 - protein, 182 aa, Streptococcus agalactiae
MKIAVFASGNGSNFQVIAEQFQVSFVFSDHRDAYVLERAQNLAIPSFAFELKEFENKAAYEQAVVDLLDKHEIDLVCLAGYMKIVGETLLSAYEGRIINIHPTYLPEFPGAHGIKDAWEAGVDQSGVTIHWVDSGVDTGQVIQQVHVPRLADDSLESFETRIHETEYQLYPAVLDSLGIKRK

SEQ ID NO: 965 - DNA, 552 bp, Streptococcus pyogenes
atgaaaatcgctgtttttgcttctggtaatggttccaactttcaggtcatagcagagcagtttccagttagttttgtcttttcagatcatcgtgatgcctatgttttagagcgtgctcagaatttagccattccaagcttcgcttttgaactcaaggagtttgagaataaggtggcttacgagcaagccatcgttgatttgttggacaaacacgagattgacttagtctgtctggcaggctatatgaagattgttggagaaaccttactcttggcctatgagaggcgtattatcaatattcacccagcctacctgcctgaatttccaggtgcccacggtatcgaggatgcttgggaagctggtgttgaccagtctggcgtgaccatccactgggttgactctggtgtggataccggtcaggtcatccaacaagtgcgcgtgccacgcctagcagacgatagcctagaaagctttgaaacccgtatccatgaaaccgaatatcaactctacccagctgtcttagatagcttgggagtggagaggaaagtaatc

SEQ ID NO: 966 - protein, 184 aa, Streptococcus pyogenes
MKIAVFASGNGSNFQVIAEQFPVSFVFSDHRDAYVLERAQNLAIPSFAFELKEFENKVAYEQAIVDLLDKHEIDLVCLAGYMKIVGETLLLAYERRIINIHPAYLPEFPGAHGIEDAWEAGVDQSGVTIHWVDSGVDTGQVIQQVRVPRLADDSLESFETRIHETEYQLYPAVLDSLGVERKVI

SEQ ID NO: 967 - DNA, 1020 bp, Streptococcus agalactiae
atgtctgaaaaaaatgcttatgcccagtctggtgttgatgtagaagcgggctacgaagttgtcgaacgtatcaagaaacacgttgctcgcacagaacgtgctggtgtcatgggagctctcggtggctttggtggtatgtttgacctgtcacaaacaggtgttaaagaacctgtcttgatttcagggactgacggtgtcggaactaaactcatgcttgctatcaagtacgacaagcacgacacaatcggtcaagactgtgttgccatgtgtgtcaacgatattattgcagcaggtgctgagcccctttacttccttgactatgtcgcgactggtaaaaacgaacctgccaaattggaacaggttgtcgctggtgttgctgaaggttgtgttcaagctagcgcagctcttatcggtggtgaaacggctgagatgcctggtatgtatggcgaagatgattatgaccttgcaggctttgctgttggtgtggctgaaaaatctcaaatcatcgacggttcaaaggtaaaagaaggggatattcttcttggacttgcttcaagtggtatccattcaaatggttattcattggtacgtcgtgtctttgctgactacactggtgatgaggtgcttccagagcttgaaggcaaacaactcaaggatgtccttcttgagccaactcgtatctatgttaaagcagctctgccattgatcaaggaagaactagttaacggtatcgcccacatcacgggtggtggttttatcgagaatgttcctcgtatgtttgcggatgatttggctgcggaaatcgatgaggataaggtgcctgtacttccgattttcaaggcgcttgaaaaatatggtgacatcaagcacgaagaaatgtttgaaatcttcaacatgggtgtcggtcttatgctggatgttaaccctgaaaatgttgaccgtgtcaaagaacttttggacgaaccagtctatgaaatcggtcgtatcatcaagaaagcagacgatagtgtggtgattaaa

SEQ ID NO: 968 - protein, 340 aa, Streptococcus agalactiae
MSEKNAYAQSGVDVEAGYEVVERIKKHVARTERAGVMGALGGFGGMFDLSQTGVKEPVLISGTDGVGTKLMLAIKYDKHDTIGQDCVAMCVNDIIAAGAEPLYFLDYVATGKNEPAKLEQVVAGVAEGCVQASAALIGGETAEMPGMYGEDDYDLAGFAVGVAEKSQIIDGSKVKEGDILLGLASSGIHSNGYSLVRRVFADYTGDEVLPELEGKQLKDVLLEPTRIYVKAALPLIKEELVNGIAHITGGGFIENVPRMFADDLAAEIDEDKVPVLPIFKALEKYGDIKHEEMFEIFNMGVGLMLDVNPENVDRVKELLDEPVYEIGRIIKKADDSVVIK

SEQ ID NO: 969 - DNA, 1020 bp, Streptococcus pyogenes
atgtctgaaaaaaatgcttatgcaaaatctggtgttgatgttgaagctggttatgaagtggttgaaagaataaaaaaacacgttgctcgtacagaacgtgcgggagtcatgggagctctaggtggctttggtgggatgtttgacttgagtaaaacaggagttaaagagcctgtcttggtttcagggactgacggtgtcggaacaaaacttatgcttgctatcaagtacgacaagcacgacacaatcggtcaagactgtgttgccatgtgtgtcaatgatattattgcagcaggtgctgagccattatattttttagattatattgcgacaggaaaaaataacccagtcaaacttgaagaagttgtttctggtgttgcagaaggttgtgttcaagcaggagcagcactcattggaggtgagaccgctgaaatgcctggaatgtatggtcaagatgattatgaccttgcaggctttgctgttggtgtggctgaaaaatctcaaatcatcgacggttcaaaagtaaaagaaggcgatattcttttgggacttgcttcaagtggtatccattcaaacggttattctttggtacgtcgtgtctttgctgactatactggtaaagagctgcttccagagcttgaaggcaaacaacttaaggatgtcctccttgagccaactcgtatctatgttaaagcagctctgccattaatcaaggaagaactagtcaaaggtatcggccacatcacgggtggtggctttatcgagaatattcctcgtatgtttgcggatgatttggctgcggaaatcgatgaggacaaggtgccagtgcttccgattttcaaggcgcttgaaaaatatggtgacatcaagcacgaagaaatgtttgaaatcttcaatatgggtgtcggtcttatgctagctgttagtcctgaaaatgttaaccgcgtcaaagagctcttggatgaaccagtttatgaaatcggtcgtatcatcaagaaagcagacgctagtgtggtgattaaa

SEQ ID NO: 970 - protein, 340 aa, Streptococcus pyogenes
MSEKNAYAKSGVDVEAGYEVVERIKKHVARTERAGVMGALGGFGGMFDLSKTGVKEPVLVSGTDGVGTKLMLAIKYDKHDTIGQDCVAMCVNDIIAAGAEPLYFLDYIATGKNNPVKLEEVVSGVAEGCVQAGAALIGGETAEMPGMYGQDDYDLAGFAVGVAEKSQIIDGSKVKEGDILLGLASSGIHSNGYSLVRRVFADYTGKELLPELEGKQLKDVLLEPTRIYVKAALPLIKEELVKGIGHITGGGFIENIPRMFADDLAAEIDEDKVPVLPIFKALEKYGDIKHEEMFEIFNMGVGLMLAVSPENVNRVKELLDEPVYEIGRIIKKADASVVIK

SEQ ID NO: 971 - DNA, 1452 bp, Streptococcus agalactiae
atgacatacgaagtaaaatctctaaatgaagaatgtggagtctttggtatctgggggtatcctcaggcagctcaagtcacttactttgggcttcatagccttcaacatcgcggtcaagaaggagctggtattatttcaaatgataatgggaaactctatggttatcgaaatgttgggctcctttctgaagtttttaagaatcaatctgaattagataatttaactgggaatgcggctattggacatgttcggtatgctactgcaggttctgcagatattcgcaatattcagccttttctttataaatttcatgatgggcaatttgctttatgtcataatggtaatttgacaaatgctatttcctcaaggaaagaattagaaaagcaaggtgcaattttcaatgcctcctcagatactgaaattttaatgcatttgattcgtcgaagccataacccaagttttatggggaaggtaaaagaagctttaagcactgtaaagggaggtttcgcctatctactgatgacagaagataaattaattgctgctcttgaccctaatgcctttcgtcctttgtcaattggacaaatgcaaaatggtgcctgggttatttccagtgagacctgtgcttttgaggtggtaggcgcaaaatgggttagagatgttgaacctggtgaagttattcttatagacgatagtggtattcaatgtgatcgttatactgatgaaacgcaactggcaatttgttcgatggaatatgtctattttgcaaggccggattcaactatacatggtgttaatgttcatacggctcgaaaaaatatgggaaagcgtcttgcacaagaatttaaacaggatgctgatattgtaattggtgtcccaaattcgtccttatcggctgctatgggctttgctgaagaatccggattaccaaatgagatgggccttgtaaaaaatcagtatacgcagcgaacctttattcaaccgacacaagaattaagggaacaaggtgttcgaatgaaattatcagcggtatctggtgttgtcaaaggaaagcgcgttgttatgattgatgactcaattgtaagaggaacgacttctagaaggattgtaggattattaagagaagcaggagctactgaagtacatgttgctatagctagtccagaattaaagtatccttgtttttatggaattgatattcaaacaagacgagaattaatttcagcaaatcacgctgttgacgaagtgtgtgatattattggcgcagatagtctaacttatctatcaatcgatgggttaattaaatcaattggactcgaaacaaaagcaccaaatggtggtttatgcgtagcttactttgatggacattatccaacaccgctttatgattatgaagaagaatacctcagaagtttagaagaaaaaacaagtttttatattcaaaaagtgaaa

SEQ ID NO: 972 - protein, 484 aa, Streptococcus agalactiae
MTYEVKSLNEECGVFGIWGYPQAAQVTYFGLHSLQHRGQEGAGIISNDNGKLYGYRNVGLLSEVFKNQSELDNLTGNAAIGHVRYATAGSADIRNIQPFLYKFHDGQFALCHNGNLTNAISSRKELEKQGAIFNASSDTEILMHLIRRSHNPSFMGKVKEALSTVKGGFAYLLMTEDKLIAALDPNAFRPLSIGQMQNGAWVISSETCAFEVVGAKWVRDVEPGEVILIDDSGIQCDRYTDETQLAICSMEYVYFARPDSTIHGVNVHTARKNMGKRLAQEFKQDADIVIGVPNSSLSAAMGFAEESGLPNEMGLVKNQYTQRTFIQPTQELREQGVRMKLSAVSGVVKGKRVVMIDDSIVRGTTSRRIVGLLREAGATEVHVAIASPELKYPCFYGIDIQTRRELISANHAVDEVCDIIGADSLTYLSIDGLIKSIGLETKAPNGGLCVAYFDGHYPTPLYDYEEEYLRSLEEKTSFYIQKVK

SEQ ID NO: 973 - DNA, 1509 bp, Streptococcus pyogenes
ttgtgcgaaaaactttctattttcgctttacttgacagcctttgtatcgaggtaaaaatgacatacgaagtaaaatctctaaatgaagaatgtggagtctttggtatctggggacatcctcaggcagctcaagtcacttactttgggcttcatagccttcaacatcgcggtcaagaaggagctggtattgtttcaaatgacaatgggaaactctatggttatcgaaatgttgggctcctttctgaagtttttaagaatcaatctgaattagataatttaactgggaatgcggctattggacatgttcggtatgctactgcaggttctgcagatattcgcaatattcagccttttctttataaatttcatgacgggcaatttgctttatgccataatggtaatttgacaaatgctatttccttaaggaaagaattagaaaagcaaggtgcaattttcaatgcctcctcagatactgaaattttgatgcacttgattcgtcgaagccataactcaagtttcatgggaaaggtaaaagaagctctaaatacagtaaagggtggctttgcctatctactgatgacagaaaataaactcattgctgctcttgaccctaatgcctttcgtcctttgtcaattggacaaatgcaaaatggtgcctgggttatttccagtgagacctgtgcttttgaggtggtaggcgcaaaatgggttagagatgttgaacctggcgaagttattcttatagacgatcgtggtattcaatgtgatcgttatactgatgaaacgcaactggcaatttgttcgatggaatatgtctattttgcaaggccggattcaactatacatggtgttaatgttcatacggctcgaaaaaatatgggaaagcgtcttgcacaagaatttaaacaggatgctgatattgtaattggtgtcccaaattcgtccttatcggctgctatgggctttgctgaagaatccggattaccaaatgagatgggtcttgtaaaaaatcagtatacgcagcgaacctttattcaaccgacacaagaattaagggaacaaggtgttcgaatgaaactatcagcggtatccggtgttgtcaaaggaaagcgcgttgttatgattgatgactcaattgtaagaggaacgacttctagaaggattgtcggattattaagagaagcaggagctagtgaagtacatgttgctatagctagtccagaattaaagtatccttgtttttatggtattgatattcagactcgtcgtgagttgatttcagccaatcactctgttgatgaagtgtgtgatattattggcgcagatagtctgacctatctctcactggatgggttgattgaatcaattggactcgaaacaaaagcaccaaatggtggtttatgcgtagcttactttgatgggcattatccaacaccgctttatgattatgaagaagaatacctcagaagtttagaagagaaaacaagtttttatattcaaaaagtgaaa

SEQ ID NO: 974 - protein, 503 aa, Streptococcus pyogenes
LCEKLSIFALLDSLCIEVKMTYEVKSLNEECGVFGIWGHPQAAQVTYFGLHSLQHRGQEGAGIVSNDNGKLYGYRNVGLLSEVFKNQSELDNLTGNAAIGHVRYATAGSADIRNIQPFLYKFHDGQFALCHNGNLTNAISLRKELEKQGAIFNASSDTEILMHLIRRSHNSSFMGKVKEALNTVKGGFAYLLMTENKLIAALDPNAFRPLSIGQMQNGAWVISSETCAFEVVGAKWVRDVEPGEVILIDDRGIQCDRYTDETQLAICSMEYVYFARPDSTIHGVNVHTARKNMGKRLAQEFKQDADIVIGVPNSSLSAAMGFAEESGLPNEMGLVKNQYTQRTFIQPTQELREQGVRMKLSAVSGVVKGKRVVMIDDSIVRGTTSRRIVGLLREAGASEVHVAIASPELKYPCFYGIDIQTRRELISANHSVDEVCDIIGADSLTYLSLDGLIESIGLETKAPNGGLCVAYFDGHYPTPLYDYEEEYLRSLEEKTSFYIQKVK

SEQ ID NO: 975 - DNA, 114 bp, Streptococcus agalactiae
gtgaaggcgaggttagatagaaattcgctatcttttgaacgaagcgagcttaaccgtatctttccgccgtattggtatttgggagtcattgagactaaggttcaatggctagct

SEQ ID NO: 976 - protein, 38 aa, Streptococcus agalactiae
MKARLDRNSLSFERSELNRIFPPYWYLGVIETKVQWLA

SEQ ID NO: 977 - DNA, 111 bp, Streptococcus agalactiae
ttgcggctgtccgctgttgtcacaccgaaagctaccaaggttggtggtactgtcaattcttcgaaagtaccagacatagagtccttaccgccgattgatggcaaaccaaat

SEQ ID NO: 978 - protein, 37 aa, Streptococcus agalactiae
MRLSAVVTPKATKVGGTVNSSKVPDIESLPPIDGKPN

SEQ ID NO: 979 - DNA, 3798 bp, Streptococcus agalactiae
ttgggcttactgaaatctcaatttcagacgtcctcctattttcgagtcgctcccttgtcggacttggtatcttatatgaataaacgtatttttgttgagaaaaaggctgactttggcattaaatcggctagtcttgtgaaagagttgacgcataatctacaactggcttctttgaaggatttgcgtatcgtgcaggtctatgatgtcttcaatttggctgaggatttgctggcgcgtgctgagaagcatattttctctgagcaggtgacagaccgtcttttgacagaagctgaaatcactgcggagcttgataaggttgccttctttgccattgaggcgcttcctggtcaatttgaccaacgtgctgctagttcgcaagaagctttgctattgcttggaagtgacagtcaggtcaaggtcaatacagctcagctttacttggtcaataaggatattgcagaagcagagcttgaagccgttaagaactatcttttgaatcccgttgattcacgtttcaaggatattaccttgccacttgaagtgcaggctttctctgtgtctgataagacaatctctaatcttgatttcttcgaaacttatcaggctgacgattttgcagcctataaggcagagcagggattggctatggaggtcgatgaccttctcttcatccaagattatttcaaatcaatcgggcgtgtgccaactgagactgagttgaaagttttggatacgtattggtcagaccactgccgtcacacaacctttgaaactgaattgaaaaacattgatttttcggcctctaaattccaaaaacaattgcaggcgacttatgacaaatacattgccatgcgtgatgagcttggtcgttctgaaaagccgcagacacttatggatatggcgactatctttggtcgttatgagcgtgccaatggtcgtctggacgatatggaagtctcagatgaaatcaatgcctgctcagttgaaattgaagtagatgttgatggtgtgaaagagccttggctcctcatgtttaagaacgagactcacaaccacccaacagaaattgagccatttggtggagcggcgacttgtatcggtggtgccattcgtgacccattgtcaggacgttcatacgtttatcaggctatgcgtatttcaggcgcaggagatatcacgactccgattgcggaaacacgtgctggtaaattgccacaacaggttatttctaagactgcggcgcacggctattcttcatatggtaaccaaattgggcttgcgacaacttatgtgcgtgagtacttccaccctggcttcgtagctaaacgcatggagcttggagctgtggttggtgctgcacctaaggaaaatgtggttcgtgaaaaaccagaggcaggcgatgtggttgtcttgctcggtggtaaaacaggtcgtgacggtgtcggcggtgcgacaggttcatctaaggttcaaacggttgaatctgtggaaacagctggcgcagaggtacaaaaagggaatgccatcgaagaacgtaagattcaacgccttttccgtgatggtaatgtcactcgcctaatcaagaaatcaaatgacttcggtgcaggtggtgtctgtgttgccatcggtgaattagctgatggtcttgaaatcgatttggacaaggtgccacttaaataccaaggtcttaatggtactgaaattgctatctcagaatctcaagaaaggatgtcagttgttgttggtccaagtgatgtggatgccttcatcgcagcctgtaacaaggaaaatatcgatgcagttgttgttgcgacagttactgaaaaaccaaatcttgtcatgacttggaatggtgaaacaattgttgatttggaacgctgtttccttgataccaacggtgttcgtgtcgtagttgatgccaaagtcgttgacaaggacttaacagttccagaagcgcgcacaacatcagcagagacacttgaagcagatatgcttaaggtcttgtctgacctcaatcacgctagtcaaaaaggtcttcaaactatctttgactcatctgttggtcgttcaaccgttaaccacccaatcggtggtcgttaccaaatcacaccgacagaaagttctgttcaaaaattgccagttcaatatggtgtgacaacaacagcatctgttatggctcaaggttacaatccttatattgcagagtggtcaccttatcacggtgctgcctatgctgttattgaagcgacagctcgcttggtagcaacgggtgctgactggtctcgtgcacgtttctcttaccaagagtatttcgagcgtatggataaacaggcagagcgttttggtcagccagtatcagctcttcttggttctattgaggctcagattcaatttggtttgccatcaatcggcggtaaggactctatgtctggtactttcgaagaattgacagtaccaccaaccttggtagctttcggtgtgacaacagcggacagccgcaaggttctctctcctgagtttaaagcggctggtgagaatatctactacattccaggtcaagctatttcagaagatattgattttgaccttatcaaggctaactttagccagtttgaggctattcaagctcaacataagattaccgctgcctcagccgttaaatacggtggtgtcctagaaagtcttgctctcatgacttttggtaaccgtatcggtgcttctgttgaaattgcagagcttgacagcagcttgacagctcaactcggaggctttgtctttacatcagttgaggaaattgctgacgttgtgaagatcggtcaaactcaggcagactttacagtcactgtcaatggaaatgacctagctggtgcaagccttctatcagccttcgaaggtaaattagaagaagtttacccaacagagtttgaacaggtagatgctattgaggaagttcctgctgtggtatcagatgttgttatcaaggctaaggaaattattgaaaaaccagtagtttacatcccagtctttcctggtactaactcagagtacgattcagctaaggcctttgaacaggttggagctagcgtcaacttggtgccatttgtaaccttgaatgaggctgctattgctgagtcagttgatacgatggttgctaatattgctaaggcaaatatcatcttctttgctggaggtttctcagcagcggatgaaccagatggctctgctaagtttatcgtcaatatcttgcttaacgagaaggttcgcgcagctattgacagcttcatcgaaaaaggtggccttatcatcggtatctgtaatggtttccaagcccttgttaaatcaggtcttcttccatacggaaacttcgaggaagctggtgagacaagtccaaccctcttctataacgatgctaaccagcacgttgcaaagatggttgagactcgtatcgcaaataccaattcaccttggttggcaggagttgaggtcggcgatattcatgtcattccagtttcacacggtgaaggtaaatttgttgtcagcgcttctgaatttgcagagctaagagacaatggtcaaatctggagccaatatgtggactttgacggacaaccatctatggattctaaatacaatccaaacggctctgtcaatgccatcgaagggattaccagcaagaatggtcaaatcatcggtaagatggggcactcagaacgctgggaagacggactcttccaaaatatccctggaaacaaagaccaaaaactctttgaaagtgctgtaaaatactttacagggaag

SEQ ID NO: 980 - protein, 1266 aa, Streptococcus agalactiae
MGLLKSQFQTSSYFRVAPLSDLVSYMNKRIFVEKKADFGIKSASLVKELTHNLQLASLKDLRIVQVYDVFNLAEDLLARAEKHIFSEQVTDRLLTEAEITAELDKVAFFAIEALPGQFDQRAASSQEALLLLGSDSQVKVNTAQLYLVNKDIAEAELEAVKNYLLNPVDSRFKDITLPLEVQAFSVSDKTISNLDFFETYQADDFAAYKAEQGLAMEVDDLLFIQDYFKSIGRVPTETELKVLDTYWSDHCRHTTFETELKNIDFSASKFQKQLQATYDKYIAMRDELGRSEKPQTLMDMATIFGRYERANGRLDDMEVSDEINACSVEIEVDVDGVKEPWLLMFKNETHNHPTEIEPFGGAATCIGGAIRDPLSGRSYVYQAMRISGAGDITTPIAETRAGKLPQQVISKTAAHGYSSYGNQIGLATTYVREYFHPGFVAKRMELGAVVGAAPKENVVREKPEAGDVVVLLGGKTGRDGVGGATGSSKVQTVESVETAGAEVQKGNAIEERKIQRLFRDGNVTRLIKKSNDFGAGGVCVAIGELADGLEIDLDKVPLKYQGLNGTEIAISESQERMSVVVGPSDVDAFIAACNKENIDAVVVATVTEKPNLVMTWNGETIVDLERCFLDTNGVRVVVDAKVVDKDLTVPEARTTSAETLEADMLKVLSDLNHASQKGLQTIFDSSVGRSTVNHPIGGRYQITPTESSVQKLPVQYGVTTTASVMAQGYNPYIAEWSPYHGAAYAVIEATARLVATGADWSRARFSYQEYFERMDKQAERFGQPVSALLGSIEAQIQFGLPSIGGKDSMSGTFEELTVPPTLVAFGVTTADSRKVLSPEFKAAGENIYYIPGQAISEDIDFDLIKANFSQFEAIQAQHKITAASAVKYGGVLESLALMTFGNRIGASVEIAELDSSLTAQLGGFVFTSVEEIADVVKIGQTQADFTVTVNGNDLAGASLLSAFEGKLEEVYPTEFEQVDAIEEVPAVVSDVVIKAKEIIEKPVVYIPVFPGTNSEYDSAKAFEQVGASVNLVPFVTLNEAAIAESVDTMVANIAKANIIFFAGGFSAADEPDGSAKFIVNILLNEKVRAAIDSFIEKGGLIIGICNGFQALVKSGLLPYGNFEEAGETSPTLFYNDANQHVAKMVETRIANTNSPWLAGVEVGDIHVIPVSHGEGKFVVSASEFAELRDNGQIWSQYVDFDGQPSMDSKYNPNGSVNAIEGITSKNGQIIGKMGHSERWEDGLFQNIPGNKDQKLFESAVKYFTGK

SEQ ID NO: 981 - DNA, 3771 bp, Streptococcus pyogenes
atgtcctcctattttccagtcgctcccttgtcggacttggtatcttatatgaataaacgtatttttgttgagaaaaaggctgactttggtattaaatcggctagtcttgtgaaagagttgacgcataatctacaactgacctctttgaaggctttgcgtattgtgcaggtctatgatgtcttcaatttggctgaggatttgctggcgcgtgctgagaagcatattttctctgagcaggtgacagactgtcttttgacggaaactgaaatcactgcggagcttgataaggttgccttctttgccattgaggcgcttcctggtcaatttgaccaacgtgctgctagttcgcaagaagctttgctattatttggaagtgacagtcaggttaaggtcaatacagcccagctatacttggtcaataaggatattacagaagcagagcttgaagccgttaagaactatcttttgaaccctgttgattcgcgtttcaaggacattactttgccgcttgaagagcaggctttctctgtatctgataagacgatccctaatcttgatttctttgaaacttatcaagctgacgattttgcgacttataaggcagagcagggcttggctatggaggtcgatgaccttctcttcatccaaaattatttcaaatcaatcggatgtgtgccaactgagactgagttgaaagttttggatacttactggtcagaccactgccgtcacacaacctttgaaactgaattgaagaacattgatttttcagcttctaaattccaaaaacaattgcagacaacttatgacaaatatatcgccatgcgtgatgagcttggtcgttctgaaaagccacaaacacttatggatatggcgactatttttggtcgttatgagcgtgccaacggtcgtctggacgatatggaagtctcagatgaaatcaatgcctgctcagttgagattgaagtagatgttgatggtgtgaaagagccttggctcctcatgtttaagaacgagactcacaatcacccaacagaaattgagccattcggtggagcggcgacttgtatcggtggtgctattcgtgacccattgtcaggacgttcatacgtttatcaggctatgcgtatttcaggcgcaggcgatatcacgactccgattgcggaaacacgtgctggtaaattgccacaacaagttatttctaaaactgcggcgcacggctattcttcatatggtaaccaaattgggcttgcgacaacttatgtgcgcgagtacttccaccctggcttcgtagccaaacgtatggagcttggagctgtggttggtgctgcacctaaggaaaatgtggttcgtgaaaaaccagaagcaggcgatgtggtcatcttgctcggtggtaaaacaggtcgtgatggtgtcggtggtgcgacaggttcatctaaggttcaaacggttgaatctgtggaaacagctggcgcagaggtacaaaaagggaatgccattgaagaacgtaagattcaacgtcttttccgtgatggcaatgtcactcgtcttattaagaaatcaaatgacttcggtgcaggtggtgtctgtgttgccatcggtgaattggctgacggtcttgaaatcgatttggacaaggtgcctcttaaataccaaggtcttaatggtactgaaattgcaatctcagaatctcaagagcgtatgtcagtcgttgttcgtccaaatgatgtggatgccttcatcgcagcctgcaacaaggaaaatatcgatgcagtcgttgttgcgaccgttactgaaaaaccaaatcttgtcatgacttggaatggcgaaatcatcgttgatttggaacgccgtttccttgataccaatggtgtccgtgtcgttgttgatgctaaagtcgttgacaaggacttgacagttccagaagcacgcacaacatcagcagagacacttgaagcagatacgcttaaggtcttgtctgacctcaaccacgctagtcaaaaaggtcttcaaactatctttgactcatctgttggtcgttcaaccgttaaccacccaatcggtggtcgttaccaaatcacaccgacagaaagttctgttcaaaaattgccagttcaacatggtgtgacaacaactgcatctgttatggctcaaggttacaatccttatattgcagagtggtcaccttatcacggtgctgcctatgctgtcattgaagcgacagctcgcttggtagcaacgggtgctgactggtctcgtgcacgtttctcttaccaagagtactttgagcgtatggataaacaggcagagcgttttggtcagccagtatcagctcttcttggttctattgaggctcagattcaacttggtttgccatcaatcggcggtaaggactctatgtctggtactttcgaagacttgacagtaccaccaaccttggtagctttcggcgtgacaacagcggacagccgcaaggttctctctcctgagtttaaagcggctggcgaaaacatttactatatcccaggtcaagctatttcagaagatattgattttgaccttatcaaggataactttagccagtttgaagctattcaagctcaacataagattacagctgcctcagccgctaaatacggtggtgtcctagaaagtcttgctctcatgacttttggtaaccgtatcggtgcttctgttgaaattgcagagcttgacagcagcttgacagctcaactcggaggttttgtctttacatcagctgaggaaattgctgacgcggtgaaaatcggtcaaactcaggcagactttacagtcactgtcaatggaaatgaccttgctggcgctagccttctagcagccttcgaaggcaaattggaagaggtttacccaacagaatttgagcagacagatgttcttgaagaagttcctgctgtggtatcagatactgttatcaaggctaaggaaacaattgaaaaaccagtggtttacattccagtcttccctggtaccaactcagaatacgattcagctaaggcctttgaacaggttggagctagtgtcaacttggtaccatttgtaaccttgaatgaggttgctattgctgagtcagttgacactatggttgctaatattgctaaggcaaatatcatcttctttgctggaggtttctcagcagcggatgaaccagatgggtctgctaagtttatcgtcaatatcttgcttaacgagaaggtccgcgcagctattgacagcttcatcgaaaaaggtggccttatcatcggtatctgtaatggtttccaagcccttgttaaatcaggtcttcttccatacggaaacttcgaggaagctggtgagacaagtccaactctcttctataatgatgctaatcagcatgttgccaagatggttgagactcgtatcgcaaataccaactcaccttggttggcaggagttgaggtcggcgatattcatgccattccagtttcacatggtgaaggtaaacttgttgtcagcgcttctgaatttgcagagctaagagacaatggtcaaatctggagccaatatgtggactttgacggacaaccatctatggattctaaatacaatccaaacggctctgtcaatgccatcgaagggattaccagcaagaatggtcaaatcatcggtaagatgggacactcagaacgctgggaagacggactcttccaaaatatccctggtaacaaagaccaaatcctctttgcaagtgctgtaaaatactttacagggaag

SEQ ID NO: 982 - protein, 1257 aa, Streptococcus pyogenes
MSSYFPVAPLSDLVSYMNKRIFVEKKADFGIKSASLVKELTHNLQLTSLKALRIVQVYDVFNLAEDLLARAEKHIFSEQVTDCLLTETEITAELDKVAFFAIEALPGQFDQRAASSQEALLLFGSDSQVKVNTAQLYLVNKDITEAELEAVKNYLLNPVDSRFKDITLPLEEQAFSVSDKTIPNLDFFETYQADDFATYKAEQGLAMEVDDLLFIQNYFKSIGCVPTETELKVLDTYWSDHCRHTTFETELKNIDFSASKFQKQLQTTYDKYIAMRDELGRSEKPQTLMDMATIFGRYERANGRLDDMEVSDEINACSVEIEVDVDGVKEPWLLMFKNETHNHPTEIEPFGGAATCIGGAIRDPLSGRSYVYQAMRISGAGDITTPIAETRAGKLPQQVISKTAAHGYSSYGNQIGLATTYVREYFHPGFVAKRMELGAVVGAAPKENVVREKPEAGDVVILLGGKTGRDGVGGATGSSKVQTVESVETAGAEVQKGNAIEERKIQRLFRDGNVTRLIKKSNDFGAGGVCVAIGELADGLEIDLDKVPLKYQGLNGTEIAISESQERMSVVVRPNDVDAFIAACNKENIDAVVVATVTEKPNLVMTWNGEIIVDLERRFLDTNGVRVVVDAKVVDKDLTVPEARTTSAETLEADTLKVLSDLNHASQKGLQTIFDSSVGRSTVNHPIGGRYQITPTESSVQKLPVQHGVTTTASVMAQGYNPYIAEWSPYHGAAYAVIEATARLVATGADWSRARFSYQEYFERMDKQAERFGQPVSALLGSIEAQIQLGLPSIGGKDSMSGTFEDLTVPPTLVAFGVTTADSRKVLSPEFKAAGENIYYIPGQAISEDIDFDLIKDNFSQFEAIQAQHKITAASAAKYGGVLESLALMTFGNRIGASVEIAELDSSLTAQLGGFVFTSAEEIADAVKIGQTQADFTVTVNGNDLAGASLLAAFEGKLEEVYPTEFEQTDVLEEVPAVVSDTVIKAKETIEKPVVYIPVFPGTNSEYDSAKAFEQVGASVNLVPFVTLNEVAIAESVDTMVANIAKANIIFFAGGFSAADEPDGSAKFIVNILLNEKVRAAIDSFIEKGGLIIGICNGFQALVKSGLLPYGNFEEAGETSPTLFYNDANQHVAKMVETRIANTNSPWLAGVEVGDIHAIPVSHGEGKLVVSASEFAELRDNGQIWSQYVDFDGQPSMDSKYNPNGSVNAIEGITSKNGQIIGKMGHSERWEDGLFQNIPGNKDQILFASAVKYFTGK

SEQ ID NO: 983 - DNA, 702 bp, Streptococcus agalactiae
gtgactaaccagcttatttatacaggaaaagcgaaagatatttatagtacaaaagatgaaaatgtgattagaacggtctataaagaccaagctactatgttgaatggagctcgtaaggagactattgatggcaagggagcactaaataatcagatttcatctcttatttttgagaaattaaatatggctggtgtggtgacacattatattgagcaaatttcaaaaaacgaacaattgaataaaaaagttgatattattccacttgaggtggtgctacggaatgtgacagcaggctcattttcaaaacgttttggagtggaagaaggacacgttcttgaaacgccaatcgtggaattttactacaaaaatgataatctgaatgatccttttatcaatgatgagcatgtgaagtttttgggtattgttaatgatgaggagattgcttatctgaaaggagagactcgccatattaatgaactcttgaaagattggtttgctcagattgggcttaacttgattgacttcaagttggagttcggatttgacaaggatggcaaaatcatcttggctgatgagttctcacctgacaactgccgtctctgggatgctgatggtaatcatatggacaaggatgtttttcgtagggatcttggtagcttgaccgatgtctatcaagttgtacttgagaagttgatagcattg

SEQ ID NO: 984 - protein, 234 aa, Streptococcus agalactiae
MTNQLIYTGKAKDIYSTKDENVIRTVYKDQATMLNGARKETIDGKGALNNQISSLIFEKLNMAGVVTHYIEQISKNEQLNKKVDIIPLEVVLRNVTAGSFSKRFGVEEGHVLETPIVEFYYKNDNLNDPFINDEHVKFLGIVNDEEIAYLKGETRHINELLKDWFAQIGLNLIDFKLEFGFDKDGKIILADEFSPDNCRLWDADGNHMDKDVFRRDLGSLTDVYQVVLEKLIAL

SEQ ID NO: 985 - DNA, 732 bp, Streptococcus pyogenes
atgaaaacagaaagaaaggcgaataatcaagtgactaaccagcttatttataaaggaaaagcgaaagatatttatagtacaaaagatgaaaatgtgattagaacggtctataaagaccaagctactatgttgaatggagctcgtaaggagactattgatggcaagggagcactaaataatcagatttcatctcttatttttgagaaattaaataaggctggtgtggtgacacattatattgagcaaatttcaaaaaacgaacaattgaataaaaaagttgatattattccacttgaggtggtgttacggaatgtgacagcaggctcattttcaaaacgttttggagtggaagaaggacatgttcttgaaacgccaattgtggaattttactacaaaaatgatgatctggatgatccttttatcaatgatgagcatgtgaagtttttgggtattgttaatgatgaggagattgcttatctgaaaggagagactcgccgtattaatgaactcttgaaaggttggtttgctcagattgggcttaacttgattgacttcaagttggagttcggatttgatcaagaaggtacaattatcttagcagatgaattttcgcctgataactgtcgcctatgggataagaatggtaaccatatggacaaggatgtttttagaagagaccttggcaacctgacggatgtctatcaagttgtacttgagaagttgatagcattg

SEQ ID NO: 986 - protein, 244 aa, Streptococcus pyogenes
MKTERKANNQVTNQLIYKGKAKDIYSTKDENVIRTVYKDQATMLNGARKETIDGKGALNNQISSLIFEKLNKAGVVTHYIEQISKNEQLNKKVDIIPLEVVLRNVTAGSFSKRFGVEEGHVLETPIVEFYYKNDDLDDPFINDEHVKFLGIVNDEEIAYLKGETRRINELLKGWFAQIGLNLIDFKLEFGFDQEGTIILADEFSPDNCRLWDKNGNHMDKDVFRRDLGNLTDVYQVVLEKLIAL

SEQ ID NO: 987 - DNA, 270 bp, Streptococcus agalactiae
ttgatgcctttacagatgaataggagtgaactcatgtcaagagatgaagtttttgaaaagatgctggaattattaaggcagcaacttggtgacccacagttagatatcacaccagagtcatcgttacatgatgatttagcaattgactctatcgctttaacagagtttattatcaatttggaagatgtgtttcatctagagattccagatgaggctgtcgaacacatgtcaagcgtccaacaactattagattatatcattgaacataag

SEQ ID NO: 988 - protein, 90 aa, Streptococcus agalactiae
MMPLQMNRSELMSRDEVFEKMLELLRQQLGDPQLDITPESSLHDDLAIDSIALTEFIINLEDVFHLEIPDEAVEHMSSVQQLLDYIIEHK

SEQ ID NO: 989 - DNA, 240 bp, Streptococcus pyogenes
atgactagacaggagatttttgaaaggctgattaacttaattcagaagcaaagaagctatttgagtgtagctattacagaacaaacacatttaaaaaatgatttagcggttgactctattgaactagttgaatttattattaatgttgaagatgaatttcatattgctattcctgatgaagatgttgaggatatggtatttatgagagacattttagattatttagttcagcgtttgact

SEQ ID NO: 990 - protein, 80 aa, Streptococcus pyogenes
MTRQEIFERLINLIQKQRSYLSVAITEQTHLKNDLAVDSIELVEFIINVEDEFHIAIPDEDVEDMVFMRDILDYLVQRLT

SEQ ID NO: 991 - DNA, 1005 bp, Streptococcus agalactiae
atgaggagttcattcatgaagaaaattgctatagatgctatgggtggagattacgctcccaaagctattgtagagggtgttaatcaagctatttcagattttagtgatattgaagtacaactctatggcgatcagaaaaaaattgagaaatatttaacagtaacggagcgagttagtattattcatactgaagaaaaaattaattctgatgatgagcctgctaaagctgttcgtcgtaaaaaacagtcttcgatggtcttaggagctaaggcagtcaaagatggtgttgcacaggcctttatttctgcagggaatacaggagctttattagctgctggtttgtttgtagtaggacgtataaaaggtgttgatcgaccaggcttaatgtcaactatgcctacgttagatggtgtgggttttgatatgcttgatttaggagctaatgcagaaaacacagcttctcatcttcatcaatatgctattttagggtcgttttatgcaaaaaatgtccgtggtattgaagttcctcgtgtaggtctcttaaataacggaacggaagaaacaaaaggcgattctcttcataaagaagcttatgaactgttagcagcagagccttctattaattttattggaaatattgaagcacgtgatttgatgtctagtgtagcagatgttgttgtcactgatggttttactggaaatgctgttctaaagacaatggaaggtacagctatgagtattatgggaagcctaaaatcttcaattaaatcaggtggcgtgaaagctaaattaggagcacttctattaaaagatagcctatatcagctaaaagatagtatggactattcaagcgcgggtggagcggttctttttggtttaaaagctccaatagtaaaatgccatggatcaagtgattctaaagctgtttattctactttgaagcaagttcgtacaatgttggaaactcaagtagttgatcaattagttgatgcctttacagatgaa

SEQ ID NO: 992 - protein, 335 aa, Streptococcus agalactiae
MRSSFMKKIAIDAMGGDYAPKAIVEGVNQAISDFSDIEVQLYGDQKKIEKYLTVTERVSIIHTEEKINSDDEPAKAVRRKKQSSMVLGAKAVKDGVAQAFISAGNTGALLAAGLFVVGRIKGVDRPGLMSTMPTLDGVGFDMLDLGANAENTASHLHQYAILGSFYAKNVRGIEVPRVGLLNNGTEETKGDSLHKEAYELLAAEPSINFIGNIEARDLMSSVADVVVTDGFTGNAVLKTMEGTAMSIMGSLKSSIKSGGVKAKLGALLLKDSLYQLKDSMDYSSAGGAVLFGLKAPIVKCHGSSDSKAVYSTLKQVRTMLETQVVDQLVDAFTDE

SEQ ID NO: 993 - DNA, 1083 bp, Streptococcus pyogenes
ttggtttcagaatatgctataataaaaatattattaatagattgtgtaagaacacaagatataattaaaggagtggaaatgaagagaattgcaatagatgctatgggtggagataacgctcctaaagctattgttgagggtgttaatcaagcaatagaagcattttcagatatcgaaattcaactttacggtgatcagacaaagattaactcctatcttattcaatcagatcgtgttgctattattcatacagatgaaaaaattatgtcagatgatgaacctgcaaaagctgttcgccgtaaaaagaaggcttcaatggttttagcagctaaggcagtgaaagaaggaaaagcagatgccattatttcagcagggaatacaggtgctcttttagctgtaggtttgtttgttgtggggcgtatcaagggagttgatcgtccaggattattatcaactattcccacagtaaccggattaggatttgatatgttggatcttggagctaatgctgaaaatacggcaaaacatttacatcaatatgctattttaggctctttctatgctaagaatgtacgtgggattgctaatccacgtgttggtctattaaacaatggtacagaagaaacaaaaggagatccccttcgtaaggccacttatgaacttttaacagcagataatacaatatcttttgttggtaatgtcgaggcgcgagaacttatgtcaggtgttgcagatgttattgtatcagatggtttcacgggaaacgcagtgttgaaatcaatagaaggaacagctattagcattatggggcaactgaaacagataattaatagcggcggtattaagactaaaattggagctagtctacttaaaagtagtctttacgagatgaagaagactcttgactactctagtgctggaggtgcagttttatttggtttaaaggcacctgttgtaaagtctcatggttctagtgatgtaaaagctattttttcaacgataaaacaagtacgtacgatgctagacactaacgtggtcggacaattagtagaagaatttgctaaggagactcaagtaaatgac

SEQ ID NO: 994 - protein, 361 aa, Streptococcus pyogenes
LVSEYAIIKILLIDCVRTQDIIKGVEMKRIAIDAMGGDNAPKAIVEGVNQAIEAFSDIEIQLYGDQTKINSYLIQSDRVAIIHTDEKIMSDDEPAKAVRRKKKASMVLAAKAVKEGKADAIISAGNTGALLAVGLFVVGRIKGVDRPGLLSTIPTVTGLGFDMLDLGANAENTAKHLHQYAILGSFYAKNVRGIANPRVGLLNNGTEETKGDPLRKATYELLTADNTISFVGNVEARELMSGVADVIVSDGFTGNAVLKSIEGTAISIMGQLKQIINSGGIKTKIGASLLKSSLYEMKKTLDYSSAGGAVLFGLKAPVVKSHGSSDVKAIFSTIKQVRTMLDTNVVGQLVEEFAKETQVND

SEQ ID NO: 995 - DNA, 90 bp, Streptococcus agalactiae
atgcaagaaataaaaagaaaaaaggtccaaaagaaaaggaattgctggaagaaatttccacaaaacctgataaccagtggcaaatataaa

SEQ ID NO: 996 - protein, 30 aa, Streptococcus agalactiae
MQEIKRKKVQKKRNCWKKFPQNLITSGKYK

SEQ ID NO: 997 - DNA, 876 bp, Streptococcus agalactiae
atggaattaatttttaggatatttgagatgaaaaaaacattatacattaccaataaactcttttttgctaactggtttgtgccagttattggtgcagttctaattcaagttatcggcatcattgtaagtagacgccttgtagtaaaattgctacctgatgattataaattcaatttatacattgcgcttttactatttgttcctattttggcaagtattttactatttttaatctattttcaaaaaagggattttacttccttgggatttactaaagataataatgttttaacaacgatctcaggatttattactggtagtttactgatgttttttatttatatttgccactggttatcaggttttgtggaaatttcttccagcaattccttttcttttggaccttttttctttttatttcttgcatactttatccaaagcttgacagaggaaattttatttagaggatatgttatgacaacagttaccaaatttaaaggtagttttgcaggtgttttatgtaattctatgttgttttcttttatccactttagaaactatggtatcacagcaatagcactttttaatttatttttacttggtattattttttctattctttttaatatgaccaaaaatattctttttgttacaggagttcatactacatggaattttactatgggatgtgtattaggtaataaggttagtgggggggattctcctgtttctctttttagaattactgaaaattctagctttgctctttggaatggtggggattttggttttgaagggggagtactatgttctttgatattagtaggttgtttagcatacttttctttggaaagcgtgagagtatctgttagatat

SEQ ID NO: 998 - protein, 292 aa, Streptococcus agalactiae
MELIFRIFEMKKTLYITNKLFFANWFVPVIGAVLIQVIGIIVSRRLVVKLLPDDYKFNLYIALLLFVPILASILLFLIYFQKRDFTSLGFTKDNNVLTTISGFITGSLLMFFIYICHWLSGFVEISSSNSFSFGPFFFLFLAYFIQSLTEEILFRGYVMTTVTKFKGSFAGVLCNSMLFSFIHFRNYGITAIALFNLFLLGIIFSILFNMTKNILFVTGVHTTWNFTMGCVLGNKVSGGDSPVSLFRITENSSFALWNGGDFGFEGGVLCSLILVGCLAYFSLESVRVSVRY

SEQ ID NO: 999 - DNA, 759 bp, Streptococcus agalactiae
atgagggttagtcaaacatacggtctcgttttgtataatcgtaattatcgtgaagatgataaattagttaaaatctttacggagactgaggggaaaaggatgttttttgtaaagcatgcttcaaagtcaaaattcaatgctgtgctccaacctttgactattgctcattttattttaaaaattaatgataatggtctttcttatattgatgattataaagaagttttagcatttcaagaaaccaattcagacttgtttaagttgtcatatgcgagttatattacttctttggctgatgtggctattagtgataatgtagcggatgctcaattatttattttcctaaagaaaacgttagaattgattgaggacggtttagattatgagattctaacgaatatttttgaagtacaactactagagaggttcggtgttgctttaaattttcatgattgtgttttttgtcatagggtaggattaccttttgatttttcacacaaatattctggattattatgtccaaaccattattataaagacgagagaagaaaccacctagatcctaatatgctgtacttaatcaatcgttttcagtcaattcaatttgatgatttacaaacaatttctgtgaaacctgagatgaaacttaaaattcgtcaatttttggacatgatttacgatgaatatgtagggattcatcttaaaagtaaaaaatttattgatgatttgtctagttggggaagtattatgaaatcagat

SEQ ID NO: 1000 - protein, 253 aa, Streptococcus agalactiae
MRVSQTYGLVLYNRNYREDDKLVKIFTETEGKRMFFVKHASKSKFNAVLQPLTIAHFILKINDNGLSYIDDYKEVLAFQETNSDLFKLSYASYITSLADVAISDNVADAQLFIFLKKTLELIEDGLDYEILTNIFEVQLLERFGVALNFHDCVFCHRVGLPFDFSHKYSGLLCPNHYYKDERRNHLDPNMLYLINRFQSIQFDDLQTISVKPEMKLKIRQFLDMIYDEYVGIHLKSKKFIDDLSSWGSIMKSD

SEQ ID NO: 1001 - DNA, 753 bp, Streptococcus pyogenes
atgcaactaacagaatcactaggcatcgttctttttaataggaattatcgagaagatgataaattagtcaaaatatttactgaagtagcaggtaagcagatgtttttcgtgaaacatattagtcgttccaaaatgtcctcaatcattcaaccactaacgattgctgattttattttcaagttaaatgatacaggcttgtcttatgttgttgactatagtaacgttaacacttatcggtatattaataatgatatttttcgattagcctatgctagttatgtcttagcattagctgatgctgcgattgcagataatgaatcagattcgcatttgtttacgtttttgaaaaaaacacttgatttgatggaagagggcctagattatgaaattttgacaaatatttttgaaattcagatattagatcgttttggtattagtctaaactttcatgagtgtgccatttgtcatcgcactgatttaccgcttgatttttcccatcgtttttcagctgtactttgttctgaacattattacaaagacaaccgacgtaatcatttagatccaaatgttatctacttgttgagtcgatttcaaaaaatcacatttgatgatttgagaactatttcattgaataaagacatcaaaaagaagcttcgtcagttcattgatgagttgtatcacgactatgtaggaatcaaattaaaaagtaaaacattcattgataatttagttaagtggggagatattatgaaa

SEQ ID NO: 1002 - protein, 251 aa, Streptococcus pyogenes
MQLTESLGIVLFNRNYREDDKLVKIFTEVAGKQMFFVKHISRSKMSSIIQPLTIADFIFKLNDTGLSYVVDYSNVNTYRYINNDIFRLAYASYVLALADAAIADNESDSHLFTFLKKTLDLMEEGLDYEILTNIFEIQILDRFGISLNFHECAICHRTDLPLDFSHRFSAVLCSEHYYKDNRRNHLDPNVIYLLSRFQKITFDDLRTISLNKDIKKKLRQFIDELYHDYVGIKLKSKTFIDNLVKWGDIMK

SEQ ID NO: 1003 - DNA, 1284 bp, Streptococcus agalactiae
atgacaaaaaacctgttattaacaggttttttatcatttaatgacggaaaactggacacaaattatttttcttgtataattaaatatattatttcttatcaggaggttatgatgacattagagaaacgatttaataagtacttagatagaatagaggtctccttaattcgtcagtttgatcaatctatttcagatatacctggaatggtaaaattaactcttggagaaccagattttaccactcctgatcatgttaaagaagcagctaaatcagctattgatgcgaatcaatcgtattacactggtatgagcggtttattagctctaaggcaagctgctgcagattttgcaaaggataaatataatcttacttataatcctgattgtgagatcttggttacgataggtgccacagaagctctgtctgcatctcttatagctattttagaagctggtgatgttgttctattacctgcccccgcttatccaggatatgagccaatagttaaccttgtaggagctgatatcgtagaaattgatactagagaaaatgactttagactaactcctgaaatgttagaaacggctattatccaacaaggtgaaaaattaaaggctgttttacttaattatcctactaaccctacaggtattacctattcaaggcaagaaattgctgcattagctgaagtccttaaaaaatatgatatttttgttattagtgatgaagtttattctgagttaacttacactggtcagcagcatgtttcaattgcagaatatttacctaaccaaactatcttaattaatggcttatcaaaatcacatgctatgactggttggagagttggattggtgtatgctcctgaagcatttattgctcaaatcattaaaagtcatcaatacatggtgacagctgctagtactatttcgcaatttgctggggtagaagccttatctgtgggtaaaaatgatacgttacctatgcgtcaaggatatattaaacgtagagattatatcattgataaaatgtctaaacttggtttcaaaataattaaaccgagtggcgctttttatatctttgctaaaatacctgatagctatccacaggattctttcaagttttgtcaggattttgcttatcaacaagctgtagctattattccaggagtggcttttggtaaatatggtgaaggatatatacgtctttcttatgctgctagtatggaagttattgaaacagcaatggctagattgaaagtttttatggaatcatatgagggt

SEQ ID NO: 1004 - protein, 428 aa, Streptococcus agalactiae
MTKNLLLTGFLSFNDGKLDTNYFSCIIKYIISYQEVMMTLEKRFNKYLDRIEVSLIRQFDQSISDIPGMVKLTLGEPDFTTPDHVKEAAKSAIDANQSYYTGMSGLLALRQAAADFAKDKYNLTYNPDCEILVTIGATEALSASLIAILEAGDVVLLPAPAYPGYEPIVNLVGADIVEIDTRENDFRLTPEMLETAIIQQGEKLKAVLLNYPTNPTGITYSRQEIAALAEVLKKYDIFVISDEVYSELTYTGQQHVSIAEYLPNQTILINGLSKSHAMTGWRVGLVYAPEAFIAQIIKSHQYMVTAASTISQFAGVEALSVGKNDTLPMRQGYIKRRDYIIDKMSKLGFKIIKPSGAFYIFAKIPDSYPQDSFKFCQDFAYQQAVAIIPGVAFGKYGEGYIRLSYAASMEVIETAMARLKVFMESYEG

SEQ ID NO: 1005 - DNA, 1191 bp, Streptococcus pyogenes
atgcccaaactatcaaagcgagttttagaaatgaaagagagtgttactctggctgcaggtgctagagctaaggctttgaaagcgcagggccgcgatgtactgaatttaactttaggagaaccagatttttttacacctaagcacattcaagacaaggcgattgaatctattcaaaatggtacggctagcttttatacaaatgcttctgggcttccagaattaaaagctgcgattgccacatacctgaaaaatcagtatgggtatcacttgtctcctgatcagattgtggcaggaacaggtgccaagttcatcctttatgccttttttatggctgttttaaatcctggtgaccaagttctcattccaacaccatattgggtatcttattctgaccaagtaaaaatggcagaaggtcagccgatcttcgttcaaggactagaagaaaatcaattcaaggtaactgttgaccagctggaaagagcaaggacaagtaagactaaagttgtccttatcaattctccttccaatccaacaggcatgatttatggtgctgaggaattaagggccattggagaatgggcggtgcacaacgatattcttattctggcagatgatatttacgggtccttagtctataacggcaatcagtttgttcctatttcaacactctcagaagcgattcggcgtcaaaccattacggtcaatggcgtggctaaaagttatgccatgacaggctggcgggttggttttgcagcaggtgaaccagagatcatttcggcaatgagtaagatcatcgggcagactacctctaacctgacaaccgtttcacaatatgctgctatcgaggctttctgtggtagtcagtcatcacttgaagagatgcgattagcatttgaagagcgccttaatatcacttatccattgttgtgtcaggtccctgggtttgaggttgttaaaccacaaggagctttttacttctttccaaacgttaagaaagccatggaaatgacaggtttttccgatgtgacaagctttgctaatgctattttagaggaagtcggattagctgttgtgagtggagcaggctttggcgcaccggaaaatgttcgtctgagttatgctacagatatcgaaacccttaaagaagctgttcgtagactgcatgtctttatggaaagtaatgaaattaat

SEQ ID NO: 1006 - protein, 397 aa, Streptococcus pyogenes
MPKLSKRVLEMKESVTLAAGARAKALKAQGRDVLNLTLGEPDFFTPKHIQDKAIESIQNGTASFYTNASGLPELKAAIATYLKNQYGYHLSPDQIVAGTGAKFILYAFFMAVLNPGDQVLIPTPYWVSYSDQVKMAEGQPIFVQGLEENQFKVTVDQLERARTSKTKVVLINSPSNPTGMIYGAEELRAIGEWAVHNDILILADDIYGSLVYNGNQFVPISTLSEAIRRQTITVNGVAKSYAMTGWRVGFAAGEPEIISAMSKIIGQTTSNLTTVSQYAAIEAFCGSQSSLEEMRLAFEERLNITYPLLCQVPGFEVVKPQGAFYFFPNVKKAMEMTGFSDVTSFANAILEEVGLAVVSGAGFGAPENVRLSYATDIETLKEAVRRLHVFMESNEIN

SEQ ID NO: 1007 - DNA, 978 bp, Streptococcus agalactiae
ttggaggaaatcatgtcttattctaatttaaaattgtttgcactgtcatcaaacaaagaactagcgaaaaaagtgtctcagacgattggaattccgctaggtcaatcgacagttcgccaattttctgatggtgagattcaagttaatattgaagagtctattcgtggccatcatgtttttattttacaatcaacaagctcaccagttaatgataatttgatggaaattttaattatggttgacgctttaaagcgtgctagtgcggagtctgttagtgtggtaatgccttactatgggtatgctcgtcaagatcgcaaggcacgttctcgtgaacctattacttcgaaactcgttgcgaacatgctagaagttgctggtgttgatcgtcttttaacagttgatttacatgcagctcaaattcagggattctttgatattcccgttgatcaccttatgggggctccccttattgcagattactttgatcgtcagggattggttggtgatgatgttgttgtcgttagtcctgatcatggtggcgtaacacgtgcacgtaagctggcacagtgtttaaagacaccgattgctatcattgataagcgccgtagtgttactaaaatgaatacatctgaagtaatgaatattattggtaatatcaaaggtaaaaaatgtattttaattgatgatatgattgatactgcaggtactatttgccatgctgcagacgctttagctgaagcaggggcaacagcggtttatgcttcatgtactcaccctgttttatcagggccggctttggataatattcaaaattcagctattgaaaaattaattgtgttagatacgatttacctccctgaagaacgtttgattgataagattgaacaaatttcaattgcggaattgattggtgaagctattatccgtattcacgagaaacgtcctttatcaccattatttgaaatgaataaactaaaa

SEQ ID NO: 1008 - protein, 326 aa, Streptococcus agalactiae
MEEIMSYSNLKLFALSSNKELAKKVSQTIGIPLGQSTVRQFSDGEIQVNIEESIRGHHVFILQSTSSPVNDNLMEILIMVDALKRASAESVSVVMPYYGYARQDRKARSREPITSKLVANMLEVAGVDRLLTVDLHAAQIQGFFDIPVDHLMGAPLIADYFDRQGLVGDDVVVVSPDHGGVTRARKLAQCLKTPIAIIDKRRSVTKMNTSEVMNIIGNIKGKKCILIDDMIDTAGTICHAADALAEAGATAVYASCTHPVLSGPALDNIQNSAIEKLIVLDTIYLPEERLIDKIEQISIAELIGEAIIRIHEKRPLSPLFEMNKLK

SEQ ID NO: 1009 - DNA, 972 bp, Streptococcus pyogenes
ttggaggaaaaaatgtcttattctgatttaaaattgtttgctttatcgtcaaacaaggaattagcagaaaaagttgcgtctgcaatgggtattcaacttggaaagtctacggttcgccagttttcagatggtgaaatccaagtaaatattgaagaatcaattcgtggtcatcatgtctttattttgcaatcaactagctcacctgtcaatgataatttaatggaaattttgattatggtcgatgctttaaagcgtgctagtgctgaaaaaatttcagttgtgatgccttactacggctatgcacgccaagaccgtaaagcgcgttctcgtgaacctattacttcaaaattagttgctaatatgttagaagttgctggtgtagatcgcttattaacggttgatttacatgctgctcaaattcaagggttctttgatattccagttgatcacttgatgggtgcacctttaattgcagactattttgatcgtcatggtttagtgggtgaagatgttgtcgttgttagtcctgaccatggtggtgtgactcgtgcgcgtaaattagcacaattcctccaaacaccaattgcaattatcgataagcgtcgtagtgtggataagatgaacaccagtgaagtgatgaatattatcggaaatgtttcggggaagaaatgtatcttgattgacgatatgattgataccgcagggactatttgccatgcagcagatgcgcttgctgaagcgggggcaacagctgtgtatgcgtcatgtacgcatcccgttctttctggaccagcacttgataatattcaacgttcggctatcgaaaaactaattgttcttgatactatttatctgccaaaagaacgccttattgataaaattgaacaaatttcaattgctgatttggttgcagaagcgattattcgtattcatgaaaaacgtccgttgtcacctttatttgagatgggcaat

SEQ ID NO: 1010 - protein, 324 aa, Streptococcus pyogenes
LEEKMSYSDLKLFALSSNKELAEKVASAMGIQLGKSTVRQFSDGEIQVNIEESIRGHHVFILQSTSSPVNDNLMEILIMVDALKRASAEKISVVMPYYGYARQDRKARSREPITSKLVANMLEVAGVDRLLTVDLHAAQIQGFFDIPVDHLMGAPLIADYFDRHGLVGEDVVVVSPDHGGVTRARKLAQFLQTPIAIIDKRRSVDKMNTSEVMNIIGNVSGKKCILIDDMIDTAGTICHAADALAEAGATAVYASCTHPVLSGPALDNIQRSAIEKLIVLDTIYLPKERLIDKIEQISIADLVAEAIIRIHEKRPLSPLFEMGN

SEQ ID NO: 1011 - DNA, 1185 bp, Streptococcus agalactiae
gtgactgctattaaaggacaagttggtgctttagagtctcaacaatcagaattagaagcgcaaaatgctcaacttgaggctgtatctcagcagttaggtcaagagattcaaactctttctaataaaattgttgcacgtaacgaatctttgaaaaagcaagttcgtagtgctcaaaagggtaacttgactaactatattaatactattttaaattcgaaatcagtatctgatgctgttaatcgtgttgttgctattcgtgaggttgtttcagctaatgaaaagatgttagcacaacaagaggctgacaaagcggccttagaagctaaacaaattgaaaatcaaaatgctataaatactgtagcagctaacaagcaagctatcgaaaataataaagcagccttagcaacacaaagagcacaattagaagcagctcaattagagttatctgctcaattgactacagtccaaaatgaaaaagcatctttaattcaggcaaaagcacaagctgaggaagctgcgcgtaaggcagctgaagcacaagcagcagctgaagcgaaagcacaagctgaagcgaaagcacaagctgagtctgtagcaaaagcacaggcagcagcacaagttgagtctgccacagctcctactgaaacagttcaaacacaaccgagaactgaaataaagccttctaatcttacggctacttcttcggcaactactgttgctacaactacagctacagctactaatgagccaaaagttactcaaccttctgtagtaactaaagcagttgaagcacctaaagcagttgtttcttcaacacctagagcggtatcaaaacctgttgtcagaagttatgattcaagtaacacatacccaatgggacaatgtacttggggagctaagtcaatggcttcttgggttggtaactattggggaaatgctaatcagtggggtgctagtgcacgtgcagctggttattctgtaggaactacccctcgtgttggtgcagtagctgtttggccatatgatggtggtggttacgggcacgttgcagtagtaacgtcagtggctaacaattcatctatccaagttatggaatcaaactatgctggaaatatgagtattggcaattaccgtggttcatttaaccctagtgcttctggctctgtttactatatttacccaaat

SEQ ID NO: 1012 - protein, 395 aa, Streptococcus agalactiae
MTAIKGQVGALESQQSELEAQNAQLEAVSQQLGQEIQTLSNKIVARNESLKKQVRSAQKGNLTNYINTILNSKSVSDAVNRVVAIREVVSANEKMLAQQEADKAALEAKQIENQNAINTVAANKQAIENNKAALATQRAQLEAAQLELSAQLTTVQNEKASLIQAKAQAEEAARKAAEAQAAAEAKAQAEAKAQAESVAKAQAAAQVESATAPTETVQTQPRTEIKPSNLTATSSATTVATTTATATNEPKVTQPSVVTKAVEAPKAVVSSTPRAVSKPVVRSYDSSNTYPMGQCTWGAKSMASWVGNYWGNANQWGASARAAGYSVGTTPRVGAVAVWPYDGGGYGHVAVVTSVANNSSIQVMESNYAGNMSIGNYRGSFNPSASGSVYYIYPN

SEQ ID NO: 1013 - DNA, 1194 bp, Streptococcus pyogenes
atgaaaaaaagaattttatcagcagttcttgtaagtggtgttaccctcggagcagctacaactgtaggagcggaggatttaagtactaagattgctaagcaagattctattatctcaaatctgactacagagcaaaaagctgcacagaatcaagtttcagcgttacaggctcaagtaagttcactacaatctgaacaagataaactgaccgcaagaaatacagaacttgaggcgctttcaaagcgatttgagcaagaaattaaggctctaacaagtcaaattgttgctcgtaatgaaaaattaaaaaatcaagctcgtagtgcttataaaaacaatgaaacttctggttatattaatgcacttttgaattctaaatcaatttctgatgttgtaaaccgtttagtagcaattaatagagctgtctctgctaacgctaaattgttagaacaacaaaaagctgataaagtttcccttgaagaaaagcaagctgctaaccaaacagctattaataccattgccgctaatatggcaatggctgaagaaaaccaaaatacattacgtactcaacaagctaatttggtagctgcaactgcaaatttagctctccaattagcatctgctactgaagataaagctaatttggtagctcaaaaagaagctgcagaaaaagctgctgctgaagccttagcacaagaacaggctgctaaagttaaggcacaagaacaggctgcacaacaagcagcatctgttgaagcagcaaaatctgctattactccagcaccacaagctactccggcagcgcaaagtagtaatgctattgaaccagctgcactcacggctccggcagctccttctgcaggaccacaaacatcatatgattcttctaatacttatccagttggacaatgcacatggggagctaaatctttagctccttgggcaggaaataattggggaaatggtggtcaatgggcttatagtgctcaagcagctggttatcgtactggttcaacgccgatggtaggtgcgattgccgtttggaacgatggtggttatggacatgtcgccgttgtagttgaggttcaaagtgcctcaagtattcgtgtgatggagtctaactacagtggtagacagtacattgctgaccaccgtggctggtttaatccaacaggtgttacatttatttatccacac

SEQ ID NO: 1014 - protein, 398 aa, Streptococcus pyogenes
MKKRILSAVLVSGVTLGAATTVGAEDLSTKIAKQDSIISNLTTEQKAAQNQVSALQAQVSSLQSEQDKLTARNTELEALSKRFEQEIKALTSQIVARNEKLKNQARSAYKNNETSGYINALLNSKSISDVVNRLVAINRAVSANAKLLEQQKADKVSLEEKQAANQTAINTIAANMAMAEENQNTLRTQQANLVAATANLALQLASATEDKANLVAQKEAAEKAAAEALAQEQAAKVKAQEQAAQQAASVEAAKSAITPAPQATPAAQSSNAIEPAALTAPAAPSAGPQTSYDSSNTYPVGQCTWGAKSLAPWAGNNWGNGGQWAYSAQAAGYRTGSTPMVGAIAVWNDGGYGHVAVVVEVQSASSIRVMESNYSGRQYIADHRGWFNPTGVTFIYPH

SEQ ID NO: 1015 - DNA, 228 bp, Streptococcus agalactiae
ttgattactgaatcagtagcagcaattttcgagtcaaagtcatcagcgtttactgttacggcagcagttccaagagttactccactcacaaggactgctgataatattctttttttcatttttattaaactactcctttacgataagacattaaatattttaccaaaaaattcacgaaattatattacgtcattgttacatttatatttgaaatcaactatttctaaa

SEQ ID NO: 1016 - protein, 76 aa, Streptococcus agalactiae
MITESVAAIFESKSSAFTVTAAVPRVTPLTRTADNILFFIFIKLLLYDKTLNILPKNSRNYITSLLHLYLKSTISK

SEQ ID NO: 1017 - DNA, 102 bp, Streptococcus agalactiae
atgggcacgagtggactcgaaccaccgacctcacgcttatcaggcgtgcgctctaaccacctgagctacgcgcccaagcaaatgcttggttttacttttatg

SEQ ID NO: 1018 - protein, 34 aa, Streptococcus agalactiae
MGTSGLEPPTSRLSGVRSNHLSYAPKQMLGFTFM

SEQ ID NO: 1019 - DNA, 1212 bp, Streptococcus agalactiae
ttggaggcttttcctaaaatggcaaaagaaaaatacgatcgtagtaaaccacacgttaacattggtacaatcggacacgttgaccacggtaaaactactttaacagcagctatcacaactgtattggcacgtcgcttgcctacttcagttaaccaaccaaaagattacgcttctatcgatgctgctccagaagagcgcgaacgcggaatcacaatcaacactgcacacgttgagtacgaaactgaaaaacgtcactatgcccacatcgacgctccaggacacgcggactacgttaaaaacatgatcactggtgctgctcaaatggacggagctatccttgtagttgcttcaactgatggaccaatgccacaaactcgtgagcacatccttctttcacgtcaagttggtgttaaacaccttatcgtattcatgaacaaagttgaccttgttgatgatgaagaattgcttgaattggttgaaatggaaattcgtgaccttctttcagaatacgacttcccaggtgatgaccttccagttatccaaggttcagctcttaaagcacttgaaggcgacgaaaaatacgaagacatcatcatggaattgatgagcactgttgatgagtacattccagaaccagaacgtgatactgacaaacctttacttcttccagttgaagatgtattctcaatcactggacgtggtacagttgcttcaggacgtatcgaccgtggtactgttcgtgtcaacgacgaagttgaaatcgttggtattaaagaagatatccaaaaagcagttgttactggtgttgaaatgttccgtaaacaacttgacgaaggtcttgcaggggacaacgttggtgttcttcttcgtggtgttcaacgtgatgaaatcgaacgtggtcaagttcttgctaaaccaggttcaatcaacccacacactagatttaaaggtgaagtttacatcctttctaaagaagaaggtggacgtcatactccattcttcaacaactaccgtccacaattctacttccgtacaactgacgtaacaggttcaatcgaacttccagcaggaacagaaatggttatgcctggtgataacgttactatcgaagttgaattgattcacccaatcgccgtagaacaaggtactactttctcaatccgtgaaggtggacgtactgttggttcaggtatcgtttcagaaatcgaagct

SEQ ID NO: 1020 - protein, 404 aa, Streptococcus agalactiae
MEAFPKMAKEKYDRSKPHVNIGTIGHVDHGKTTLTAAITTVLARRLPTSVNQPKDYASIDAAPEERERGITINTAHVEYETEKRHYAHIDAPGHADYVKNMITGAAQMDGAILVVASTDGPMPQTREHILLSRQVGVKHLIVFMNKVDLVDDEELLELVEMEIRDLLSEYDFPGDDLPVIQGSALKALEGDEKYEDIIMELMSTVDEYIPEPERDTDKPLLLPVEDVFSITGRGTVASGRIDRGTVRVNDEVEIVGIKEDIQKAVVTGVEMFRKQLDEGLAGDNVGVLLRGVQRDEIERGQVLAKPGSINPHTRFKGEVYILSKEEGGRHTPFFNNYRPQFYFRTTDVTGSIELPAGTEMVMPGDNVTIEVELIHPIAVEQGTTFSIREGGRTVGSGIVSEIEA

SEQ ID NO: 1021 - DNA, 1245 bp, Streptococcus pyogenes
atggcctaccgtctatctataaaatatattttattggaggcttttcctaaaatggcaaaagaaaaatacgatcgtagtaaaccccacgttaacattggtacaatcggacacgttgaccatggtaaaactactttaacagctgcaatcacaactgtattggcacgtcgcttgccttcatcagttaaccaaccaaaagattacgcttctatcgatgctgctccagaagaacgcgaacgcggaatcactatcaacactgcacacgttgagtacgaaactgcaactcgtcactatgcgcacatcgacgctccaggacacgcggactacgttaaaaacatgatcactggtgccgctcaaatggacggagctatccttgtagttgcttcaactgatggaccaatgccacaaactcgtgagcacatccttctttcacgtcaggttggtgttaaacaccttatcgtgttcatgaacaaagttgaccttgttgatgacgaagagttgcttgaattagttgagatggaaattcgtgaccttctttcagaatacgatttcccaggtgatgaccttccagttatccaaggttcagctcttaaagctcttgaaggcgacactaaatttgaagacatcatcatggaattgatggatactgttgattcatacattccagaaccagaacgcgacactgacaaaccattgcttcttccagtcgaagacgtattctcaattacaggtcgtggtacagttgcttcaggacgtatcgaccgtggtactgttcgtgtcaacgacgaaatcgaaatcgttggtatcaaagaagaaactaaaaaagctgttgttactggtgttgaaatgttccgtaaacaacttgacgaaggtcttgcaggagacaacgtaggtatccttcttcgtggtgttcaacgtgacgaaatcgaacgtggtcaagttattgctaaaccaagttcaatcaacccacacactaaattcaaaggtgaagtatatatcctttctaaagacgaaggtggacgtcacactccattcttcaacaactaccgtccacaattctacttccgtacaactgacgtaacaggttcaatcgaacttccagcaggtacagaaatggttatgcctggtgataacgtgacaatcaacgttgagttgatccacccaatcgccgtagaacaaggtactactttctcaatccgtgaaggtggacgtactgttggttcaggtatcgtttcagaaatcgaagct

SEQ ID NO: 1022 - protein, 415 aa, Streptococcus pyogenes
MAYRLSIKYILLEAFPKMAKEKYDRSKPHVNIGTIGHVDHGKTTLTAAITTVLARRLPSSVNQPKDYASIDAAPEERERGITINTAHVEYETATRHYAHIDAPGHADYVKNMITGAAQMDGAILVVASTDGPMPQTREHILLSRQVGVKHLIVFMNKVDLVDDEELLELVEMEIRDLLSEYDFPGDDLPVIQGSALKALEGDTKFEDIIMELMDTVDSYIPEPERDTDKPLLLPVEDVFSITGRGTVASGRIDRGTVRVNDEIEIVGIKEETKKAVVTGVEMFRKQLDEGLAGDNVGILLRGVQRDEIERGQVIAKPSSINPHTKFKGEVYILSKDEGGRHTPFFNNYRPQFYFRTTDVTGSIELPAGTEMVMPGDNVTINVELIHPIAVEQGTTFSIREGGRTVGSGIVSEIEA

SEQ ID NO: 1023 - DNA, 486 bp, Streptococcus agalactiae
ttggatgattatttaaaggcatcaaggttgattattttttcatttttttcttgtggcttatattgctcttctgcttctttcattatgagttcctttttctcgttagcatcaatattaagcacgaatccgatcgctacagaaagtaccaagaggctgttccctccttgggataagaaaggaaatgtcactccagttgaggggattaacccagaaataccaccaatgttaacaaaaacttgcatcaatagcattgctccaataccaagagcgatcattgagttgaaaggatctttagcctttatacctacgtgcataatacgtaaaattaagaagaaaaccaaagctaaaataaaccctgcaccaataactcctaattcctcaataacaattgaaaagacaaagtctgttgttgcttctggtaagtaccctaatttttcaatagaattcccaagtcctcgaccaaaccagccaccgttgctcattgca

SEQ ID NO: 1024 - protein, 162 aa, Streptococcus agalactiae
MDDYLKASRLIIFSFFSCGLYCSSASFIMSSFFSLASILSTNPIATESTKRLFPPWDKKGNVTPVEGINPEIPPMLTKTCINSIAPIPRAIIELKGSLAFIPTCIIRKIKKKTKAKINPAPITPNSSITIEKTKSVVASGKYPNFSIEFPSPRPNQPPLLIA

SEQ ID NO: 1025 - DNA, 492 bp, Streptococcus agalactiae
ttggctaattcktwttatgcaatgagcaacggtggctggtttggtcgaggacttgggaattctattgaaaaattagggtacttaccagaagcaacaacagactttgtcttttcaattgttattgaggaattaggagttattggtgcagggtttattttagctttggttttcttcttaattttacgtattatgcacgtaggtataaaggctaaagatcctttcaactcaatgatcgctcttggtattggagcaatgctattgatgcaagtttttgttaacattggtggtatttctgggttaatcccctcaactggagtgacatttcctttcttatcccaaggagggaacagcctcttggtactttctgtagcgatcggattcgtgcttaatattgatgctaacgagaaaaaggaactcataatgaaagaagcagaagagcaatataagccacaagaaaaaaatgaaaaaataatcaaccttgatgcctttaaa

SEQ ID NO: 1026 - protein, 164 aa, Streptococcus agalactiae
  MISC_FEATURE (1)..(164): Xaa = Any Amino Acid
MANSXYAMSNGGWFGRGLGNSIEKLGYLPEATTDFVFSIVIEELGVIGAGFILALVFFLILRIMHVGIKAKDPFNSMIALGIGAMLLMQVFVNIGGISGLIPSTGVTFPFLSQGGNSLLVLSVAIGFVLNIDANEKKELIMKEAEEQYKPQEKNEKIINLDAFK

SEQ ID NO: 1027 - DNA, 1302 bp, Streptococcus pyogenes
atgattatctcaagaagtagagggaaaactatgaagattgataaaaggcacctcttaaattattctatattattgccttatttaattttatcggtgataggcttaataatggtttactcaaccacaagtgtcagcttgattcaagcacatgctaatccatttaaatcggtgattaaccagggagttttttggataataagtctagtggctattacatttatctataaattaaaattaaattttttaacgaatacaagggtattaactgtggttatgttaggagaggcctttcttttaatcattgcccgcttctttacaactgctatcaaaggagcgcatggttggattgtgatcggaccagtcagctttcagcctgctgagtatttaaagatcattatggtatggtatttggcattgacctttgctaagatccaaaaaaacattagcctttatgattatcaagcactaactcgtcgaaaatggtggccaacacaatggaacgatttacgggactggcgtgtttattctttgttgatggtacttttggttgctgctcagcctgacttgggaaatgcttccattattgtattgacagccattattatgttttctatcagtggcattggttaccgatggttttcggctatcctagtcatgattaccggtctatccacggtctttcttgggactattgccgttattggggtagaaagagttgctaagattcctgtttttggctatgtcgctaaacgttttagtgccttttttaatccttttcatgacttgaccgattcaggtcaccaattagccaattcttactatgctatgagtaatggtgggtggtttggccaagggttaggaaattccattgaaaagcgtggctatttgcccgaagcacagacagactttgtcttttcagttgtcattgaagagttaggtctaataggagcagggtttattttggcacttgttttcttcttaattttacgtattatgaatgttggtattaaagcaaaaaatccttttaatgccatgatggctttaggagtaggcggtatgatgctcatgcaagtctttgttaatattggtggtatctcaggcttaattccatctactggtgttaccttcccttttttgtctcaaggtggaaatagcttacttgtcttatctgttgcagtgggttttgtactaaatattgatgctagcgaaaagcgagatgatatatttaaagaagctgaattatcttatcgaaaggacactcgaaaagaaaatagtaaagttgtaaatatcaagcaatttcaa

SEQ ID NO: 1028 - protein, 434 aa, Streptococcus pyogenes
MIISRSRGKTMKIDKRHLLNYSILLPYLILSVIGLIMVYSTTSVSLIQAHANPFKSVINQGVFWIISLVAITFIYKLKLNFLTNTRVLTVVMLGEAFLLIIARFFTTAIKGAHGWIVIGPVSFQPAEYLKIIMVWYLALTFAKIQKNISLYDYQALTRRKWWPTQWNDLRDWRVYSLLMVLLVAAQPDLGNASIIVLTAIIMFSISGIGYRWFSAILVMITGLSTVFLGTIAVIGVERVAKIPVFGYVAKRFSAFFNPFHDLTDSGHQLANSYYAMSNGGWFGQGLGNSIEKRGYLPEAQTDFVFSVVIEELGLIGAGFILALVFFLILRIMNVGIKAKNPFNAMMALGVGGMMLMQVFVNIGGISGLIPSTGVTFPFLSQGGNSLLVLSVAVGFVLNIDASEKRDDIFKEAELSYRKDTRKENSKVVNIKQFQ

SEQ ID NO: 1029 - DNA, 654 bp, Streptococcus agalactiae
  misc_feature (1)..(654): n = a, c, g, or t
atgaaaattgataaaaggcatcttctgaattattccatcctcattccctatttgatattgtctattctaggcttaattgtaatttattcgacaactagtgcaactctaattcagcttggagctaacccttttcgttcagtaatcaaccagggtgtcttttgggcagtcagtttggttgcaattatctttatctataaactgaaactaaattttttgaaaaattctaaagtgttgactatggcagtattggtagaagtatttttactactaatagcgcgcttttttacacaagaagttaatggagcacatggttggattgttattggtcctattagttttcaacctgctgaatatttaaaagttatcattgtatggtatttagcgtttacttttgctcgaaggcaaaaaaagatagaaatatatgattatcaagctttgacaaaagggagatggcttccgagatcactaagcgacctaaaagattggcgattttattctttatttatgattggtttggtaattgcacaacctgatttaggaaatggttcgataattgttctaacggtcattattatgtactgtattagtggtattggttatcgatggttttcagctttacttggtctaatcgtcgtggggtcaactttannnnnt

SEQ ID NO: 1030 - protein, 218 aa, Streptococcus agalactiae
  MISC_FEATURE (1)..(218): Xaa = Any Amino Acid
MKIDKRHLLNYSILIPYLILSILGLIVIYSTTSATLIQLGANPFRSVINQGVFWAVSLVAIIFIYKLKLNFLKNSKVLTMAVLVEVFLLLIARFFTQEVNGAHGWIVIGPISFQPAEYLKVIIVWYLAFTFARRQKKIEIYDYQALTKGRWLPRSLSDLKDWRFYSLFMIGLVIAQPDLGNGSIIVLTVIIMYCISGIGYRWFSALLGLIVVGSTLXX

SEQ ID NO: 1031 - DNA, 171 bp, Streptococcus agalactiae
ttggagaaagaggctaagcagatcattgatttaaaaaggaatcttttcaaaattgatgtccgggcacaaaaggatgaagagaaagttttcatgcgtacggcgtgttgctattctcccttttactttacttcgaaagatgatataatgcataatggtaattttttgatatat

SEQ ID NO: 1032 - protein, 57 aa, Streptococcus agalactiae
MEKEAKQIIDLKRNLFKIDVRAQKDEEKVFMRTACCYSPFYFTSKDDIMHNGNFLIY

SEQ ID NO: 1033 - DNA, 204 bp, Streptococcus pyogenes
ttggagaaagaggctaagcagatgattgatttaaaaaggaatcttttcaaaattgatgtccgggcacaaaaggatgaagagaaagttttcatgcgtacggcgtgtagacaatctagggtttacttgctatttcatcttgtttatggtatcatttcacaggctaagggtgcttcatggataacaacgagattttgtattcctaaa

SEQ ID NO: 1034 - protein, 68 aa, Streptococcus pyogenes
LEKEAKQMIDLKRNLFKIDVRAQKDEEKVFMRTACRQSRVYLLFHLVYGIISQAKGASWITTRFCIPK

SEQ ID NO: 1035 - DNA, 1140 bp, Streptococcus agalactiae
gtgactacgatgattgattttattatttctattgatgattgcgcagttgaattggatagtcgtcaatcttggaaaattcgctaccccttatcaaccattctatttcttgtctttgtttgtcagttagctggcattgaaacctggaaggagatggaagattttattgaaatgaatgaaccattgtttgcgacctacgttgatttgagtgaaggttgtccgtctcatgataccttagagcgtgtgattagtcttgttaattcagaccgtttaaaagagcttaaagttcaatttgagcaatcattgacaagcttagatgccgttcatcaactgatttcagtggacggtaaaacgattcgaggcaatcgaggtaaaaatcagaagcctgttcatattgtaacggcttatgatgggggtcatcatcttagtttgggacaggtagcggttgaggagaaaagtaatgaaattgttgccattcctcagttattgcggacaattgatatccgtaaaagcattgtaacgatagacgcaatgggcacgcagacggctatcgttgatacgattataaaaggtaaagcagactattgcttagccgtcaaaggaaatcaagaaacactttatgatgatattgctctttattttagtgatgtcaacttattggaagaactccaagaaaatgcgcagtattatcagactgttgaaaaatctaggggacagattgaagttagagaatactgggtgtcttccgatatcaaatggttgtgtcaaaatcatcccaaatggcataagttacgtggtattgggatgactcgtaacacgattgataaggatggtcagctgagtcaagagaatcgttattttatctttagctttaagccggatgtcctcacatttgccaattgtgtacgaggtcattggcagatagagagtatgcactggttattggacgttgtttatcatgaagatcatcatcagacattggataaaagagccgcatttaacctaaatcttatccgaaaaatgtgcttatattttctcaaagtgatggtatttcctaaaaaagacctcagttatcgtcgcaaacaacggtatatttctgtccatttggaagattatttagtccaattatttggagaaagaggc

SEQ ID NO: 1036 - protein, 380 aa, Streptococcus agalactiae; identical to SEQ ID NO: 502

SEQ ID NO: 1037 - DNA, 2820 bp, Streptococcus agalactiae
gtgagatttaagagaggaagtgatggtttgtcccacccgaaattagaaagtagtagcaataaagaaatcattaccgaagaggtcggtttactgaagcagcttttggatgaagcaacgcaaaaattgattggtagtgaatcatttgacaagattgaaaaaatagtttcattatcattaactgacgattatactggtctgaaggaaactatttcggctttaagcaacgaggagatggttattgtttctcgttacttctctattttgccgctcttaattaatatttcagaagacgttgatttagcatatgaaattaattataaaaataatcttaaccaagattacctaggaaagttatcaacgactattgatgttgtagctggccatgaaaatgctaaagatattcttgaacacgtcaatgttgtgcctgtgctaacagctcatcctactcaggtgcagcgtaaaacggtgctcgaattaacgtctaagattcatgatttattacgtaaatacagagatgtcaaggcaggaatcgtgaatcaagaaaaatggtatgctgacttgcgtcgttacatcggcattatcatgcaaacagacactattcgcgagaaaaaattgaaagtcaaaaatgagataaccaatgtaatggaatattacaaccgttctcttattaaagcagttaccaaattaacagcagaatataaggcactggcagctaaaaaaggtattcacttggagaatcctaagcctctgactatggggatgtggattggtggtgatagagatggcaatccctttgtaactgctgagacactaagattatcagctatggtacaaagtgaagtgattattaaccattatattgagcagctaaatgaactttatcgtaatatgtcactttcaataaatctaactgaagtctctcccgaacttgttacattggcaaaccagtcacaagataattcggtatatagggaaaatgaaccttaccgtaaagctttcaattttatccaagataaactggtacaaaccctactaaatttaaaagttggttcttccccaaaagagaaatttgttagtcgccaagaatcttctgatattgtaggaaggtatataaaatcacatatcgctcaagtagcttctgacatacagacagaagaactaccagcatacgctactgctgaggagtttaaacaagatttgttacttgtgaagcaatctttagttcaatatggacaagattctcttgttgatggcgaattagcttgtcttattcaagcagtagatatctttggattttatttagctactattgatatgcgtcaagattctagtattaatgaagcttgtgtagcagaattattgaagtctgccaatattgtagatgattacagttctctttcagaagaagaaaaatgtcaacttctcttaaaagaattaacagaagatcctagaacattatcttctacgcatgctcctaaatccgagttacttcaaaaagaattggctattttccaaacagcacgtgagttaaaagatcaattgggtgaagacattataaaccagcatatcatttctcacacagagagcgtttcggatatgtttgagttagctatcatgttaaaagaagttggactaattgatgccaatcaagctcgtattcagattgtaccgttatttgaaaccatcgaagatttggataattcacgtgatattatgacccagtatctacattatgaattagttaaaaaatggattgctactaacaacaattatcaagaaataatgctaggttattcagatagtaataaagatggtggctatttatcatctggttggactctatataaagctcaaaatgagctaacaaaaataggtgaagaaaacggtattaaaatcacatttttccacggtcgtggtggaactgttggtcgtggtggtggtccatcttatgaagctatcacatcacaaccttttggttcaatcaaagatcgaattcgcctaacagagcaaggtgaaatcattgagaataaatatggtaatcaagatgcagcctattataaccttgaaatgcttatttcagcttccatagaccgcatggtaacacgtatgattactaaccctaatgaaattgataatttccgtgagacaatggatggtattgtgtctgaaagtaatgccgtttatagaaatttagtttttgataatccttatttctatgactatttctttgaagcaagtccaattaaagaggtatcaagtttaaatattggttctcggccagcagcacgtaaaacaattacagaaatttcaggtttacgtgcaattccatgggtattttcatggtcacaaaatcgtattatgtttccaggatggtatggtgttggatcagccttcaagcactttattgaacaagatgaggcaaacttagcaaaattacaaaccatgtatcaaaaatggccattctttaattctcttttatctaatgtagatatggttttatcaaaatcaaatatgaatattgcgcttcagtatgctcagttagctggaagtaaagaagttcgagatgtttttaatatcatccttaatgaatggcagttaactaaagatatgattttagctattgaacagcatgataatttattagaagaaaacccaatgttacatgcaagtttagattatcgtttgccatatttcaatgttttgaattatgttcaaattgaattgattaaacgtcttcgtagtaaccaactagatgaagactatgagaagttgattcatattactattaatggtattgcaacaggtttacgaaattcaggt

SEQ ID NO: 1038 - protein, 940 aa, Streptococcus agalactiae
MRFKRGSDGLSHPKLESSSNKEIITEEVGLLKQLLDEATQKLIGSESFDKIEKIVSLSLTDDYTGLKETISALSNEEMVIVSRYFSILPLLINISEDVDLAYEINYKNNLNQDYLGKLSTTIDVVAGHENAKDILEHVNVVPVLTAHPTQVQRKTVLELTSKIHDLLRKYRDVKAGIVNQEKWYADLRRYIGIIMQTDTIREKKLKVKNEITNVMEYYNRSLIKAVTKLTAEYKALAAKKGIHLENPKPLTMGMWIGGDRDGNPFVTAETLRLSAMVQSEVIINHYIEQLNELYRNMSLSINLTEVSPELVTLANQSQDNSVYRENEPYRKAFNFIQDKLVQTLLNLKVGSSPKEKFVSRQESSDIVGRYIKSHIAQVASDIQTEELPAYATAEEFKQDLLLVKQSLVQYGQDSLVDGELACLIQAVDIFGFYLATIDMRQDSSINEACVAELLKSANIVDDYSSLSEEEKCQLLLKELTEDPRTLSSTHAPKSELLQKELAIFQTARELKDQLGEDIINQHIISHTESVSDMFELAIMLKEVGLIDANQARIQIVPLFETIEDLDNSRDIMTQYLHYELVKKWIATNNNYQEIMLGYSDSNKDGGYLSSGWTLYKAQNELTKIGEENGIKITFFHGRGGTVGRGGGPSYEAITSQPFGSIKDRIRLTEQGEIIENKYGNQDAAYYNLEMLISASIDRMVTRMITNPNEIDNFRETMDGIVSESNAVYRNLVFDNPYFYDYFFEASPIKEVSSLNIGSRPAARKTITEISGLRAIPWVFSWSQNRIMFPGWYGVGSAFKHFIEQDEANLAKLQTMYQKWPFFNSLLSNVDMVLSKSNMNIALQYAQLAGSKEVRDVFNIILNEWQLTKDMILAIEQHDNLLEENPMLHASLDYRLPYFNVLNYVQIELIKRLRSNQLDEDYEKLIHITINGIATGLRNSG

SEQ ID NO: 1039 - DNA, 2760 bp, Streptococcus pyogenes
ttgccacttaaaaagttagagagtagtaacaatcaagatatcattgctgaagaagttgctcttttgaaagaaatgttggaaaatatcacacgacggatgattggagatgatgcgtttacagttatcgagtctattatggtgttatctgaaaaacaagattacatagaattagaaaaagttgtcgccaatatttcaaatcaagaaatggaagtgatttccaggtatttttctattttacccttgctaatcaatatttcagaagatgtcgatttagcctatgaaatcaattatcaaaataatacggatactgattatttaggaaaattagccctaaccatcaaggatcttgctggaaaagataatggtaaagacattttggagcaggttaatgtggttcctgttttaacagcacatccgacgcaagtacaacgtaaaacgattctggaattgacaactcacattcataaacttctgcgcaaataccgtgatgctaaggctggtgtgattaatcttgagaaatggcgtcaggagctatatcgttatattgaaatgatcatgcagacagatattattcgcgagaaaaagcttcaggtgaaaaacgagataaaaaatgtcatgcagtattacgatggttctctcattcaagcagtgaccaagttgacaacagagtacaaaaacttagcccaaaaacacggtctagagttagacaatcccaaacccattaccatggggatgtggattggtggggaccgtgatgggaacccctttgtcacagctgaaaccttgtgcttgtcagctacggttcaaagtgaggttatcctcaattactacattgacgaattagcagccctttaccgaacattttcactgtcgtcaaccttggtacaacccaactcggaagtggaacgtttagccagtttgtctcaggaccaatcgatttaccgtggaaatgaaccttatcgcagagcttttcattatattcaatcgcgtcttaaacaaacacaaattcaactaactaatcagccagcagctagtatgagtagtagtgtgggactaaacacatctgcttggtcctcaccagctagtttagaaaatcccatcttagcctatgactctcctgttgattttaaagctgatttaaaggctattgagcagtcgctacttgataatggcaactccgctttgattgagggggatttgcgagaagtcatgcaagctgttgatatttttggcttcttcttagcaagcattgacatgaggcaagactccagtgtccaagaagcttgtgtggcagagttattaaaaggagccaatattgttgacgattatagctctctttcagaaactgaaaaatgcgatgttctcttacaacaattaatggaggagccaaggactttatcctcagcggcagttgctaaatcagacctattggaaaaagaactggctatctatactacggcacgagaattgaaagataagcttggagaagaggttattaaacaacatattatttcacatacagaaagtgtctctgatatgtttgagttggccatcatgcttaaagaagtgggattggttgaccagcagcgggctcgtgtgcaaattgttcccctctttgaaaccattgaggatttagataatgcccgtgacatcatggcagcctatttaagccatgacattgtcaaatcttggattgcaacgaatcgtaattaccaagaaatcatgttaggttattctgacagtaataaagatggtggctacttggcatcgggttggactctttataaagctcagaatgaattaacggctattggtgaggaacatggagtgaagatcaccttcttccatggtcgtggaggaacagttggtcgaggaggtggcccttcttatgatgccattacttcacaaccttttggttccatcaaagatcggattcgtctgacagagcaaggggaaattattgaaaacaaatacggcaataaagatgtggcttattaccatttagaaatgttgatttcagcttctatcaatcgtatggtgactcaaatgataacagatcctaatgagattgatagttttcgagaaatcatggatagcattgttgctgatagcaatatcatttatcgaaaattggtttttgacaatccccatttctatgattatttctttgaggcaagtccgattaaggaagtttccagtctcaacattgggtcaagaccagcggcccgtaaaacgattacggaaattacaggcttgcgtgccattccttgggtcttttcatggtcacaaaatcgcatcatgtttccaggttggtatggggtaggttcagcctttaaacgttatattgaccgagcacaaggtaaccttgaacgcctccaacatatgtatcagacgtggccttttttccattccttgttatcaaatgttgatatggtattatctaaatcaaacatgaatattgcctttcagtatgcacaactagctgaaaggcaggatgttcgagatgttttttatgagattttggatgagtggcaattgacaaaaaatgttattcttgctatccaagaccatgatgatctattggaggataatccttcccttaagcatagcttgaaatcacgcttgccgtattttaatgtgttgaactatattcaaattgaattgattaaacgttggcgtaataatcaacttgacgaaaatgatgaaaaattgatccatacaactatcaatggcatagcgactggtttacgtaattcaggc

SEQ ID NO: 1040 - protein, 920 aa, Streptococcus pyogenes
LPLKKLESSNNQDIIAEEVALLKEMLENITRRMIGDDAFTVIESIMVLSEKQDYIELEKVVANISNQEMEVISRYFSILPLLINISEDVDLAYEINYQNNTDTDYLGKLALTIKDLAGKDNGKDILEQVNVVPVLTAHPTQVQRKTILELTTHIHKLLRKYRDAKAGVINLEKWRQELYRYIEMIMQTDIIREKKLQVKNEIKNVMQYYDGSLIQAVTKLTTEYKNLAQKHGLELDNPKPITMGMWIGGDRDGNPFVTAETLCLSATVQSEVILNYYIDELAALYRTFSLSSTLVQPNSEVERLASLSQDQSIYRGNEPYRRAFHYIQSRLKQTQIQLTNQPAASMSSSVGLNTSAWSSPASLENPILAYDSPVDFKADLKAIEQSLLDNGNSALIEGDLREVMQAVDIFGFFLASIDMRQDSSVQEACVAELLKGANIVDDYSSLSETEKCDVLLQQLMEEPRTLSSAAVAKSDLLEKELAIYTTARELKDKLGEEVIKQHIISHTESVSDMFELAIMLKEVGLVDQQRARVQIVPLFETIEDLDNARDIMAAYLSHDIVKSWIATNRNYQEIMLGYSDSNKDGGYLASGWTLYKAQNELTAIGEEHGVKITFFHGRGGTVGRGGGPSYDAITSQPFGSIKDRIRLTEQGEIIENKYGNKDVAYYHLEMLISASINRMVTQMITDPNEIDSFREIMDSIVADSNIIYRKLVFDNPHFYDYFFEASPIKEVSSLNIGSRPAARKTITEITGLRAIPWVFSWSQNRIMFPGWYGVGSAFKRYIDRAQGNLERLQHMYQTWPFFHSLLSNVDMVLSKSNMNIAFQYAQLAERQDVRDVFYEILDEWQLTKNVILAIQDHDDLLEDNPSLKHSLKSRLPYFNVLNYIQIELIKRWRNNQLDENDEKLIHTTINGIATGLRNSG

SEQ ID NO: 1041 - DNA, 1797 bp, Streptococcus agalactiae
atgaaacttaaaaaacgctctgaattccctgaaaatgaactttgggatctgactgctctctacaaagatcgtcaagattttttactggctattgaaaaagctcttgaggatatcaaggttttcaaaaaaaattacgagggaaaacttaattgtgttgaggattttactagtgcccttatggaaatcgagcatatttatatccagatgagtcacattgatacgtatgcttttatgcctcaaactactgactttagcaacgaagagtttgcacaaatttctcaagcaggatcagacttcgcaactaaagctaatgtactactttctttctttaatactgccctagcaaatgcagatataaagattttagattctttagaaaataaccctcatttcaaagcaactattcgccaagctaaaattcaaaagcaacacttattaagtccagaagtcgaaaaagctttgacaaacttaaatgaagtcctaaatacaccatatgatatttatactaaaatgcgtgctggcgattttgatatggaagattttgaagttgacggaaaaacctacaaaaatagttttgtaacttatgaaaattactttcaaaatcacgaaaatgcagagatacgtgaaaaatccttccgttcattctcgaaaggtctacgtaagcaccaaaatgctgcagctgcggcttatcttgcaaaagtcaaatctgaaaagttaattgctgatatgcgtggttacgatagtgtttttgattatcttctttccgaacaagaagttgaccgttcaatgtttgacagacaaattgatcttatcatggatgaatttggtccagtagctcaacgattcctcaaacatatcgccgatgttaatggtattgaaaagatgacttttgcagattggaaattagacattgataacgaacttaatcccgaagtaagtatcaatgatgcttatgacttagtaatgaaatcagttgctcctttaggaaaagaatattctcaagaggttgagcgctatcaaaaagagcgttgggttgattttgcagctaacgctaataaagattctggaggatatgctgcggatccttacaaagttcatccctatgtactcatgagctggacggggcgtatgagcgatgtctacacacttattcatgagattggacattctggtcaatttatcttctcagataatcaccaaagttttttcaatactcacatgtccacttactatgttgaagctccatctacttttaacgaacttttacttagtgactacttagaaaaccaatttgatacagcacgtcaaaaacgctttgctcttgcacatcgcttaactgatacttacttccacaatttcattactcacttacttgaagctgctttccaacgtaaagtttacactctaattgaggagggaggaacttttggagcagaacaattaaatgctattatgaaggaagtattaacacaattctggggagatgctattgaaatagatgacgatgccgctttgacatggatgagacaagctcattactacatggggctctatagctatacttactctgctggattagtaatctcgacagccggctatctcaatctcaaaaataatccaaacggagcaaaagagtggttagcattcttgaaatctggtgggagccgtacccctttagaaacagctctattaatcagtgctgatatttctactgataagcctctgcgcgatactattaatttcttatctaacactgtagaccaaattattaattacagtaatcttattgagcaaggc

SEQ ID NO: 1042 - protein, 599 aa, Streptococcus agalactiae
MKLKKRSEFPENELWDLTALYKDRQDFLLAIEKALEDIKVFKKNYEGKLNCVEDFTSALMEIEHIYIQMSHIDTYAFMPQTTDFSNEEFAQISQAGSDFATKANVLLSFFNTALANADIKILDSLENNPHFKATIRQAKIQKQHLLSPEVEKALTNLNEVLNTPYDIYTKMRAGDFDMEDFEVDGKTYKNSFVTYENYFQNHENAEIREKSFRSFSKGLRKHQNAAAAAYLAKVKSEKLIADMRGYDSVFDYLLSEQEVDRSMFDRQIDLIMDEFGPVAQRFLKHIADVNGIEKMTFADWKLDIDNELNPEVSINDAYDLVMKSVAPLGKEYSQEVERYQKERWVDFAANANKDSGGYAADPYKVHPYVLMSWTGRMSDVYTLIHEIGHSGQFIFSDNHQSFFNTHMSTYYVEAPSTFNELLLSDYLENQFDTARQKRFALAHRLTDTYFHNFITHLLEAAFQRKVYTLIEEGGTFGAEQLNAIMKEVLTQFWGDAIEIDDDAALTWMRQAHYYMGLYSYTYSAGLVISTAGYLNLKNNPNGAKEWLAFLKSGGSRTPLETALLISADISTDKPLRDTINFLSNTVDQIINYSNLIEQG

SEQ ID NO: 1043 - DNA, 1872 bp, Streptococcus pyogenes
ttggataggtttagtctccatattccactaaaattctgttatactagtcttgactatattgttaaggagacaactatggaattgaaaaaacgttcagaattccctgaaaatgaactttgggatctaacagcgctctacaaagaccgccaagattttttactcgctattgaaaaagccttacaagatattgacctgtttaagcgcaattatgaaggccgcttaacgtcggtggacgatttcactcaggccttaatagaaattgagcatatttatattcaaatgagtcatattggcacttatgcctttatgcctcaaaccactgacttttcagatgaaagttttgctcaaattgctcaggctggcgatgatttcatgactaaagctagcgttgcccttagcttctttgacaccgccttagccaatgccgaccttgacgtgttagatacattagaaaagaacccttatttcagcgcagctattcgcatggcaaaaattcaaaaagaacacctcttaagtcctgatgtggaaaaagctttggctaacttacgcgaggttatcaatgcgccctatgatatttacaccaaaatgcgggctggtgactttgacatggatgattttgaggtggatggtaaaacctataaaaatagctttgtttcttacgaaaatttctatcaaaatcacgaaaatgctgagattcgtgaaaaagccttccgctctttttcaaaaggtctccgtaaacaccaaaatacagctgcagcggcttacttagccaaggttaaatctgaaaaattgttagcggatatgaaaggctacgcttctgtctttgattacctcctagctgaacaggaagtggatcgtagcttgttcgaccgccaaattgacctcatcatgactgaatttggaccggttgctcagaaattcttaaaacatgtcgcccaagtcaatggtcttgagaaaatgacttttgctgactggaagctagatattgacaatgatctcaatccagaggtcagcattgatggtgcctatgacctcgtgatgaaatctctagccccattagggcaagaatacacgaaagaaatcgaacgttatcagacagaacgctgggttgactttgctgctaacgccaataaggattctggtggttatgccgctgatccctacaaggttcatccgtatgtcttaatgagttggactggaagaatgtctgatgtttatacccttattcatgaaatcggtcactctggccaattcattttttcagataatcaccaaagttacttcaacacccatatgtcaacttattacgtcgaagcgccatcgacctttaatgaattgatgcttagtgattacttggaacatcagtttgatgaccctcgtcaaaaacgttttgcccttgctcaccgtttaacagatacttactttcataacttcatcactcacctattggaagcggctttccaacgtaaggtttacacccttattgaagaaggcggtacctttggagctgaccaattaaatgcgatgatgaaagaggtcttaacagacttctggggagatgccgttgacattgacgatgacgcagctcttacctggatgcgccaagcacattactacatgggcttatatagttatacctattctgctgggcttgttatttcaacagctggttacctcaaccttaaacataatccaaatggtgccaaggagtggcttgacttcctaaaatcaggtggcagccgtacgcctcttgatactgcaatgctcattggggcagacattgccactgaaaagcctcttcgagataccattcaattcttgagtgataccgttgaccaaattatcagttacaccgaggatatgtcacatgcc

SEQ ID NO: 1044 - protein, 624 aa, Streptococcus pyogenes
LDRFSLHIPLKFCYTSLDYIVKETTMELKKRSEFPENELWDLTALYKDRQDFLLAIEKALQDIDLFKRNYEGRLTSVDDFTQALIEIEHIYIQMSHIGTYAFMPQTTDFSDESFAQIAQAGDDFMTKASVALSFFDTALANADLDVLDTLEKNPYFSAAIRMAKIQKEHLLSPDVEKALANLREVINAPYDIYTKMRAGDFDMDDFEVDGKTYKNSFVSYENFYQNHENAEIREKAFRSFSKGLRKHQNTAAAAYLAKVKSEKLLADMKGYASVFDYLLAEQEVDRSLFDRQIDLIMTEFGPVAQKFLKHVAQVNGLEKMTFADWKLDIDNDLNPEVSIDGAYDLVMKSLAPLGQEYTKEIERYQTERWVDFAANANKDSGGYAADPYKVHPYVLMSWTGRMSDVYTLIHEIGHSGQFIFSDNHQSYFNTHMSTYYVEAPSTFNELMLSDYLEHQFDDPRQKRFALAHRLTDTYFHNFITHLLEAAFQRKVYTLIEEGGTFGADQLNAMMKEVLTDFWGDAVDIDDDAALTWMRQAHYYMGLYSYTYSAGLVISTAGYLNLKHNPNGAKEWLDFLKSGGSRTPLDTAMLIGADIATEKPLRDTIQFLSDTVDQIISYTEDMSHA

SEQ ID NO: 1045 - DNA, 387 bp, Streptococcus agalactiae
atgaaaaaatacattaaattattcttgctaacagtattcgctacaactttagtagcttgcgggcaaccatctacatcgaataagacaacaactagctcaacgttagaagttggtaaggttgaattggtggttaaagaagatacgaacgtgttaagtgaaaaggttgtttaccataaaggtgatactgttttggatgtgcttaaagctaactataaagttaaagaaaaagatggtttcattacttcaattgatggcatcagccaagatgaaaccaaagggctttattggatgttcaaggtcaataataaattagctcctaaggcagcaaaccaaattaaagttaaaaagaatgacaaaattgaattttatcaggaagtttacaaaaaa

SEQ ID NO: 1046 - protein, 129 aa, Streptococcus agalactiae
MKKYIKLFLLTVFATTLVACGQPSTSNKTTTSSTLEVGKVELVVKEDTNVLSEKVVYHKGDTVLDVLKANYKVKEKDGFITSIDGISQDETKGLYWMFKVNNKLAPKAANQIKVKKNDKIEFYQEVYKK

SEQ ID NO: 1047 - DNA, 384 bp, Streptococcus pyogenes
gtgaacaaaagatttaaaacaggatttctagcgcttgttgctatgctacttgttgcttgctcgcaaggaacaaaacaaatacagacgactccaagcgttccaaaagcagaccatcacgttcgcttagttgtcaaagaagataccaatactgttgacgaaaaagtttcttttggaaaaggagatacggtgcttgaggttctcaaagataattatgaggttaaagaaaaagatggttttatcacagcaattgatggtatcgagcaagacacgaaagctaacaaatactggctttttaaggtgaatggaaagatggcagataagggtgccgatcaaattaccgttaaagatggtgatagcattgaattttatcaagaagtttttaat

SEQ ID NO: 1048 - protein, 128 aa, Streptococcus pyogenes
VNKRFKTGFLALVAMLLVACSQGTKQIQTTPSVPKADHHVRLVVKEDTNTVDEKVSFGKGDTVLEVLKDNYEVKEKDGFITAIDGIEQDTKANKYWLFKVNGKMADKGADQITVKDGDSIEFYQEVFN

SEQ ID NO: 1049 - DNA, 522 bp, Streptococcus agalactiae
atgataaagaattcaactttaactaaattgactagagtcgctatattatctgctttgtgtgttgtgttgagatatgcttttgcgcctctgcctaacattcagccaattactgccatttttttgattacagttgtcttattcgatttaaaagaaggtgtagctactgtaactataacaatgctagtttcttcttttttaatgggctttgggccatgggtctttttgcaaatcatttccttcactttaattttatgcttgtggaaatttctgatatatccgctgacaaaagctgtatgttttggtaaaataacggaggtagtacttcaaactttctttgcaggagggttaggggttgtttatggcgtcattattgatacctgttttgcttggttatatcatatgccttggtggacttatgtattagcaggacttagttttaatatggcacacgctttatcaacttgtttattttatcctcttttgttaccgattttaaggagatttaggaatgaaaaaatacat

SEQ ID NO: 1050 - protein, 174 aa, Streptococcus agalactiae
MIKNSTLTKLTRVAILSALCVVLRYAFAPLPNIQPITAIFLITVVLFDLKEGVATVTITMLVSSFLMGFGPWVFLQIISFTLILCLWKFLIYPLTKAVCFGKITEVVLQTFFAGGLGVVYGVIIDTCFAWLYHMPWWTYVLAGLSFNMAHALSTCLFYPLLLPILRRFRNEKIH

SEQ ID NO: 1051 - DNA, 501 bp, Streptococcus pyogenes
atgtcagctaagcttatgagtcgcattgctatcatgtcagccctatgtgttgtgttgagaatggtttttagcagcctgcctaacgtgcagcctgtgacggcatttttactcagttatcttctttactttgggttagccgaggctgtattagttatgatgttgtgcttgtttttatcagcctttttgctgggatttggcccttgggtcttttggcaagttacttgttttgtgcttgttcttttattatggcgttttgtcttgtaccctttgtctcagcaattccccaaatatcagcttggctgtcaggctttcttggtcgccttatgtggcctcctttatggggtgttgatagatacttgttttgcgtatttgtatagtatgccttggtggagctatgttctagctgggatgccttttaatatagcgcatgctttatcaactctcgtcttttttccagttgtgatgatgttatttaggaggttaatcggtgaacaaaagatt

SEQ ID NO: 1052 - protein, 167 aa, Streptococcus pyogenes
MSAKLMSRIAIMSALCVVLRMVFSSLPNVQPVTAFLLSYLLYFGLAEAVLVMMLCLFLSAFLLGFGPWVFWQVTCFVLVLLLWRFVLYPLSQQFPKYQLGCQAFLVALCGLLYGVLIDTCFAYLYSMPWWSYVLAGMPFNIAHALSTLVFFPVVMMLFRRLIGEQKI

SEQ ID NO: 1053 - DNA, 846 bp, Streptococcus agalactiae
atgagaagaagaattaaacctattgttgttgcggtttttttcagtttatttggacttttattaattattggtcatttacattcgacaaatactttgaaaaaagaattagttgaagctaaaaagacaattccatccgtaaaagcttcaaaagtaccgcaaaaatcaacatcatcgaaagataaagagtttgttcttaaaccgattatcgatgtctctggttggcaacttcctaaggagattgattacgatacgctttcaaaaaatatttcaggtgttgttattcgtgtctttggtggatcaaagatatctaagactaataacgctgcttatacaactggaatcgataaatcgtttaagacccatatcaaagaatttcaaaagcgaaatatcccagtagctgtctacagttatgcacttggttcaagtgttaaagaaatgaaagaagaggctcagatattttataagaatgcagctccttacaaaccaactttttattggattgacgtagaagaggagacaatgtctaacatgaataaaggtgtccaagcattccgaaaagaattaaaaagacttggtgctaaaaatgttggtatctacattggtacttactttatgactgagcaaggcatctctgtaaaaggatttgacgctgtttggattccaacttatggtagcgattctggatactatgaagcggctccgcaaactgaacttaaatacgatttacaccaatacacctctcaaggttatctaccaggattcaatcaaccgcttgatttaaatcaaattgcagttaataaagacaagaagaaaacttatgagaaactttttggaaaagtaaaagag

SEQ ID NO: 1054 - protein, 282 aa, Streptococcus agalactiae
MRRRIKPIVVAVFFSLFGLLLIIGHLHSTNTLKKELVEAKKTIPSVKASKVPQKSTSSKDKEFVLKPIIDVSGWQLPKEIDYDTLSKNISGVVIRVFGGSKISKTNNAAYTTGIDKSFKTHIKEFQKRNIPVAVYSYALGSSVKEMKEEAQIFYKNAAPYKPTFYWIDVEEETMSNMNKGVQAFRKELKRLGAKNVGIYIGTYFMTEQGISVKGFDAVWIPTYGSDSGYYEAAPQTELKYDLHQYTSQGYLPGFNQPLDLNQIAVNKDKKKTYEKLFGKVKE

SEQ ID NO: 1055 - DNA, 846 bp, Streptococcus pyogenes
atgagaagaaaaataaaacctattgttgtgctagtcttctttattttactggcaatggtattgattatcggaaaaagacaagctaatcatgcgaaacaaaaagaagttgaagacgctaagagtcatattcctattgcaaccagtaatcctggtaaagcaaaaactagcacttctgaaaccgaagactttattttaaatcctattgttgatgtttccggctggcaactccctgaagaaattgattatgacacattgtcacgtcacatctctggcgcaattgtacgtgtctatggaggatcgcaaattacagctcataacaacgctgcttttacaactggaattgacaaatcttttaaaacgcatatcaaagaatttcaaaaacgaaatgttcctgtagctgtttacagttacgcacttggtcgtagtactaaagagatgaaagaagaggcccgagctttctacaaaaacgctgctccctataatccaacttactactggattgatgtcgaagaagccactatgaaagatatgaataaaggcgtaacagccttccgagaagagcttaaaaaacttggtgctgaaaatgttggtctctatattggaacttattttatggcagaacaagatatttcaacaaaaggtttcgattctgtatggattccgacttatggtagtgattctggctattatgaggctgctcctaatacaaccttagattacgatttacaccaatacacctcacaaggttatctcagtggttttaacaatgctttagatttaaatcaaattgccgtaacaaaagacactaaaaaaacgtttgagaagttatttggcaactccaacaat

SEQ ID NO: 1056 - protein, 282 aa, Streptococcus pyogenes
MRRKIKPIVVLVFFILLAMVLIIGKRQANHAKQKEVEDAKSHIPIATSNPGKAKTSTSETEDFILNPIVDVSGWQLPEEIDYDTLSRHISGAIVRVYGGSQITAHNNAAFTTGIDKSFKTHIKEFQKRNVPVAVYSYALGRSTKEMKEEARAFYKNAAPYNPTYYWIDVEEATMKDMNKGVTAFREELKKLGAENVGLYIGTYFMAEQDISTKGFDSVWIPTYGSDSGYYEAAPNTTLDYDLHQYTSQGYLSGFNNALDLNQIAVTKDTKKTFEKLFGNSNN

SEQ ID NO: 1057 - DNA, 672 bp, Streptococcus agalactiae
ttgacaaggcatataaaaatttctatactaaatttacaaaatgaaggagagggaactatggaaatactgattgcaggtggtagtggttttttaggaaagcagataataaaagcagcgcttacaaaagggcataaagtggcttacttatcaagacatgaaggtaaaggtgatatatttaaggatcctagattaacctacattaggggagatattacagaagctgataagattcatttagaagacagaacttttgatatattaattgactgtattggagcgattaagcccaatcaactagatgagcttaacgttaaagcaacccaaaaagcagtagcactctgtcacaaaaatcaaataccaaagttagtttatatttcagccaacagcggctattcagcttacattaaaagtaaaaggaaggcagagcagataatcaaagcaagcggtctggattatctttttgtaagaccaggtttgatgtatggtgaagagcgacctctctcgattttccaagccaagtgtataaagttatttagtcatttgcctttcttaggtattgttgtacaaaaggtctttccaactaaggttgtgatagtggcagaagcaatcgttactacgcttaggaaaaaaccaacccaaaaaatcctttctattgaagaattaaataataaa

SEQ ID NO: 1058 - protein, 224 aa, Streptococcus agalactiae
MTRHIKISILNLQNEGEGTMEILIAGGSGFLGKQIIKAALTKGHKVAYLSRHEGKGDIFKDPRLTYIRGDITEADKIHLEDRTFDILIDCIGAIKPNQLDELNVKATQKAVALCHKNQIPKLVYISANSGYSAYIKSKRKAEQIIKASGLDYLFVRPGLMYGEERPLSIFQAKCIKLFSHLPFLGIVVQKVFPTKVVIVAEAIVTTLRKKPTQKILSIEELNNK

SEQ ID NO: 1059 - DNA, 471 bp, Streptococcus agalactiae
atgagtaaaaagaataaaatcaaaaaaactttagttgatcaaattttagataaagcaaaaatcgaacatgatagtctacaattggatgctttacagggagatttacccaacggtattcaaaaacaagatatctttaagacattagcgctaatcggtgataaaaccggtcccataataggtatcttacctctcaccgagcatttatccgaaaaaaagttagctaaaatttcaggaaacaaaaaggtacaaatgatacctcaaaaagatctccagaaaataaccggttatattcacggagcaaataatccaattggaattcgccaaaaacataattaccctatttttatcgatactatcgctttagaaaaacaagaactcattgtctctgcaggagaaattggacgttctattcgtattaatagtgaggttcttgcagatttcgtaaatgctaaatttgccgatataaaggaa

SEQ ID NO: 1060 - protein, 157 aa, Streptococcus agalactiae
MSKKNKIKKTLVDQILDKAKIEHDSLQLDALQGDLPNGIQKQDIFKTLALIGDKTGPIIGILPLTEHLSEKKLAKISGNKKVQMIPQKDLQKITGYIHGANNPIGIRQKHNYPIFIDTIALEKQELIVSAGEIGRSIRINSEVLADFVNAKFADIKE

SEQ ID NO: 1061 - DNA, 477 bp, Streptococcus pyogenes
atggctaaaaaaacaaaactcaaaaaaaccttagtagaacaaatcctcgataaggctaatattgctcatcaaggactcaagcttaatgctttagaaggcgactttccagatgatcttcaaccatcagatatttacaagacacttgctctgactggtgatcaaacaggtcctctaattggcattattccattaacagaacacttatcagaaaaacaattggcaaaagtatcaggtaacaaaaaagtgtccatggttcctcaaaaagacttgcaaaagacaacaggctatattcacggtgccaataatcctgttgggattcgtcaaaaacattcatatcctatttttattgaccaaactgcactggaaaaaggtcaaataatcgtttcagctggtgaagttgggcgttctataaagatttctagccaggctctagctgatttcgttggcgcaagctttgctgatttaaagaagagaaaa

SEQ ID NO: 1062 - protein, 159 aa, Streptococcus pyogenes
MAKKTKLKKTLVEQILDKANIAHQGLKLNALEGDFPDDLQPSDIYKTLALTGDQTGPLIGIIPLTEHLSEKQLAKVSGNKKVSMVPQKDLQKTTGYIHGANNPVGIRQKHSYPIFIDQTALEKGQIIVSAGEVGRSIKISSQALADFVGASFADLKKRK

SEQ ID NO: 1063 - DNA, 651 bp, Streptococcus agalactiae
ttggagaaaaatatgaaattttatcttgttagacacggaaaaacacaatggaatttagaggggcgtttccaaggtgctaacggagactcacctctccttgaagaagctattgaagaattagaagaacttggacaatacctatcatctattcattttgatgctgtttattctagcgacttaggtcgtgctagagatactgttaatatcctcaatgatgctaattcatgcccaaaagaaatccactatactcctcaacttcgtgaatgggcattgggaactttagaaggttgtaaaattgcaactatgcaagctatctatcctcgtcaaatgaccgcattttatcaaaatcccttacaatttaaacatgacatgttcggtgcagaatctctttatcagacaacgcatcgtgtagagagtttcttacgttctctagcttcaaaaaattacgacaaggtccttattgtaggacatggagcaaacctaactgcgtctattcgttccttactgggttatcaatatggtagtttacactacaaagataaacttgataatgccagcctcacaatcatagaaactcatgattttaaagacttcaactgtctgacttggaacgataaatcttatttaaggcaagaggtcaaaatgacacac

SEQ ID NO: 1064 - protein, 217 aa, Streptococcus agalactiae
MEKNMKFYLVRHGKTQWNLEGRFQGANGDSPLLEEAIEELEELGQYLSSIHFDAVYSSDLGRARDTVNILNDANSCPKEIHYTPQLREWALGTLEGCKIATMQAIYPRQMTAFYQNPLQFKHDMFGAESLYQTTHRVESFLRSLASKNYDKVLIVGHGANLTASIRSLLGYQYGSLHYKDKLDNASLTIIETHDFKDFNCLTWNDKSYLRQEVKMTH

SEQ ID NO: 1065 - DNA, 621 bp, Streptococcus pyogenes
atgaaattatattttgtaagacatgggaaaaccctttggaatttagaaggtcgctttcaaggcgctgggggcgattcgccattacttgaagaggcaaaagacgaaattcacttacttggcaaagagttagctaaggtggcttttgatgccgtttatactagcgaccttcaaagagctatggcaacagcagctattatcttagatgcttttgaccaacagccaaaactttaccacaccgaccagcttcgggagtggagattaggtaaattggaaggggctaaaatagcaacaatggcagctatatatccccaacaaatgctggcttttcgagagaatctagcccagttcaaaccagatcagttcgaggctgaatcaatttaccaaacgactcaacgtgtctgccatcttatccaatcgtttaaagataaacattatcaaaacgttcttattgtaggacacggcgctaacttaacagcaactattcgctcattattaggttttgaacctgctcttttactcgctaaaggtggcttagataatgccagtcttactattcttgaaactaaagattatttaacttatgactgtttaatttggaatgataaatcttttctagaggtg

SEQ ID NO: 1066 - protein, 207 aa, Streptococcus pyogenes
MKLYFVRHGKTLWNLEGRFQGAGGDSPLLEEAKDEIHLLGKELAKVAFDAVYTSDLQRAMATAAIILDAFDQQPKLYHTDQLREWRLGKLEGAKIATMAAIYPQQMLAFRENLAQFKPDQFEAESIYQTTQRVCHLIQSFKDKHYQNVLIVGHGANLTATIRSLLGFEPALLLAKGGLDNASLTILETKDYLTYDCLIWNDKSFLEV

SEQ ID NO: 1067 - DNA, 900 bp, Streptococcus agalactiae
atgattacttcaattgtttttgatgttgatgatacgatttacgatcaacaagcaccttaccgtattgctgtggagaaatgctttcctgattttgatatgagcgctattaaccaagcttatattcgctttcgtcattattcagatattggctttccacgagtaatggctggtgaatggacaacagaatattttcgtttctggcgatgcaaagaaacgcttttagagtttggttatcgtgaaattgacgaagctactggtatttattttcaagaaatatacgaacatgaacttgaaaatattacaatgcttgatgagatgcgtatgacacttgactttttgaaatcaaaaaatgtaccaatgggaattattacaaatggtcctacggaacatcaattgaaaaaagttaaaaaattgggactttatgactatgttgatccaaaacgtgttatagttagtcaagcaactggttttcaaaagcctgaaaaggagatttttaatttagcagcagagcaatttgatatgaacccttcaactacactttatgtgggtgattcatatgataatgatattatgggtgcatttaatggtggttggcattctatgtggttcaaccatagaggacgttctttaaaaccgggaattaaaccagtttatgatgttgctattgataactttgagcaattattcggtgctgttaaagtgttgtttgacttacctgataataaatttatttttgatatcaacgataaaagtaatccagtccttgaaatgggacttaataatggtttaatgatggcagcagagcgtctgcttgagagtaatatgagcgttgacaaagttgttattttactgcgcctaactgcaaaacaagaaaaagtattacgcatgaagtatgctaga

SEQ ID NO: 1068 - protein, 300 aa, Streptococcus agalactiae
MITSIVFDVDDTIYDQQAPYRIAVEKCFPDFDMSAINQAYIRFRHYSDIGFPRVMAGEWTTEYFRFWRCKETLLEFGYREIDEATGIYFQEIYEHELENITMLDEMRMTLDFLKSKNVPMGIITNGPTEHQLKKVKKLGLYDYVDPKRVIVSQATGFQKPEKEIFNLAAEQFDMNPSTTLYVGDSYDNDIMGAFNGGWHSMWFNHRGRSLKPGIKPVYDVAIDNFEQLFGAVKVLFDLPDNKFIFDINDKSNPVLEMGLNNGLMMAAERLLESNMSVDKVVILLRLTAKQEKVLRMKYAR

SEQ ID NO: 1069 - DNA, 900 bp, Streptococcus pyogenes
atgattactgctattgtttttgatgtggatgacacaatttacgaccagcaagcgccttatcgaatcgccatggaaaagtgcttcccagattttgatatgtcagtaatgaatcaagcttatattcgctttcgtcactattcagatgttggattcccaagagtaatggcaggggagtggaccacagaatatttccgattctggcgttgcaaggaaacactgcttgagtttggctatcgagaaatcgacgaagctgcgggagtacattttcaagaagtctatgagcacgaacttgagaacattaccatgttagatgagatgcgcatgacccttgactttttaaaatcaaagaatgttcctatggggattattaccaatgggccaacagaacatcagctgaaaaaagttcgtaaattagggctttatgattatattgatgctaagcgtgtcattgtgagccaagcaacaggctttcaaaaaccagaaaaagaaatttttaacctggcagcagaacaatttgacatgaacccacaaaccacactatatgttggggactcttatgacaatgatatcatgggtgcctttaatggtggttggcattccatgtggtttaatcatagaggtcgtcagctaaaaccaggcactaagcctgtttatgatgtggctattgataactttgaacagctctttggtgccgttaaagtactctttgatttacctgataataaatttatttttgatgtcaatgacaagaaaaatccaattttacagatgggaatcaataatggcttgatgatggcagcagagcgtttacttgaaagcaacatgagcattgacaaggtggttatcttgcttcggttaaccaagcaacaagaaaaagttttgcgcttaaaatatgccaga

SEQ ID NO: 1070 - protein, 300 aa, Streptococcus pyogenes
MITAIVFDVDDTIYDQQAPYRIAMEKCFPDFDMSVMNQAYIRFRHYSDVGFPRVMAGEWTTEYFRFWRCKETLLEFGYREIDEAAGVHFQEVYEHELENITMLDEMRMTLDFLKSKNVPMGIITNGPTEHQLKKVRKLGLYDYIDAKRVIVSQATGFQKPEKEIFNLAAEQFDMNPQTTLYVGDSYDNDIMGAFNGGWHSMWFNHRGRQLKPGTKPVYDVAIDNFEQLFGAVKVLFDLPDNKFIFDVNDKKNPILQMGINNGLMMAAERLLESNMSIDKVVILLRLTKQQEKVLRLKYAR

SEQ ID NO: 1071 - DNA, 1599 bp, Streptococcus agalactiae
atggtgaaaagtctattaaaaatgagaataacaccagaaactcataaaataaattatgaattatcagtgtttttgtggtacaataggatgaatactaacttggaggaaattatgtctaaccaacatattgaagaattaaatgaccaacagattgttcgtcgtgaaaaaatggctgctttgactgaacaaggcattgatccttttggtaaacgatttgaacgtacagcaacatctggtcaattaaatgaaaaatacgctgacaaatcaaaagaagacttgcacgacattgaagaaactgctacaatcgctggtcgtttaatgactaagcgcggtaaggggaaagttggctttgcgcatatccaagatcgcgaaggtcaaattcaaatttatgtccgtaaagattctgttggcgaagaaaactacgaaatctttaaaaaagctgatttaggtgacttccttggtgttgaagggcaagtaatgcgtacagatatgggagaactttctatcaaggctactcatattactcacctttcaaaagcactccgtccacttcctgaaaaattccacggcctaactgatattgaaacaatctatcgtaaacgtcatcttgatttaatctcaaatcgtgacagctttgaccgttttgtaacacgctcaaaaatcatttcagaaattcgtcgctttatggatagcaatggtttcttagaggttgaaacacctgttcttcataatgaagctggtggtgcttctgctcgcccatttatcacacatcacaatgcacaagacattgacatggttcttcgtatcgcaactgaattgcatctaaaacgtcttattgtaggtggtatggagcgtgtttatgaaatcggacgtattttccgtaatgaagggatggatgcaacccacaatccagagttcacatctattgaagcctaccaagcctatgctgactaccaggatattatggacttgacagaaggtattatccagcatgttacaaaaactgtaaaaggtgatggaccaattaattatcaaggcacagaaattaaaattaatgaaccattcaaacgtgttcatatggttgatgcggttaaagaaatcactggtattgacttctggaaagaaatgactcttgaagaagcacaagctttggcacaagaaaaaaatgttccgcttgaaaaacatttcacaacagttggtcacatcattaatgccttcttcgaagaatttgttgaagacactttaattcaaccaacttttgtctttggtcatccagttgaagtgtctccacttgctaagaaaaatgatacagaccctcgttttacagaccgtttcgaactctttatcatgactaaagaatacgctaatgcttttacagaattaaatgacccaattgatcagctatctcgctttgaagcacaagcatctgctaaagaacttggcgatgatgaagcaactggagttgattacgattatgttgaagcacttgaatatggtatgccacctactggtggactaggtattggtatcgaccgtctctgtatgctgttaactgatacaacaactatccgagacgtcctacttttccctacaatgaaa

SEQ ID NO: 1072 - protein, 533 aa, Streptococcus agalactiae
MVKSLLKMRITPETHKINYELSVFLWYNRMNTNLEEIMSNQHIEELNDQQIVRREKMAALTEQGIDPFGKRFERTATSGQLNEKYADKSKEDLHDIEETATIAGRLMTKRGKGKVGFAHIQDREGQIQIYVRKDSVGEENYEIFKKADLGDFLGVEGQVMRTDMGELSIKATHITHLSKALRPLPEKFHGLTDIETIYRKRHLDLISNRDSFDRFVTRSKIISEIRRFMDSNGFLEVETPVLHNEAGGASARPFITHHNAQDIDMVLRIATELHLKRLIVGGMERVYEIGRIFRNEGMDATHNPEFTSIEAYQAYADYQDIMDLTEGIIQHVTKTVKGDGPINYQGTEIKINEPFKRVHMVDAVKEITGIDFWKEMTLEEAQALAQEKNVPLEKHFTTVGHIINAFFEEFVEDTLIQPTFVFGHPVEVSPLAKKNDTDPRFTDRFELFIMTKEYANAFTELNDPIDQLSRFEAQASAKELGDDEATGVDYDYVEALEYGMPPTGGLGIGIDRLCMLLTDTTTIRDVLLFPTMK

SEQ ID NO: 1073 - DNA, 1503 bp, Streptococcus pyogenes
ttggaggaaaatatgtctaatcaacacatcgaagaattaaatgaccaacagattgtccgtcgtgaaaaaatgacggcgctggctgaacaaggaattgatcctttcggtaaacgctttgaccgcacagccaattctgctgaattaaaagaaaagtatgctgataaaacaaaagaagaattacatgagttaaacgaaacagctattgttgctggccgcttgatgacaaaacgtggcaaaggtaaggttggttttgctcatcttcaagaccgtgaaggccaaatccaactttatgttcgcaaggactctgttggcgaagacaactatgaaatcttcaaaaaagccgatttaggcgactttatcggcgttgaaggcgaagtcatgcgtacagacatgggcgagttgtcaatcaaggcaaccaagttgactcacctttctaaatcacttcgtcctcttcctgaaaaattccacggattaactgatattgaaaccatttaccgtaagcgtcaccttgatttaatttcaaatcgtgaaagctttgaccgcttcgtgacccgttccaaaatgatttcagaaatccgtcgttatttagacggtcttgatttcctagaagtagaaacgcctgtgcttcataacgaggctggtggtgctgctgctcgtcctttcgttactcaccataatgctcaaaacattgatatggtgcttcgtatcgcaacagaacttcatttgaaacgtttgattgttggtggtatggaacgtgtctatgaaattggtcgtatcttccgtaacgagggaatggatgctactcataatcctgagttcacttctattgaggtttaccaagcctatgcagactatcttgatatcatgaacctgacagaaggcattatccaacatgctgctaaagctgttagaggtgatggccctattgattatcaaggaactgaaatccgtatcaatgaacctttcaaacgtgttcacatggtagatgctatcaaggaagtgacaggtgctgatttctggcctgaaatgactgtcgaagaagctattgcacttgccaaagaaaaacaggtcccactcgaaaaacacttcataagtgtcggacatatcatcaacgctttcttcgaggaatttgttgaagaaaccttggtccaaccaacctttgtgtttggtcatcctgttgaagtatcgcctttggctaagaagaatccagaagatacccgcttcaccgaccgcttcgaacttttcatcatgaccaaagaatacgccaatgctttcacagagttgaatgatcccattgaccaattatctcgttttgaagcacaagcacaagctaaagaacttggtgatgacgaagcaactggcattgactacgacttcgttgaagctcttgaatatggtatgccgccaaccggtggactcggaatcgggattgatcgtctttgcatgttattaacaaacacaacaacaatcagagatgtgcttttattcccaacgatgaaacct

SEQ ID NO: 1074 - protein, 501 aa, Streptococcus pyogenes
LEENMSNQHIEELNDQQIVRREKMTALAEQGIDPFGKRFDRTANSAELKEKYADKTKEELHELNETAIVAGRLMTKRGKGKVGFAHLQDREGQIQLYVRKDSVGEDNYEIFKKADLGDFIGVEGEVMRTDMGELSIKATKLTHLSKSLRPLPEKFHGLTDIETIYRKRHLDLISNRESFDRFVTRSKMISEIRRYLDGLDFLEVETPVLHNEAGGAAARPFVTHHNAQNIDMVLRIATELHLKRLIVGGMERVYEIGRIFRNEGMDATHNPEFTSIEVYQAYADYLDIMNLTEGIIQHAAKAVRGDGPIDYQGTEIRINEPFKRVHMVDAIKEVTGADFWPEMTVEEAIALAKEKQVPLEKHFISVGHIINAFFEEFVEETLVQPTFVFGHPVEVSPLAKKNPEDTRFTDRFELFIMTKEYANAFTELNDPIDQLSRFEAQAQAKELGDDEATGIDYDFVEALEYGMPPTGGLGIGIDRLCMLLTNTTTIRDVLLFPTMKP

SEQ ID NO: 1075 - DNA, 468 bp, Streptococcus agalactiae
atgacaattattgaaggacaattagtggcaaacgaaatgaaaataggaatcgtagtctcacgtttcaatgaattgattacatctaaattattatcaggagcagtagatggactgctgagacatggtgtttcagaagaagatatagatattgtatgggtacctggtgcttttgaaatcccctatatggctagaaaaatggcattatataaagattatgatgctattatctgtcttggggtagtcattaaaggcagcactgatcattatgattatgtttgtaatgaggtgacaaaaggtattggtcatttaaatagccagtcagatatccctcatatctttggtgttctaacaacggataacatcgaacaagctattgagagggcaggaacaaaagcaggaaataaaggttatgattgtgctctttcggctattgaaatggtgaaccttgataaaaaattgcgtgagcga

SEQ ID NO: 1076 - protein, 156 aa, Streptococcus agalactiae
MTIIEGQLVANEMKIGIVVSRFNELITSKLLSGAVDGLLRHGVSEEDIDIVWVPGAFEIPYMARKMALYKDYDAIICLGVVIKGSTDHYDYVCNEVTKGIGHLNSQSDIPHIFGVLTTDNIEQAIERAGTKAGNKGYDCALSAIEMVNLDKKLRER

SEQ ID NO: 1077 - DNA, 1239 bp, Streptococcus agalactiae
ttggtcttttttatcagaaaatggctactaagagagaggagaaagctaatggcctttagtccaataaaaaaacttttacaagacatcaaatcagggaaaatggtagtgttgatggatgacgaaaatagagagaatgaaggagaccttatttgtgcggctgaaatggtgacaaaagagtcgattaattttatggctaaatttgggaaaggattaatttgcttacctctgtctaattactatgctgaaaagttagaattagctcaaatggctagccataatactgataatcatgaaacagcttttaccatatctattgatcatctatcaactagtactgggatttctgcggaagatagagctttgacagctaagatggttgctaacgacagtagcaaagctaaagactttagacgtcctgggcacttatttcccttgttagccaaggaaggaggtgttttagctagaaatggacatactgaagcaaccgttgatctatgtcgtttagctggattaaaggaatgtggactttgttgtgaaataatggctgaagatggtagtatgatgagaaaggatgagttattagcatttgctcaaaagcacgatttagctatcgctaccataaaacaattgcaagactatagacgtcaagaagagggaggggtggttagagaaattgagattcagctaccaacgcaattcggtcattttacggcttatggatatagcgaagttgtggcaaataaggaacatgttgcccttgttaaaggggatattagtagtggtgaagatgttttatgtcgtttacactcagaatgtttgacaggtgatgtctttcattccttgagatgtgattgtggggaacaactggctaatgccctccaacaaatagaggctgaaggtcgtggagtccttctttatatgagacaggaaggtcgaggaattggtttgattaataagttaaaagcttatcatttgcaagaagaaggcttagatactttagaagctaatttggctttaggttttgaaggagatgagagagactatggagttagtgctcaacttttaaaagatttaggtataaattctataaacttactaaccaataatccagataaaatccaacaacttgaagcagaaggaatttgcgtcaaaaacagagtgccattacaggtggcagtaacagcttatgaccttaattatttaaaaactaaaaaagaaaaaatgggacatcttttagat

SEQ ID NO: 1078 - protein, 413 aa, Streptococcus agalactiae
MVFFIRKWLLRERRKLMAFSPIKKLLQDIKSGKMVVLMDDENRENEGDLICAAEMVTKESINFMAKFGKGLICLPLSNYYAEKLELAQMASHNTDNHETAFTISIDHLSTSTGISAEDRALTAKMVANDSSKAKDFRRPGHLFPLLAKEGGVLARNGHTEATVDLCRLAGLKECGLCCEIMAEDGSMMRKDELLAFAQKHDLAIATIKQLQDYRRQEEGGVVREIEIQLPTQFGHFTAYGYSEVVANKEHVALVKGDISSGEDVLCRLHSECLTGDVFHSLRCDCGEQLANALQQIEAEGRGVLLYMRQEGRGIGLINKLKAYHLQEEGLDTLEANLALGFEGDERDYGVSAQLLKDLGINSINLLTNNPDKIQQLEAEGICVKNRVPLQVAVTAYDLNYLKTKKEKMGHLLD

SEQ ID NO: 1079 - DNA, 648 bp, Streptococcus agalactiae
atgtttacaggaattattgaggaaatgggtcaagtcagtcgtattcggaatggcataaagtcccaacaattaagtattgatgctcccaaactagtccctttattaagaaaaggggatagcgtagctgttaatggtgtttgtttgacggttcttgacaaaagtgaaacagcttttatagcagacgtcatgccagaaagtatgatgcgaacaagcttagctgctttacgacttcattctaaagttaacttagaattagcactcagaagtgactcaaggttaggggggcattttgttcttggacatgtggatggggttggaaaaatagaaaaaatccaaaaagatgatattgctgtcagattttcaattgatgctccacctagtattatgtcttatattatagagaaaggttcggtggctctagatgggattagcttaacagtggtatcatttacagagcattcttttgaagtttcggtcattccccacacgatggctcaaactaatctatccttaaaaaaggttggggatttattaaatatcgaagtggatgttttaggcaaatatgctgagaaatttttagcacccactaatagaactaatcacacttcatcggtaatggattggtcttttttatcagaaaatggctac

SEQ ID NO: 1080 - protein, 216 aa, Streptococcus agalactiae
MFTGIIEEMGQVSRIRNGIKSQQLSIDAPKLVPLLRKGDSVAVNGVCLTVLDKSETAFIADVMPESMMRTSLAALRLHSKVNLELALRSDSRLGGHFVLGHVDGVGKIEKIQKDDIAVRFSIDAPPSIMSYIIEKGSVALDGISLTVVSFTEHSFEVSVIPHTMAQTNLSLKKVGDLLNIEVDVLGKYAEKFLAPTNRTNHTSSVMDWSFLSENGY

SEQ ID NO: 1081 - DNA, 1107 bp, Streptococcus agalactiae
atgatgaaaaaagaagactacatggcattagccttgaaagaggctgagaaaggtatggggttcgttgctcccaacccattagtaggtgctgttattgttaaagatgatcgtataatttccaaaggttatcataaacgatttggagatttacatgcggaaagacaggctattaaaaatgctgatgaggatatctctggaagtactctgtacgtgactttagaaccatgctgtcatgttggtaagcaaccaccttgtactgaagctcttattaaatctggtatcaaaaaagtagtagttggaagtttagatccaaatcctttagtttcaggaaaagggattgccttgttgagaaaagaaggtttaaatgttgaagttggtatcttaagagaagaatgcgatgctctgaatgaaagatttatttttcacatgacctataagcagccttttgtttatttgaaatatgctatgactttagatgggaagatagctacaaagacgggcgattctaagtggatatcaaatgagcactcaagacaatctgttcagaaattgaggcaaaaatgtagtgctattatggtcggtatcaatactgtattagctgataatccacgtttaacttgccgtattcctaaaggtgaagcgcttgtgaggatcgtatgtgatagtcagttgaagatacctttagactcttacctagttaagagcgctaaaacaataccaacatggattgcaacatgttcagataatcttgctcagcaacaaacattaaaagaaatgggttgccgtttgattaaggtcccaagaaaagatggaaagctggatttgaaagtattaatgactattttaggacaagaagggattgatagccttcttattgaaggaggaagtagtttacatttttcagctttaaaagctggtattgttaacagactaattgtttttattgcacccaaaataataggaggtctgaaagcaaaaacagctatttctggagaaggtttggattggcttaaccaagctttcagagtaaaagatattgaacttagtcgtatggattctgacgttgttattgaaggaaaggtagaacattatgtttacaggaattat

SEQ ID NO: 1082 - protein, 369 aa, Streptococcus agalactiae
MMKKEDYMALALKEAEKGMGFVAPNPLVGAVIVKDDRIISKGYHKRFGDLHAERQAIKNADEDISGSTLYVTLEPCCHVGKQPPCTEALIKSGIKKVVVGSLDPNPLVSGKGIALLRKEGLNVEVGILREECDALNERFIFHMTYKQPFVYLKYAMTLDGKIATKTGDSKWISNEHSRQSVQKLRQKCSAIMVGINTVLADNPRLTCRIPKGEALVRIVCDSQLKIPLDSYLVKSAKTIPTWIATCSDNLAQQQTLKEMGCRLIKVPRKDGKLDLKVLMTILGQEGIDSLLIEGGSSLHFSALKAGIVNRLIVFIAPKIIGGLKAKTAISGEGLDWLNQAFRVKDIELSRMDSDVVIEGKVEHYVYRNY

SEQ ID NO: 1083 - DNA, 537 bp, Streptococcus pyogenes
ttggaacttggggagtctttcttgatgccatatagtttagaagagcaaacttatttcatgcaagaggctttaaaagaagccgaaaaatccttacagaaagctgaaatccccattggctgtgtcattgtcaaggatggtgagattattggtcgtgggcacaatgcgcgtgaagagagtaaccaagccattatgcacgctgaaatgatggctattaacgaggctaacgctcatgaaggcaactggcgtttattagataccacactctttgtgaccatcgagccttgtgtgatgtgtagtggtgccattgggctagcaaggattccgcatgttatttatggagccagcaatcaaaaatttggtggagtagacagcctttaccagattttgacagatgagcgcttaaaccatcgcgtgcaagttgaacgaggcctgctagcagcagactgtgctaacatcatgcaaacctttttccgccaagggcgagagcgcaaaaaaatagctaagcatttgatcaaggaacagtcagatccctttgac

SEQ ID NO: 1084 - protein, 179 aa, Streptococcus pyogenes
LELGESFLMPYSLEEQTYFMQEALKEAEKSLQKAEIPIGCVIVKDGEIIGRGHNAREESNQAIMHAEMMAINEANAHEGNWRLLDTTLFVTIEPCVMCSGAIGLARIPHVIYGASNQKFGGVDSLYQILTDERLNHRVQVERGLLAADCANIMQTFFRQGRERKKIAKHLIKEQSDPFD

SEQ ID NO: 1085 - DNA, 1338 bp, Streptococcus agalactiae
atgaatcaaaatcattccgtcaaaagatccttatccgaagttaatcagagcgttgaggttcctcacaatagctctttttggaacactttaagagcttttcttggacctggagctttggttgcagttggttatatggatccaggtaactggattactagcgttattggtggagctacctatcgttacttactattgtttgttgttttagtatcttctttgatggcgatgcaattacaacaaatggctggcaagcttggcattgttacacgacaggacttagcacaagcaacagcttctcgactcccaaaaccgcttcgttacctgctatttattatcattgagttagcccttatcgctactgatttagcagaagtcattggctctgccattgctcttcacttattatttggctggcccctgttactgtctatcatgattactattttggatgtattcttacttttactcttaatgaagttaggcgtccaaaaaattgaagcctttgtttctgttctcatattgacaattttgataatctttacatatttagttgttttatcacaacctgatttagatgctatgttcaaaggatttttaccacaccatgagctttttaacatatcacatgaagggaaaaatagtcctttaaccctcgctcttggcattatcggcgcaacagtcatgccacataatctttatttacattcttctttatctcagactagacgcgtggattatcataataaatcttcaataaaaaaagctgtacgtttcatgaccttagattctaacattcagctatcacttgcatttgtcgtgaattcgctactattagtcttaggagctagtctattttatgggcatgctaatgatatcagtgccttttctcaaatgtatcttgccctatctgataaaactattactggtgcagtagccagttctttcctttctaccctttttgcagttgccctactagcaagtggtcaaaattcaacgattacaggtactttaacaggacaaatcgttatggaaggtttccttcacttcaaattacctcaatggttaataaggctttgtactagattattaactcttcttccaatttttgttatcgccctactagttggaggcgaagaaaatacgttagatcaactaatcgtctattcacaagtttttctttccttagctttaccattttcaatctttccattgatttatttcacgtcgcaaaaatcaattatgggagagcatgctaatgctaaatggaatacctatttagcataccttgtcgccatcattttaacattactcaatttgaaattaatcatggatttactt

SEQ ID NO: 1086 - protein, 446 aa, Streptococcus agalactiae
MNQNHSVKRSLSEVNQSVEVPHNSSFWNTLRAFLGPGALVAVGYMDPGNWITSVIGGATYRYLLLFVVLVSSLMAMQLQQMAGKLGIVTRQDLAQATASRLPKPLRYLLFIIIELALIATDLAEVIGSAIALHLLFGWPLLLSIMITILDVFLLLLLMKLGVQKIEAFVSVLILTILIIFTYLVVLSQPDLDAMFKGFLPHHELFNISHEGKNSPLTLALGIIGATVMPHNLYLHSSLSQTRRVDYHNKSSIKKAVRFMTLDSNIQLSLAFVVNSLLLVLGASLFYGHANDISAFSQMYLALSDKTITGAVASSFLSTLFAVALLASGQNSTITGTLTGQIVMEGFLHFKLPQWLIRLCTRLLTLLPIFVIALLVGGEENTLDQLIVYSQVFLSLALPFSIFPLIYFTSQKSIMGEHANAKWNTYLAYLVAIILTLLNLKLIMDLL

SEQ ID NO: 1087 - DNA, 795 bp, Streptococcus agalactiae
atgattagacattcatttaaaagtaaggtgttattgttagtctttatcttaacaataatagtgaattatttatccgcaacaggttttttaacagggaacagtcagaagagtctgtctgatcgttatcaaacgctcttgacaccagcaccattagccttttcaatttggtcagtcatctatttattgacctttttagtaatattaagagctatattcagtaagagtcaatcttaccaagataactttgctagcatttttccatactttttgggtcttctattagttaataatatatggactgtattttttacgagtaatttgattggcctatcaacaataataatttttgcttactgtattcttctggttatcattatcaagatactaagtaaaaataaatcaaaattactgcttagaataacatttggaattcatgcaggatggttgctagttgcgtcattggtcaatttagcggtctacttagttaaaattgattttaattacccattaccaaaggtatatatagctatcattgccttgatttttataactgttttaagtctttacctagctagagtattacaaaatgcttacttaatcttatccgttttttgggcttggttgatggtttttaaagcacatttagaaggaaattttcaacacctatattttagtatccaaattttatctttgattgcagcaattatccttggcgtatcgtttttcatcatcggttattataatgtcaaggagaggtacaagcaaaaaaatactagcccttactcacgggttctt

SEQ ID NO: 1088 - protein, 265 aa, Streptococcus agalactiae
MIRHSFKSKVLLLVFILTIIVNYLSATGFLTGNSQKSLSDRYQTLLTPAPLAFSIWSVIYLLTFLVILRAIFSKSQSYQDNFASIFPYFLGLLLVNNIWTVFFTSNLIGLSTIIIFAYCILLVIIIKILSKNKSKLLLRITFGIHAGWLLVASLVNLAVYLVKIDFNYPLPKVYIAIIALIFITVLSLYLARVLQNAYLILSVFWAWLMVFKAHLEGNFQHLYFSIQILSLIAAIILGVSFFIIGYYNVKERYKQKNTSPYSRVL

SEQ ID NO: 1089 - DNA, 210 bp, Streptococcus agalactiae
atgtcagaatttacatttgaaattgttgagaagttattggtcctatctgaaaatgaaaaaggttggacaaaagagttgaatcgtgtgagcttcaacggagcgccagctaaatttgatttgcgtacatggagtccagatcatacaaaaatgggtaaaggtatcactttatctaatgaagaatttaaagtcattttagatgcttttcgtaaa

SEQ ID NO: 1090 - protein, 70 aa, Streptococcus agalactiae
MSEFTFEIVEKLLVLSENEKGWTKELNRVSFNGAPAKFDLRTWSPDHTKMGKGITLSNEEFKVILDAFRK

SEQ ID NO: 1091 - DNA, 210 bp, Streptococcus pyogenes
atggcagaatttacattcaacattgaggaacatttactcaccttatcagaaaatgataaaggttggacgaaagaattgaaccgcgtcagctttaatggcgcagaagcgaaatgggatatccgcacgtggagtccagaccatacgaaaatggggaaaggcattactcttactaatgaagaatttaaaaccatcttagacgcttttcgtaag

SEQ ID NO: 1092 - protein, 70 aa, Streptococcus pyogenes
MAEFTFNIEEHLLTLSENDKGWTKELNRVSFNGAEAKWDIRTWSPDHTKMGKGITLTNEEFKTILDAFRK

SEQ ID NO: 1093 - DNA, 1284 bp, Streptococcus agalactiae
atgtctaatgtaaaaaaacgccctgaggttttatcacctgcaggaacactagaaaaattaaaagttgctattgattatggagcagatgctgtatttgttggaggtcaagcgtatggtcttcgaagtagagctggtaacttttctatggaagagttacaagagggaataaactatgctcatgcaagagatgctaaagtttatgtagcggctaatatggttactcatgaaggtaatgagcttggggcaggtccgtggtttcgtgaattacgtgatatgggactagatgcagtcattgtttcagatcctgctcttattgttatttgtgctacagaagcaccaggcttagaaattcatttgtcaactcaagcctcttccacgaactatgaaacttttgaattttggaaagagatggggcttactcgtgtcgtattagcacgtgaggttactatggcagagttggctgaaatcaggaagaggacagatgttgagatagaagcatttgttcatggcgcgatgtgtatttcatactcaggacgatgtgttctatcaaaccatatgagccatcgtgatgctaatcgtggcggttgctctcagtcatgtcgttggaaatatgacctctacgatatgccatttggacaagaacgtcaatcgttaaaaggcgagattccagaacctttctcaatgtcagctgtggatatgtgtatgattgagcatattccagatatgattgaaaatggtgtagatagtttaaaaatagaaggacgtatgaaatccattcattatgtttctacagtaactaattgctataaagctgctgtagatgcctatatggaaagtccagaagcttttgaagctattaaagaagacttgattgatgaactttggaaggttgcacaacgcgaattagcaacaggtttctactaccatacaccaactgaaaatgaacaactctttggagctcgtcgtaaaattcctcaatacaaatttgttggggaagtggtttcatttgacaatgctaaaatggaggctacaattcgtcagcgtaatgttattatggaaggagatcgcgtagaattctatggtcctggcttccgtcactttgaatgttttattgatggtctgcgtgatgctgaaggaaataaaatagaccgtgctccaaatccgatggaattattaaccataacattaccaaatccagtaaaaaaaggggatatgattcgtgcttgtaaagaaggattagtgaacctttatcaaaatgatggtactagcaagactgtaagagct

SEQ ID NO: 1094 - protein, 428 aa, Streptococcus agalactiae
MSNVKKRPEVLSPAGTLEKLKVAIDYGADAVFVGGQAYGLRSRAGNFSMEELQEGINYAHARDAKVYVAANMVTHEGNELGAGPWFRELRDMGLDAVIVSDPALIVICATEAPGLEIHLSTQASSTNYETFEFWKEMGLTRVVLAREVTMAELAEIRKRTDVEIEAFVHGAMCISYSGRCVLSNHMSHRDANRGGCSQSCRWKYDLYDMPFGQERQSLKGEIPEPFSMSAVDMCMIEHIPDMIENGVDSLKIEGRMKSIHYVSTVTNCYKAAVDAYMESPEAFEAIKEDLIDELWKVAQRELATGFYYHTPTENEQLFGARRKIPQYKFVGEVVSFDNAKMEATIRQRNVIMEGDRVEFYGPGFRHFECFIDGLRDAEGNKIDRAPNPMELLTITLPNPVKKGDMIRACKEGLVNLYQNDGTSKTVRA

SEQ ID NO: 1095 - DNA, 1284 bp, Streptococcus pyogenes
atgtcacatatgaaaaaacgtcccgaggtcttatcacctgctggaacacttgaaaaattaaaagttgcgattgactatggcgcagatgctgtttttgttggagggcaggcctatggcctaagaagccgcgctggtaacttctctatggaagaattgcaagaaggcattgattatgcacatgcgcgtggagctaaggtctatgttgctgctaacatggttacccacgaagggaacgaaattggtgcgggcgagtggtttcgtcaactgcgtgatatggggcttgatgcggtcattgtttcagatccagccttgattgttatttgttcaacagaagccccaggtttggaaattcatttgtcaacgcaagcttcatctaccaattacgagacctttgaattttggaaagccatgggcttgacccgagttgttttagctcgcgaggttaatatggccgagttagcagaaatccgcaagcggacagatgtggaaattgaagcctttgtccatggagccatgtgtatctcttattcaggccgctgtgttttgtcaaaccacatgagtcaccgtgatgccaacaggggcggctgctcacagtcttgccgctggaagtatgatttgtatgacatgccatttggaggagagcgccgctccttaaaaggggaaattccagaagactattctatgtcctctgttgacatgtgtatgattgaccatattcctgacctgattgaaaatggggttgatagcttaaaaattgaaggccgaatgaaatctatccactacgtctcaaccgtaaccaactgttacaaggcggctgtaggtgcttacatggaaagcccagaagctttttatgctatcaaagaggaattgattgacgagttgtggaaggttgcccagcgcgagttggctacaggtttttactatggtatcccaactgaaaatgaacaattatttggtgctcgccgcaaaattccacaatataaatttgtcggagaagtagttgcctttgactcagctagcatgacagcgaccattcgtcagcgtaatgtcatcatggaaggcgatcggattgaatgttatggaccaggtttccgtcattttgaaacggttgttaaggacttacatgatgcggatggccaaaagattgaccgtgccccaaatccaatggaactcttaaccatctctttaccgagagaagttaagccaggggatatgattagggcttgcaaggaaggtctggttaacctctatcaaaaagatggcaccagtaaaactgttagaaca

SEQ ID NO: 1096 - protein, 428 aa, Streptococcus pyogenes
MSHMKKRPEVLSPAGTLEKLKVAIDYGADAVFVGGQAYGLRSRAGNFSMEELQEGIDYAHARGAKVYVAANMVTHEGNEIGAGEWFRQLRDMGLDAVIVSDPALIVICSTEAPGLEIHLSTQASSTNYETFEFWKAMGLTRVVLAREVNMAELAEIRKRTDVEIEAFVHGAMCISYSGRCVLSNHMSHRDANRGGCSQSCRWKYDLYDMPFGGERRSLKGEIPEDYSMSSVDMCMIDHIPDLIENGVDSLKIEGRMKSIHYVSTVTNCYKAAVGAYMESPEAFYAIKEELIDELWKVAQRELATGFYYGIPTENEQLFGARRKIPQYKFVGEVVAFDSASMTATIRQRNVIMEGDRIECYGPGFRHFETVVKDLHDADGQKIDRAPNPMELLTISLPREVKPGDMIRACKEGLVNLYQKDGTSKTVRT

SEQ ID NO: 1097 - DNA, 924 bp, Streptococcus agalactiae
atggaaaaaataattttgacagcgacagctgaatctattgaacaagtaaagcaattgctagcaataggaattgaccgcatctatgtaggggaagaaaattacggtcttcgtttaccacattcattttcagacgatgaattgcgtgaaatcgctaaattagtacatgatgctggtaaagaattgacagtagcttgtaatgcactcatgcatcaagagatgatggataatatcaaaccatttttggagttgatgaaagaaattaatgtggattatttggtagttggtgatgcaggagtattttatatcaacaagcgtgatggttataacttcaaacttatctacgacacttctgtcttcgttacatcaagtcgtcaagttaatttttggggacaacatggagcagtagaaacggttttagcacgtgaaataccttctgaagaactttttaagatgtctgagaatcttgaatttcctgctgagattttagtttatggggcttctgtaattcatcactctaagcgtccgttattgcaaaactattataattttactcatatcactgatgaaaaaacacgtgagcgtggtctttttttagcagaaccaggtgatccagaaagtcactattctatttacgaagataagcatgggactcatatttttattaacaatgatatcaatatgatgactaaagtgactgaactagttgaacatcactttactcactggaaattagatggtatttattgtccaggagataattttgttgctattgctgaaatttttgtcgaaacagctcgtttgattgaaaatggaacattcactcaggatcaggctttcttgtttgatgaacgaattagaaaactgcaccctaaaggacgtggtttagatactggattttatgattttgacccatcaacagtaaaa

SEQ ID NO: 1098 - protein, 308 aa, Streptococcus agalactiae
MEKIILTATAESIEQVKQLLAIGIDRIYVGEENYGLRLPHSFSDDELREIAKLVHDAGKELTVACNALMHQEMMDNIKPFLELMKEINVDYLVVGDAGVFYINKRDGYNFKLIYDTSVFVTSSRQVNFWGQHGAVETVLAREIPSEELFKMSENLEFPAEILVYGASVIHHSKRPLLQNYYNFTHITDEKTRERGLFLAEPGDPESHYSIYEDKHGTHIFINNDINMMTKVTELVEHHFTHWKLDGIYCPGDNFVAIAEIFVETARLIENGTFTQDQAFLFDERIRKLHPKGRGLDTGFYDFDPSTVK

SEQ ID NO: 1099 - DNA, 924 bp, Streptococcus pyogenes
atggaaaaaataattattacagccacagctgaaagcattgagcaagtcaaagctttattagctgctggtgttgatcgtatttatgttggtgaagccaattacgggttacgtcttccccataatttttcttatgatgaattgagacaaattgccaaactagtgcatgatgcaggcaaagagttgacagtagcttgcaatgctttgatgcatcaagatatgatggatcagatcaaaccctttttagacttaatgatagagattgctgttgattatcttgtggttggtgatgcaggtgtgttttatgtcaataaaagggatggctataactttaaactgatttatgatacctctgtttttgtgacttctagccgtcaggtaaatttctgggggcaacatggtgctgttgaaagtgttttagcaagggaaatcccatcagcagagttattcaccttagctgaaaatttggaatttccagcagaggtgctagtttacggcgcctcggtgattcatcactcgaaacgtcccttgctagaaaattattaccattttacaaagattgatgatgaggttagtcgtgaacgaggacttttcttggcagaaccaggagatgctagcagccattactccatttatgaagacaatcatggcactcatattttcattaataacgatatcgacatgatgtctaaattgggtgagctgtatgcgcatggcttaactcattggaagctagatggcatttactgtccaggtgatgattttgtcgctattactaaattgtttattcaggctaaaaccttattagaagctgggcaatttacccaagaagaagctgaaaagcttgatcaagcagtgcatgcccatcatccagctggccgtggattagatactggcttttatgagttcgatccaaaaaccgttaaa

SEQ ID NO: 1100 - protein, 308 aa, Streptococcus pyogenes
MEKIIITATAESIEQVKALLAAGVDRIYVGEANYGLRLPHNFSYDELRQIAKLVHDAGKELTVACNALMHQDMMDQIKPFLDLMIEIAVDYLVVGDAGVFYVNKRDGYNFKLIYDTSVFVTSSRQVNFWGQHGAVESVLAREIPSAELFTLAENLEFPAEVLVYGASVIHHSKRPLLENYYHFTKIDDEVSRERGLFLAEPGDASSHYSIYEDNHGTHIFINNDIDMMSKLGELYAHGLTHWKLDGIYCPGDDFVAITKLFIQAKTLLEAGQFTQEEAEKLDQAVHAHHPAGRGLDTGFYEFDPKTVK

SEQ ID NO: 1101 - DNA, 429 bp, Streptococcus agalactiae
atgagtaaattatttaaaactttagttatcagtgctgcatcaggtgcagcagcagcttattttttaacaacaaaaaaaggaaaagagctaaggaaaaatgcagaaaaattctatggagaatataaagaaaatccagaagaatatcatcaaatagctaaagataaagcaagtgaatattcaaatttagctgttgatacttttaaagattataaaggtaaatttgaatcaggtgaattgacaacagaggatatcgtctcagccgttaaggaaaaaagcggagaagtagttgactttgctaatgattttgtcaatcaagctaaatcaaaattctcagacgaggatactgctaaaaaagaagataaggctcctgaaacaaaagtagaagatattgtcattgattataaagaaaacacagaagataaagaaaaa

SEQ ID NO: 1102 - protein, 143 aa, Streptococcus agalactiae
MSKLFKTLVISAASGAAAAYFLTTKKGKELRKNAEKFYGEYKENPEEYHQIAKDKASEYSNLAVDTFKDYKGKFESGELTTEDIVSAVKEKSGEVVDFANDFVNQAKSKFSDEDTAKKEDKAPETKVEDIVIDYKENTEDKEK

SEQ ID NO: 1103 - DNA, 447 bp, Streptococcus pyogenes
ttggaaaaaaaggagaaaagcatgaataaaagtttcaaaaacttagtgattggagctgtttcaggagtagcggcagcttacttcttatcaacagaaaaaggcaaggctttgaaaaatcgtgctgaaaaagcttatcaagcctacaaagaaagtccagatgattaccaccaatttgctaaagaaaaaggtagtgaatacagccatttagcacgtgacactttctatgatgtgaaagataagttggcttctggtgacttaactaaagaggacatgttagacttgctcaaagataaaacaacagctttcgtgcaaaaaacaaaagaaacccttgccgaagttgaagcgaaagaaaagcaagatgatgttatcattgatttaaatgaagaagacatcatcattgactatactgaacaagatgagcctgttagtgatacactagataaacac

SEQ ID NO: 1104 - protein, 149 aa, Streptococcus pyogenes
LEKKEKSMNKSFKNLVIGAVSGVAAAYFLSTEKGKALKNRAEKAYQAYKESPDDYHQFAKEKGSEYSHLARDTFYDVKDKLASGDLTKEDMLDLLKDKTTAFVQKTKETLAEVEAKEKQDDVIIDLNEEDIIIDYTEQDEPVSDTLDKH

SEQ ID NO: 1105 - DNA, 396 bp, Streptococcus agalactiae
atgatagaaattgctgtattaattattgccattgcgtttgttgttttagttttaggaatacttttcgttctgaaaaaagtatcagaaacgattgaggaaaccaagcaaactattaaagtattaacaagcgatgttaacgtgactctttaccaaactaatgaaattttagccaaagctaatgttttagttgatgatgttaatggtaaagtatctactattgatcctctttttgtagctattgctgacttatcagaatctgtatctgatttaaacctacaggcaagacatattggacaaaaggcaagtagtgcaacctcaagtgttactaaggcaggttcagctttagctattggaaaagcggcttcaaaaatttttcgtaaaaaaggagacaaaaaa

SEQ ID NO: 1106 - protein, 132 aa, Streptococcus agalactiae
MIEIAVLIIAIAFVVLVLGILFVLKKVSETIEETKQTIKVLTSDVNVTLYQTNEILAKANVLVDDVNGKVSTIDPLFVAIADLSESVSDLNLQARHIGQKASSATSSVTKAGSALAIGKAASKIFRKKGDKK

SEQ ID NO: 1107 - DNA, 405 bp, Streptococcus pyogenes
atggacttagttggaatctcactgatgattattgcactcgcatttgttgctttggtgattttcttgattattgtattaaagaaagtctcagaaacaattgatgaagccaaaaaaacgatttctgtattgacaagtgatgttaatgtgacacttcatcaaactaatgatattttagcaaaagctaatatccttgttgaagatgttaatggtaaagtagcaaccatcgatccactgtttgttgctattgctgatttgtcagaaagtctttcagatttaaatagtcaagcaaggcattttgggcaaaaagcaactaatgctacaggtaatgtttcaaaagctggaaaattagcattagttggtaaagtagcctcaaaagtatttggaaaaaaaggagaaaagcatgaa

SEQ ID NO: 1108 - protein, 135 aa, Streptococcus pyogenes
MDLVGISLMIIALAFVALVIFLIIVLKKVSETIDEAKKTISVLTSDVNVTLHQTNDILAKANILVEDVNGKVATIDPLFVAIADLSESLSDLNSQARHFGQKATNATGNVSKAGKLALVGKVASKVFGKKGEKHE

SEQ ID NO: 1109 - DNA, 114 bp, Streptococcus agalactiae
atggcttgggcaatcatcactcctggagcagcaatatccagaaaatcaatgggattaatcaagcgacgatatgaaaaaatcacaaggagaatggccccggtaattaaccctccg

SEQ ID NO: 1110 - protein, 38 aa, Streptococcus agalactiae
MAWAIITPGAAISRKSMGLIKRRYEKITRRMAPVINPP

SEQ ID NO: 1111 - DNA, 774 bp, Streptococcus agalactiae
atgatgattaatccagtagcaatacgattaggccccttttctattcgctggtatgctatttgcatagtgtctggtatgttgttagcagtttacttagcaatgaaagaggcccctcgtaagaacattaagtcggatgatattctagatttcattctcatggcttttccactatccattgttggagctcgtatttattatgttatcttcgaatgggcttattactctaagcacccagtagagattatcgccatctggaatggcggtattgctatttacggagggttaattaccggggccattctccttgtgattttttcatatcgtcgcttgattaatcccattgattttctggatattgctgctccaggagtgatgattgcccaagccataggtaggtgggggaattttattaatcaagaagcatacggtagggcagtaaaaaatctgaattacgtaccaaactttataaaaaatcaaatgtatattgatggagcttaccgagtacctacatttttatatgagtctctttggaacttcctaggttttgtcatcatcatgtctattcgtcatcgaccgcgcactttaaaacaaggtgaagtggcatgtttttatttagtttggtatggatgtggacggttcattattgaagggatgaggacagatagcctttatttggcgggtttgcgcgtgtcacaatggttatcagttattttagttattatcggaattgtcatgattatttatcgtcgtcgtgaacaacatatttcatattat

SEQ ID NO: 1112 - protein, 258 aa, Streptococcus agalactiae
MMINPVAIRLGPFSIRWYAICIVSGMLLAVYLAMKEAPRKNIKSDDILDFILMAFPLSIVGARIYYVIFEWAYYSKHPVEIIAIWNGGIAIYGGLITGAILLVIFSYRRLINPIDFLDIAAPGVMIAQAIGRWGNFINQEAYGRAVKNLNYVPNFIKNQMYIDGAYRVPTFLYESLWNFLGFVIIMSIRHRPRTLKQGEVACFYLVWYGCGRFIIEGMRTDSLYLAGLRVSQWLSVILVIIGIVMIIYRRREQHISYY

SEQ ID NO: 1113 - DNA, 777 bp, Streptococcus pyogenes
atgatcaatcccattgccttaaaatgtggtccactagccatccactggtatgctctatgtatcttgtcaggacttgttttggcggtttacttagcatcaaaagaagcacccaaaaaaggaatatcatctgatgctattttcgattttattctgattgcttttccacttgctattgttggtgcaagaatttactatgttatttttgaatggtcttattatgtcaagcatttagatgaaatcatagccatttggaatggcggtattgctatttatggcggtctcattacaggagctcttgtacttttggcttactgttataacaaggtgctcaatcccattcattttttagatattgccgcaccaagtgtcatggtcgctcaagctatcggtcgctggggaaattttatcaaccaagaagcctatggtaaagctgtgagccagttaaattacttaccaagctttattcaaaagcaaatgtttatagagggaagttaccgcattccgacctttctctatgaatcactttggaatcttttgggctttgtcattattatgatgtggcgtcgtaagccaaaaagtctattagatggagaaatctttgcattttacttaatttggtatggtagtggaagactagtcattgaaggtatgcgaacagatagtcttatgtttttaggtattcgcatctcccaatatgtgtctgccttattaattattattggcttaatctttgttataaaaagacgtcgtcaaaaaggaatttcttattatcaagaa

SEQ ID NO: 1114 - protein, 259 aa, Streptococcus pyogenes
MINPIALKCGPLAIHWYALCILSGLVLAVYLASKEAPKKGISSDAIFDFILIAFPLAIVGARIYYVIFEWSYYVKHLDEIIAIWNGGIAIYGGLITGALVLLAYCYNKVLNPIHFLDIAAPSVMVAQAIGRWGNFINQEAYGKAVSQLNYLPSFIQKQMFIEGSYRIPTFLYESLWNLLGFVIIMMWRRKPKSLLDGEIFAFYLIWYGSGRLVIEGMRTDSLMFLGIRISQYVSALLIIIGLIFVIKRRRQKGISYYQE

SEQ ID NO: 1115 - DNA, 933 bp, Streptococcus agalactiae
atggcagttactgttcaaatgttagttgaccgcttaaagttaaatgtcatctatggtgatgaacatctattatctaagcggattacaacagctgacatttcacgtcctggtctagaaatgacagggtattttgattattatgcaccagagcgtttgcaacttgttggtatgaaagagtggtcatatttaatggctatgacaggacataatcgttatcaagtgttacgtgaaatgttccaaaaagaaacaccagctattgttgtagcacgtgatttagaaattccagaagagatgtatgaggcggctaaagataccggtattgctattcttcaaagtaaggcccctacaagtcgtttatcaggtgaagtttcttggtatttagattcttgcttagctgagaggacaagtgttcatggtgtcttgatggatatctatggtatgggtgttctgattcaaggtgattccggtattggtaagagtgagacaggactagagctagttaagcgaggacatcgtttggtagcagatgatcgtgttgatgtttatgctaaagacgaagagacgctttggggagagcctgctgagatattacgtcatttacttgaaattagaggtgtgggaatcattgatattatgagcctatatggagctagtgcggttaaagattcatcgcaagtgcaattagctatataccttgaaaactttgaaactggaaaagtttttgatagactcgggaatggcaatgaagagatcgaattatctggagttaaggttcctcggatacgtattcctgttaaaacaggccgaaacgtgtcagtagttattgaagcagcggctatgaatcacagagctaaacaaatggggtttgatgctacccagacttttgaggatcgtttaacacatttgattagtcagaacgaggtcaatgatgat

SEQ ID NO: 1116 - protein, 311 aa, Streptococcus agalactiae
MAVTVQMLVDRLKLNVIYGDEHLLSKRITTADISRPGLEMTGYFDYYAPERLQLVGMKEWSYLMAMTGHNRYQVLREMFQKETPAIVVARDLEIPEEMYEAAKDTGIAILQSKAPTSRLSGEVSWYLDSCLAERTSVHGVLMDIYGMGVLIQGDSGIGKSETGLELVKRGHRLVADDRVDVYAKDEETLWGEPAEILRHLLEIRGVGIIDIMSLYGASAVKDSSQVQLAIYLENFETGKVFDRLGNGNEEIELSGVKVPRIRIPVKTGRNVSVVIEAAAMNHRAKQMGFDATQTFEDRLTHLISQNEVNDD

SEQ ID NO: 1117 - DNA, 1023 bp, Streptococcus pyogenes
ttggtgtcgttgttctcatttagtagtgaaaaaatgagtatttgcaagggtctaacggtcgatttgtgttataatattgaaaaaggagaaattatgaccgttactgtaaagatgctagtgcaaaaagttaaacttgatgtggtttatgctacagataacttgctgtcaaaagagataacaacatcagatatttcacgtccaggtcttgaaatgactggttattttgattattatgctccagaaaggttgcagctatttggaatgaaagagtggtcttatcttacacagatgacttctcacaaccgttattctgttttaaaagagatgttcaaaaaggacactcctgcagtggttgtctctagaaatttagccattccaaaagaaatggttcaagctgcaaaagaagaaggtatttcacttttaagtagccgtgtttcaactagccgcttagctggagaaatgtcttattttcttgacgcttctttagctgaacgtactagtgttcacggcgttttaatggatatttatggtatgggggttcttatccaaggggattctggaattggtaaaagtgagactggtttagaattagttaagcgagggcatcgtttggttgcagatgaccgtgtggatgtctatgccaaagatgaagaaaccctttggggagagccagcagagatcttgcgccacttgcttgaaattcgtggggtaggtattattgatgtgatgtcgctttatggagctagtgctgtgaaggactcatcacaagttcaattggccatttaccttgaaaactttgaggctggtaaagtttttgatcgtctcggaaacggaaatgaggagataactttctcaggagtgagaatccctcgtattcgtattccggtaaaaacaggtcgaaatgtttcagtggttattgaagccgctgcgatgaatcatcgggctaaagaaatgggctttgatgctacaaaaacttttgaagatcgtttaactcaactaatcaccaaaaatgaggtgagtcaa

SEQ ID NO: 1118 - protein, 341 aa, Streptococcus pyogenes
LVSLFSFSSEKMSICKGLTVDLCYNIEKGEIMTVTVKMLVQKVKLDVVYATDNLLSKEITTSDISRPGLEMTGYFDYYAPERLQLFGMKEWSYLTQMTSHNRYSVLKEMFKKDTPAVVVSRNLAIPKEMVQAAKEEGISLLSSRVSTSRLAGEMSYFLDASLAERTSVHGVLMDIYGMGVLIQGDSGIGKSETGLELVKRGHRLVADDRVDVYAKDEETLWGEPAEILRHLLEIRGVGIIDVMSLYGASAVKDSSQVQLAIYLENFEAGKVFDRLGNGNEEITFSGVRIPRIRIPVKTGRNVSVVIEAAAMNHRAKEMGFDATKTFEDRLTQLITKNEVSQ

SEQ ID NO: 1119 - DNA, 183 bp, Streptococcus agalactiae
ttgaaacaagaagacaaggtcccagaagacgtaaagatgctgaacctgttgatgatgacggttggttctggtaattcatataaaggagatttgctagatgaatctccttttttcttagctttatttagaccactttttcaaaatatcttctttttttcagaaaaacgcgttagcgcttacttt

SEQ ID NO: 1120 - protein, 61 aa, Streptococcus agalactiae
MKQEDKVPEDVKMLNLLMMTVGSGNSYKGDLLDESPFFLALFRPLFQNIFFFSEKRVSAYF

SEQ ID NO: 1121 - DNA, 261 bp, Streptococcus agalactiae
atgaaatcaagcttctacaaacaacgaaaaggtaagttggtctgcggtgttgtcgccggtctagctgataagtataactgggatttagctctttcacgggtgttgattgcactgattttgtattttaccaaatttggtcttttgctatatattttattagctgttttcttaccctataaagaagatattattgaaacaagaagacaaggtcccagaagacgtaaagatgctgaacctgttgatgatgacggttggttctgg

SEQ ID NO: 1122 - protein, 87 aa, Streptococcus agalactiae
MKSSFYKQRKGKLVCGVVAGLADKYNWDLALSRVLIALILYFTKFGLLLYILLAVFLPYKEDIIETRRQGPRRRKDAEPVDDDGWFW

SEQ ID NO: 1123 - DNA, 270 bp, Streptococcus pyogenes
gtggaaactaaattctataaacagcgaaaaaatcgcttggttgcaggtgttattgctggtttagcagataagtatggttgggatcttgctctagcgcgtgtcttagcggctcttcttatttacggaactggttttggagttttgctttatattttgttggccatcttcttaccttacaaggaagacttgcttgaagaacgttatggccgaggtcctcgtcgtcgtaaagacgctgatgtcttaaatgaagaagaagatggttggttctgg

SEQ ID NO: 1124 - protein, 90 aa, Streptococcus pyogenes
VETKFYKQRKNRLVAGVIAGLADKYGWDLALARVLAALLIYGTGFGVLLYILLAIFLPYKEDLLEERYGRGPRRRKDADVLNEEEDGWFW

SEQ ID NO: 1125 - DNA, 2241 bp, Streptococcus agalactiae
ttgttagattataaaaacgctatcttgaaatcgctttttaaaactcttcgtaagtcaaaaatatgctataataaaagcgttatggaaaatttaaatattacacaaattgctattgatttaggtattaaagcgtcacaaatcgaaaaggttttagaattaacagatgaaggaaatactattccttttattgcccgttatcgtaaagaaatgacaggtaatttggatgaagttcaaatcaaatcaattattgaccttgataagagtatgacagctctttcagatcgtaaaactacggtcttagccaaaattgaagaacaaggaaagttgactcaagaactcaaaaaggctattgaagaagcaactaaactagcagatgttgaggaactctacctaccttataaagaaaaacgtcgtacgaaagctacgattgcacgtgaagcaggtctttttcctttagcacgtcttattttacaaaataaggataaccttgaggaagaagctcaaaactatcttacagatggttttgagacaactacgaaggcactttctggagcagtagatattcttatcgaagctttttctgaggataataaattacgttcatggacatataatgagatctggaactacagctcaatcactgcagttgttaaagatgagtcacttgatgaaaaacaggtcttcaaaatctactatgacttttctgaaaaaataagtaaactccatggctatcaagttttagcattgaatcgtggtgagaaaatgggtgttcttaaggttaattttgagcataaccttgaaaaaatgtttcgcttttttgctgttcgatttaaagaaactagccaatatatagatgaccttattgtacagactgtcaagaaaaaaatcgttccagctatggaacgccgtatccgtacagaactaagtgaaggagcagaagatggtgcaatttcactgttttcagagaatcttcgtaacttattgttagtctcaccgcttaaggggaaaatggtgttaggttttgaccctgcctttcgtacaggagcaaaattagcagtagtagaccaaactggaaaattaatgacaacacaagtgatttatccagttcctccagctaatcaagcaaaaatcgaacaatcaaaaatagagttagcaaaacttatcaaagaattcaatatagaaattattgctatagggaatggaacagcgagtcgtgaatcagaagcatttgttgcagaagttttacaagattttccagacgtatcctatgtgattgttaacgaaagtggtgcctctgtttattcagcctcagaattggcacgtcatgaatttccagacttaacggttgaaaaacgttcggccatctcaattgcaagacgtctgcaagacccattagcagaactagtcaaaattgatccaaaatctattggtgtgggtcaatatcaacatgatgttagccaaaaaaaattagcagaaaatcttgattttgttgttgaaactgtagttaaccaagtaggtgttaatgttaatacagcaagtccagccttgttagctcatgtttcaggtttaaataaaacaatatctgaaaatattgttaaatatcgtgaagagaatgggcaaattaagtcacgtgctgaaattaagaaagtgcccagattaggagcaaaagcttttgagcaagctgctggattcttacgtattcctaatgctaaaaatttcttggataatacaggtgttcaccctgagtcttatgaagctgttaaaaagttgcttgaccaactgactatcaaagaattagatgatcttgctaaagagaagttacaaaaccttgacttaattgcaacagcagaaagtattggggtaggtcaagaaacattaaaagacattatagaagatcttttgaaaccaggtcgtgatttgcgtgatgattttgaagcgcctgttttgagacatgatgttttagatgtcagtgatttaaaagttggacaggaattgcaaggaactgttcgaaacgtcgttgattttggtgcttttgttgatattggtgttcatgaagatggtctaatccaccagtctcgccttattaagcgaaaacgcgataaaaaaactagaaaaatgcctcctttacaacatccaagcaaatatctctctgttggtgatattgtaactgtttgggttgtagaggtagatgcggagcgtagcagaattggacttagtcttatcaagccagacggacttgac

SEQ ID NO: 1126 - protein, 747 aa, Streptococcus agalactiae
MLDYKNAILKSLFKTLRKSKICYNKSVMENLNITQIAIDLGIKASQIEKVLELTDEGNTIPFIARYRKEMTGNLDEVQIKSIIDLDKSMTALSDRKTTVLAKIEEQGKLTQELKKAIEEATKLADVEELYLPYKEKRRTKATIAREAGLFPLARLILQNKDNLEEEAQNYLTDGFETTTKALSGAVDILIEAFSEDNKLRSWTYNEIWNYSSITAVVKDESLDEKQVFKIYYDFSEKISKLHGYQVLALNRGEKMGVLKVNFEHNLEKMFRFFAVRFKETSQYIDDLIVQTVKKKIVPAMERRIRTELSEGAEDGAISLFSENLRNLLLVSPLKGKMVLGFDPAFRTGAKLAVVDQTGKLMTTQVIYPVPPANQAKIEQSKIELAKLIKEFNIEIIAIGNGTASRESEAFVAEVLQDFPDVSYVIVNESGASVYSASELARHEFPDLTVEKRSAISIARRLQDPLAELVKIDPKSIGVGQYQHDVSQKKLAENLDFVVETVVNQVGVNVNTASPALLAHVSGLNKTISENIVKYREENGQIKSRAEIKKVPRLGAKAFEQAAGFLRIPNAKNFLDNTGVHPESYEAVKKLLDQLTIKELDDLAKEKLQNLDLIATAESIGVGQETLKDIIEDLLKPGRDLRDDFEAPVLRHDVLDVSDLKVGQELQGTVRNVVDFGAFVDIGVHEDGLIHQSRLIKRKRDKKTRKMPPLQHPSKYLSVGDIVTVWVVEVDAERSRIGLSLIKPDGLD

SEQ ID NO: 1127 - DNA, 2130 bp, Streptococcus pyogenes
atggaaaataacaataatcacaacattgcagaggctttgtcagttagtctccatcaaattgaacaggtgcttgccctaacagcacaaggcaataccattccctttattgcacgttaccgtaaagaagtaacaggaaatctagatgaagtggtgattaagtccattattgatatggataagtctctcactaccctgaatgagcgcaaagcaaccattctcgctaaaattgaggaacagggaaaactgacagatcagttacgaacgagtattgaagcaaccgagaaactcgctgatttggaagagttgtacctgccttataaggaaaaacgccgtacaaaagcgacgattgcgcgtgaagcaggcttgttcccattagcacgtttgattttacaaaatgcgcaaaaccttgaaacagcagcagaaccctttgtcacagaaggatttgccagcccacaagaagctctagcaggagctgtggacatccttgtggaggccatgtcagaagatgctaaattacgctcttggacctacaatgagatttggcagtacagccgcttagtatcaacgcttaaagatgagcagttggatgagaaaaaggttttccaaatctattacgatttttctgaccaagtgtctaacatgcaaggatatcgtactttagcccttaaccgtggcgaaaagttaggcatcttaaaagtgtcttttgagcataacttggagaaaatgcaacgctttttcagtgtgcggttcaaagaaaccaacccttatattgaagaggtcatcaatcagaccatcaaaaagaaaattgttccagctatggaaagacgggttcgttcagaactcagtgatgccgcagaagatggggctatccacctcttttctgaaaatctccgtcatcttttgttagtgtctcctttaaaagggaaaatggttcttgggtttgaccctgcctttcgaacaggtgcaaaattggctatcgttgatcagactggaaaattgttgactactcaggttatttatcccgtagcaccagctagccaaacgaagattcaagcagctaaagaaacactgactcagctcattgagacttaccagattgatattattgccattggaaacggaacagccagtcgggaaagtgaagcctttgtagcagacgttttgaaagatttcccaaatacgtcctatgtcatcgttaacgaaagcggtgcttctgtttattcagcgtcagagttagcccgccatgagtttccagacctcacagtggagaagcgctctgctatttctattgctcgtcgcttgcaagacccactcgcagaattggttaaaattgatcctaaatctattggcgtcggtcagtaccagcacgatgtgagtcagaaaaagttgagtgagaatcttggttttgttgtggatactgtggttaaccaagtcggtgttaatgtgaacacggctagtccatctttattagcacatgtgtcaggtttgaacaaaacgatttcagaaaatattgtcaaataccgcgaagaaaatggagcactgacatcacgcgctgacatcaaaaaagtgccgcgtttaggagccaaggcgtttgagcaagcagcaggttttctcagaattccaggagccaaaaatattttagacaacacaggagttcaccccgagtcctacccagcagtcaaagaactctttaaggtacttggtattcaggacttggacgacgctgccaaggcaactttagcagcagttcaagttccccaaatggcagaaacattggctattgggcaggaaacccttaaagatatcattgctgatctccttaaaccgggtcgtgaccttcgtgatgactttgaagcaccaatcttacgtcaagatatccttgatttgaaagatttggaaattggccagaagcttgaaggaactgtgagaaacgtcgttgactttggtgcttttgtagacattggtgttcatgaagatgggcttattcacatttctgaaatgagcaaaacctttgtcaaccaccctagtcaagttgtttcagtgggtgacttggtaactgtttgggtctctaagattgacttggaccgccacaaggtcaatctcagcctattgccaccgcgtgacactcac

SEQ ID NO: 1128 - protein, 710 aa, Streptococcus pyogenes
MENNNNHNIAEALSVSLHQIEQVLALTAQGNTIPFIARYRKEVTGNLDEVVIKSIIDMDKSLTTLNERKATILAKIEEQGKLTDQLRTSIEATEKLADLEELYLPYKEKRRTKATIAREAGLFPLARLILQNAQNLETAAEPFVTEGFASPQEALAGAVDILVEAMSEDAKLRSWTYNEIWQYSRLVSTLKDEQLDEKKVFQIYYDFSDQVSNMQGYRTLALNRGEKLGILKVSFEHNLEKMQRFFSVRFKETNPYIEEVINQTIKKKIVPAMERRVRSELSDAAEDGAIHLFSENLRHLLLVSPLKGKMVLGFDPAFRTGAKLAIVDQTGKLLTTQVIYPVAPASQTKIQAAKETLTQLIETYQIDIIAIGNGTASRESEAFVADVLKDFPNTSYVIVNESGASVYSASELARHEFPDLTVEKRSAISIARRLQDPLAELVKIDPKSIGVGQYQHDVSQKKLSENLGFVVDTVVNQVGVNVNTASPSLLAHVSGLNKTISENIVKYREENGALTSRADIKKVPRLGAKAFEQAAGFLRIPGAKNILDNTGVHPESYPAVKELFKVLGIQDLDDAAKATLAAVQVPQMAETLAIGQETLKDIIADLLKPGRDLRDDFEAPILRQDILDLKDLEIGQKLEGTVRNVVDFGAFVDIGVHEDGLIHISEMSKTFVNHPSQVVSVGDLVTVWVSKIDLDRHKVNLSLLPPRDTH

SEQ ID NO: 1129 - DNA, 1041 bp, Streptococcus agalactiae
atgattgaattaggtattacaacattcggagagacaacaatccttgaagaaacaaaccaaagctattcacatcctgagaggattcgccaattagttgctgagattgaactagctgatcaagttggtttagatgtatatggtattggagagcaccatcgtgaagattttgcggtctctgcacccgaaattgtcctagcagcaggagcggttagaactaataatatccgtttatctagtgcagtaacgattctctcttccaatgatcctattcgcgtctaccagcaattttcaacgattgacgcactttcaaatggtagagcagaaattatggcagggcgtggttcctttattgagtcttttccattgtttggatacgatttagcggattatgatgatttatttaatgaaaaaatggatatgttgttagcaattaactcagcgacaaatctcgattggaaaggtcatttgacacaaacagttaatgagcgaccaatttatccaagagcattacagagacagttaccaatatgggtggcaacaggaggaaatgttgattctacaattcgtattgcagaacaaggtttgccaattgtttatgcaactattggtgggaatcccaaagcatttcgtcaattggtccatatttataaagaagttggtagtcgtaatggacacaaaccagaacaactaaaagttgctgctcactcttggggatggattgaagaggataatcaaaccgctattgaccgttattttttccctacgaaacagaccgtcgataatattgctaagggacgccctcattggtctgaaatgaccaaagagcagtatttacgttcagtaggtccagaaggtgctatttttgtaggaagtcctgaagtggttgcacataaaattataggacttgttgaagcacttgagttagaccgttttatgttacatctaccagttggctctatgcctcacaaagacgtcctaaatgctatcaaactttatggtaaggaagtagcaccaattgttcgaaaatattttgaaaagaat

SEQ ID NO: 1130 - protein, 347 aa, Streptococcus agalactiae
MIELGITTFGETTILEETNQSYSHPERIRQLVAEIELADQVGLDVYGIGEHHREDFAVSAPEIVLAAGAVRTNNIRLSSAVTILSSNDPIRVYQQFSTIDALSNGRAEIMAGRGSFIESFPLFGYDLADYDDLFNEKMDMLLAINSATNLDWKGHLTQTVNERPIYPRALQRQLPIWVATGGNVDSTIRIAEQGLPIVYATIGGNPKAFRQLVHIYKEVGSRNGHKPEQLKVAAHSWGWIEEDNQTAIDRYFFPTKQTVDNIAKGRPHWSEMTKEQYLRSVGPEGAIFVGSPEVVAHKIIGLVEALELDRFMLHLPVGSMPHKDVLNAIKLYGKEVAPIVRKYFEKN

SEQ ID NO: 1131 - DNA, 135 bp, Streptococcus agalactiae
gtgccattaatggctattacgcacaaacgtcaagatgacttagaaagtatgttcgctagttttgctaaagtaccaaaacctaaaaaagttgattctgattcaaaacctgaacagaaagatgattctcagaaagat

SEQ ID NO: 1132 - protein, 45 aa, Streptococcus agalactiae
MPLMAITHKRQDDLESMFASFAKVPKPKKVDSDSKPEQKDDSQKD

SEQ ID NO: 1133 - DNA, 153 bp, Streptococcus pyogenes
atggcaattacccataaaaaaaatgatgaacttgaaaaaatgctagcaggctttgcatcaatccctagttttgataagcctttggaagtcaatactgatggtaaactagcgaccaaagaaaaaacgacagaacaaacaaaaccaagcaaacca

SEQ ID NO: 1134 - protein, 51 aa, Streptococcus pyogenes
MAITHKKNDELEKMLAGFASIPSFDKPLEVNTDGKLATKEKTTEQTKPSKP

SEQ ID NO: 1135 - DNA, 240 bp, Streptococcus agalactiae
gtgtatgaaggcactttcttttcaaggaatcgattaataataggaatgataccacattcgcaagaaggaaagacaaagccaacgaaggttccaaataagactctgagaaatttatttttcggtaagaacttattgactatatcaggtgttataaagacttcaataattcctgataaaatagttccaagcaaaacaaaaggaagtgcctcaataataatggaaatgaaaatggcaaaccat

SEQ ID NO: 1136 - protein, 80 aa, Streptococcus agalactiae
MYEGTFFSRNRLIIGMIPHSQEGKTKPTKVPNKTLRNLFFGKNLLTISGVIKTSIIPDKIVPSKTKGSASIIMEMKMANH

SEQ ID NO: 1137 - DNA, 900 bp, Streptococcus agalactiae
atggatatctttaatcaattaccggatagtgtccttcaatggtttgccattttcatttccattattattgaggcacttccttttgttttgcttggaactattttatcaggaattattgaagtctttataacacctgatatagtcaataagttcttaccgaaaaataaatttctcagagtcttatttggaaccttcgttggctttgtctttccttcttgcgaatgtggtatcattcctattattaatcgattccttgaaaagaaagtgccttcatacacggcagttccgtttcttgctactgcccctattattaatcctattgttttatttgcgacctactcagcatttggaaattccatacgcttcctgatattacgctttgtaggtgctaccattgtagccattgctttaggagtcatgcttgcctttttagtagatgataatattctaaaagaagacgctaaacctactcattttcatgattattctgataagaagtggtatcaaaaaatctttctagccttagctcatgccatcgatgaattttttgatacaggacgctatctagtatttggtactttaattgcttcagctatgcaaatttatttaccaactcgagttcttactactatcggacatagccctatcacagccatcttagttatgatgttgcttgctttcatcttgtcattgtgtagtgaagctgacgcttttataggtgcttctttattatcaacctttggaatcgcgccagtgatggctttccttttaattggacccatgattgatattaagaatttaatgatgatggtaaattcttttaaaacaaggtttattgtccaattcattagtgtatcttctcttattattattatctattgtttatttgtgggggtaata

SEQ ID NO: 1138 - protein, 300 aa, Streptococcus agalactiae
MDIFNQLPDSVLQWFAIFISIIIEALPFVLLGTILSGIIEVFITPDIVNKFLPKNKFLRVLFGTFVGFVFPSCECGIIPIINRFLEKKVPSYTAVPFLATAPIINPIVLFATYSAFGNSIRFLILRFVGATIVAIALGVMLAFLVDDNILKEDAKPTHFHDYSDKKWYQKIFLALAHAIDEFFDTGRYLVFGTLIASAMQIYLPTRVLTTIGHSPITAILVMMLLAFILSLCSEADAFIGASLLSTFGIAPVMAFLLIGPMIDIKNLMMMVNSFKTRFIVQFISVSSLIIIIYCLFVGVI

SEQ ID NO: 1139 - DNA, 900 bp, Streptococcus pyogenes
atgtcactcttttccaaccttcctcccagtgtcttgcaatggtttgcgatttttatgtccattatcattgaagctcttccttttgtgctcctaggaactattttatctggttgtattgaagtctttgtaacgccagaattggttcaaaaatacctacctaagcaaaaatgcttgcgcattctgtttggaacctttgttggatttgtttttccttcttgtgaatgcgggattattcccatcatcaaccgctttttggaaaaaaaggtgcctagttatacggccgtcccttttctggcaacagcgcctatcattaatcctattgttttgttcgctacttattctgcttttgggaattctttgcgctttctgatacttcgcttggtcggtgctgcactagtagccattacacttggggtaatgttagcttttattgtagatgataacattctcaaggataatgctcaacccgtgcattttcatgattattctcatgaaagcttgccaaaacgcatttatctagcactggtacatgctattgatgaattcttcgacaccggtaggtatctcgtatttggaaccttgattgcctctgccatgcaaatatatgtcccaactcgtgtgttgacaacgattgggcacaatcccttgacagccattttgatcatgatgctgatggctttcattctatcattatgtagtgaagccgatgcctttatcggagcttccttattatccacctttggagtggctccagttcttgcctttcttttaattggtcctatggtggatattaaaaaccttatgatgatggtaaaggcttttaaaggacgcttcattgtccaatttatcggcgtatccgttcttatgattgccgtttattgtttacttgtgggggtgctc

SEQ ID NO: 1140 - protein, 300 aa, Streptococcus pyogenes
MSLFSNLPPSVLQWFAIFMSIIIEALPFVLLGTILSGCIEVFVTPELVQKYLPKQKCLRILFGTFVGFVFPSCECGIIPIINRFLEKKVPSYTAVPFLATAPIINPIVLFATYSAFGNSLRFLILRLVGAALVAITLGVMLAFIVDDNILKDNAQPVHFHDYSHESLPKRIYLALVHAIDEFFDTGRYLVFGTLIASAMQIYVPTRVLTTIGHNPLTAILIMMLMAFILSLCSEADAFIGASLLSTFGVAPVLAFLLIGPMVDIKNLMMMVKAFKGRFIVQFIGVSVLMIAVYCLLVGVL

SEQ ID NO: 1141 - DNA, 111 bp, Streptococcus agalactiae
ttggcagagactgtggttgagtctaaactaactgtaggtactaacaaacctactaaaacgggaaatactaaaatcattgggcttgttgatttagctattttaccatgtagg

SEQ ID NO: 1142 - protein, 37 aa, Streptococcus agalactiae
MAETVVESKLTVGTNKPTKTGNTKIIGLVDLAILPCR

SEQ ID NO: 1143 - DNA, 834 bp, Streptococcus agalactiae
ttgtttatttgtgggggtaatataatgattcgatttcttattcttgctggttattttgaattaagcatgtatttaaagttatcaggtaaactaaatcagtatattaatactcattatacctatttggcctatatttcaatggtcctatcttttattttagcaattgtacagctaattatttgggttaaaaatatgaaaatgcatagtcacctacatggtaaaatagctaaatcaacaagcccaatgattttagtatttcccgttttagtaggtttgttagtacctacagttagtttagactcaaccacagtctctgccaagggatataatttccctctagcagccggctctactggtactgtaagtcaagatgggacacgcgttcaatatttgaaaccagataccagcacttattttacttcttcagcctatgaaaaagaaatgcaaaaagagcttaaaaaatataaaggctctggtacattaaccatcacaactgaaaattacatggaagttatggaactaatttatctctatcccgagcaattcatggatcgccaaatacaatatactgggtttgtttataacgaacccaaacacgaaggatatcaatttattttccgctttggaatcattcattgtattgccgattcaggagtttatggtctactaacgactggaaatcaaaaaagttatccggacaatacttgggtaactgttagaggtacaattaaatccgagtataatcaattgttacaacaaaacttaccagtcttacacattgaagagtctcgtcaagtttctaaagctaataatccttatgtttatcgtgtcttt

SEQ ID NO: 1144 - protein, 278 aa, Streptococcus agalactiae
MFICGGNIMIRFLILAGYFELSMYLKLSGKLNQYINTHYTYLAYISMVLSFILAIVQLIIWVKNMKMHSHLHGKIAKSTSPMILVFPVLVGLLVPTVSLDSTTVSAKGYNFPLAAGSTGTVSQDGTRVQYLKPDTSTYFTSSAYEKEMQKELKKYKGSGTLTITTENYMEVMELIYLYPEQFMDRQIQYTGFVYNEPKHEGYQFIFRFGIIHCIADSGVYGLLTTGNQKSYPDNTWVTVRGTIKSEYNQLLQQNLPVLHIEESRQVSKANNPYVYRVF

SEQ ID NO: 1145 - DNA, 837 bp, Streptococcus pyogenes
ttgtttacttgtgggggtgctctaatgattcgctttttaattttagctggctattttgaactaaccatgtatctccagctgtctggcaaactggatcagtacatcaatgttcggtattcttaccttgcttatatttccatgattttatctttcattttagctcttgttcaactctatacctggatgaaaaacattaaggtacatagccatttaacaggaaaaatcgcaaggctgacgagtccttttatcttggtctttcctgttttgattggtctccttgtgccgaccgtgaccttagattccaccacggtttctgctaaaggctatactttcccattggctgcgggagcctctaaaacgggagtcagtgatgacggtaccaccattcaatacctcaaacctgataccagcctttactttacaaagtctgcctaccaaaaggagatgcgtcaagaactccataaatataaaggcaagaaaccggtcaccattaccactgaaaattatatggaagtgatggaattgatctatctctacccagatgagtttcttgatcgtgacatccaatacactggctttgtttataacgaaccgggccatgacaactaccaattccttttccgcttcggcattattcactgtattgccgactcaggagtgtacggacttttgaccacaggtaatcaaaccagctaccctaacaacacatggctaacagttaaaggtcgccttcatatggaatatgataaaaacttagaacaacatctacctgtccttcaacttgctgaggttcatcaaaccaaagaacctaataatccttatgtttaccgcgttttt

SEQ ID NO: 1146 - protein, 279 aa, Streptococcus pyogenes
LFTCGGALMIRFLILAGYFELTMYLQLSGKLDQYINVRYSYLAYISMILSFILALVQLYTWMKNIKVHSHLTGKIARLTSPFILVFPVLIGLLVPTVTLDSTTVSAKGYTFPLAAGASKTGVSDDGTTIQYLKPDTSLYFTKSAYQKEMRQELHKYKGKKPVTITTENYMEVMELIYLYPDEFLDRDIQYTGFVYNEPGHDNYQFLFRFGIIHCIADSGVYGLLTTGNQTSYPNNTWLTVKGRLHMEYDKNLEQHLPVLQLAEVHQTKEPNNPYVYRVF

SEQ ID NO: 1147 - DNA, 1608 bp, Streptococcus agalactiae
atgggattatttgaccgcctatttggacataagaaaaaagataaagaaccagaaattgaagcatcagaatctgttgttttagaagatgaagattcagttattgataaagaggagggcagcaacttttcgaaggagtcaactttgaatcgaacctctgaagtccctgttgcagaagatgattctttcttagaattagaaagagatacagcattgtcagaatcacatcaaccagttacctctgaaattcatcctttagagtcagaagataccgatgaaattcctgtaaaagaagacgatagttttttagaactagaagatagggctaagacaaaggtagcagatacttctgaggtagaaaatgtagttcctgattccacgactctttctgacaatgtttctgctaaatctgaggcatcttttagtgataaggagcaattaagtgatagtcaggcttcagatcagttttcagaaactccccttcaagaagagatgtctagtggaaaaactgaggtacaaacagagtcagaggatacatctgcggctgatgcttttttagcagattactatgctaaacgtaaagcaattgagaaagaaatctcgtctaattcgctgtcaacagatgagtcagaattttctgaggcacaggaagttttatcgcaatcacaggcagacactataaaagctgagagtcaagaggaaaaatataatcgtagcctgaaaaaaacacgcacaggttttagtgcacgccttaatgctttcctttctaacttccgtcgtgttgacgaagagttctttgaagaattagaagaaatgttaatcttatctgacgttggggtaaatgttgcaacacagttaaccgaagatcttcgttatgaagcaaaattagagaatgccaagaaatcagaggatttaaaacgtgttatcgttgaaaaattagttgaaatctacgaaaaagatggtatttataatgaggctatcaatttccaagaaggtttaaccgtaatgctttttgtaggtgttaatggtgttggaaaaacgacatctataggtaagttagctcatcaatacaagtctcaagggaaaaaagttatgttagtagcagctgatactttccgtgcaggtgctgtggctcaactagtagaatggggacgccgtgttgatgtaccagttgtcactggagaagaaaaagcagatccggctagcgttgtctttgatggcatggaaaaagccgttgctcaaggcgttgatgtcttgttaattgatacagcaggacgtctgcaaaataaagaaaaccttatggcagagttggaaaaaattggacgtattattaagcgtgtcgtacctgatgctccccacgaaactttgcttgctttagatgcatctacaggacaaaatgctttaagtcaagctaaagagttctcgaaaattacaccattaactggccttattctgactaaaattgatggtactgctaagggtggtgtggtactggctattcgtcaagaactagatattcctgttaaattcattggtttcggcgaaaaaatcgatgatattggtgaatttaattcagaagatttcatgcgtggccttctggaaggaatttta

SEQ ID NO: 1148 - protein, 536 aa, Streptococcus agalactiae
MGLFDRLFGHKKKDKEPEIEASESVVLEDEDSVIDKEEGSNFSKESTLNRTSEVPVAEDDSFLELERDTALSESHQPVTSEIHPLESEDTDEIPVKEDDSFLELEDRAKTKVADTSEVENVVPDSTTLSDNVSAKSEASFSDKEQLSDSQASDQFSETPLQEEMSSGKTEVQTESEDTSAADAFLADYYAKRKAIEKEISSNSLSTDESEFSEAQEVLSQSQADTIKAESQEEKYNRSLKKTRTGFSARLNAFLSNFRRVDEEFFEELEEMLILSDVGVNVATQLTEDLRYEAKLENAKKSEDLKRVIVEKLVEIYEKDGIYNEAINFQEGLTVMLFVGVNGVGKTTSIGKLAHQYKSQGKKVMLVAADTFRAGAVAQLVEWGRRVDVPVVTGEEKADPASVVFDGMEKAVAQGVDVLLIDTAGRLQNKENLMAELEKIGRIIKRVVPDAPHETLLALDASTGQNALSQAKEFSKITPLTGLILTKIDGTAKGGVVLAIRQELDIPVKFIGFGEKIDDIGEFNSEDFMRGLLEGIL

SEQ ID NO: 1149 - DNA, 1548 bp, Streptococcus pyogenes
atgggattatttgatcgtttatttgggaaaaaagaaaccccgaaggtagctgaggaaaagttagaagaaaatcttttgacagaaacaactcagaaagaggagctttctgaaaaagccaatgagcaagacaagattgaggcggttcaacaagaggacgtttcttcagagggcgcaggttcggtggaaaatggtcccgaagcagcttcagtaaacgcactggttgaggaagaaacaggtgacaatagtaatcatccatcagaagataccaatgagtttgctgccgacaaaacagaccttaaggtaagtgaacttagtcaatctacggcatcagaaccaaaagaccttgttgaccagccagttgtggaacagtttccaacaaaacaagcccaagctgatgcctcaaatgattcggcgaatgaagaagcagtagacacttcaaaagagcaatccagtagccaacaggttatggaagactactaccgtcgtaaggctgctcttgaaaaaagccttcaagaaaaagcagcggcaacggttccagtgatgccagaagaagttccacaagaaaatcaggcctctacctcagcagaagcttctcaaaacaaggcaacccacgataccattcctgagacagatcaagaaaaatacaagcgtagcttgaaaaaaacgcggactggcttctcagctcgtctgaacagtttctttgccaatttcaggcgagtggatgaagaattctttgaagacttggaagaaatgctgatcttatcagatgtcggtgtacatgtggcgacaactttgacagaggagttgcgttatgaagccaaactggaaaatgcgaaaaaaccagatgccttgaaacgtgtgattgtggaaaaattggtagatatctatgaaaaagatgggcgttataatgaagccattaattatcaagatggcttgacggttatgctttttgtaggtgttaacggggttggtaaaacgacttcaatcgggaagctggcttaccgttacaaacaagaaggtaaaaaagtcatgttggtggcagcagataccttccgagcaggggctgtggctcagctagtcgaatggggacgccgagtagatgtgccagtcattactggccctgaaaaggctgatccagcgtctgttgtttttgacgggatggaaaaagctgtggcaaaaggtgtagatattctcctgattgacacggctggtcgcctgcaaaacaaagaaaatctcatggcagagctggaaaaaatgggtcgtatcattaagcgcgtgctaccagatgcccctcatgaaacgcttttggccttagatgcgtcaacaggacaaaatgcgcttagccaagccaaggaattttcaaaaataacaccattaacaggtttgattttaacgaaaattgatggcacggccaaaggtggtgtagtcctagccatccgtcaagaattagacattccagtcaagtttatcggatttggtgaaaaagtggatgatattggagaattccactcagaagactttatgaaaggccttttggaaggtatctta

SEQ ID NO: 1150 - protein, 516 aa, Streptococcus pyogenes
MGLFDRLFGKKETPKVAEEKLEENLLTETTQKEELSEKANEQDKIEAVQQEDVSSEGAGSVENGPEAASVNALVEEETGDNSNHPSEDTNEFAADKTDLKVSELSQSTASEPKDLVDQPVVEQFPTKQAQADASNDSANEEAVDTSKEQSSSQQVMEDYYRRKAALEKSLQEKAAATVPVMPEEVPQENQASTSAEASQNKATHDTIPETDQEKYKRSLKKTRTGFSARLNSFFANFRRVDEEFFEDLEEMLILSDVGVHVATTLTEELRYEAKLENAKKPDALKRVIVEKLVDIYEKDGRYNEAINYQDGLTVMLFVGVNGVGKTTSIGKLAYRYKQEGKKVMLVAADTFRAGAVAQLVEWGRRVDVPVITGPEKADPASVVFDGMEKAVAKGVDILLIDTAGRLQNKENLMAELEKMGRIIKRVLPDAPHETLLALDASTGQNALSQAKEFSKITPLTGLILTKIDGTAKGGVVLAIRQELDIPVKFIGFGEKVDDIGEFHSEDFMKGLLEGIL

SEQ ID NO: 1151 - DNA, 822 bp, Streptococcus agalactiae
atgtcggatattaaaatacttgccttagatttagatggcactttatttacaacagataagaaagtttcagaagaaaataaagtggccttaaaagcagctagagaaaaaggtataaaagttgttattacaacagggcgtcctttaaaagcaattggtaatttgttagaggacctagagttagtatctgatgaagattacagcattacttttaacggtggtttagttcaacaaaatacagggaaaatcttagctaaaactgcaatgacacgacaagaagtggaagatatccatgaggagttgtatcaagtgggtttgccaacagatatcttaagtgagggaacggtatatagtatcgctaacaagggacaccattctcaatatcatttagccaacccgctcttagaatttatagaagttgatgatttagagcaagtgccaaaggatgtagtttataataaaattgttagtgttattgatgctacatatcttgatcaacaaattgctaaacttcctgatagacttaaagttgactatgaaatgtttaaatcacgtgatatcattttagaattgatgcctaaaggtgttcataaagcagtcggcttagaactactgacaaaacaccttgggttagatagtagtcaagttatggcaatgggagatgaagcaaatgatttatcaatgctagagtgggcaggcttaggagttgcaatggctaatggtattccagaagctaaggcaatagcaaaagcgacaactatttgtaataacgatgagtctggagtcgccgaagcaattgggaaatatattttaagtgaggaaaat

SEQ ID NO: 1152 - protein, 274 aa, Streptococcus agalactiae
MSDIKILALDLDGTLFTTDKKVSEENKVALKAAREKGIKVVITTGRPLKAIGNLLEDLELVSDEDYSITFNGGLVQQNTGKILAKTAMTRQEVEDIHEELYQVGLPTDILSEGTVYSIANKGHHSQYHLANPLLEFIEVDDLEQVPKDVVYNKIVSVIDATYLDQQIAKLPDRLKVDYEMFKSRDIILELMPKGVHKAVGLELLTKHLGLDSSQVMAMGDEANDLSMLEWAGLGVAMANGIPEAKAIAKATTICNNDESGVAEAIGKYILSEEN

SEQ ID NO: 1153 - DNA, 822 bp, Streptococcus pyogenes
atgaatattagaattttggcgcttgatttagacggtaccctctacaacactgaaaaaattgtcacagatgccaataaaaaagccttagcagcggctagagaaaaaggggttaaggtggttattaccacaggtcgccctctaaaggccatcggtaacttgctagaagagttggacttgcttgaccacgatgactacagtattacctttaatggggggttggttcagcgaaatacaggggaggttttggataagagttctctcagttttgaccaggtttgccagattcagcaagctttagaggcggttggcttaccaacagatattatcagtggtggggatgtgtatagcattccaagtaaggacggtaggcattcgcagtaccatctagctaacccactgttgacctttattgaggtgacatctgtagcggaactaccaaaagacattacctataacaaaattgtgacagtcaccgatccagactttttggatcagcagattataaagctatccccaagcttatttgaggattttgaagcctttaaatcacgagatattatttttgaaatcatgccaaaaggcattgataaagcttttggattaaacttgctttgtcagcaccttggccttgatgctagacatgtcatggctatgggagacgaagctaacgactttgcgatgttagaatgggcaggacttggagtagctatggctaatggtgtttcaggagctaaagccgatgccgatgccgtgaccaccttgaccaatgatgagtctggagttgcagaagctgtgaagacatttattttagaagaggagagt

SEQ ID NO: 1154 - protein, 274 aa, Streptococcus pyogenes
MNIRILALDLDGTLYNTEKIVTDANKKALAAAREKGVKVVITTGRPLKAIGNLLEELDLLDHDDYSITFNGGLVQRNTGEVLDKSSLSFDQVCQIQQALEAVGLPTDIISGGDVYSIPSKDGRHSQYHLANPLLTFIEVTSVAELPKDITYNKIVTVTDPDFLDQQIIKLSPSLFEDFEAFKSRDIIFEIMPKGIDKAFGLNLLCQHLGLDARHVMAMGDEANDFAMLEWAGLGVAMANGVSGAKADADAVTTLTNDESGVAEAVKTFILEEES

SEQ ID NO: 1155 - DNA, 795 bp, Streptococcus agalactiae
atgataaaattagtagcaaccgatatggacggtacattcttagatgaaaacggtacctatgataaaaaacgtttagcaaatgtgctaaaaaaatttaaagaacaaggaattgtctttacggcagcaagtgggcgttccttattatcacttgaacaattatttgctgactttcgtgatcagatggcttttatagcagaaaacggaagtgcagcagtcttatttaatcgcttggcatatgaacagcacttgagtcgagaacaatacttagatattattgaccatttgagtaagagcccttatatggagaataatgaatatgtcttatctggcaaggatggtgcatatattctaagtgatgccaatccagattatattgaattcatcactcattattatgataatttgcaaaaagtttctcactttgaagatgttgatgatattattttcaaagtaacggctaactttactgaagagactgttagacaagctgaggagtgggtaaatcaagctataccgtatgccacagcagtgacaacaggttttaaatccattgatattattctaagctcagttaataaacgaaatggtttagagcacctctgtgaacaatacggtattagagcagaagaagtcttatcttttggtgacaatattaatgatttagaaatgctagagtggtcaggaaaagctatcgcaacagaaaatgctagaccagaagttaaagagatagcagattgtattataggtcatcacaataatcaagctgtaatggcttatttagaaagtatggtggat

SEQ ID NO: 1156 - protein, 265 aa, Streptococcus agalactiae
MIKLVATDMDGTFLDENGTYDKKRLANVLKKFKEQGIVFTAASGRSLLSLEQLFADFRDQMAFIAENGSAAVLFNRLAYEQHLSREQYLDIIDHLSKSPYMENNEYVLSGKDGAYILSDANPDYIEFITHYYDNLQKVSHFEDVDDIIFKVTANFTEETVRQAEEWVNQAIPYATAVTTGFKSIDIILSSVNKRNGLEHLCEQYGIRAEEVLSFGDNINDLEMLEWSGKAIATENARPEVKEIADCIIGHHNNQAVMAYLESMVD

SEQ ID NO: 1157 - DNA, 795 bp, Streptococcus pyogenes
atgataaaactaatagcaacagatatggatggtactttcctagctgaagatggtacttataatcaagagcaactagctgcgctcttgccaaagttagccgaaaaaggcattttatttgcggtttcgagtggccgctcgctcttagccattgatcagctctttgagccctttttggatcagattgctgttattgcagaaaatggttccgtggttcaataccgtggtgagattctatttgcagatatgatgaccaaagagcagtataccgaagttgcaaaaaagattttagccaatcctcactatgtagaaacaggtatggttttttctgggcaaaaggcagcctatattttaaaaggcgcatcagaagagtacattcaaaaaacaaaacattactatgctaatgttaaggttattaatggttttgaagatatggagaatgacgccatttttaaagtttctaccaacttcacaggccataccgtcttagaaggaagcgattggttgaatcaagccctcccttatgccactgcagtgaccaccggctttgattccattgatattatcttaaaagaggtgaataagggctttggtatggagcatctttgtcaagccttgggcattaagaaagcagaaacgattgcttttggggataattttaatgattaccagatgttggagtttgctggtagggctattgctacggaaaatgcaagacctgaaatcaaagtgatttcagaccaagtcattggccactgtaatgacggagcagtactaacgtatttaaaaggactagtg

SEQ ID NO: 1158 - protein, 265 aa, Streptococcus pyogenes
MIKLIATDMDGTFLAEDGTYNQEQLAALLPKLAEKGILFAVSSGRSLLAIDQLFEPFLDQIAVIAENGSVVQYRGEILFADMMTKEQYTEVAKKILANPHYVETGMVFSGQKAAYILKGASEEYIQKTKHYYANVKVINGFEDMENDAIFKVSTNFTGHTVLEGSDWLNQALPYATAVTTGFDSIDIILKEVNKGFGMEHLCQALGIKKAETIAFGDNFNDYQMLEFAGRAIATENARPEIKVISDQVIGHCNDGAVLTYLKGLV

SEQ ID NO: 1159 - DNA, 114 bp, Streptococcus agalactiae
atgacaaatggaattgtcttaacacggataatggcaaataataatgctaacgctgataatgctttttcaccacctgacatcaagtttaaagactggatttttttaccaggaggt

SEQ ID NO: 1160 - protein, 38 aa, Streptococcus agalactiae
MTNGIVLTRIMANNNANADNAFSPPDIKFKDWIFLPGG

SEQ ID NO: 1161 - DNA, 3537 bp, Streptococcus agalactiae
atgtttttaaaagaaattgaaatgcaaggctttaagtcctttgcggataaaactaaggtagaatttgatcaaggagttactgctgttgtaggtccaaatggatcaggtaaaagtaatatcacagagagtttacgttgggcattgggagaatcaagcgcaaaaagtttacgaggaggtaagatgccagacgttatatttgctggtacagaaaatcgtaagccccttaattatgcgcaagtgagtgttactttagataatagcgaccattttatcgaaaatatagctgacgaagttcgagttgaacgtcgtatttttcgaaacggagatagtgaatatttaatagatggacgcaaagttcgcttacgtgatattcatgatttatttatggatactggattaggaagagattctttttctattatttcccaaggacgcgttgaagctatttttaatagtaaaccagaagagcgccgtgccatatttgaagaagccgctggtgttctgaaatacaaaacacgtaagaaagaaacacaatccaaattagaacaaactcaagggaacttagatcgcttagaggatattatttatgaattggacatgcaagtccaaccattagaaaaacaagcaagtattgccaagcgttttttagtattagatgaggaacgacaaggactccacttatctattttgattgaagatattttacaacatcaatcagatttaactactgttgaggaaaagctattgacagtaagaaaagagttagcaacttattaccaacaacgtcagtcccttgaagatgaaaatcaatcgttaaaacagaaacgtcaccatttatctgaagaaattgaggctaaacagttagctcttttagacgttacaaagttaaagtcagatttggaacgccaaattgatctgattcgtttagagtcaaaccaaaaggctgaaaaaaaagaagaggcaggtcaacgcttagcagagttagaaattaaagctaaagattgtagtgaccagattacccaaaaaaatatagagttaactactctgtcggaaaaaatagcccaaataagatcagaaattgttagtacagaaagttccttggagcgtttttcaactaatccggatcagattattgaaaaacttcgagaagactttgttaccttgatgcaagaagaagccgacacttcaaacgctttaacagctttactagctgatatagagaatcaaaaacaagcttctcaagctaaatctcaagaaatacaagaagttagcaaaaatttagaagtattaaaaagtaacgcaaaggtagcattggaacgatttgaggctgcaaagaagaatgttcgtcagttattatctcactaccaagatttaggtcaaaccttgcaaaatctagaaggtgagtataagaatcagcagtcaattttatttgatcatttagatgaaatcaaatcaaagcaagcacgtatttcgagtttagaatctattttgaaaaatcatagtaatttctatgctggagtgaagtcagttctacaggctaaggaccagcttggaggtatcataggtgctgttagtgagcatcttagctttgacaaacattaccaaacagcattggagatagctttgggaggtagcagccaacacatcattgttgaagacgagagtgctgccaaacgttcaattgcttttttaaagaaaaaccgccaaggtagagcgacatttctgcctttaactacaataaaaccaagagaattagcacaacattatctctcaaaattacaaagttctcaagggtttttaggaatagctagtgaattggtaacctatgatcaacgcttgtcaaacatttttaaaaataacttagggttaactgctatttttgatacggttgataatgctaatgtagctgcgagacaattgaattatcaagtacgtttagtaaccttagatggaacagagttacgccctggagggtcgtactcagggggagcaaatcgtcaaaataatactgtttttatcaagcctgaattggataatctaaaaaaagaattgaaacaggcacaaagtaaacaattaattcaagaaaaagaagttgccacattgttagagcaactcaaagagaaacaagaaaccttagcacaacttaagaatgatggagaacaagctcgtcttgaggaacaaagagctgatatagagtatcaacaactatcagaaaagcttgctgatttaaataaactatataatggcttgcaattaagcagcggggcgttggaacaaactacttctgaaaatgaaaaaaatcgtttagaaaaagaacttgaacaatttgctattaaaaaagaagagttgacaacttcaattgctcaaattaaggaagataaagattcaattcaagaaaaagtcaataatctaacaacattattgtcagaggcacagctagaagaacgtgatttgctaaacgagcagaaatttgaacgtgccaactgtacacgtctagagattaccttgtctgaaataaaacgtgacattagtaatttacaaacattactaagccatcaggacagtcaattagacaaagaagagcttccacgtatagaaaaacagttgctacaagtaaataatagaagagaaaatgacgaagaaaagcttgtgagtctccgttttgaattggaggattgtgaagctgctttagatgatttagctgcttctctggctaaagagggacaaaaaaatgaaagtcttattcgtcagcaagctcaattagagtcacaatgtgaacaattatctcaacaattgatgatattctcacgtcaattatcagaagactatcagatgacattggatgaagcgaaggtaaaagcaaatgtcttggaagatattttgatggcgcgtgaacaattgaaatctctacaagctaaaattaaagctttaggacctgttaatattgatgcaattgctcaatttgaagaagttcatgaacgattgaccttccttaacacacagcgagacgacttagttcatgccaaaaatttattactagagacgattacagatatggatgatgaagttaagactcgttttaaatcgacatttgaagccattcgtcatagtttcaaagaaacctttgtacagatgtttggtggaggttctgcggaccttattctgacagaaggtgatttattatcagctggggttgatatttcggttcaacctcctggtaaaaaaatccagtctttaaacttgatgtcaggtggtgaaaaagcattatcagcgttagcattattatttgccattatccgtgttaagacaattccatttgtcatcttggatgaagttgaggccgctttagatgaagcaaatgttaagcgatttggcgattatcttaatcgatttgataaatcaagtcaatttatcgttgttactcaccgaaaagggactatgtctgctgctgatagtatctatggggtaacgatgcaagaatcaggcgtttccaaaattgtttctgtaaaattaaaagaagctcaagaaatgaccaat

SEQ ID NO: 1162 - protein, 1179 aa, Streptococcus agalactiae
MFLKEIEMQGFKSFADKTKVEFDQGVTAVVGPNGSGKSNITESLRWALGESSAKSLRGGKMPDVIFAGTENRKPLNYAQVSVTLDNSDHFIENIADEVRVERRIFRNGDSEYLIDGRKVRLRDIHDLFMDTGLGRDSFSIISQGRVEAIFNSKPEERRAIFEEAAGVLKYKTRKKETQSKLEQTQGNLDRLEDIIYELDMQVQPLEKQASIAKRFLVLDEERQGLHLSILIEDILQHQSDLTTVEEKLLTVRKELATYYQQRQSLEDENQSLKQKRHHLSEEIEAKQLALLDVTKLKSDLERQIDLIRLESNQKAEKKEEAGQRLAELEIKAKDCSDQITQKNIELTTLSEKIAQIRSEIVSTESSLERFSTNPDQIIEKLREDFVTLMQEEADTSNALTALLADIENQKQASQAKSQEIQEVSKNLEVLKSNAKVALERFEAAKKNVRQLLSHYQDLGQTLQNLEGEYKNQQSILFDHLDEIKSKQARISSLESILKNHSNFYAGVKSVLQAKDQLGGIIGAVSEHLSFDKHYQTALEIALGGSSQHIIVEDESAAKRSIAFLKKNRQGRATFLPLTTIKPRELAQHYLSKLQSSQGFLGIASELVTYDQRLSNIFKNNLGLTAIFDTVDNANVAARQLNYQVRLVTLDGTELRPGGSYSGGANRQNNTVFIKPELDNLKKELKQAQSKQLIQEKEVATLLEQLKEKQETLAQLKNDGEQARLEEQRADIEYQQLSEKLADLNKLYNGLQLSSGALEQTTSENEKNRLEKELEQFAIKKEELTTSIAQIKEDKDSIQEKVNNLTTLLSEAQLEERDLLNEQKFERANCTRLEITLSEIKRDISNLQTLLSHQDSQLDKEELPRIEKQLLQVNNRRENDEEKLVSLRFELEDCEAALDDLAASLAKEGQKNESLIRQQAQLESQCEQLSQQLMIFSRQLSEDYQMTLDEAKVKANVLEDILMAREQLKSLQAKIKALGPVNIDAIAQFEEVHERLTFLNTQRDDLVHAKNLLLETITDMDDEVKTRFKSTFEAIRHSFKETFVQMFGGGSADLILTEGDLLSAGVDISVQPPGKKIQSLNLMSGGEKALSALALLFAIIRVKTIPFVILDEVEAALDEANVKRFGDYLNRFDKSSQFIVVTHRKGTMSAADSIYGVTMQESGVSKIVSVKLKEAQEMTN

SEQ ID NO: 1163 - DNA, 3537 bp, Streptococcus pyogenes
atgtttttaaaagaaattgagttggaagggttcaagtcctttgcggacaagactaaaattgaatttgataagggagtaactgcagtcgtaggaccaaatggttcaggtaaaagtaatattacagaaagtttacgttgggctttaggagaatcaagtgctaaaaatctgcgtgggggcaagatgccagatgtcatttttgctgggacacaaaaccgtaatcctctaaactatgctaaggtagcggttgttcttgataattccgatcattttataaaaactgccaagaaagaaatccgtgtcgaaaggcatatttaccgaaatggagatagtgactatctgattgatggtcgcaaggtaaggctccgtgatattcatgatttgtttatggatacagggcttggtcgtgattctttctccattatttctcaaggtcgcgtagaggaaattttcaatagtaaacctgaagaaaggcgcgccatttttgaagaagcagctggtgttttaaaatataaaacacgtaaaaaagaaactcagattaaattaaatcaaactcaagataatttagaccgtctagaggatattatttatgagctagacacgcagttggcaccacttgaaaagcaagctaaagtagctaaacaatttttagaacttgatgccaatcgtaagcaactacaactagatattctagtcaaagatattgatatagctcaagaaagacagactaaagatactgaagctttagctgctttacaacaagacttagcatcttattacgctaagcgtcaatctatggaagaagattaccaaaaattcaagcaaaaaaagcaggttcttagtcaagagtcagatcaaacccaaacaacattattagaattaaccaagctaatagctgacttggaaaagcaaattgaattggttaagctagaaagtggccaagaagcagagaaaaaggcagaagccaaaaaacatctcgaacagttacaagaacaattggatggttttcaagcagaagaaaagcagtgtacagaacaattattgcatattgatcaacaactttgtgatgtcaaacaacagttaaacgaattgagcaatgcattagagcgtttttcaagtgatcccgaccaattaatggaaactctaagagaagagtttgtattattgatgcaaaaagaggcggccttatcaaatcagctgacagctttaaaagcccatttagacaaagaaaaacaggctcgtcaacataaggctcaagaatatcagctacttgttactaagcttgatcaacttaatgacgagtctcaaaaagctcaagctcattataaagctcaaaaagagcaagtcgaaatgttgctccaaaattatcaagaaggtgataaacgcgttcaggaattagaaagagattaccaactgaatcaagaaagactatttgacttgttggatcaaaaaaaaggaaaagaagctcgtaaggctagcttagaatctattcaaaaaagtcatagtcaattctatgcgggagtacgagctgtccttcaatcacaaaaaaagcttggagggatcataggtgcagtcagtgaacacctttcttttgattctgattaccaaacagctcttgaagttgcattaggtgctaatagtcagcatattattgtaacagacgaagctgcagcaaaaagagcaattgcttatttgaaaaaaaatcgccaaggacgagcaacttttttacctttaactactataaaggctagatcattatcagaacactatcatcgtcaattggcgacttgtgaaggttatctgggaactgcagaatcattgattcgctatgatgatagtctttcagctattatccaaaatcttttatctagtactgctatctttgaaactattgatcaagctaatattgcagcgcgcttattaggatataaggtaagaattgttactcttgatggaacagaattacgaccaggtggttctttttcaggaggagctaatagacaaagcaatacaacttttatcaaaccagagttagaacaaatcagtgaggaattaacgcgattagttgagcaattaaaaataactgaaaaagaagtagctgccttgcaaagcgatttgatagcaaaaaaagaagaactgacacaattgaaattagccggtgaccaggcacgcttagctgaacaaagagctcaaatggcttatcagcaattgcaagaaaaacaagaagattcaaaggctttgttagctgcccttgatcaaagtcagacgactcattctgatgaatctttattggcagaacaagctcgtattgaagaagcattaacagctattgctaagaaaaaaaatgccttaacttgtgatattgatgatatcaaagaaaacaaagatttgattaggcaaaaaacacaaaacattcaccaagctttatctcaagctcgtttgcaagaaagagatttacttaatgaaaagaaatttgagcaagctaatcaatctcgtctaagaactcagctgaagcaatgccagcaaaatattctcaaacttgaaagcatactaaacaataacgtaagtcaagacagcattcaaagactaccccagtggcaaaaacagttacaagatgccacagagcataagtctggtgctcaaaaacgtttagtccaattaagatttgaaatagaggactatgaggcccgcttagaagaaacagcagaaaaaataaccaaagaaagcgaaaaaaatgacacatttattcgtcgtcaaaccaagttagagacacatttagagcaagtggctaatcgcttacgagcctatgctaaaagtttatcagaagattttcaaatgacactagcagacgcaaaggaggtaacaaatagtattgatcacttagaaagtgccaaagaaaaattacaccatttacaaaagactattcgtgcactaggaccaattaatagtgatgctattaatcagtatgaggaagtgcatgagcgtttgacttttttaacaagtcaaaagacagatctgacaaaagctaaaaatcttttgctagagactattaatagtatggatagcgaagtgaaggctcgtttcaaagtgacttttgaggcaattcaaaaaagttttaaagaaacctttactcagatgtttggtgggggttctgctgatttggttttaacggaaacagacctcttgtctgctggtatagagatttctgtgcagcctcctggtaagaaaattcaatctcttaacttgatgtcaggcggagaaaaagctttgtcagcactggctttattgtttgctattatacgtgttaaaacgattccgtttgtgattttagatgaggtagaagcggctcttgatgaagcaaatgttaagcgctttggggatttcctcaatcgctttgacaaagatagtcaatttattgtcgtgacccatcgtaaaggaacaatggctgcagcagatagtatttatggaattaccatgcaggaatcgggggtctctaaaattgtatctgtaaaattaaaagaagctcaagagatgaccaat

SEQ ID NO: 1164 - protein, 1179 aa, Streptococcus pyogenes
MFLKEIELEGFKSFADKTKIEFDKGVTAVVGPNGSGKSNITESLRWALGESSAKNLRGGKMPDVIFAGTQNRNPLNYAKVAVVLDNSDHFIKTAKKEIRVERHIYRNGDSDYLIDGRKVRLRDIHDLFMDTGLGRDSFSIISQGRVEEIFNSKPEERRAIFEEAAGVLKYKTRKKETQIKLNQTQDNLDRLEDIIYELDTQLAPLEKQAKVAKQFLELDANRKQLQLDILVKDIDIAQERQTKDTEALAALQQDLASYYAKRQSMEEDYQKFKQKKQVLSQESDQTQTTLLELTKLIADLEKQIELVKLESGQEAEKKAEAKKHLEQLQEQLDGFQAEEKQCTEQLLHIDQQLCDVKQQLNELSNALERFSSDPDQLMETLREEFVLLMQKEAALSNQLTALKAHLDKEKQARQHKAQEYQLLVTKLDQLNDESQKAQAHYKAQKEQVEMLLQNYQEGDKRVQELERDYQLNQERLFDLLDQKKGKEARKASLESIQKSHSQFYAGVRAVLQSQKKLGGIIGAVSEHLSFDSDYQTALEVALGANSQHIIVTDEAAAKRAIAYLKKNRQGRATFLPLTTIKARSLSEHYHRQLATCEGYLGTAESLIRYDDSLSAIIQNLLSSTAIFETIDQANIAARLLGYKVRIVTLDGTELRPGGSFSGGANRQSNTTFIKPELEQISEELTRLVEQLKITEKEVAALQSDLIAKKEELTQLKLAGDQARLAEQRAQMAYQQLQEKQEDSKALLAALDQSQTTHSDESLLAEQARIEEALTAIAKKKNALTCDIDDIKENKDLIRQKTQNIHQALSQARLQERDLLNEKKFEQANQSRLRTQLKQCQQNILKLESILNNNVSQDSIQRLPQWQKQLQDATEHKSGAQKRLVQLRFEIEDYEARLEETAEKITKESEKNDTFIRRQTKLETHLEQVANRLRAYAKSLSEDFQMTLADAKEVTNSIDHLESAKEKLHHLQKTIRALGPINSDAINQYEEVHERLTFLTSQKTDLTKAKNLLLETINSMDSEVKARFKVTFEAIQKSFKETFTQMFGGGSADLVLTETDLLSAGIEISVQPPGKKIQSLNLMSGGEKALSALALLFAIIRVKTIPFVILDEVEAALDEANVKRFGDFLNRFDKDSQFIVVTHRKGTMAAADSIYGITMQESGVSKIVSVKLKEAQEMTN

SEQ ID NO: 1165 - DNA, 726 bp, Streptococcus agalactiae
ttgtttaatattttatctatgattgaaatcaaggagaaaaaaatgaaagaattaagatcaaagctggaaaaagactatggtattgtttttgctaatcaagaattattagatacagcttttacccatacatcatacgcaaatgagcatcgcctcctaaacatttcacataatgaacgtttggaatttttaggagacgctgttctacaattacttatttcacagtatctttttacaaagtaccctcaaaaggcagaaggtgatttatcaaaattacgttcaatgattgttcgtgaggaaagtcttgcaggtttttcacgtctatgtggctttgatcactatattaaacttggaaaaggagaagaaaaatctggtggacgtaatcgtgacactattttaggagatttatttgaggcttttttaggagctttattattagacaaaggtgttgaagtggttcatgcctttgttaacaaggtaatgatccctcacgttgaaaaagggacctatgagcgtgttaaagattacaagacaagcttgcaagaattacttcaatctcatggggatgtaaaaatagattatcaagttactaatgaaagtggtccagcacatgcaaaggaatttgaggtgactgtatctgtcaaccaagaaaatttgagccaaggaattggacgatcaaagaaagctgctgaacaagacgctgccaaaaatgctttagcaacgttacaa

SEQ ID NO: 1166 - protein, 242 aa, Streptococcus agalactiae
MFNILSMIEIKEKKMKELRSKLEKDYGIVFANQELLDTAFTHTSYANEHRLLNISHNERLEFLGDAVLQLLISQYLFTKYPQKAEGDLSKLRSMIVREESLAGFSRLCGFDHYIKLGKGEEKSGGRNRDTILGDLFEAFLGALLLDKGVEVVHAFVNKVMIPHVEKGTYERVKDYKTSLQELLQSHGDVKIDYQVTNESGPAHAKEFEVTVSVNQENLSQGIGRSKKAAEQDAAKNALATLQ

SEQ ID NO: 1167 - DNA, 690 bp, Streptococcus pyogenes
atgaaacagcttgaagagttactctcaacatcttttgatattcaatttaatgatttgactttactagaaacagcttttacccacacctcttacgctaacgagcatcgtctcctaaacgtttcacataatgaacgcttggaatttttaggagacgctgttctacaattgattatttcagagtatttatttgcaaagtatcctaaaaagacagaaggagatatgtctaagttacgttccatgattgtacgtgaggaaagcttggcaggtttttcacgattttgttcttttgacgcttatatcaaactaggaaaaggtgaggaaaagtcaggtggtcgccgtcgtgatactattttaggagacttatttgaagcctttttaggtgctcttttattagataaggggattgatgcagtacgtcgcttcttgaaacaagtcatgattcctcaggtggaaaaagggaattttgaaagggttaaagactataaaacttgtcttcaagagtttttgcaaacaaaaggtgatgtggctattgattatcaagtcattagtgagaaaggacctgcccatgctaaacaatttgaggtatcgatagttgttaatggtgctgtccttagtaaaggtttaggtaagtctaaaaaattagcggagcaagatgctgctaaaaatgcccttgcccaacttagtgaggtt

SEQ ID NO: 1168 - protein, 230 aa, Streptococcus pyogenes
MKQLEELLSTSFDIQFNDLTLLETAFTHTSYANEHRLLNVSHNERLEFLGDAVLQLIISEYLFAKYPKKTEGDMSKLRSMIVREESLAGFSRFCSFDAYIKLGKGEEKSGGRRRDTILGDLFEAFLGALLLDKGIDAVRRFLKQVMIPQVEKGNFERVKDYKTCLQEFLQTKGDVAIDYQVISEKGPAHAKQFEVSIVVNGAVLSKGLGKSKKLAEQDAAKNALAQLSEV

SEQ ID NO: 1169 - DNA, 366 bp, Streptococcus agalactiae
ttgaaaaagattttttacattagtttaggatttattagtttagggataggcattgcaggtattgtcttgccggtagttccaacgactccattagtattgctttcagctttttgcttttcgagaagctctgaaaaatttgatatttggttgcgtcaaactaaagtttataaatactacgctgcagattttgttgaaagcagaagtattgccccagcgcgtaaaaagtcaatgatttggcaaatttatatcttgatgggaatttcaatctattttgctcctctaatgtggctcaaactgggattattgattggaactattgtaggaacttatgtgcttttttatgtagtacctgataaaattgatgaa

SEQ ID NO: 1170 - protein, 122 aa, Streptococcus agalactiae
MKKIFYISLGFISLGIGIAGIVLPVVPTTPLVLLSAFCFSRSSEKFDIWLRQTKVYKYYAADFVESRSIAPARKKSMIWQIYILMGISIYFAPLMWLKLGLLIGTIVGTYVLFYVVPDKIDE

SEQ ID NO: 1171 - DNA, 807 bp, Streptococcus agalactiae
atgtcagaaataggatttaaatatagtatcttagcttcaggttcaactggaaattgtttttatattgagacaccccaaaaacgtcttttaattgacgctggtttaacaggcaagaaagtgactagccttcttgcagaaattaatcgtaaaccagaagatttagatgctatactagttacccatgaacattctgaccacattaaaggtgttggcgtattggctaggaaatatcaccttgatatttatgccaatgagcagacgtggaaagttatggatgagcgtaacatgttaggcaaagttgatgttagtcaaaagcatgtttttggacgcggtaaaaccttaactttcggggatttagatattgagagctttggtgtaagtcatgatgctgtggatccccaattttaccgtatgatgaaagatgataagagctttgtgatgttgacagatacaggatatgttagcgaccgaatggcaggcttgattgagaatgcagatggttatttgatcgagtcaaatcacgacattgagattctacgttcgggttcttatccttggacacttaagcaacgtattttatcagataaaggacatttatctaatgaagatggttcagaaaccatgattcgcactataggtaaccgtactaaacacatctatttaggacacttgagtaaggaaaataatattaaggaacttgctcacatgactatggaaaacaatttaatgagagctgactttggtgtgggcacagatttttctgttcacgatacttcacctgattcagctaccccactgacgaggatt

SEQ ID NO: 1172 - protein, 269 aa, Streptococcus agalactiae
MSEIGFKYSILASGSTGNCFYIETPQKRLLIDAGLTGKKVTSLLAEINRKPEDLDAILVTHEHSDHIKGVGVLARKYHLDIYANEQTWKVMDERNMLGKVDVSQKHVFGRGKTLTFGDLDIESFGVSHDAVDPQFYRMMKDDKSFVMLTDTGYVSDRMAGLIENADGYLIESNHDIEILRSGSYPWTLKQRILSDKGHLSNEDGSETMIRTIGNRTKHIYLGHLSKENNIKELAHMTMENNLMRADFGVGTDFSVHDTSPDSATPLTRI

SEQ ID NO: 1173 - DNA, 807 bp, Streptococcus pyogenes
atgaatgagagtggttttaaatacagtattttagcatctgggtccacaggaaattgtttttatttagaaacacctaaaaaacgcttattgattgatgcagggcttactggtaagaaaattaccagtcttcttgctgaaattgaccgcaaacctgaggatttggatgctattttgattacccatgagcactctgaccatattaagggtgtaggcgttatggcccgcaaataccatttggatatctatgctaatgaaaaaacatggcagctgatggatgagtgcaatatgctaggtaagcttgatgcctcacaaaaacatattttccaaagggataaagttttgacctttggagatgttgatatcgaaagttttggagtcagccatgacgctattgatcctcaattttatcggattatgaaagataataagtcttttgtgatgttgacagatacaggatatgtcagtgataggatgacaggtattattgaaaatgcagatggctacttgattgaatccaatcatgatattgaaattttgagatcaggctcttatccttggagcttaaagcagcgtattttatctgatttaggacatttatcaaatgaagatggagcgggagccatgattagaagcctggggtacaataccaaaaaaatatacctaggtcatctgagtaaagaaaataacatcaaagagttagcgcatatgacgatggtcaatcaactggctatggcagatttagcagtaggtacagactttacggtccatgatacctctccagatactgcttgtccattaactgatatt

SEQ ID NO: 1174 - protein, 269 aa, Streptococcus pyogenes
MNESGFKYSILASGSTGNCFYLETPKKRLLIDAGLTGKKITSLLAEIDRKPEDLDAILITHEHSDHIKGVGVMARKYHLDIYANEKTWQLMDECNMLGKLDASQKHIFQRDKVLTFGDVDIESFGVSHDAIDPQFYRIMKDNKSFVMLTDTGYVSDRMTGIIENADGYLIESNHDIEILRSGSYPWSLKQRILSDLGHLSNEDGAGAMIRSLGYNTKKIYLGHLSKENNIKELAHMTMVNQLAMADLAVGTDFTVHDTSPDTACPLTDI

SEQ ID NO: 1175 - DNA, 1347 bp, Streptococcus agalactiae
atgaataatagtgctgcaaatattaggtcgtttgagctagccttactttttttactagtttttgttgctgtttattttgtttatctagcggttagagattttaaaatgtctaaaaatatccggcttttgaattggaaagtcagagatttgatagcaggaaattattcagatagtattctaattcaaggtgatgcagatttggtagaattaggtgaaagtctaaatgatttatctgatgtcttccgaatggcacatgataacttagaacaagaaaagaatcgcttagcaagtatcttaacttatatgactgacggtgtgctggctacagatcgttcaggaaaaatcgttatgattaatgagacagcccaacagcagttcaatctagcatatgatgaagctttatcaatgaatattgttgatatgttagggtcgggaagtccatattcgttccaagatttagtctctaaaacgccagaggtagttcttaatagacgtgatgaaaacggtgaatttgttaccttacggattcgatttgctttgaaccgtcgtgaaagtggttttatttccggtttagttgcagtgtcacacgatgctactgagcaagagaaagaagagcgtgaaagaagactttttgtatctaatgtttctcatgaacttcgtacacctttgacatctgtaaaatcttatttagaagctttagatgagggagcgcttaatgaagaagttgctccaagcttcattaaggtatctctagatgaaacaaatcgtatgatgcgtatgatatcagatttattaagtttatcgcgcattgataatgaagtaacgcatttagatgttgaaatgacgaattttacagctttcatgacctcaattttgaatcgatttgatcagattagaaatcaaaaaacagtcacaggaaaagtttatgaaattgtcagagattatcctcttaagtcaatttgggtggaaattgatacagataagatgactcaagtgattgataacattttaaataatgcagtcaagtattcaccagatggtggtaagatcacagttaatctacgcacaactaaaacgcagatgattttatcaatatcagaccaaggcttaggtattcccaaaaaagatttacctctcatctttgatcgtttttatcgtgttgataaggcgagaagtcgtaaacagggtgggactggacttggtttgtcaattgcaaaagaaattgttaagcagcataagggatttatttgggctaagagtgagtatggtaaagggtctacttttacaatagtcttgccttatgataaagatgctgtaacttatgaagaatgggaggacgttgaagat

SEQ ID NO: 1176 - protein, 449 aa, Streptococcus agalactiae
MNNSAANIRSFELALLFLLVFVAVYFVYLAVRDFKMSKNIRLLNWKVRDLIAGNYSDSILIQGDADLVELGESLNDLSDVFRMAHDNLEQEKNRLASILTYMTDGVLATDRSGKIVMINETAQQQFNLAYDEALSMNIVDMLGSGSPYSFQDLVSKTPEVVLNRRDENGEFVTLRIRFALNRRESGFISGLVAVSHDATEQEKEERERRLFVSNVSHELRTPLTSVKSYLEALDEGALNEEVAPSFIKVSLDETNRMMRMISDLLSLSRIDNEVTHLDVEMTNFTAFMTSILNRFDQIRNQKTVTGKVYEIVRDYPLKSIWVEIDTDKMTQVIDNILNNAVKYSPDGGKITVNLRTTKTQMILSISDQGLGIPKKDLPLIFDRFYRVDKARSRKQGGTGLGLSIAKEIVKQHKGFIWAKSEYGKGSTFTIVLPYDKDAVTYEEWEDVED

SEQ ID NO: 1177 - DNA, 1350 bp, Streptococcus pyogenes
atgactagagatatcattggaaacttatccacatttgaattagcgatccttatcttacttgtttttgttgctttttactttatccatcttgcggtgcgtgattaccgaaatgcacgtattattcggatgatgagccataaaatccgagacttgattaatggtcgctatactgatataatcgacgaaaaagcagacattgagttaatggagctttcagaccagttaaatgacctgtcagatgtttttcgcttgacgcatgaaaatcttgcccaagaaaaaaatcgcttggcaagtattttggcttatatgtcagatggtgtacttgctacagaccggtctggtaaaatcatcatgattaacgagacagctcgcaagcaattaaatttaagtaaagaagaggcactaaagaaaaacattacagatttgttagaaggtgatacttcatatacctaccgtgatttggtatccaaaacaccagtggtaactgttaatagccgaaatgatatgggtgagtttgtctcattacgcttgcgctttgcgttgaataggagagagagtggttttatttcgggcttggttgtggtgctccatgacaccacagaacaggaaaaagaagaacgtgaacgccgtctttttgtctctaatgtaagtcatgaattaaggacccctttaacttcggttaaatcctacttggaggctcttgatgaaggtgcacttaaagaagatattgctccaagtttcataaaagtttctcttgatgaaactaatcggatgatgcgtatgatttcagatcttttaaacctgtctcggattgataatcaagtaacccaattagcagtagagatgactaattttactgcttttataacttctattttaaacagatttgatttggttaaaaatcagcatacaggtacaggaaaagtctatgaaattgtaagagattaccctattacctctgtctggattgaaattgataatgataaaatgacacaggttatcgagaatattttgaacaatgccattaagtattctccagatggtggaaaaattacagtccgtatgaaaacaacagatacccaattaattatttccatttcagaccaaggactaggtatccctaaaacagatttgcctcttatttttgatcggttctatcgtgtagacaaggcaagaagtcgtgcccaaggagggaccggtctaggccttgccattgctaaagaaatcatcaagcagcaccatggctttatctgggctaagagtgactatggtaaaggatcgacctttactattgtcttgccttatgaaaaagatgcagccatctatgaagaatgggaggaagatgtagac

SEQ ID NO: 1178 - protein, 450 aa, Streptococcus pyogenes
MTRDIIGNLSTFELAILILLVFVAFYFIHLAVRDYRNARIIRMMSHKIRDLINGRYTDIIDEKADIELMELSDQLNDLSDVFRLTHENLAQEKNRLASILAYMSDGVLATDRSGKIIMINETARKQLNLSKEEALKKNITDLLEGDTSYTYRDLVSKTPVVTVNSRNDMGEFVSLRLRFALNRRESGFISGLVVVLHDTTEQEKEERERRLFVSNVSHELRTPLTSVKSYLEALDEGALKEDIAPSFIKVSLDETNRMMRMISDLLNLSRIDNQVTQLAVEMTNFTAFITSILNRFDLVKNQHTGTGKVYEIVRDYPITSVWIEIDNDKMTQVIENILNNAIKYSPDGGKITVRMKTTDTQLIISISDQGLGIPKTDLPLIFDRFYRVDKARSRAQGGTGLGLAIAKEIIKQHHGFIWAKSDYGKGSTFTIVLPYEKDAAIYEEWEEDVD

SEQ ID NO: 1179 - DNA, 708 bp, Streptococcus agalactiae
atgaaaaaaatacttatcgttgatgatgaaaaaccaatttcagatattatcaaatttaatttaaccaaagaaggatatgagacggcgacagctttcgatggccgtgaagctttagtacaatatgcagaatttcaaccagatttaatcattttggatttaatgcttcctgaactagatggtttagaagtggctaaggaagttcgtaaaaccagccatattcctattattatgctttctgcaaaagacagtgagtttgacaaagtcattggtttagaaatcggtgcagatgattatgttactaaacctttttcaaatcgtgaacttttggcacgggtcaaagcacatttacgacgtactgaaaatattgaaacagctgtagcagaagaaagtgctcaaaatgcttcttcagatattactattggtgagttgcaaattttaccagatgcctttattgctaagaaacgtggcgaagaaattgaattaacgcaccgagaatttgaattacttcaccatttagcgacacatatcggacaagtcatgacacgcgaacatttattggaaacagtttggggatatgattattttggagatgtccgtacagttgatgtgacggtgagacgtttacgtgaaaagattgaagatactcctggtcgtccagaatatattttgactcgacgtggtgtaggttattacatgaagtcttatgaa

SEQ ID NO: 1180 - protein, 236 aa, Streptococcus agalactiae
MKKILIVDDEKPISDIIKFNLTKEGYETATAFDGREALVQYAEFQPDLIILDLMLPELDGLEVAKEVRKTSHIPIIMLSAKDSEFDKVIGLEIGADDYVTKPFSNRELLARVKAHLRRTENIETAVAEESAQNASSDITIGELQILPDAFIAKKRGEEIELTHREFELLHHLATHIGQVMTREHLLETVWGYDYFGDVRTVDVTVRRLREKIEDTPGRPEYILTRRGVGYYMKSYE

SEQ ID NO: 1181 - DNA, 708 bp, Streptococcus pyogenes
atgaaaaaaatacttattgtggatgatgaaaaaccgatttctgacattattaagtttaatttgacaaaagaaggttatgacattgttacagcttttgatggacgcgaagcggtaacaatttttgaagaagaaaagccagatttaattattcttgatttgatgctccctgagttggacggtcttgaagtagccaaggaaattcgtaaaaccagtcatgtcccgattattatgttgtcggctaaagatagtgagtttgacaaggttattggacttgaaattggggctgatgattacgtgaccaagcccttttctaatcgggaattgctggcgcgtgtcaaggctcatctgcgtcgtaccgaaactattgaaacggctgttgcagaagaaaatgcttcttcaggtacacaggaactgaccattggtaatttacagattttaccagatgcgtttgttgctaaaaaacatggtcaagaggtagagttgacccatcgtgaatttgaactattgcatcatctagctaaccatatggggcaggtgatgacacgagaacacttattggaaattgtttggggatatgattattttggcgatgtgcgcacggttgatgtgactgttcgtcgcctccgtgaaaaaattgaagacacaccaagtcgtcctgagtatattttaacaagacgtggtgttgggtactacatgaaatcttatgac

SEQ ID NO: 1182 - protein, 236 aa, Streptococcus pyogenes
MKKILIVDDEKPISDIIKFNLTKEGYDIVTAFDGREAVTIFEEEKPDLIILDLMLPELDGLEVAKEIRKTSHVPIIMLSAKDSEFDKVIGLEIGADDYVTKPFSNRELLARVKAHLRRTETIETAVAEENASSGTQELTIGNLQILPDAFVAKKHGQEVELTHREFELLHHLANHMGQVMTREHLLEIVWGYDYFGDVRTVDVTVRRLREKIEDTPSRPEYILTRRGVGYYMKSYD

SEQ ID NO: 1183 - DNA, 753 bp, Streptococcus agalactiae
atgtcactcatatcttataagaatgttaacaagtattatggagattatcacgcccttcgtcagattaatttggaaatagagccagggcaagtggttgttctattaggaccttctggatcaggtaaatcaacacttattagaacaatgaacgctctcgaatctattgacgatggtagtttggtcgtgaatggacatgaattagcaaatatttcatctaaagaattggtcaacctccgtaaagaagttggtatggtttttcaacattttaacctttatcctcacaaaaccgtgttagaaaatattacattagctcctattaaagtattaaaacaatctaaaaaagaagctatggaaattgctgaaaaatatttaaaatttgtcaatatgtgggaaagaaaagattcctacccatctatgctatcaggtggtcaaaaacaaagaattgctattgctagagggcttgccatgcatccaaaactcctcctctttgatgagcctacctctgcccttgatcccgaaaccatcggagacgttctttcagtgatgcaaaaattggcaaatgacggaatgaatatggtcgttgtaactcatgaaatgggatttgcacgagaagttgctgatcgtattatttttatggctgatggggaaattttagtggatactacagatgtacaagacttttttgataatcccagagaaccacgtgctaaacaatttttaagcaacattatcaaccataccagtactgacctt

SEQ ID NO: 1184 - protein, 251 aa, Streptococcus agalactiae
MSLISYKNVNKYYGDYHALRQINLEIEPGQVVVLLGPSGSGKSTLIRTMNALESIDDGSLVVNGHELANISSKELVNLRKEVGMVFQHFNLYPHKTVLENITLAPIKVLKQSKKEAMEIAEKYLKFVNMWERKDSYPSMLSGGQKQRIAIARGLAMHPKLLLFDEPTSALDPETIGDVLSVMQKLANDGMNMVVVTHEMGFAREVADRIIFMADGEILVDTTDVQDFFDNPREPRAKQFLSNIINHTSTDL

SEQ ID NO: 1185 - DNA, 735 bp, Streptococcus pyogenes
ttgatgactgaggctattatttcaattaaagacttgcacaagtattatgggcacaatgaagtgcttaagggaattgatttagacattatgccaggagaggttgtggtgattattggcccttctggttctggaaaatcgaccttacttcgaaccatgaatcttttggaagtaccaactaagggacagattaggtttgaggggattgatattaccgataagaagaatgatattttcagcatgcgtgaaaaaatgggaatggttttccagcagtttaacctctttcccaatatgactattttagaaaatatcactttatcgccaatcaaaactaagggaatggctaaagcagaggctgacaaaacagccttgagcttgttggacaaagttggattatcagaaaaagccaaggcttatcctgctagtctttctggtgggcaacagcagcggattgcgattgcgcgtggactggctatggatccagatgttttactctttgatgaaccaacttcagctctagacccagaaatggtgggtgaggtcttggctgtcatgcaagatttggctaaatctgggatgactatggttattgtgactcatgaaatgggctttgctaaagaagtcgcagaccgtgtgatgtttatggatggcggcgttattgtggaagaaggaagtcctaaccaactttttgatctgactaaagaagaacgtacaaaagattttttgagtagagtatta

SEQ ID NO: 1186 - protein, 245 aa, Streptococcus pyogenes
LMTEAIISIKDLHKYYGHNEVLKGIDLDIMPGEVVVIIGPSGSGKSTLLRTMNLLEVPTKGQIRFEGIDITDKKNDIFSMREKMGMVFQQFNLFPNMTILENITLSPIKTKGMAKAEADKTALSLLDKVGLSEKAKAYPASLSGGQQQRIAIARGLAMDPDVLLFDEPTSALDPEMVGEVLAVMQDLAKSGMTMVIVTHEMGFAKEVADRVMFMDGGVIVEEGSPNQLFDLTKEERTKDFLSRVL

SEQ ID NO: 1187 - DNA, 798 bp, Streptococcus agalactiae
atgctgagacgaaaaagattaacgttctatctattatcctgtatttttattttcctgttattttatcctaactcaacgtcagctaatcaattatcagaaatcaaaaaatcgggcgtccttaaagttggagtcaaacaagatgtgcctaactttggttattataatgctgagacgaatcaatacgaaggaatggaaattgatattgccaaaaaaattgccaaatccttaggtgtcaaaccagtttttgtaccgacaaccgcacaaaccagagagcctctgatggacaatgggcaaattgatattctaatcgcaacatacactatcacgcccgaaagaaaagctaactataatatttctaaagcttattatcacgatgaaattggatttttggtgcgtaaaaatagtcatatcaaaactataaaagaattggatggtaaacacattggtgtggctcaaggtgccactacaaaagtcaatttagaaaaatatgctaaagaacacaagctaaaatttagctatgctcaattagggagtttcccagaattagcgatatcgctgtacgctaatcgtattgatgctttttcagttgataaatctatccttagcggctaccttagccctcatacaaccatattaaaagaagggttcaatacgcaagaatacggtattgcaaccagtaaacaggacaaagtcttgattccctacgttaataagttactggtatcatgggaaaaagatggtagtttaaaacacatttatcaaaaatttaagcttaaacccgctaaagtaaaaaaagaa

SEQ ID NO: 1188 - protein, 266 aa, Streptococcus agalactiae
MLRRKRLTFYLLSCIFIFLLFYPNSTSANQLSEIKKSGVLKVGVKQDVPNFGYYNAETNQYEGMEIDIAKKIAKSLGVKPVFVPTTAQTREPLMDNGQIDILIATYTITPERKANYNISKAYYHDEIGFLVRKNSHIKTIKELDGKHIGVAQGATTKVNLEKYAKEHKLKFSYAQLGSFPELAISLYANRIDAFSVDKSILSGYLSPHTTILKEGFNTQEYGIATSKQDKVLIPYVNKLLVSWEKDGSLKHIYQKFKLKPAKVKKE

SEQ ID NO: 1189 - DNA, 897 bp, Streptococcus pyogenes
atgttatactattcttatcttaataaaggagttactatgaagaaatcagttacattactgtctatcggacttgccagccttttattggcagcatgtgcgccacatcaatctcaaaaatcaagttgggacactatcaaagaaaaaggggtgttaaaagtagctaccccaggaacctatcagccaacttctttttacaacgataataatgagttagtaggttacgaagtagatatggtcaaagaaatcggtaaacgacttaacattaaagtcaagtttgttgaaacaggatttgaccaagcctttacctcagttgatagtggtcgagtggatatttctttgaacaactttgacattaccccaaaacgtcagaaaaaatacaatatctctacgccttataaatacggggtaggaggcatgattgtccgtgctgatggcagctcaaacatagctaaaaaagatcttagcgactggaaaggaaaaaaagcagccggcgcttctggaacagaatacatgaaagtagcgcaaaaacagggagctgaactggtgacctacgataatgttacaggagatgtttatctaaacgatgtggctaacggtcgaacagatttcatcccaaatgattacccagctcaaaaattatttgtggattacatgttatctcaaaatccaaatctaaatgtcaaaatgagcgatgttcagtacaacccaaccgaacaaggaattgttatgaacaaaaaagacgatagcctcaagaaaaaaatagatgctgttattaaagacatgataaaagatggtagcttgaagaaaatctctgaaacctactatgctggtcaagatctgacaaaaccttttggcaaagacaaaaaaattcccgtcattgatacgaaagacgttaac

SEQ ID NO: 1190 - protein, 299 aa, Streptococcus pyogenes
MLYYSYLNKGVTMKKSVTLLSIGLASLLLAACAPHQSQKSSWDTIKEKGVLKVATPGTYQPTSFYNDNNELVGYEVDMVKEIGKRLNIKVKFVETGFDQAFTSVDSGRVDISLNNFDITPKRQKKYNISTPYKYGVGGMIVRADGSSNIAKKDLSDWKGKKAAGASGTEYMKVAQKQGAELVTYDNVTGDVYLNDVANGRTDFIPNDYPAQKLFVDYMLSQNPNLNVKMSDVQYNPTEQGIVMNKKDDSLKKKIDAVIKDMIKDGSLKKISETYYAGQDLTKPFGKDKKIPVIDTKDVN

SEQ ID NO: 1191 - DNA, 693 bp, Streptococcus agalactiae
atgactttattaaacatcagtccttttgccatttcaaggtggggcgctttctttaaccatttcgacctattctttaaaggcttcttatatactctaggtatttcgtttggtgcactcctacttgctctgatattaggaattctctctggtggtttatcaacttctaaaagtaaagttggtaagttgatatcacgtatctatgttgaagtttttcaaaacacacctcttttagttcaaatggtttttgtctactatggactagcaatcattagtaatggacatgttatgattagtgcttttttcaccgccgttttgtgcgttggactataccatggtgcctatatttctgaagttattcgctcaggaattgaagctgtccctaaaggacaaacagaggctgctttagctcaaggattcacagctaatcaaaccatgcaacttatcattttgcctcaagctgtcagaacaattttaccaccaatgaccaaccaagttgttaatctaatcaagaatacctctaccgtagcaatcatttctggagccgatatcatgtttgtagctaaggcctgggcttatgatacgactaattatatcccagcttttgcaggagctgctatcttctattttgttatttgtttcccactagcaagctgggcaagaaaacaagaagaattaaataagaaaacttattct

SEQ ID NO: 1192 - protein, 231 aa, Streptococcus agalactiae
MTLLNISPFAISRWGAFFNHFDLFFKGFLYTLGISFGALLLALILGILSGGLSTSKSKVGKLISRIYVEVFQNTPLLVQMVFVYYGLAIISNGHVMISAFFTAVLCVGLYHGAYISEVIRSGIEAVPKGQTEAALAQGFTANQTMQLIILPQAVRTILPPMTNQVVNLIKNTSTVAIISGADIMFVAKAWAYDTTNYIPAFAGAAIFYFVICFPLASWARKQEELNKKTYS

SEQ ID NO: 1193 - DNA, 1584 bp, Streptococcus pyogenes
ttgaaacaggagacctatatgaaaaagctaatccttagctgtttggtcgccttggcccttctgtttggaggaatgagccgggctcaagcaaaccaatatttaagagtcggaatggaagcagcctatgctccttttaactggactcaagatgacgcttcaaacggggctgttccaattgaaggaactagccaatacgccaacggttacgatgtccaagtcgctaaaaaagtcgctaaagctatgaacaaagaacttttagtcgttaagacctcttggaccggtttaattccagcattaacttctggaaaaatcgatatgatcgctgctggtatgagtcctaccaaagagcgtagaaacgaaattagcttctcaaacagctcctacactagccaacctgttctagtcgtaactgccaatggcaaatatgctgatgcaacaagcctcaaggatttttctggagctaaagtaactgcccagcaaggcgtttggcatgtcaatctcttaactcaactaaaaggtgctaagttacaaacaccaatgggagatttctctcaaatgcgacaagcccttacttcgggtgttatcgatgcctatatttctgaacgacctgaagccatgactgctgaagctgctgatagccgtttgaaaatgatcactcttaaaaaagggtttgctgttgctgaatcagatgctgctatcgctgtcggaatgaaaaaaaatgacgatcgtatggcaactgtcaaccaagtgcttgaaggattttctcaaacagatcgtatggccctgatggatgatatggttaccaaacaacccgtggaaaagaaagccgaagatgctaaagcatcatttctaggccaaatgtgggctatttttaaaggtaactggaagcaattcttacgtggaactggaatgacccttctgatttccatggtcggaaccattacaggtctctttattggattattaatcggtattttccgtacagctcctaaagctaagcataaagtagctgccttgggacaaaaactctttggttggttactcactatttatatcgaaatcttccgtgggacacctatgattgttcaatctatggttatctactacggaacagcgcaagcctttggtatttcgatcgaccgtaccctagcggctatttttatcgtatctatcaatacgggggcctatatgagtgaaattgttcgcgggggtattttcgctgtcgacaaaggtcaattcaaagcagcaactgctcttggctttactcacggacaaaccatgcgtaaaatcgtgctaccacaagttgttcgcaacattttaccagcaacaggtaatgagtttgtcatcaatatcaaagatacttctgtcttgaatgttatctctgttgtggaactttacttctcaggtaataccgtagccacacaaacctaccaatatttccaaacctttacgattatcgccattatctactttgttcttaccttcacggtgacacgtatccttcgttatattgaacgccgtttcgatgccgatacttacaccactggagcaaaccaaatgcagattgcggaggtctcaaatgtc

SEQ ID NO: 1194 - protein, 528 aa, Streptococcus pyogenes
LKQETYMKKLILSCLVALALLFGGMSRAQANQYLRVGMEAAYAPFNWTQDDASNGAVPIEGTSQYANGYDVQVAKKVAKAMNKELLVVKTSWTGLIPALTSGKIDMIAAGMSPTKERRNEISFSNSSYTSQPVLVVTANGKYADATSLKDFSGAKVTAQQGVWHVNLLTQLKGAKLQTPMGDFSQMRQALTSGVIDAYISERPEAMTAEAADSRLKMITLKKGFAVAESDAAIAVGMKKNDDRMATVNQVLEGFSQTDRMALMDDMVTKQPVEKKAEDAKASFLGQMWAIFKGNWKQFLRGTGMTLLISMVGTITGLFIGLLIGIFRTAPKAKHKVAALGQKLFGWLLTIYIEIFRGTPMIVQSMVIYYGTAQAFGISIDRTLAAIFIVSINTGAYMSEIVRGGIFAVDKGQFKAATALGFTHGQTMRKIVLPQVVRNILPATGNEFVINIKDTSVLNVISVVELYFSGNTVATQTYQYFQTFTIIAIIYFVLTFTVTRILRYIERRFDADTYTTGANQMQIAEVSNV

SEQ ID NO: 1195 - DNA, 648 bp, Streptococcus agalactiae
atgtcatcagtcttaacactaacaaagatactatttctccttcaagggttcggtttaaccttatatatatcttttatttccattttactatcaatgttttttggaactctattagcaattatgagaaatagcaaaaatcctatctggaaattaatagctagtatctatatcgaatttgtcagaaatgttccaaatctactttggatttttatcattttcttagtattccagatgaaatcagtcagcgctggtattacttcgtttacaatttttacctccgctgctttagcagaaattattcggggaggtttaaatggagtcgataaaggacaaacagaagctggactttctcaaggattcacttatttgcaagttttcattattattattttcccacaagcttttcgcaaaatgttgccagccattatttctcagtttgtaacggttataaaagatacatcactactttattctgttatagctattcaagaaatcttcggaaaaagtcaaattctaatgggaagatatttcgaagctggacaagtttttacactctacgctattataactgctgtctatttcattacaaactttatcatctcaagtttttcacgtaaactttcaaaacgttgggagcaagctactgag

SEQ ID NO: 1196 - protein, 216 aa, Streptococcus agalactiae
MSSVLTLTKILFLLQGFGLTLYISFISILLSMFFGTLLAIMRNSKNPIWKLIASIYIEFVRNVPNLLWIFIIFLVFQMKSVSAGITSFTIFTSAALAEIIRGGLNGVDKGQTEAGLSQGFTYLQVFIIIIFPQAFRKMLPAIISQFVTVIKDTSLLYSVIAIQEIFGKSQILMGRYFEAGQVFTLYAIITAVYFITNFIISSFSRKLSKRWEQATE

SEQ ID NO: 1197 - DNA, 2172 bp, Streptococcus pyogenes
atgacgcacaaaataaaagtattgctgcttgcgataatgtctatttttttgacatgcaatattgcaagtgctgaaactattgctattgtttcagatacagcttatgccccatttgaatttaaagactcagatcaaatttacaaaggaattgacgttgatattattaatgaagtagccaaacgtcaatcttgggatttcagtatgagtttcccgggttttgatgcagctgtaaatgctgttcaatctggtcaagcgagtgctctaatggccggtacaaccattacgaatgctcgtaagaaagtctttcatttctcagagccatattacgataccaaaattgtcattgcgacacgtaaagccaatgccatcaaaaaatacagtgacttaaaaggaaaaacggtcggtgttaaaaatggaacagcggctcaagcctttttgaataactataaaaaaaagtatgattatactgttaaaacatttgacacaggtgatcttatgtataatagtttatctgctggttctattgccgctgttatggatgatgaggcggttatccaatacgcaatcagccaaaaccaagatattgctattaacatgaaaggagagcccattggaagctttgggtttgctgtcaaaaagggaagcggatatgattatctagttaatgatttcaatacagctcttaaagctatgaaagctgatggtacctaccaagctatcatgaccaagtggttaggcacagatgataaagctaccaccagtcaggcaacgggaaatccatctgccaaagctacacctacaaaggacagttataaaattgtctctgattcgtcttttgcaccgtttgaatttcaaaatggtaagggcaaatacgttggtattgacatagaattaatcaaagctattgctaaacaacaaggtttcaaaattgaaatcgctaatccaggtttcgatgctgccttaaatgctgtgcaatctagccaagcagatggggtcattgctggtgcaactattactgacgctcgtaaagctatctttgatttttctgatccttattatacttctaatatcattttagctgttaaagctggaaaaaacatcaagaactatgaagacttagacagaaaaacagtcggtgctaaaaacggcacttcatcttactcttggttaaaagaaaacgctcctaaatatggttataatgtcaaggcatttgatgatggttctagcatgtatgatagcttaaattcaggttctgtagatgctatcatggatgatgaggcggttcttaaatacgctatctctcaaggtcgtcgctttgaaacacctcttgagggcatttctactggtgaagttggttttgctgtcaagaaaggaactaatccagaattaatcgaaatgttcaacaatggcttagctgctctcaaaaaatctggtcagtatgatgacattatagataaataccttgactctaagaaagctgcaactccttctgaaaaaggtgctgatgagtctactatttcaggcctattatcaaataactacaaacaactattggcaggacttggaaccacgctcagtttaacccttatttcatttgctattgctataattatcgggatcatctttgggatgatggccgtgtcaccaactaaatcacttcgacttatttcaacggtctttgtggacgttgttcgagggattcctttgatgattgtggctgccttcattttctggggagtaccaaaccttatcgagagtatgaccggccaccagtcaccgattaatgatttcttagctgctacaattgcactgtcacttaatggcggagcctatattgctgaaattgttcgcggtggtatcgaagctgttccagcagggcaaatggaagctagtcgaagtcttggtttgtcttacggaaccacgatgagaaaagtaattctcccacaagctgtgaaactaatgttacctaactttatcaatcagtttgttatttcattgaaggatacaacaatcgtctcagcaattggtttagtggaactcttccaaacaggtaaaatcattattgctagaaattaccagtcgttccgtatgtatgctattttagcaattatttaccttatcatgattatactcttaacaagacttgcaaaacgtttagaaaagaggcttaac

SEQ ID NO: 1198 - protein, 724 aa, Streptococcus pyogenes
MTHKIKVLLLAIMSIFLTCNIASAETIAIVSDTAYAPFEFKDSDQIYKGIDVDIINEVAKRQSWDFSMSFPGFDAAVNAVQSGQASALMAGTTITNARKKVFHFSEPYYDTKIVIATRKANAIKKYSDLKGKTVGVKNGTAAQAFLNNYKKKYDYTVKTFDTGDLMYNSLSAGSIAAVMDDEAVIQYAISQNQDIAINMKGEPIGSFGFAVKKGSGYDYLVNDFNTALKAMKADGTYQAIMTKWLGTDDKATTSQATGNPSAKATPTKDSYKIVSDSSFAPFEFQNGKGKYVGIDIELIKAIAKQQGFKIEIANPGFDAALNAVQSSQADGVIAGATITDARKAIFDFSDPYYTSNIILAVKAGKNIKNYEDLDRKTVGAKNGTSSYSWLKENAPKYGYNVKAFDDGSSMYDSLNSGSVDAIMDDEAVLKYAISQGRRFETPLEGISTGEVGFAVKKGTNPELIEMFNNGLAALKKSGQYDDIIDKYLDSKKAATPSEKGADESTISGLLSNNYKQLLAGLGTTLSLTLISFAIAIIIGIIFGMMAVSPTKSLRLISTVFVDVVRGIPLMIVAAFIFWGVPNLIESMTGHQSPINDFLAATIALSLNGGAYIAEIVRGGIEAVPAGQMEASRSLGLSYGTTMRKVILPQAVKLMLPNFINQFVISLKDTTIVSAIGLVELFQTGKIIIARNYQSFRMYAILAIIYLIMIILLTRLAKRLEKRLN

SEQ ID NO: 1199 - DNA, 564 bp, Streptococcus agalactiae
atgattaagaaaaataaagtttttttaggagttcttttagtccttgttgttatccttggaggtggtgtattattttaccaatcacaattccaaaagacaactaatcaagcgttagctattgcttataaagatgctaaagtggctaagaaggatgtcatacatcaaaaaattgacaaagaatttgaaaactttagagggagctacgaaattgaattcaataccaaaagcgcagaatacagctatcatgtagatgttaagactggacaaatccttgagcgggacatggataataatggcttttcaaaatcgacttctcagtcaagttcatcgtcaagtcaaaaatctcataaaataagtcaagaagaagccaaaaagattgcatttaaagatgctaatatagaggaatcagaagtcagtaatcttaagatcaaagaagaaattgaaaatggaaaatcagtttatgatattgactttgtggacctgaaaaataaaaatgaagttgattatcaaattgatgcagaaactggaaaaatcattgaacgttctagagatcatatgaatgat

SEQ ID NO: 1200 - protein, 188 aa, Streptococcus agalactiae
MIKKNKVFLGVLLVLVVILGGGVLFYQSQFQKTTNQALAIAYKDAKVAKKDVIHQKIDKEFENFRGSYEIEFNTKSAEYSYHVDVKTGQILERDMDNNGFSKSTSQSSSSSSQKSHKISQEEAKKIAFKDANIEESEVSNLKIKEEIENGKSVYDIDFVDLKNKNEVDYQIDAETGKIIERSRDHMND

SEQ ID NO: 1201 - DNA, 450 bp, Streptococcus pyogenes
atgatacttcaaagtgaccacacgtttttatattgtatagtcaaaatattgggaaaaaccatgtgtttgagttataatagaagaaatcaaagaaagaaggtagtacttatgacaattaaaaaattctctctactagccatagccagcctctctttactcagtcttgcagcctgtgatatggatgataaagacgatcatatggataatcaaccaaagacaagtcaaactagcaagaaagttaaactctcagaagacaaagccaaatcaattgcgttaaaagatgcttctgttacggaagctgatgctcaaatgctatcagttacacaagataatgaagatggcaaagccgtgtatgaaatcgagtttcaaaacaaagatcaagaatacagctataccattgacgccaactcaggggatattgtggaaaaatcttctgaaccaatcaatgac

SEQ ID NO: 1202 - protein, 150 aa, Streptococcus pyogenes
MILQSDHTFLYCIVKILGKTMCLSYNRRNQRKKVVLMTIKKFSLLAIASLSLLSLAACDMDDKDDHMDNQPKTSQTSKKVKLSEDKAKSIALKDASVTEADAQMLSVTQDNEDGKAVYEIEFQNKDQEYSYTIDANSGDIVEKSSEPIND

SEQ ID NO: 1203 - DNA, 1032 bp, Streptococcus agalactiae
ttggaggggagagatatggcaaagaccgctcttaatattccttttacagttgaagggatagaaaattattatcaaaatataaaaatgatactgtctttagcagataaatggagcatacctaaagatgatctattactttttttaaagggcctcaaggctattgatgatataaaagttggctctcctatttttaagtatttttggacttctttaagtttacaagcacccctcaaagctttagaattcgtgttagagcaggctaaaatgccaactgaattgtcaggagaattatcagaaacacaatacttggtcgcacagttttcagatgagttagctccacatgatgatttctggatagccttatcacaagttatttatgattcttttcctgggaatagtctagccgaagatactgtattaaataggaaactccatcaattccgctatttgatttctagtcagcaagcacagtatgttcgacgatactttaaagatgttggtatgactgatagagatgctttagtaaactacctatcatgtttaagagaaccagatagtatcgcctactatgaatctgctcgcttgcataataaacgtcggagaaatggtgaaatctttggtttcccagatgatgagccggttattaatagtaagcttttaatttcattccatacggaatttattattgatgacaaaggaaactttttaaacgagattgacgcagaagtaataacacgtaatggtattatcaatggagctagctttaattatgcttttaaaaataatacacgtcataaagaattagatgttgatcctgtaaagttagacccaaaatttcgaaacgatatgactagaggttatagatcgccaaatctatctagaaggaaatggtttttctttaaagaagaggattacgattgtagttatttcaataaaaaaggatattacgcatttggaaggcgtagtgctaagcaatcggttgataaacaagtcaaatacttgaagaaggctgtgcagaaaatgcgcatcaac

SEQ ID NO: 1204 - protein, 344 aa, Streptococcus agalactiae
MEGRDMAKTALNIPFTVEGIENYYQNIKMILSLADKWSIPKDDLLLFLKGLKAIDDIKVGSPIFKYFWTSLSLQAPLKALEFVLEQAKMPTELSGELSETQYLVAQFSDELAPHDDFWIALSQVIYDSFPGNSLAEDTVLNRKLHQFRYLISSQQAQYVRRYFKDVGMTDRDALVNYLSCLREPDSIAYYESARLHNKRRRNGEIFGFPDDEPVINSKLLISFHTEFIIDDKGNFLNEIDAEVITRNGIINGASFNYAFKNNTRHKELDVDPVKLDPKFRNDMTRGYRSPNLSRRKWFFFKEEDYDCSYFNKKGYYAFGRRSAKQSVDKQVKYLKKAVQKMRIN

SEQ ID NO: 1205 - DNA, 1032 bp, Streptococcus pyogenes
atgtgttataatatggtcaaaaaagatgaggagaaggccatgaaacaagctatcttagatcgctatcaggccttgaaatgctatcaaaacgcaggtttatcaaaccaagcatttcgtgctatagctaaagagcctatcattgataatcgacttggttctccaactttctgggtaatatggcctattgaaaaagaaaaccaatcagctaagcagttactaacgtttcttcttgatttggtagagatgccatttgagctaagtggtcagttgcatgaaactcaaacgctactcacccgattccatccatctctattgccagatcatatgttttggaaagagttggctagcttagttgatcaagcttttcctggcaaaacactaagccaagcaggtgagcttgaaaagcgtttgcatcaatttcgttatgtcatctctagtcaacaagctcaatctatcagaaaccattataaaatgattgagatgacagacgcccaagctctggccctttttttgaggtctaaaaaagggccttgtttgtggcggcaagcaccagattataccttgatggattctgccaggttacataataaactaagatttgaagataataaagtcatttttccaagtcaagaagtttcctataatataaaagtacttctttggtttcataccgaatttactctagatagcacaggcttttttcttaatgaagttgatgcagaagtagtgaccgaaaaaggaattgtcaatggtgcatcttttaactatggcacagatggtcctagacattgggatttagatgttgatccgattagccatcacgatcctcagtttagaagagacacccttaaaggatttcgatcgccaaaaagagtatttcgccagtggtttagagctcaaaaagatgactttatgttctcttattttaatgccaaaggactttttgcttaccacaacaagagtagttttgccagagtcaaaaaatcagctaagcaattcaaacgtcaaattcatcctataaagggttggttt

SEQ ID NO: 1206 - protein, 344 aa, Streptococcus pyogenes
MCYNMVKKDEEKAMKQAILDRYQALKCYQNAGLSNQAFRAIAKEPIIDNRLGSPTFWVIWPIEKENQSAKQLLTFLLDLVEMPFELSGQLHETQTLLTRFHPSLLPDHMFWKELASLVDQAFPGKTLSQAGELEKRLHQFRYVISSQQAQSIRNHYKMIEMTDAQALALFLRSKKGPCLWRQAPDYTLMDSARLHNKLRFEDNKVIFPSQEVSYNIKVLLWFHTEFTLDSTGFFLNEVDAEVVTEKGIVNGASFNYGTDGPRHWDLDVDPISHHDPQFRRDTLKGFRSPKRVFRQWFRAQKDDFMFSYFNAKGLFAYHNKSSFARVKKSAKQFKRQIHPIKGWF

SEQ ID NO: 1207 - DNA, 702 bp, Streptococcus agalactiae
ttgcgaacagtattagtagtgcaaggtgatgacgaaacaatagagttattaaggtcgtatttagagggagctctttataaggttgtgatggctagtgatggtgaggaggctttttctttatttcagcaacatcagattgatttagcaatcatagatattacgctacctaaaatagatggatatgagttgacgcgactcattcgtcaagatagtcagattcctattattatgctagcagctaagacaacagatatggacagaatattaggattgaatattggagcagatgattttatcacgaaaccgtttaattctttggaggttttagctcgaattaattcgcaactgcgtcgttactatgaattcaatagtcttgccaaacctaaaaatcaatttataaagataggggaattggaattagatgaggaacatgttgaactaactaaaaatggtaaacatatcaagttgactgctacagaatttaagattcttcatatcttaatgtcatcaccaggaaggatttatactaaaacacaactctatgagaagattaatggtaggtatttagaaggtgatgagacaacgattatggtgcatatttctaatatccgtgacaaaatcgaagatgatagtaaatatcctaaatatataaaaacacttagaggagtaggatataaaatcgaaaaaccgcagtatcttgtt

SEQ ID NO: 1208 - protein, 234 aa, Streptococcus agalactiae
MRTVLVVQGDDETIELLRSYLEGALYKVVMASDGEEAFSLFQQHQIDLAIIDITLPKIDGYELTRLIRQDSQIPIIMLAAKTTDMDRILGLNIGADDFITKPFNSLEVLARINSQLRRYYEFNSLAKPKNQFIKIGELELDEEHVELTKNGKHIKLTATEFKILHILMSSPGRIYTKTQLYEKINGRYLEGDETTIMVHISNIRDKIEDDSKYPKYIKTLRGVGYKIEKPQYLV

SEQ ID NO: 1209 - DNA, 1941 bp, Streptococcus agalactiae
atgattaaaatcactttcccagatggtgcaattcgtgaatttgaatctggcatcacaacatttgaaattgcacaatcaatttctaactctttagctaaaaaagctttagctggtaaatttaatggtcaacttattgatacaacacgtgctatcgaagaagatggtagtattgagattgtaacacctgaccacgaagatgctttaggagttcttcgtcactcagcagcgcatttatttgctcaagctgcaaaacgcctttttccagacttatgtttaggtgtaggtccagctattcaagatggtttttactacgatactgataataaatcaggtcaaatttcaaatgatgatcttcctcgtattgaagaagaaatgaaaaaaattgttaaggaaaatcacccttgtattcgtgaagaaatcagtaaagaagaagcgttagaactttttaaagatgacccttataaagttgaattaattagtgaacatgctgaagatggtttaactgtttatcgtcaaggtgaatttgtagacctttgtcgtggacctcatgtcccatcaacaggacgtattcaagtctttcatcttctaaatgtcgctggtgcttactggcgtggtaacagtgataatgctatgatgcagcgtgtctatggtactgcttggtttgataaaaaagatttgaaagcatatcttaaacgccgtgaagaagctaaggaacgtgaccatcgcaaattaggtaaagaacttgatttatttatggttaatcctgaagtaggtcaaggattgccattctggttgccaaatggagcaactattcgccgcgaattggaacgttacattgttgataaggagattgcttcaggttatcaacacgtttacacacctccgatggcatctgttgaattttacaagacttctgggcactgggaccactatcgtgaagatatgttcccaacaatggatatgggagatggagaggaattcgttcttcgtccaatgaactgcccacaccatattgaagtttataaacatcatgttcattcatatcgtgaattgccaattcgtatcgctgaacttggtatgatgcaccgttatgaaaaatcaggggccctcacaggattgcaacgtgtacgcgaaatgacactcaacgatgcccatattttcgttacacctgagcaaattaaagatgaatttcttaaagctcttaatcttatagcagaaatttatgaagattttaacttaacagattaccgtttccgcttatcttatcgtgacccagaagataaacataagtattatgataacgatgagatgtgggaaaatgcacaagctatgctaaaagaggctatggatgattttggattagattattttgaagcagaaggcgaagcagccttttacggtcctaaattggatatccaggtgaaaactgctcttggtaatgaagaaacactatctactatccaactagatttccttcttccagaacgctttgatctcaaatacatcggtgcagatggtgaagaacatcgtccaattatgattcaccgcggtggtatttcaacaatggagcgctttacagctattttaattgaaacttacaaaggtgcctttccaacttggcttgctccacaacaagtttctgttattccaatttcaaatgaagcccacattgattatgcttgggaagtggctcgtgtccttaaagatcgtggtattcgtgctgaagtagatgaccgtaacgaaaagatgcaatataagattcgtgcggctcaaacccaaaaaattccatatcaattgattgttggtgataaggaaatggaagaaaaagccgtaaatgtgcgccgctatggaagcaaagcgactgaaacaaaatctatagaggaatttgtagaaagtattttagctgatattgcaagaaaatctagacctgacgaagttaaa

SEQ ID NO: 1210 - protein, 647 aa, Streptococcus agalactiae
MIKITFPDGAIREFESGITTFEIAQSISNSLAKKALAGKFNGQLIDTTRAIEEDGSIEIVTPDHEDALGVLRHSAAHLFAQAAKRLFPDLCLGVGPAIQDGFYYDTDNKSGQISNDDLPRIEEEMKKIVKENHPCIREEISKEEALELFKDDPYKVELISEHAEDGLTVYRQGEFVDLCRGPHVPSTGRIQVFHLLNVAGAYWRGNSDNAMMQRVYGTAWFDKKDLKAYLKRREEAKERDHRKLGKELDLFMVNPEVGQGLPFWLPNGATIRRELERYIVDKEIASGYQHVYTPPMASVEFYKTSGHWDHYREDMFPTMDMGDGEEFVLRPMNCPHHIEVYKHHVHSYRELPIRIAELGMMHRYEKSGALTGLQRVREMTLNDAHIFVTPEQIKDEFLKALNLIAEIYEDFNLTDYRFRLSYRDPEDKHKYYDNDEMWENAQAMLKEAMDDFGLDYFEAEGEAAFYGPKLDIQVKTALGNEETLSTIQLDFLLPERFDLKYIGADGEEHRPIMIHRGGISTMERFTAILIETYKGAFPTWLAPQQVSVIPISNEAHIDYAWEVARVLKDRGIRAEVDDRNEKMQYKIRAAQTQKIPYQLIVGDKEMEEKAVNVRRYGSKATETKSIEEFVESILADIARKSRPDEVK

SEQ ID NO: 1211 - DNA, 1941 bp, Streptococcus pyogenes
atgattaagattacttttccagatggcgccgtgcgtgaatttgaatctggcgtaacaacgtttgacattgctgagtccatcagcaaatcattggctaaaaaagctttagctggtaagttcaatgatcaactcattgacaccactcgtgccattgaagaagatggcagtattgaaatcgtgacacctgaccacaaagatgcttatgaggtgcttcgccactctgcagcccatttatttgcccaagctgcaaaacgcttgttcccaaatcttcatttgggtgtgggccctgccattgcagaaggcttttactatgatacagataatgctgaaggccaaatttcaaacgaagatttgccacgtatcgaagctgaaatgcaaaaaatcgtgacagaaaattacccatgtatccgtgaagaagtgaccaaagaagaagctttggaattgttcaaagatgatccttacaaggtagaattgattaatgagcatgctggtgctggcttgacggtttaccgtcaaggtgaatttgtggatctttgccgtggccctcatgtgccatcaacaggccgtatccaagtcttccacttgctcaatgtggcgggtgcttactggcgtggtaacagcgacaataacatgatgcaacgtatctatggaacagcttggtttgataaaaaagacctcaaagcttacttgactcgtctagaagaagctaaagaacgtgatcaccgtaagcttggtaaagagcttgacttgttcatgattagccaagaagttggccaaggcttgccattttggttaccagatggagcgactattcgtcgtacacttgagcgctacatcacagataaagaattagcatcaggctaccaacacgtttacacaccaccacttgcttctgtagaattgtacaagacatcaggtcattgggatcattatcaagaagatatgttccctgtaatggatatgggagatggtgaggagtttgttcttcgtccaatgaactgcccacaccacattcaagtgtataaaaatcatgtgcgttcttatcgtgaattgcctattcgtattgccgagcttggcatgatgcaccgttacgaaaaatcaggtgccctatcaggacttcaacgggtacgtgaaatgaccttgaatgatggtcacattttcgtaacaccagagcaaatccaggaagaatttcaacgtgcccttcaattaatcattgatgtttatgctgacttcaacttgactgattatcgttttcgtttgtcataccgagaccctaacgatactcataaatattatgacaatgatgagatgtgggaaaatgctcaaagtatgcttaaagctgcacttgatgagatgggtgtagattactttgaagcagaaggtgaagcagctttttatgggcctaagcttgatattcaggtgaaaacagctcttggtaacgaagaaaccctatcaaccattcagttggacttcttgttgccagaacgctttgatctcaaatacattggtgctgatggcgaagaacaccgcccagtcatgattcaccgtggtgttatctcaactatggaacgtttcactgctatccttattgaaacttacaagggtgctttcccaacttggttggcacctcaccaagtaaccgtgattccaatttcaaatgaagcccacattgactatgcttgggaagtagcaaaaacccttcgtgaccgtggtgttcgtgcagatgtcgatgaccgcaatgaaaaaatgcagtacaagattcgtgcgtctcaaaccagcaaaattccttaccaattaattgttggggacaaagaaatggaagacaaatcagtcaatgttcgccgctatggtagcaagacgactcacaccgaatctgtggaagaatttgtggaaaacatcttggcagacattgctcgcaagtcacgtccagatgcacaagct

SEQ ID NO: 1212 - protein, 647 aa, Streptococcus pyogenes
MIKITFPDGAVREFESGVTTFDIAESISKSLAKKALAGKFNDQLIDTTRAIEEDGSIEIVTPDHKDAYEVLRHSAAHLFAQAAKRLFPNLHLGVGPAIAEGFYYDTDNAEGQISNEDLPRIEAEMQKIVTENYPCIREEVTKEEALELFKDDPYKVELINEHAGAGLTVYRQGEFVDLCRGPHVPSTGRIQVFHLLNVAGAYWRGNSDNNMMQRIYGTAWFDKKDLKAYLTRLEEAKERDHRKLGKELDLFMISQEVGQGLPFWLPDGATIRRTLERYITDKELASGYQHVYTPPLASVELYKTSGHWDHYQEDMFPVMDMGDGEEFVLRPMNCPHHIQVYKNHVRSYRELPIRIAELGMMHRYEKSGALSGLQRVREMTLNDGHIFVTPEQIQEEFQRALQLIIDVYADFNLTDYRFRLSYRDPNDTHKYYDNDEMWENAQSMLKAALDEMGVDYFEAEGEAAFYGPKLDIQVKTALGNEETLSTIQLDFLLPERFDLKYIGADGEEHRPVMIHRGVISTMERFTAILIETYKGAFPTWLAPHQVTVIPISNEAHIDYAWEVAKTLRDRGVRADVDDRNEKMQYKIRASQTSKIPYQLIVGDKEMEDKSVNVRRYGSKTTHTESVEEFVENILADIARKSRPDAQA

SEQ ID NO: 1213 - DNA, 1332 bp, Streptococcus agalactiae
atgcgtataggtctatttacagatacatacttcccccaagtttcgggagtttcaacaagtatccgcactttaaaggaagggttggagaaggaaggacacgaagtttatattttcacaactaccgaccgtaatgtcaaacgttttgaagaccctacaattattcgtttaccaagtgtcccttttatttcttttacggatcgtcgagtagtttatagaggtttaatttctgcttataggatagctaaagactacgaacttgatattattcatactcaaacagaattcagcttagggcttttaggaaaattagttgcaaaagctttaagaatacctgttgtgcatacttatcatactcaatatgaggattacgttggttatatcgcaaaaggcaaattgattaagccaagtatggtcaaatatatcatgcgtacctacctaagtgatttggatggtgtcatatgtccttctcgaattgttctcaatcttctagatggttacggtgtcaaaattccaaaacaagttattccgacaggtattcctgttgagaactatcgtcgagaggatatctctgaagaaacaatcaagaatctacgaacggagcttggacttgcggataatgatacaatgctattgagtttatcacgggtatcttttgaaaaaaatattcaagcaatcttgatgcatttatcagctgtcgttgatgaaaatcctcacgtaaaattagtgatagttggagatggtccttatctttcagatctaaaagaacttgttcactctttagaacttgaaaattcagttatttttacaggtatggttgagcatagccaagtggctatctactataaagcatgtgatttctttattagtgcttcaacaagtgaaacgcaaggattaacttacattgagagtctggcgagtggacgtccaatcattgcgcaaagtaatccttatctagatgatgttatttcagataaaatgtttggaactctgtacaagaaggaaagtgatttggcagatgctatcctagatgcaatagcagagacacccaaaatgactcaagaagcttatgaacagaaattatatgagatttctgctgagaatttcagcaagtctgtatatgctttttacctagactttctgatttcacaaaaagctagtgtgaaagaaaaagtctctctgacaataggaaataaggatagccattctactcttcgttttgtcagaaaagcggtatatttacctaagaaagtttttacctttacaggaagagcctctaaaaaagtggtaaaagcacctaaacgtcgtatttcatctattcgagattttttagat

SEQ ID NO: 1214 - protein, 444 aa, Streptococcus agalactiae
MRIGLFTDTYFPQVSGVSTSIRTLKEGLEKEGHEVYIFTTTDRNVKRFEDPTIIRLPSVPFISFTDRRVVYRGLISAYRIAKDYELDIIHTQTEFSLGLLGKLVAKALRIPVVHTYHTQYEDYVGYIAKGKLIKPSMVKYIMRTYLSDLDGVICPSRIVLNLLDGYGVKIPKQVIPTGIPVENYRREDISEETIKNLRTELGLADNDTMLLSLSRVSFEKNIQAILMHLSAVVDENPHVKLVIVGDGPYLSDLKELVHSLELENSVIFTGMVEHSQVAIYYKACDFFISASTSETQGLTYIESLASGRPIIAQSNPYLDDVISDKMFGTLYKKESDLADAILDAIAETPKMTQEAYEQKLYEISAENFSKSVYAFYLDFLISQKASVKEKVSLTIGNKDSHSTLRFVRKAVYLPKKVFTFTGRASKKVVKAPKRRISSIRDFLD

SEQ ID NO: 1215 - DNA, 1332 bp, Streptococcus pyogenes
atgcgtataggtctattcacagatacctattttccacaagtttcaggagtcgctactagtattcgtacgttaaaagaagagctagaaaaagaaggtcacgaagtttatattttcaccactactgatagagatgtcaaacgctttgaagacccgaccattattcgactgccaagtgttccttttgtgtcatttacggatagacgtgtggtttatcgtggcctcatttcgtcatacaaaattgcaaaacactataatcttgatattattcatacgcaaactgagtttagcttaggcttattagggaaaatgataggcaaagctttgcgaattcctgttgtccatacttaccatacccaatatgaggactacgtgagttatattgccaacggaaaaatcattcgaccaagtatggtcaaacctcttcttaggggctatttgaaggatttggatggggttatctgcccaagtaggattgtcctcaatcttctagaaggttacgaagttactatccctaagcgggttatcccaacaggcattcctttggaaaaatatattcgtgatgacatcacagcagaagaagtaaccaacttaaaagcagaattgggcattgctggtgatgaaaccatgttattgagtttgtcacggatttcttatgaaaaaaatattcaagctatcatcaatcagatgccagctattttggctgaaaatgccaagataaagcttattattgtaggaaatggcccctatttgcaagatttgaaacacttggcgatgcagttagaggttgacaaacacgtgacctttacaggcatggtgcctcatgataaggttgctctgtactataaggcttgtgatttctttatctcagcatcaactagtgagactcagggcttgacctatattgaaagtttggctagtggcactcctattattgctcatggcaatccttatttagatgatgtggtgactgataaaatgtttggcactctttattacgctgaaacagatttaactgatgctattattgatgccatactaaaaacaccagttatggataaacggttattagcaaaaaaacgttatgaaatctcagcacagcactttggaaaatctatttacacgttctatttagatacgttaattgctagaaatagcaaagaagctcaaaagctgagtctttatcttaatcattctggtaaaagtagttctctaaaattagtgcaaggtgctattcacttgcctaaacgtgctgctaaggtcacagctatcacctcagtaaaagtagtcaaggctcctatcaagctggtccatgctatcaaagattttctggat

SEQ ID NO: 1216 - protein, 444 aa, Streptococcus pyogenes
MRIGLFTDTYFPQVSGVATSIRTLKEELEKEGHEVYIFTTTDRDVKRFEDPTIIRLPSVPFVSFTDRRVVYRGLISSYKIAKHYNLDIIHTQTEFSLGLLGKMIGKALRIPVVHTYHTQYEDYVSYIANGKIIRPSMVKPLLRGYLKDLDGVICPSRIVLNLLEGYEVTIPKRVIPTGIPLEKYIRDDITAEEVTNLKAELGIAGDETMLLSLSRISYEKNIQAIINQMPAILAENAKIKLIIVGNGPYLQDLKHLAMQLEVDKHVTFTGMVPHDKVALYYKACDFFISASTSETQGLTYIESLASGTPIIAHGNPYLDDVVTDKMFGTLYYAETDLTDAIIDAILKTPVMDKRLLAKKRYEISAQHFGKSIYTFYLDTLIARNSKEAQKLSLYLNHSGKSSSLKLVQGAIHLPKRAAKVTAITSVKVVKAPIKLVHAIKDFLD

SEQ ID NO: 1217 - DNA, 996 bp, Streptococcus agalactiae
atgaaagttttactgtatttagaggctgaagaatacttgaaaaagtcaggtatcggtcgtgctatcaaacatcaagagaaagctcttcaaattgctgggatagattataccactaatcctacagatgactttgaccttgttcatatgaatacctatggtattagaagttggcttttgatgagtaaagctaaaaaaactgggaaaaaagtaattatgcatggccattccactgaagaggactttagaaattcttttattggctcaaatttagtatccccgctttttaaatggtacctttgccgtttttatcaaaaagcagatgccattataaccccaactgattattctaaacaactaataaaagcatatggcatcaagaaaccaatttttgttttatctaacgggattgatctaagtcgctatcagaggtcagaaaagaaagaatctgcatttcgtcactattttcacttaagtaaggatgataaagttgttatgggggccggtctttatttcatgcgtaagggaattgaccaatttgttgaagtagctgcaaaaatgcctgatattcgttttatttggtttggagaaacaaataaatgggttattcctcgaaaggttaggcaaatcgttaccaagcaacatccctcaaatgttacttttgctggttacataaaaggtgatgtttatgaaggtgccatgagtgctagcgatgctttcttctttccgagtcgtgaagagacagaagggatagtagttttagaggctttagctagtcatcagcatgtggttttaagagatatccctgtgtatcacggttgggtgaccgaagacagtgttgaattagcgactgatgttgatggttttgttgaaaagttggataaagtcttatctggtaagagtgataagattaaagaaggttatcatgtggctgagagtcgaagtatcgaacgaattgcccatgaattggcaagtgtttatcaaaaagtaatggagttg

SEQ ID NO: 1218 - protein, 332 aa, Streptococcus agalactiae
MKVLLYLEAEEYLKKSGIGRAIKHQEKALQIAGIDYTTNPTDDFDLVHMNTYGIRSWLLMSKAKKTGKKVIMHGHSTEEDFRNSFIGSNLVSPLFKWYLCRFYQKADAIITPTDYSKQLIKAYGIKKPIFVLSNGIDLSRYQRSEKKESAFRHYFHLSKDDKVVMGAGLYFMRKGIDQFVEVAAKMPDIRFIWFGETNKWVIPRKVRQIVTKQHPSNVTFAGYIKGDVYEGAMSASDAFFFPSREETEGIVVLEALASHQHVVLRDIPVYHGWVTEDSVELATDVDGFVEKLDKVLSGKSDKIKEGYHVAESRSIERIAHELASVYQKVMEL

SEQ ID NO: 1219 - DNA, 996 bp, Streptococcus pyogenes
atgaaagtcttattgtatttagaagcagaaaattatctaagaaaatcaggaattggtcgagcgattaagcatcaggctaaagccttgtcacttgttggtcaacattttacgactaatccaagagaaacttatgatttggttcatctcaatacctatggtttaaaaagttggctgctgatgataaaagcacaaaaagctggtaagaaggttatcatgcatgggcattctacagaagaagattttagaaattcttttattttttcaaatctattatctccttggtttaaaaaatacctttgtcacttttacaataaggcagatgctatcattacccctaccctatattctaagtctttgattgagagttatggagtgaagtcacctatttttgcagtgtcaaatgggattgatttggagcagtacggagcagatcctaaaaaggaagcagcttttcgtcgctactttgacattaaagagggtgaaaaagtggttatgggagcaggattattttttctgaggaaaggaattgatgactttgtcaaagttgcccaagctatgccagatgttcgttttatctggtttggcgagaccaacaaatgggtcattcctgctcaagttcgccaaatggtcaatggtaaccacccgaaaaatcttattttcccaggatacattaaaggggatgtttatgaaggtgccatgactggtgcagatgcctttttctttccaagtcgtgaagaaacagaaggcattgttgtcttagaagccttggccagtcgccagcaccttgttttacgtgatataccagtttactacggatgggttgatcaaagtagtgcggaattagcaaccgatataccaggttttatagaagctctgaaaaaagtcttttctggtgccagcaacaaagttgaagctggttacaaggttgcccagagtcgtcgcctagaaacggttggccatgccttagtagatgtctataaaaaagtaatggagtta

SEQ ID NO: 1220 - protein, 332 aa, Streptococcus pyogenes
MKVLLYLEAENYLRKSGIGRAIKHQAKALSLVGQHFTTNPRETYDLVHLNTYGLKSWLLMIKAQKAGKKVIMHGHSTEEDFRNSFIFSNLLSPWFKKYLCHFYNKADAIITPTLYSKSLIESYGVKSPIFAVSNGIDLEQYGADPKKEAAFRRYFDIKEGEKVVMGAGLFFLRKGIDDFVKVAQAMPDVRFIWFGETNKWVIPAQVRQMVNGNHPKNLIFPGYIKGDVYEGAMTGADAFFFPSREETEGIVVLEALASRQHLVLRDIPVYYGWVDQSSAELATDIPGFIEALKKVFSGASNKVEAGYKVAQSRRLETVGHALVDVYKKVMEL

SEQ ID NO: 1221 - DNA, 1464 bp, Streptococcus agalactiae
atgacaaatgaattgataatgcaagcttttgagtggtatttacctagtgatgggaatcactggaagaaattagaggagtctatatcagaccttaaaaaacttggaattagtaaaatctggttaccaccagcatttaagggaactagcagtgatgatgtaggatatggtgtttatgatctctttgatttaggagaatttgaccagaatggaacaattagaacaaaatatggtaggaaagaagagtatctaaagcttattaagtcgttaaaggcaaatggcattaaaccgtttgcagatatcgttcttaaccataaagccaatggtgatcataaagaaaaatttcaagtcatcaaagtcaatcctgaaaatcgtcaagaagcattaagtgaaccctatgagattgaaggatggacgggatttgatttcccaggtagacagggtgagtacaatgattttaaatggcactggtaccactttactggtttagattacgatgctaaaaataatgaaacagacatctttatgattgtaggcgataataaaggttgggcagacgatgatttgattgatgatgaaaatggtaatttcgattatctcatgtacaatgacattgattttaagcatcctgaagttataaaaaacttacaagattgggctaagtggtttattgaaactacaggcattgaaggttttcgtttggatgctgtgaaacatatcgattcttactttattcaaactttcattaatgatattcgtacaaaaataaaacccgatttagaggtctttggcgaatattggaaatctgaccaaacatcaatgaaggactatttagaggcaacacaatttcaattttctcttgttgatgttaccttacatatgaatttttttgatgccagtcaccaaaaccgtgattttgatatgcgaacaatttttgatgatagtcttgttattgataatcctgagtatgctgttacattcgtagaaaatcatgatacgcaaagtggacaagctctagaaagtagagtggaagattggtttaaacctttagcttatggcttgatacttttacgccaacaagggactccatgtcttttttatggtgattactatggcattcaaggagaatttggtcaaccatcctttaaagaggttattgataaaatggctgagctacgccaaaactatgtatttggcaaacaagtcgattattttacgcattcaaattgtattggttggacttgtcttggggatgaggaacataattcttgtttagctgtggtcctaacaaatggtgatcagggatggaaacatatggaagtaggggaaatttatgcaggcaaaacgtttgttgattatttaggtaattgtgaacaagaggttgttataggagatgatggttggggtgattttttagttgaatctgcgtctatctcggcttgggttcctaaaatagaggaagctaac

SEQ ID NO: 1222 - protein, 488 aa, Streptococcus agalactiae
MTNELIMQAFEWYLPSDGNHWKKLEESISDLKKLGISKIWLPPAFKGTSSDDVGYGVYDLFDLGEFDQNGTIRTKYGRKEEYLKLIKSLKANGIKPFADIVLNHKANGDHKEKFQVIKVNPENRQEALSEPYEIEGWTGFDFPGRQGEYNDFKWHWYHFTGLDYDAKNNETDIFMIVGDNKGWADDDLIDDENGNFDYLMYNDIDFKHPEVIKNLQDWAKWFIETTGIEGFRLDAVKHIDSYFIQTFINDIRTKIKPDLEVFGEYWKSDQTSMKDYLEATQFQFSLVDVTLHMNFFDASHQNRDFDMRTIFDDSLVIDNPEYAVTFVENHDTQSGQALESRVEDWFKPLAYGLILLRQQGTPCLFYGDYYGIQGEFGQPSFKEVIDKMAELRQNYVFGKQVDYFTHSNCIGWTCLGDEEHNSCLAVVLTNGDQGWKHMEVGEIYAGKTFVDYLGNCEQEVVIGDDGWGDFLVESASISAWVPKIEEAN

SEQ ID NO: 1223 - DNA, 2133 bp, Streptococcus pyogenes
atgagagaattacatatcaaaacttataagttattaacgaaaagtgctgttttacttggcttaatttcatttccactaactgtttctgctgccgataatgcttctgtcaccaacaaagcagatttttcaacagatacgatttatcagattgtaacagatcgttttaacgatggtaatacctctaataatggtaagactgatgtttttgataaaaatgaccttaaaaaataccatggaggtgattggcaaggaatcatcgccaagattaaggatggttacctgacagatatggggatttctgccatttggatttcttctcctgttgaaaatatcgacagtattgatccttctaatggaagtgctgcatatcatgggtattgggctaaggacttctttaaaacaaaccagcattttggcactgaagcagactttcaacaactagtcaaagtagctcatcaacaccatattaaggtagttattgattttgctcctaatcatacgtctacagccgaaaaagaaggcacaactttcaaagaagatggcgctttatataaaaacggtaaattagttggtaaattttcagatgataaagacaagatttttaatcatgaatcttggaccgattttagtacttatgaaaattctatttatcattcaatgtacggactagctgatttaaataacattaatccgaaagttgaccagtacatgaaagaagctattgataaatggttagacctgggtgttgatggtatccgagttgacgctgttaaacatatgtcacaaggttggcaaaaaaattggttgagtcatatctatgaaaaacataatgtctttgttttcggggaatggttctcgggacataccgacgatgattatgatatgacgacatttgctaacaatagtgggatggggcttttagattttagatttgccaatgctattagacagttgtatacaggtttttcaacgtttaccatgcgagatttttacaaggttcttgaaaatagagatcaggtgactaatgaagtgacagaccaggtgacctttattgataatcatgatatggaacgcttcgcaacaaaagtggctaataatcaaactgctgttaatcaagcctatgctttgcttttaacatctagaggtgtgcctaatatttattatggtacagagcagtatgcaacaggtgataaagatcctaataatcgtggtgatatgccaagttttaataaagagtcacaagcctataaagtgattagtaagctagctcctttaagaaaacaaaatcaagctttagcttatggaacaactgaacaacgttggattagtgatcatgttttggtatttgagcgtaaatttggtaatcatgtcgcactagtggctattaatagagatcaaacgaatggttatacaattactaatgctaaaacagccttgccccaaaatagctacaaggacaaattagaaggtcttcttggcggtcaagaattaatagttggagcagatggcactattagtagctttgaacttggagcggggcaagtcgctgtatggacttatgaaggagaggacaagacaccacaacttggagatgtcgatgcttcagtgggtattgctggaaataagattactatttcaggtcaaggttttggtaattctaaaggtcaagtgacttttggagaaatctctgctgagatcctttcttggtcagatacccttatcaccttaaaagtaccgacggttccagcaaattattataacatttcagtgacaactgccgataagcaaaccagcaatagttaccaagcctttgaagtattgactgataaacaaattcctgttcgtttactcatcaatgattttaagacagtaccaggggaacaactatatctcatgggtgatgtttttgagatgggggcaaatgacgctaagaatgctgttggtcctctatttaataacactcagaccattgccaagtacccaaactggttctttgatactcatctaccaatcaataaagaaatagcagtcaaacttgttaaaaaagatagtattgggaatgttttatggacaagtcctgagacttatagtataaagacaggtcatgaagcacaaaccattactataaaaaaa

SEQ ID NO: 1224 - protein, 711 aa, Streptococcus pyogenes
MRELHIKTYKLLTKSAVLLGLISFPLTVSAADNASVTNKADFSTDTIYQIVTDRFNDGNTSNNGKTDVFDKNDLKKYHGGDWQGIIAKIKDGYLTDMGISAIWISSPVENIDSIDPSNGSAAYHGYWAKDFFKTNQHFGTEADFQQLVKVAHQHHIKVVIDFAPNHTSTAEKEGTTFKEDGALYKNGKLVGKFSDDKDKIFNHESWTDFSTYENSIYHSMYGLADLNNINPKVDQYMKEAIDKWLDLGVDGIRVDAVKHMSQGWQKNWLSHIYEKHNVFVFGEWFSGHTDDDYDMTTFANNSGMGLLDFRFANAIRQLYTGFSTFTMRDFYKVLENRDQVTNEVTDQVTFIDNHDMERFATKVANNQTAVNQAYALLLTSRGVPNIYYGTEQYATGDKDPNNRGDMPSFNKESQAYKVISKLAPLRKQNQALAYGTTEQRWISDHVLVFERKFGNHVALVAINRDQTNGYTITNAKTALPQNSYKDKLEGLLGGQELIVGADGTISSFELGAGQVAVWTYEGEDKTPQLGDVDASVGIAGNKITISGQGFGNSKGQVTFGEISAEILSWSDTLITLKVPTVPANYYNISVTTADKQTSNSYQAFEVLTDKQIPVRLLINDFKTVPGEQLYLMGDVFEMGANDAKNAVGPLFNNTQTIAKYPNWFFDTHLPINKEIAVKLVKKDSIGNVLWTSPETYSIKTGHEAQTITIKK

SEQ ID NO: 1225 - DNA, 1002 bp, Streptococcus agalactiae
atgaatacagatgatacgattacgatttatgatgttgcccgtgaagcaggtgtttcgatggcaactgttagtcgtgtggtaaatggaaataaaaatgtcaaggaaaatacacgtaagaaagtccttgaagttattgatcgtcttgactatcgtccaaatgctgtggcgcgtggtttagcaagtaaaaaaacgacaactgttggtgttgtcattcctaatatcgcaaatagctacttttcaattttagcgcgtggtattgatgatattgcagcaatgtacaaatataacattgtccttgcttcaagtgatgaagacgatgataaagaggttaatgttgttaatactttgtttgctaagcaagtagacggtattatttttatgggacaccacttaactgaaaagattcgtgcagagttctctcgttcacgcacaccgattgttttagcaggtactgtggaccttgagcatcaattaccaagtgttaatatcgattacaaagcagcagcagttgatgttattgatattttagctggcaatcataaagacattgcttttgtatcaggaccacttattgacgatattaatggcaaggttcgtttggcaggatacaaagaaggtctcaagaaaaatggcttaaactttaaagaggggttggtttttgaagccaactaccgttatgctgaaggctttgcattagctcaacgcgtgattaatgctggagcaacagcagcatatgttgctgaggatgagttagcggcaggtttgttaaatggtctttttgaggcaggtaaacgtgttcctgaagattttgaaattatcacaagcaatgactcgccaatcgcacaatatacacgtcctaacttaacttctatcagtcaaccggtctatgatttgggtgctgttagcatgcgtatgctaacaaaaattatgcacaaagaagagttggaagaaaaagaaatagtgcttaatcacgggattgttaaacgtggcacaacaaataat

SEQ ID NO: 1226 - protein, 334 aa, Streptococcus agalactiae
MNTDDTITIYDVAREAGVSMATVSRVVNGNKNVKENTRKKVLEVIDRLDYRPNAVARGLASKKTTTVGVVIPNIANSYFSILARGIDDIAAMYKYNIVLASSDEDDDKEVNVVNTLFAKQVDGIIFMGHHLTEKIRAEFSRSRTPIVLAGTVDLEHQLPSVNIDYKAAAVDVIDILAGNHKDIAFVSGPLIDDINGKVRLAGYKEGLKKNGLNFKEGLVFEANYRYAEGFALAQRVINAGATAAYVAEDELAAGLLNGLFEAGKRVPEDFEIITSNDSPIAQYTRPNLTSISQPVYDLGAVSMRMLTKIMHKEELEEKEIVLNHGIVKRGTTNN

SEQ ID NO: 1227 - DNA, 999 bp, Streptococcus pyogenes
atgaatacagatgatccccttacaatttatgatgttgcccgtgaagctggtgtttcaatggcaaccgttagtcgtgttgttaatggcaataaaaatgttaaggaaaatacacgtaagaaagttttagaagttattgatcgccttgactatcgtcccaatgctgtcgcgcgtggtctcgccagcaaaaagacaacaaccgttggcgttgtgattccaaatattgcaaatagttatttttctatcttagctaagggtattgacgatatcgccgctatgtacaaatataatattgtgcttgcctccagtgatgaagatgatgacaaggaggttaatgttgtcaataccctttttgccaagcaagtggatggtattatttttatggggcatcacttgacagaaaaaatccgggccgagttttcacgctctcgtactccagttgttttggcaggaactgtagatcttgatcatcaattaccaagcgtcaacattgactatagagctgcggtgtcaaacgttgttgatattttagctgaaaatcataagtgtatcgcttttgtgtcaggaccactcattgatgatatcaatggtaaagtgcgcttagcaggttacaaagaagggttgaagcacaataagcttgacttcaaagaaggccttgtttttgaagcgaactattcttataaagaaggatttgaattggcgcagcgcgtcattaactcaggagcaacagcggcttatgtggctgaagatgaattggcagcgggccttttaaacggcttgtttgaagcaggtaaacgcgtaccagaggactttgaaatcatcaccagcaacgattcaccagtggttcaatacactcgtcccaatttgagttctatcagtcaacctgtttatgacttaggtgctgttagcatgcggatgttgactaaaatcatgaacaaagaagagttggaagaaaaagaaattcttttgaatcatggtattaaaaaacgtgggacaactaag

SEQ ID NO: 1228 - protein, 333 aa, Streptococcus pyogenes
MNTDDPLTIYDVAREAGVSMATVSRVVNGNKNVKENTRKKVLEVIDRLDYRPNAVARGLASKKTTTVGVVIPNIANSYFSILAKGIDDIAAMYKYNIVLASSDEDDDKEVNVVNTLFAKQVDGIIFMGHHLTEKIRAEFSRSRTPVVLAGTVDLDHQLPSVNIDYRAAVSNVVDILAENHKCIAFVSGPLIDDINGKVRLAGYKEGLKHNKLDFKEGLVFEANYSYKEGFELAQRVINSGATAAYVAEDELAAGLLNGLFEAGKRVPEDFEIITSNDSPVVQYTRPNLSSISQPVYDLGAVSMRMLTKIMNKEELEEKEILLNHGIKKRGTTK

SEQ ID NO: 1229 - DNA, 1083 bp, Streptococcus agalactiae
atgtcaaaacttaatcgtatacgccatcacttacattcagtccaagctgaacttgctgtcttttctgatcctgtgacagtcaactatttaacaggtttcttttgcgatccccatgaaagacaaatgtttttatttgtctatgaagatcgcgatcctattttatttgtaccagcactagaagtatcgcgtgcaaaacaaagtgtaccatttcccgtctttggttacatagattcagaaaatccttggcaaaaaatagctagcaacttaccatccttttctgtttctaaagttctagccgaatttgataatcttaatgttactaaattccaaggtctccaaaccgtttttgatggtcattttgaaaacctaacaccttatattcaaaacatgcgcctaattaaatcacgagatgaaattgagaaaatgttagtcgctggagaatttgctgataaagctgttcaagttggatttgacaatatctcgctaaacaacactgaaaccgatattatcgctcaaatcgaatttgaaatgaaaaaacaaggtatcaataaaatgagtttcgacactatggttttgactggcaataatgcagcaaatccacatggtatcccaggaactaataaaatcgaaaataatgctttgttattatttgatttaggtgtagaaacactaggttatacgtcagatatgacccgtacagtagcagtggggaaacctgatcaattcaaaaaagatatttaccatttatgtcttgaagcacatcaagcggctattgattttattaagccaggagtccttgcttctgaagttgacgcagcagcaagaaatgttattgaaaaggctggttatggacaatactttaaccaccgccttggtcatggattaggtatggatgtccatgaatttccatctattatggctggtaacgatatggagattcaagaaggcatgtgcttctctgttgaaccaggtatttatataccagataaagttggtgtgcgaattgaagactgcggttatgtgactaaaaccggctttgaagtatttaccaaaacacccaaggaactactctattttgaagga

SEQ ID NO: 1230 - protein, 361 aa, Streptococcus agalactiae
MSKLNRIRHHLHSVQAELAVFSDPVTVNYLTGFFCDPHERQMFLFVYEDRDPILFVPALEVSRAKQSVPFPVFGYIDSENPWQKIASNLPSFSVSKVLAEFDNLNVTKFQGLQTVFDGHFENLTPYIQNMRLIKSRDEIEKMLVAGEFADKAVQVGFDNISLNNTETDIIAQIEFEMKKQGINKMSFDTMVLTGNNAANPHGIPGTNKIENNALLLFDLGVETLGYTSDMTRTVAVGKPDQFKKDIYHLCLEAHQAAIDFIKPGVLASEVDAAARNVIEKAGYGQYFNHRLGHGLGMDVHEFPSIMAGNDMEIQEGMCFSVEPGIYIPDKVGVRIEDCGYVTKTGFEVFTKTPKELLYFEG

SEQ ID NO: 1231 - DNA, 1083 bp, Streptococcus pyogenes
atgacaaaattagaccaaatacgtttgtatcttgaccaaaagggagctgaattggcgattttctcagatcctgttacgattaactatttaaccggattcttctgtgacccacatgaaagacaactgttcttgtttgtctaccatgatttagctcctgtgctttttgtacctgcccttgaggtggccagagctagccaggccatatcatttcctgtgtttggttatgttgactctgaaaatccttgggaaaagatcaaggccgttttaccaaatacagcagccaaaaccatttatgctgaatttgaccaccttaacgtcaataagttccatggcttgcagactatcttttcaggacaatttaacaatctaaccccttatgtccaaggcatgcgcctcgtcaaatcagctgatgaaatcaataaaatgatgattgccgggcagttcgctgataaggctgttcaagttggttttgacaatatttccttagatgctaccgaaacagacgtcatcgctcaaattgagtttgaaatgaaaaaacaaggcattcataaaatgagctttgacactatggtcttaactggaaataatgcagccaatccccatggcattcctggaacaaataacattgaaaacaatgccctacttctctttgacttaggtgttgagaccttaggctacaccagtgatatgaccagaactgtggctgttggtcagccagaccaatttaaaatcgatatctacaatctctgcctagaggcacaactagcggctattgactttatcaaaccaggtgtaacagctgctcaagtagatgctgctgctcgtcaagtgattgaaaaggctggatatggtgagtacttcaaccaccgcttgggacatggtatcggcatggatgtccacgaatttccctccattatggctggcaatgacttggtccttgaagaaggtatgtgcttctctgttgaacctggtatttacattccaggaaaggtcggtgtgcgcatcgaagactgtggccatgtcactaaaaatggctttgaagtctttacccatactccaaaagagttgctttattttgaaggc

SEQ ID NO: 1232 - protein, 361 aa, Streptococcus agalactiae
MTKLDQIRLYLDQKGAELAIFSDPVTINYLTGFFCDPHERQLFLFVYHDLAPVLFVPALEVARASQAISFPVFGYVDSENPWEKIKAVLPNTAAKTIYAEFDHLNVNKFHGLQTIFSGQFNNLTPYVQGMRLVKSADEINKMMIAGQFADKAVQVGFDNISLDATETDVIAQIEFEMKKQGIHKMSFDTMVLTGNNAANPHGIPGTNNIENNALLLFDLGVETLGYTSDMTRTVAVGQPDQFKIDIYNLCLEAQLAAIDFIKPGVTAAQVDAAARQVIEKAGYGEYFNHRLGHGIGMDVHEFPSIMAGNDLVLEEGMCFSVEPGIYIPGKVGVRIEDCGHVTKNGFEVFTHTPKELLYFEG

SEQ ID NO: 1233 - DNA, 102 bp, Streptococcus agalactiae
atgataggattacgccaattacgtgtcaaatctacaattggagaaaatgaagcattacaacccacagcagatgcctccatccctgcgattcttcccatttca

SEQ ID NO: 1234 - protein, 34 aa, Streptococcus agalactiae
MIGLRQLRVKSTIGENEALQPTADASIPAILPIS

SEQ ID NO: 1235 - DNA, 1788 bp, Streptococcus agalactiae
atgacacatttagttgacttaacaaagaaacccttcaatctaaatcaagaagcaattgagtggattgaaaaaacaattaatgagatgacattggatgagaaaattgggcaactttttttcaatatgggagctagtcgttcagaagaatatttaacagatgttttggatcggtatcatattgctgctgttcgctataatagaggtagttcaagtgaaatctatgatcagaatttaattttacagacaaagtcgaaattgccgatgttgattgctgcaaatacagaagctggtggagacggtgctgtcacggatggaactaaagttggcgatgaaataaaagtggctgctacaaatgatccgaaatatgcttatgaaatgggaagaatcgcagggatggaggcatctgctgtgggttgtaatgcttcattttctccaattgtagatttgacacgtaattggcgtaatcctatcatagctagtcgaaattggggtgctaacgttgatcaaattatttcactttcaaaagagtatatgaaaggaatcatgcaatataatattgtacctttcgctaaacattttccaggggatggcattgatgagcgtgatcatcatttgtcatttgcttccaatcctatgagtaaagaggagtggatgtcgacatttggccgcatttatggtgaattggctgacgcaggtttaccaggagtcatggcaggtcacatacatttaccaaacgttgaaaaagaaatgcatccagagcgagaccttgatgatatgttaccagcttcattgaataaaacacttttagatgagttattgagaggagagttaggttataatggagctattgtaacggacgcttctcatatggttggaatgactgcttcaatggcaaggagagatttgttgccaacggcgattgaagcaggttgtgatttattcttattctttaatgaccctgatgaagacattcaatggatgaaagaaggttacgaaaaaggtattctaacagaggaacgtctccatgacgctttacgtcgtactctcggtctaaaagcgaaattaggcttgcataactatgagggacgtcgccaagaactctttatgcctaaagataaggctatggctttaatcaacacattagagtcgcaaaaaatagctgatgaagttgctgataaagcagtaactctggtaaaagataaacaaaaagatatctttccagtaaatccagaacgttatcgtcatatcttacttgttaacgttgaaggatataagggaggttttggtgcgatgattgctggaaacaagcaacgtgcatcggattacatgaaagagttacttgaggcacgtggccatgaagtaactgtctgggagtctaccgaagagcgtattatgaaattgccacaagaggagcgggcagcagctatcgctaatgtttacgcacaaaaacagccaatcgcaaatctaacagaacactatgacttgattattaacttggtagatgtcaatgctggaggaacaacacaacgtattatttggccagcagctaaaggcacccctgatcagcctttttacgttcatgaaataccatctattgtgatttcagtacaacatgcatttgctttagcagatatgccacaggtagggacttatattaatgcttatgatgggcttcctagcacgataagtgcagtagttgcgaaattggctggagaatcagaatttacaggagtttcaccagtagatgcttactgtggtttaattgatacacatttatggcgccaatgc

SEQ ID NO: 1236 - protein, 596 aa, Streptococcus agalactiae
MTHLVDLTKKPFNLNQEAIEWIEKTINEMTLDEKIGQLFFNMGASRSEEYLTDVLDRYHIAAVRYNRGSSSEIYDQNLILQTKSKLPMLIAANTEAGGDGAVTDGTKVGDEIKVAATNDPKYAYEMGRIAGMEASAVGCNASFSPIVDLTRNWRNPIIASRNWGANVDQIISLSKEYMKGIMQYNIVPFAKHFPGDGIDERDHHLSFASNPMSKEEWMSTFGRIYGELADAGLPGVMAGHIHLPNVEKEMHPERDLDDMLPASLNKTLLDELLRGELGYNGAIVTDASHMVGMTASMARRDLLPTAIEAGCDLFLFFNDPDEDIQWMKEGYEKGILTEERLHDALRRTLGLKAKLGLHNYEGRRQELFMPKDKAMALINTLESQKIADEVADKAVTLVKDKQKDIFPVNPERYRHILLVNVEGYKGGFGAMIAGNKQRASDYMKELLEARGHEVTVWESTEERIMKLPQEERAAAIANVYAQKQPIANLTEHYDLIINLVDVNAGGTTQRIIWPAAKGTPDQPFYVHEIPSIVISVQHAFALADMPQVGTYINAYDGLPSTISAVVAKLAGESEFTGVSPVDAYCGLIDTHLWRQC

SEQ ID NO: 1237 - DNA, 810 bp, Streptococcus agalactiae
atggtagatacaaatcacaaaatcgctttttgcatagattctgatggttgcgcaatggatacaatgacatataagcatcaactcttttttggtccaattgctgcagatatatttgggatatcagaacaagaaagaacaagttttttaaaagagtgggatagagtcaatctttattcaagaactcgtggagttaatcggtttgtgggattggttatgggccttgagtttgccggagtagaacatattgataaattaaaagaatgggtcgaaacaacagactcattgtccaataattccttagagttagcgcttgccaacgattttagtagagatttagagaaggctttagaatggtccaatgaagtgaatcgccaaatcaaaaattatgagggagattctttagcgttttcaggtgtgttagaaagtttagaacgattaagtcaatttggtaatgtttatgtcgtgagttctgctaacaaggaagctgtttggcaagagtgggaagaacagggattgctaaagtatgttgatgatatctattgtcaagatagaggtaaaaaagaagatgttatcgccactttaattgcaagtggttactgccgtgaaactattttgatggtaggagattccctgggtgatctggctgcagcagaacaaaatggtattgcattttacccagtacttgttggtaaggaagtcaaatcatgggaaattcttagagaagatattggtgaagcttttgcaaaaggtcaattcgaacagcaaaggcaaaaagaatctattaataccttttgggctaatttagataac

SEQ ID NO: 1238 - protein, 270 aa, Streptococcus agalactiae
MVDTNHKIAFCIDSDGCAMDTMTYKHQLFFGPIAADIFGISEQERTSFLKEWDRVNLYSRTRGVNRFVGLVMGLEFAGVEHIDKLKEWVETTDSLSNNSLELALANDFSRDLEKALEWSNEVNRQIKNYEGDSLAFSGVLESLERLSQFGNVYVVSSANKEAVWQEWEEQGLLKYVDDIYCQDRGKKEDVIATLIASGYCRETILMVGDSLGDLAAAEQNGIAFYPVLVGKEVKSWEILREDIGEAFAKGQFEQQRQKESINTFWANLDN

SEQ ID NO: 1239 - DNA, 888 bp, Streptococcus agalactiae
ttgtacttagctaagagtagaatacttatagaagttaatgagaggaataagatgtcaaaaacaattacatttaccaataaagttgtcgtcataacaggtgcaggcggtgttctctgtggttatatggctaaagaatttgcgaaagcaggcgctaaagtggcattattagatttgaatcaagaagctgctcaaacatttgctgatgaaattgtagaagaaggtggtatcgctaaggcttataaagctaacgttttgtctaaagaaaaccttgaagaagtgcatcaagccgttttagaggatcttggaccaactgatattttagttaatggtgcaggaggcaacaatcctaaagctacaactgataatgaatttcacgaattagacttaccttcagaaacaaaaaccttctttgagttagatgaagctggtattagctttgtttttaacttaaattatttaggaacattattgccaacgcaagtatttgcccaagatatggttggacgtgaaggagcgaatattattaatatctcttcaatgaatgcttttacccctctgaccaaaataccagcttattctggagctaaagcagctattagtaacttcacacaatggctagctgttcatttctcaaaagttggtatccgttgtaatgctattgcacctggtttcttggtaacaaatcagaaccgaagcttgttatttactgaggacggtcagccaactgcgcgtgctgagaaaattcttaataatacaccaatgggaagatttggagaagcaagtgagctgattggcggattgttctttttagcagatgaaaaatcatcaagttttgttaatggcgttgtccttccgattgatggtggatttgctgcttactctggtgtt

SEQ ID NO: 1240 - protein, 296 aa, Streptococcus agalactiae
MYLAKSRILIEVNERNKMSKTITFTNKVVVITGAGGVLCGYMAKEFAKAGAKVALLDLNQEAAQTFADEIVEEGGIAKAYKANVLSKENLEEVHQAVLEDLGPTDILVNGAGGNNPKATTDNEFHELDLPSETKTFFELDEAGISFVFNLNYLGTLLPTQVFAQDMVGREGANIINISSMNAFTPLTKIPAYSGAKAAISNFTQWLAVHFSKVGIRCNAIAPGFLVTNQNRSLLFTEDGQPTARAEKILNNTPMGRFGEASELIGGLFFLADEKSSSFVNGVVLPIDGGFAAYSGV

SEQ ID NO: 1241 - DNA, 792 bp, Streptococcus pyogenes
atggaaaatatgttttcgttacaaggtaagattgccttgattaccggagcatcttacggtattggttttgaaattgccaaagcctatgctcaagcgggtgcaactattgtgtttaatgacatcaaacaagagttagttgataaggggttggctgcctatcgagagttagggatagaagcgcatggctatgtttgtgacgtgactgatgaagctggtatccaacagatggttagtcaaattgaagatgaagtaggtgctattgatattttggtcaacaatgcaggtattattaggcgtacgccgatgcttgaaatggccgcagaagattttcgtcaagttattgatattgatttaaatgctccttttattgtgtcaaaagctgtattaccatcaatgattgcaaagggacatggtaaaattataaatatctgttctatgatgagcgaattggggcgtgaaacagttagtgcctacgcggcggctaaaggtggcttgaaaatgttaaccaaaaatatagcctctgagtttggagaagccaacattcaatgtaatgggattggtcctggctacattgcgacgccccaaacagctccgttgagagagcgacaagcagatggtagtcgtcatccttttgatcaatttatcattgctaaaacaccagcagcacgttgggggacaacagaagacttagctggtccagctgtttttctagctagcgatgccagtaattttgtcaacggccatattctttatgtcgacggtggcattttagcttatattggaaaacaacct

SEQ ID NO: 1242 - protein, 264 aa, Streptococcus pyogenes
MENMFSLQGKIALITGASYGIGFEIAKAYAQAGATIVFNDIKQELVDKGLAAYRELGIEAHGYVCDVTDEAGIQQMVSQIEDEVGAIDILVNNAGIIRRTPMLEMAAEDFRQVIDIDLNAPFIVSKAVLPSMIAKGHGKIINICSMMSELGRETVSAYAAAKGGLKMLTKNIASEFGEANIQCNGIGPGYIATPQTAPLRERQADGSRHPFDQFIIAKTPAARWGTTEDLAGPAVFLASDASNFVNGHILYVDGGILAYIGKQP

SEQ ID NO: 1243 - DNA, 1044 bp, Streptococcus agalactiae
atggaaatgtcatttaggtggtatggtgaagacgaccccgttactttagaaaatattggtcaaattccaacaatgaaagggattgttacagcgatatacgatgtaccagtaggagaagtttggtcacgtgagcgcattcaacagctgaaagaaaaggtagaggcagcagggcttaaaatttcggttatcgaatcagtacctgttcatgaagatatcaaattgggacgtccaacacgtgatctcttgattgataattatattcaaaccgtcaaaaatttggctgcggaaggtattgatactatttgttataattttatgccagtatttgactggacacgcactgatttagcatatcaatatccagatggttccacagctttgatatttgatgagacggtttctaaaaaaatggatccagtaaacggtgaattatctttgccaggatgggatgccagctatagtaaagaagaaatgaaggctatcatggatgcctatgctgaaattgatgaggaaaaactttgggaaaatctcacttattttattaaacgtattattcctgaagcggaagccgtaggcgttaaaatggccattcatccggatgacccaccatattctatttttggtttacctcgcattattactgggttagaggctattgagcgttttgtgaaattgtacgatagtaaaagtaatggcatcactttatgtgtgggttcttacgcttctgatccccagaatgatgttttagagatttcgcgacgtgcttttgagttagatcgtgtaaactttgttcatgctcgcaatattaaattaggtgatggaaagtcatttaaagaatcggctcatccatcagaatacgggtcaatagacatgtatgaagttattaagttatgccatgaatttgggtttgagggtgctattcgacctgaccacgggcgtatgatttggggagaaacaggtcgtccaggatatggcctatacgatagagctttaggagccacttacgtttctggtttatacgaagctgtgattaaaggttcaaaa

SEQ ID NO: 1244 - protein, 348 aa, Streptococcus agalactiae
MEMSFRWYGEDDPVTLENIGQIPTMKGIVTAIYDVPVGEVWSRERIQQLKEKVEAAGLKISVIESVPVHEDIKLGRPTRDLLIDNYIQTVKNLAAEGIDTICYNFMPVFDWTRTDLAYQYPDGSTALIFDETVSKKMDPVNGELSLPGWDASYSKEEMKAIMDAYAEIDEEKLWENLTYFIKRIIPEAEAVGVKMAIHPDDPPYSIFGLPRIITGLEAIERFVKLYDSKSNGITLCVGSYASDPQNDVLEISRRAFELDRVNFVHARNIKLGDGKSFKESAHPSEYGSIDMYEVIKLCHEFGFEGAIRPDHGRMIWGETGRPGYGLYDRALGATYVSGLYEAVIKGSK

SEQ ID NO: 1245 - DNA, 93 bp, Streptococcus agalactiae
gtgaaggctatatcccaaatcaatcagaaatcagcaaatggcaaacagctgtttttatggaactttgccgattatataaaaaatatggttttg

SEQ ID NO: 1246 - protein, 31 aa, Streptococcus agalactiae
MKAISQINQKSANGKQLFLWNFADYIKNMVL

SEQ ID NO: 1247 - DNA, 1398 bp, Streptococcus agalactiae
atggcgtttaatactgaaacatttatgttaaaaaatcaagcagctatacagctgtatgaagaggtcaagagacaacctatttttgattatcattgccacttagatccaaaggacatttttgaagatcatatttttgataatattgtggatttgtggcttggtggtgaccactataaatggcgtcttatgagggctaatggtatttctgaagcagaaattacaggtccagcatccaaccttgagaaatttaaagcatttgctagaacactagaaagagcatacggtaatcctgtttatcattggtctgctatggaattgaaaaatgtctttggtgttaatgagattttgacagaatcaaatgctgaggaaatttatcatcgtttaaatcatttcttgaaagagcataaaataagtcctagacgtttaattgcagatagcaaagttatgtttattggtactacagaccaccctcttgatactctcgagtggcataaaaagttggctgctgatgagagttttaaaacagttgttgctccgacatttaggccagatgaagcttttattgaacatcgacattttgttgattttattactaaactgggtgacattactcaaaaagagattacagatttttcaacatttatagcagcaatggaagaacgcattgcgtattttgctcaaaatggttgtagggctagcgatatcagttttacggaaatcgtctttgaacaaactgatgaattggagttgaacgatttatttaataaagtttgtgaaggctatatcccaaatcaatcagaaatcagcaaatggcaaacagctgtttttatggaactttgccgattatataaaaaatatggttttgtaacacaggtgcattttggagctttgagaaataatcattctactatttttgaaaaattgggagctgacgtgggtgtggattcacttggtgaccaagtggctttaactgttaatatgaaccgtttattggattccttggttaaaaaagatagtctgcctaaaatgatttggtataatctcaatccagcttacaatatagcagtagctaacactttggcaaattttcaagctaacgaacttggagtgagatcttaccttcaatttggtgcaggttggtggtttgcagatactaaattagggatgattagtcaaatgaatgccttagcagagcaaggcatgttggcgaattttattggtatgttaacagattctagaagttttctatcttatcaacgtcatgactattttcgacgtattttatgtacctacttaggagaatggattgaagaaggagaagttccagaagattatcaagctttaggaagtatggctaaagacatcgcttatcaaaatgcagttaattattttaagaac

SEQ ID NO: 1248 - protein, 466 aa, Streptococcus agalactiae
MAFNTETFMLKNQAAIQLYEEVKRQPIFDYHCHLDPKDIFEDHIFDNIVDLWLGGDHYKWRLMRANGISEAEITGPASNLEKFKAFARTLERAYGNPVYHWSAMELKNVFGVNEILTESNAEEIYHRLNHFLKEHKISPRRLIADSKVMFIGTTDHPLDTLEWHKKLAADESFKTVVAPTFRPDEAFIEHRHFVDFITKLGDITQKEITDFSTFIAAMEERIAYFAQNGCRASDISFTEIVFEQTDELELNDLFNKVCEGYIPNQSEISKWQTAVFMELCRLYKKYGFVTQVHFGALRNNHSTIFEKLGADVGVDSLGDQVALTVNMNRLLDSLVKKDSLPKMIWYNLNPAYNIAVANTLANFQANELGVRSYLQFGAGWWFADTKLGMISQMNALAEQGMLANFIGMLTDSRSFLSYQRHDYFRRILCTYLGEWIEEGEVPEDYQALGSMAKDIAYQNAVNYFKN

SEQ ID NO: 1249 - DNA, 708 bp, Streptococcus agalactiae
ttgaatagctatttttttagtattcttcttgacaattcatcagatgacttatataatatagttaaagataacggttacattttgggaggtattatgttaaatcaattgaaaaacaactatttctttgctgttattcgagggaaatcatctgaggatgcgctcgaaatcgcaaagcatgctattttgggtggtattcggaatattgaagtaactttttcgactcctgaagcaagcaaagtcatcaaacaattatcagatgactttaaaaataataaagaaattattgtgggggccggaacggtcatgacaactgaacttgctaaagaggctattgatgctggagctaaatttttggttagcccacactttgattcagatattgctaatttagctaatgaaaacaaggtttattatttcccaggctgtgcaacggcaacagaaatcgtggtagctagaaagtataaatgtcagattataaagctttttccaggtggagttgtgggtccaggttttatcaaagatattcatggtcctattccagatgttgatttaatgccatcaggtggcgtctctgtttcaaatgtagttgaatggagaaaagcaggagcagttgcggttggtgttggctcagcattatctagtaaagtagccacagaaggctatgatagtgttactaaaatagctaaacagtttgtttctgcacttgat

SEQ ID NO: 1250 - protein, 236 aa, Streptococcus agalactiae
MNSYFFSILLDNSSDDLYNIVKDNGYILGGIMLNQLKNNYFFAVIRGKSSEDALEIAKHAILGGIRNIEVTFSTPEASKVIKQLSDDFKNNKEIIVGAGTVMTTELAKEAIDAGAKFLVSPHFDSDIANLANENKVYYFPGCATATEIVVARKYKCQIIKLFPGGVVGPGFIKDIHGPIPDVDLMPSGGVSVSNVVEWRKAGAVAVGVGSALSSKVATEGYDSVTKIAKQFVSALD

SEQ ID NO: 1251 - DNA, 633 bp, Streptococcus pyogenes
atgggaaaaatagaaatcttaaccaaacttaaggctaatcggcttgtcctagttgtacgaggagagtctagtgaggaagctttagcttgcagcctggccagtattgaaggtggcattaagacaattgaagtcacctatactaacccctttgctagtgaggttatcggtcaattagctgaacgcttcaaagaagatcctgaggtattgataggtgctgggacagttttggatgatgtcactgcccgccaagctattttagcaggagcacagtttattgttggtcctaatttcaatcgagcagtggctttgatttgtcatcgttatagcataccttatttaccaggttgtatgacggttaatgaagtggttacagcattagaatcaggggttgatatggtcaaaatttttcctggttctactgtagggatatcctttattcgggcaatcaaatctcctttgccacaagtagaggttatggttacaggcggagtttcttcagataatctcaaagactggctagctgctggagtagatgttctaggcataggaggcgagtttaatcagttagcgagccaaaaacaatataacctaatcactaagaaagccgctcattatatcaaaagtttgcgacaa

SEQ ID NO: 1252 - protein, 211 aa, Streptococcus pyogenes
MGKIEILTKLKANRLVLVVRGESSEEALACSLASIEGGIKTIEVTYTNPFASEVIGQLAERFKEDPEVLIGAGTVLDDVTARQAILAGAQFIVGPNFNRAVALICHRYSIPYLPGCMTVNEVVTALESGVDMVKIFPGSTVGISFIRAIKSPLPQVEVMVTGGVSSDNLKDWLAAGVDVLGIGGEFNQLASQKQYNLITKKAAHYIKSLRQ

SEQ ID NO: 1253 - DNA, 669 bp, Streptococcus agalactiae
atggctagacccttagtagaacaaacagcagatcgtctattgcatttaattttagaaagagaataccctgttggtgctaagctccccaatgaatatgaattagcagaagatctagatgttggtcgcagcacaatccgagaagcagtcagaagtttagcaacgcgtaatattttagaagtcagacagggctctggaacatatattagttctaaaaagggtgtttctgaggatccattagggttctctctaataaaggacacagataggttgacatcagatctctttgaactacgccttttattggaacctcgaatagcagagctggtagcttatagaattacagatgatcagttacaattactcgaaaagcttgttggagatattgaagatgctgttcacgcaggcgatccgaaacatttacttttagacgtggaatttcattccatgctagctaaatacagtggtaatattgcaatggatagccttttgccagtcatcaaccagtcaattcatctgataaatgcgaattatacaaatcgtcagatgaagtcggatagtttagaagcacatagagaaattatcaaagcaatccgagaaaaaaatccagtagctgcacatgatgctatgcttatgcatatcatgagtgttagacgttcagcattgaaagct

SEQ ID NO: 1254 - protein, 223 aa, Streptococcus agalactiae
MARPLVEQTADRLLHLILEREYPVGAKLPNEYELAEDLDVGRSTIREAVRSLATRNILEVRQGSGTYISSKKGVSEDPLGFSLIKDTDRLTSDLFELRLLLEPRIAELVAYRITDDQLQLLEKLVGDIEDAVHAGDPKHLLLDVEFHSMLAKYSGNIAMDSLLPVINQSIHLINANYTNRQMKSDSLEAHREIIKAIREKNPVAAHDAMLMHIMSVRRSALKA

SEQ ID NO: 1255 - DNA, 723 bp, Streptococcus pyogenes
atgaataaccgacttgaggagtgtggcatgttaccagcttatataaaaattcatgatgcaattaaaaaagacattgatctgggcatctggccaattggtagtcgcttaccaagtgaacgacatttagcggaacatttcaccgttagtcgaatgactctacggcaggctattacattactagtagaagaagggattcttgaaaggcggataggaagtggtacttatgttgccagtcatcgtgttcaagaaaaaatgcgaggaacaacaagtttcacagaaattatacgctcccaaggacgacaaccctcctctaaattattatcctatcaaaagcaattagctagtgataccgaagttaaagaattgaacttagacaaaacagacttggtcattcgaatggaacgtatccgctatgcagacagtgtccctttggtgtacgaaattgcttcaatcccagaaaaatttataaaaacggttaaacgagctgatattacagaacacttttttcactcattgatagcaaatggttacgagattggtaaaagtaaacagacaatctacgctaagctagcaagtgagcgtgtagcctcctacttggaagttgctaaaggacatgccattttggctctaactcaggtgtcttactttacagacggcaaaccttttgagtatgtccgcagtcagtatatcggtgaccgttttgaattttacttagaaaataat

SEQ ID NO: 1256 - protein, 241 aa, Streptococcus pyogenes
MNNRLEECGMLPAYIKIHDAIKKDIDLGIWPIGSRLPSERHLAEHFTVSRMTLRQAITLLVEEGILERRIGSGTYVASHRVQEKMRGTTSFTEIIRSQGRQPSSKLLSYQKQLASDTEVKELNLDKTDLVIRMERIRYADSVPLVYEIASIPEKFIKTVKRADITEHFFHSLIANGYEIGKSKQTIYAKLASERVASYLEVAKGHAILALTQVSYFTDGKPFEYVRSQYIGDRFEFYLENN

SEQ ID NO: 1257 - DNA, 1863 bp, Streptococcus agalactiae
atgatattgcttacctcattgaaaaagaaacaaatgatattaaacgatagtgtaaaaggagagtgtatgttatatccattattgacaaaaacaagaaatacttatgatttaggcggtatttggaactttaaattaggagaacataatccaaatgaattactaccttcagatgaagtcatggttatcccgacttcatttaatgatttgatggtaagtaaagaaaaacgtgattatataggtgatttttggtatgaaaaagtcattgaagtacctaaagtatcagaggatgaagagatggtgctgcgttttggctcagtgacacatcaagctaaaatttatgttgacggtgtattggtaggagagcataagggaggttttactccttttgaagttcttgttcctgaatgtaagtataataatgagaaaattaaggtatcaatttgtgctaataacgttttagactataccacgcttccggtcggaaattatagtgaaatcattcaagaagatggtagcattaagaagaaagtacgtgagaattttgatttcttcaattatgcaggtgtgcatcgtcctcttaagttgatgatacgtcctaaaaatcatatttttgatattacaattacaagtcgtctatcagatgatttacagtcagcagatttacattttttagtggagactaatcaaaaggttgacgaagttagaattagcgtttttgatgaagataacaaactagtgggtgaaacgaaggatagcagattatttcttagtgatgtccatctttgggaagttttaaatgcctatctgtacacagcgcgtgttgaaatttttgttgataatcaactccaagatgtctatgaggaaaattttggtcttagagaaatagaagtgacaaatggtcaattcctattgaatcgcaaacctatttattttaaaggatttggtaaacatgaagatacgttcattaatggcagaggtttgaatgaagctgctaacttaatggatttgaatcttttgaaggatatgggggcaaactcttttagaacatcccattatccttattctgaagaaatgatgcgtttagcagatcgaatgggagtgttagtgatagatgaggttccagcagtagggttatttcaaaattttaacgcttccttagatttgtcaccaaaagataatggtacgtggaatttgatgcaaacaaaagcggcgcatgaacaagctatccaagaattagtgaagcgtgataaaaatcatcctagcgtcgtgatgtgggtagtcgctaacgaaccggctagtcatgaagcgggagcacatgattattttgagccattagtaaaactttataaagatttagaccctcaaaaacgtcctgtcaccttggttaatattttaatggcaaccccagatagagaccaagtgatggacctggttgatgttgtctgccttaatcgttactatggttggtacgttgaccacggtgatttaacaaatgcagaagtaggtataagaaaagagttattagaatggcaagataaatttcctgacaaaccaattatcataacggagtatggcgctgatacgttaccgggattacattctacttggaatattccatatacagaagaatttcaatgtgatttttatgaaatgagtcatcgtgtttttgatggtattcctaatttagttggtgagcaagtctggaattttgcagactttgaaactaatctgatgatacttcgtgtacaggggaatcacaaaggtctcttttcaaggaatcgccagccgaaacaagtcgtcaaagaatttaaaaaacgctggatgactattcctcattaccataataaaaaaaatagtgtaaaa

SEQ ID NO: 1258 - protein, 621 aa, Streptococcus agalactiae
MILLTSLKKKQMILNDSVKGECMLYPLLTKTRNTYDLGGIWNFKLGEHNPNELLPSDEVMVIPTSFNDLMVSKEKRDYIGDFWYEKVIEVPKVSEDEEMVLRFGSVTHQAKIYVDGVLVGEHKGGFTPFEVLVPECKYNNEKIKVSICANNVLDYTTLPVGNYSEIIQEDGSIKKKVRENFDFFNYAGVHRPLKLMIRPKNHIFDITITSRLSDDLQSADLHFLVETNQKVDEVRISVFDEDNKLVGETKDSRLFLSDVHLWEVLNAYLYTARVEIFVDNQLQDVYEENFGLREIEVTNGQFLLNRKPIYFKGFGKHEDTFINGRGLNEAANLMDLNLLKDMGANSFRTSHYPYSEEMMRLADRMGVLVIDEVPAVGLFQNFNASLDLSPKDNGTWNLMQTKAAHEQAIQELVKRDKNHPSVVMWVVANEPASHEAGAHDYFEPLVKLYKDLDPQKRPVTLVNILMATPDRDQVMDLVDVVCLNRYYGWYVDHGDLTNAEVGIRKELLEWQDKFPDKPIIITEYGADTLPGLHSTWNIPYTEEFQCDFYEMSHRVFDGIPNLVGEQVWNFADFETNLMILRVQGNHKGLFSRNRQPKQVVKEFKKRWMTIPHYHNKKNSVK

SEQ ID NO: 1259 - DNA, 3504 bp, Streptococcus pyogenes
atggtttatcgccaaaagagttcagagatcgttacaaggacaattaccaagccatcaagggcgaccagtaacgtcaaacaggagattgatatgacaccagatagcaaggagcagacagtgactggctaccaataccactatattgatcaagaaggaagaaagcagccctttaatcaaggctggcgttttcttatggcagatgtggcgtgtgctcaggacccttcttttgatgattcgaactggcaggtgattcatttaccacatgatttcagtcttacgcagccttacacaagaaatggtgaagctgaaagtgcttataaattaggtggtgtcggttggtatcggcattatctcgtgttagatgaggttttagctggttgtcatgttgccattacttttgagggttcctatatggaaacggaaatttatgttaacgggcaattcattggcaaacacttaaatggctatcaggaatttacttatgatatctctgatgttgtgacttttggagctgaaaatcttctggctgtccgggttgaaaacaaggttcccagttctcgttggtattcaggcagtggtctttatcgtgaagtgagtttgtctgttcttccccagcttcattttgtggcagaccaggtagcaatgaccttggctgatactgctgtgcaggagaaagggcaacagaaagttgatttacgctttgccctcaatcagtctattcagacttgccactaccaattgagcctctgtttatgggaacaatcacattgctcaaaagacaagaaactcctttatcaagaaacagaagtgcctctagctgatttggctttccaaagacagtatggtcttacactgtctttggaagaactccaattgtggtcaccagataatcctcacctctacgatttagaactcactctttactatcaaggtcaggtcattgattgcttttgccttgaaactggttttcgtcagctgacttttatggccaatcaggggctttttgtgaatggcagagctgtcaaattaaagggagtttgtttgcatcatgaccaaggaggcctaggagcttgtgcttacgaagatgccctagccagacaattagtcctgttgaaagacatgggggctaataccattcgtagcacccataacccaagtagtcccaaacttaggcaactagccaatcgtctcggcttttttgtgattgaagaagcctttgacacctggacctatgccaaaaatggaaacgttaatgacttttcaaactatttccatcagactatcggaactgaaaatgcaaactatcttcaaagagtgaggtcacctgaaacgagctgggcccagtatagtattgaggccatggtctggtctgccaagaatgacccgtcagtgttgatgtggtcgattggtaatgaattgatggagggtttttcagccgatgtcagtcattacccagagctgacaagacaaatgtgccaatggattactgctattgacacctcacgtcccattacctttggggacaataaattaaaagaagctgacttttgctggcatgaggaagtgtcgcaaatggcaactcttcttagtcaattagaccatcctcagggactcattgggttaaactatgctgatggaaaagactatgataggcttcatgaggagcactctgattggctgttgtatggttctgaaacagtctcagccattaccagcagggcttattataaagagacaaaaaaagttcttgactccggttatcacctaacctcttatgatcatgctaaggttgattggggtgccttcgctagccaggcttggtatgataccattacccgtgattttgttgctggcgaatgcgtttggacaggctttgattatttaggagaacctaccccctggaacaagatcgacagcggtgttgtaggcctttggccttctcctaaaaatgcctactttggcattttagacacggcaggctttccaaaagatagctattatttttaccaaagtcagtgggcgcaggggcagaccaccttgcacctgttaccagtctggcagaaggaccagctttgtttcgatgagcagggattggtggaggttgtggtttatagcaatgctgccagtgtgcaactgatgtttgaagatgagcagggcaacttaacagattatggaaggaaggcatttcatacttatagcacgccaacgggacacacttatcagctttaccaaggagctgacgctgctaagaatcctcacgagaacctttacctgacttggcgagtgccctatcaaaaagggttgctaagggcagtggcctacgacatttctggtaaaagcattccaaaaaccagtggacgttctcaggttagaacctatggttcagtggcaaagctatcttggaaagcctttgaagcacctattgacgctccttgggaattgctttatctggatttatcactcttggatagccgaggtgaattggtcagccatgctcaagattggttgcaggttcaagtagaaggaccagcccgtttgttggctcttgataatgggaatccgactgaccacaccccttatcaggagcctctgcgccaggcatatgggggaaaattattagccattttagccctcactggagaggcgggacacattaaggtcacggcaaaagcctcgcagcaacttagcagtgtttttcagacacaagtagcctgccgtgcccccaaagaacacttagtgacactacctttagagaaatatcagtttaaaaagagccgactgacaagtcaacaagaaattggtcaatcttgtctaaagaccacacaattcctttctgttttggagaacaaagacacccagcaaaaagcaggtaaggctagcacacctcacattcttatcactagttaccagcactatttatctctgcccttgcaggtttgttctcaggcatttgattttaaaaaaggcgacgatatcttcttgcctcagtggctccaagtcaaagatgcccaaggttctcttgtgaaaaaagctttttcaatgacgtggtacctaaaagagaaaatctttgccaagcctattcttgtcacaggctatgtttcttgttttgggcaatcaataccggttgaggcaaggcttaacctagcacaagctagcaaaagacggcaccaggatctcagtttagtcgccaagcaatccctggccgcaagtcaaaaaaggctaacttattgctaccaatatgatacggtgcaagccataggagccattagcttgcaaaatcacacaggcacatctcttagtgtttctgtggcaatcagttatggtagtcagagctctattaagcaagaaaccttgatgctagctgatagccacttgagccagttagaagaggttattttcttcgatgatattttgactgttttgtatctggcagtgacccttgaagtcattgaaggacctgacctaactgaagacagtattcaaattggcctttgggatttagca

SEQ ID NO: 1260 - protein, 1168 aa, Streptococcus pyogenes
MVYRQKSSEIVTRTITKPSRATSNVKQEIDMTPDSKEQTVTGYQYHYIDQEGRKQPFNQGWRFLMADVACAQDPSFDDSNWQVIHLPHDFSLTQPYTRNGEAESAYKLGGVGWYRHYLVLDEVLAGCHVAITFEGSYMETEIYVNGQFIGKHLNGYQEFTYDISDVVTFGAENLLAVRVENKVPSSRWYSGSGLYREVSLSVLPQLHFVADQVAMTLADTAVQEKGQQKVDLRFALNQSIQTCHYQLSLCLWEQSHCSKDKKLLYQETEVPLADLAFQRQYGLTLSLEELQLWSPDNPHLYDLELTLYYQGQVIDCFCLETGFRQLTFMANQGLFVNGRAVKLKGVCLHHDQGGLGACAYEDALARQLVLLKDMGANTIRSTHNPSSPKLRQLANRLGFFVIEEAFDTWTYAKNGNVNDFSNYFHQTIGTENANYLQRVRSPETSWAQYSIEAMVWSAKNDPSVLMWSIGNELMEGFSADVSHYPELTRQMCQWITAIDTSRPITFGDNKLKEADFCWHEEVSQMATLLSQLDHPQGLIGLNYADGKDYDRLHEEHSDWLLYGSETVSAITSRAYYKETKKVLDSGYHLTSYDHAKVDWGAFASQAWYDTITRDFVAGECVWTGFDYLGEPTPWNKIDSGVVGLWPSPKNAYFGILDTAGFPKDSYYFYQSQWAQGQTTLHLLPVWQKDQLCFDEQGLVEVVVYSNAASVQLMFEDEQGNLTDYGRKAFHTYSTPTGHTYQLYQGADAAKNPHENLYLTWRVPYQKGLLRAVAYDISGKSIPKTSGRSQVRTYGSVAKLSWKAFEAPIDAPWELLYLDLSLLDSRGELVSHAQDWLQVQVEGPARLLALDNGNPTDHTPYQEPLRQAYGGKLLAILALTGEAGHIKVTAKASQQLSSVFQTQVACRAPKEHLVTLPLEKYQFKKSRLTSQQEIGQSCLKTTQFLSVLENKDTQQKAGKASTPHILITSYQHYLSLPLQVCSQAFDFKKGDDIFLPQWLQVKDAQGSLVKKAFSMTWYLKEKIFAKPILVTGYVSCFGQSIPVEARLNLAQASKRRHQDLSLVAKQSLAASQKRLTYCYQYDTVQAIGAISLQNHTGTSLSVSVAISYGSQSSIKQETLMLADSHLSQLEEVIFFDDILTVLYLAVTLEVIEGPDLTEDSIQIGLWDLA

SEQ ID NO: 1261 - DNA, 1056 bp, Streptococcus agalactiae
ttgttaaataagagctaccattggaggattcttatggcaaaaattatttcattaggtgaggttcttttgcgattatctccacctcaatatcacacactgatgcaggctaatcacctaaaatgccaattcggtggttcagaacttaatgtcttagcaagccttgctcaactaggttaccatgtaggattggtctcagctttgcctgataatgatttgggcaagatggcaagtcaatttatattgtcacagcaaattagtccagctgctataattaaaaaagaaggacgactaggaatttattactatgaacaaggattttcggtaagaacaaataaggttatctacgatcgtaactattcatctttttgggaaagtaccttgagtgattatgattttacttctatttttaagggagtggattggtttcatgtttctggaattactccagcactaaccaaggacttatatgaggtgactcggttccttatgacaaaagctaaagaaggaggtgtaaaagtatcgattgatctcaattttcgtgagagtttatggtcatcttttcaagaggcacgtgagcaattatcgccactattaggattattagatgtttgctttggcttagagccgatttatttagctggcgaaagtgaagatttaaaagatgagttgggcttatccagaccttaccttgatattgaattacttgaaaagataacccaaaagattgtccaagaatatgggttagactatattgcctttactcaaagggaaatggaatatactaatcagtatatgttaaaatcatatttgtatcataataatatgttatatcaaactgataaaactggcgttgaagtattagatcgtgtggggacaggagatgcctttgctgcaggtttaattcatgcgcttctggaaaaagaaactcctcaaagggccttagaaatagctatggctacatttaaatacaaacataccattcaaggagatatcaatatcatgacacgagatgatattgcttacctcattgaaaaagaaacaaatgatattaaacga

SEQ ID NO: 1262 - protein, 352 aa, Streptococcus agalactiae
MLNKSYHWRILMAKIISLGEVLLRLSPPQYHTLMQANHLKCQFGGSELNVLASLAQLGYHVGLVSALPDNDLGKMASQFILSQQISPAAIIKKEGRLGIYYYEQGFSVRTNKVIYDRNYSSFWESTLSDYDFTSIFKGVDWFHVSGITPALTKDLYEVTRFLMTKAKEGGVKVSIDLNFRESLWSSFQEAREQLSPLLGLLDVCFGLEPIYLAGESEDLKDELGLSRPYLDIELLEKITQKIVQEYGLDYIAFTQREMEYTNQYMLKSYLYHNNMLYQTDKTGVEVLDRVGTGDAFAAGLIHALLEKETPQRALEIAMATFKYKHTIQGDINIMTRDDIAYLIEKETNDIKR

SEQ ID NO: 1263 - DNA, 1038 bp, Streptococcus pyogenes
ttgaacagtaattccattttgacgaggaaaggaggtcacatgtctaagttattattggttggtgaaccgctgattcgcgttagccccaatcagtttcagcctttgaccaatgcctgcgaggctcagctttttttcggcggttcagaagttaatattgcaagaactctaggcggttttggcttagaagcaaggctatttacggccctaccagataatcctgttggtcacgcttttcatcagtttttgaagcaaagcggcgtggatatgtccttgacggcttggcaaggtcatcgcgttgggctatattaccttgaaaatggctttggctgtcgggctagtcaggtttattatgaccgctgtggctctagcttttcggccttagataaggatagtcttgatttagctgccatttttgaaggcattagtcactttcattttagtgggatcagtttggcgttgggcaaaaaaactcaggacctgattgaggtacttgtgagagaagctaagaaaagggatatttgtatttcctttgaccttaactttagatctagtatgattgccgtagctgatgctaaacgactcttttctcactttgctcaatacgcggatattatttttggcatggaacctttgctgttagacagtgacgattttgacatgtttgatagaaaaaaggcagatactacgacgattagagaacgtctggcaggactttatcagcgctatcagttacaagctatttaccatacggagcgttcaaatgatgcccaaggcagtaatcatttcaaagcttatgcctatgataggcagttttacgaatcctgtgaagtgacgaccccagtcttgcaacgggttggaagtggagatgcttttgtggcgggtttactttatcagttgttagaaggtaacgaaaagcagcgcaaccttgattttgctgtggcaacagctagcctaaaatgtacagtagctgaagatcagctctatcacagtgtccaacaagtagaagcagtcttagctaatcaacgagatatccagagg

SEQ ID NO: 1264 - protein, 346 aa, Streptococcus pyogenes
LNSNSILTRKGGHMSKLLLVGEPLIRVSPNQFQPLTNACEAQLFFGGSEVNIARTLGGFGLEARLFTALPDNPVGHAFHQFLKQSGVDMSLTAWQGHRVGLYYLENGFGCRASQVYYDRCGSSFSALDKDSLDLAAIFEGISHFHFSGISLALGKKTQDLIEVLVREAKKRDICISFDLNFRSSMIAVADAKRLFSHFAQYADIIFGMEPLLLDSDDFDMFDRKKADTTTIRERLAGLYQRYQLQAIYHTERSNDAQGSNHFKAYAYDRQFYESCEVTTPVLQRVGSGDAFVAGLLYQLLEGNEKQRNLDFAVATASLKCTVAEDQLYHSVQQVEAVLANQRDIQR

SEQ ID NO: 1265 - DNA, 177 bp, Streptococcus agalactiae
atggccacaaggatactaatagctgccatttttaaatcagggggcagtggtgtttcgatagttggaaatgattttgaaaatccaattcctgctaacacaaaacctactaccataggagcaaatgaagaagcaatcgaatctgttaaggagaagatagttccaatcattcctgataca

SEQ ID NO: 1266 - protein, 59 aa, Streptococcus agalactiae
MATRILIAAIFKSGGSGVSIVGNDFENPIPANTKPTTIGANEEAIESVKEKIVPIIPDT

SEQ ID NO: 1267 - DNA, 1548 bp, Streptococcus agalactiae
atggagaaaacaatggatatggaacaacgtgaagaagttgtatcttataaccgagcgaaagtatggcagttagttatgtttgccatgaacaatgcttctacaaatatatacttatttacgtttatgtttgttacctatttctcaactggcgttcttggctcggcagccatttttgtcagtcaaattatgggttatatccgtatttttgatggttttattgatccagctattggtattatgattgataaaactgatacaaaatttggtaagtatcgtcctattttgattattgggaacgttattacggctttgtcattgatttttcttcttgcattgagaggtgtcgatgaaaatattcgtttcccattatttatccttgttctaattatccataaaattggatactcaatgcaacagacaataactaaagcagggcaaacagcactgacaaatgaccctaagcaacgtcctatttttaatatcgttgatgcagttatgacaacatcattaatgacaggcggtcagtttgtcgtttcagttttcttagtaccaaaatttggtaattttacacctcaattcttcaatgtccttatttttggaacaattcttatttcagctattttagcaatcgttgcaattattgggatttgggcaaaagacagaaaagaattctttggtttaggagagaatacccaaaagactgctctaaaagattactggaaggtgttgaaaggaaataaaccgcttcagatattatccattgctgcagctttggtaaaatttgccatccaattctttggcgattccgttgttatggtgctattgtttggtattttatttggtaattatgctttatcaggacaattctcacttcttttcattgttcctggtgttattattaatattttgttctcaacaattgctcgtaaaaaaggtcttcgtttttcatatgtcagagcaattcagatcggtatgattggtttacttgcttttggtgcagttctttacgttggtaagcctggtgaccttagtttaacaagcctaaatctttatactattttatttatcgttactaatattattgcgagatacgcttcacaagcacctgctagtttagtattgactatgggagcagatatttctgactatgaaacttctgaatccggtcgttatgtatcaggaatgattggaactatcttctccttaacagattcgattgcttcttcatttgctcctatggtagtaggttttgtgttagcaggaattggattttcaaaatcatttccaactatcgaaacaccactgccccctgatttaaaaatggcagctattagtatccttgtggccattccatttatagctttgtctatagctcttcttttaatgaaattttacaaactagataaagaagaaatggttcgtattcaagagaagattcaagttatgaaagcagcaactactaaggaacgtgctaaagatattgctcgtaatgttcctttgacagatatggattatgttgatgtaacaaaatatcctattgataaagat

SEQ ID NO: 1268 - protein, 516 aa, Streptococcus agalactiae
MEKTMDMEQREEVVSYNRAKVWQLVMFAMNNASTNIYLFTFMFVTYFSTGVLGSAAIFVSQIMGYIRIFDGFIDPAIGIMIDKTDTKFGKYRPILIIGNVITALSLIFLLALRGVDENIRFPLFILVLIIHKIGYSMQQTITKAGQTALTNDPKQRPIFNIVDAVMTTSLMTGGQFVVSVFLVPKFGNFTPQFFNVLIFGTILISAILAIVAIIGIWAKDRKEFFGLGENTQKTALKDYWKVLKGNKPLQILSIAAALVKFAIQFFGDSVVMVLLFGILFGNYALSGQFSLLFIVPGVIINILFSTIARKKGLRFSYVRAIQIGMIGLLAFGAVLYVGKPGDLSLTSLNLYTILFIVTNIIARYASQAPASLVLTMGADISDYETSESGRYVSGMIGTIFSLTDSIASSFAPMVVGFVLAGIGFSKSFPTIETPLPPDLKMAAISILVAIPFIALSIALLLMKFYKLDKEEMVRIQEKIQVMKAATTKERAKDIARNVPLTDMDYVDVTKYPIDKD

SEQ ID NO: 1269 - DNA, 993 bp, Streptococcus agalactiae
gtgatgaaactcaaagtatttaatgttagagaagaagaagcaacattagcacaagattgggcaaaccgaaatcatgtggaactttctatgagtgaaggacctttgacattggaaactgttaatgaggtagaaggttttgatgggattgctaatgcacagattgagcctttagatgatgctatttatcctcttctcaaagaaatgggaattaagcaaatcgctcagcgcagtgctggtgttgatatgtataatcttgagttagctaagcaacatggtattatcattagcaatgtgccaagttactcaccggagtctattgcagaatttacagtgacaatcgctcttaaccttattcgaaaagttgagcttattagagctaatgttcgtgaacagaatttttcatggaccttgccaattcgaggacgagtcctaggtaacatgactgtggctataataggaactggtcgcattggtctagcgactgctaaaatttttaaagggttcggatgtcgtgttattggttatgatatttaccataatccaatggcagatggtatccttgagtatgtcaattcggtagaagaagctgttgaagaagctgatcttgtgtccttacatatgccaccaactgctgaaaatacgcatctatttaatttagatatgtttaaacagtttaaaaaaggtgctattttaatgaatatggcacgtggagcattggtggaaaccaaagatcttcttgaggctttagatcaagggcttttggagggagctggtattgatacttatgaatttgaggggccatatatacctaaaaattgtcaaggtcaagacatttcagacaaggatttcctaagactgattaaccatccgaaagtaatatacactcctcatgcggcttattatacagatgaagcggtcaaaaatctagtagagggtgccttaaatgcttgtgtagaagtgattgaaacgggaacaactactacgaaagtcaac

SEQ ID NO: 1270 - protein, 331 aa, Streptococcus agalactiae
MMKLKVFNVREEEATLAQDWANRNHVELSMSEGPLTLETVNEVEGFDGIANAQIEPLDDAIYPLLKEMGIKQIAQRSAGVDMYNLELAKQHGIIISNVPSYSPESIAEFTVTIALNLIRKVELIRANVREQNFSWTLPIRGRVLGNMTVAIIGTGRIGLATAKIFKGFGCRVIGYDIYHNPMADGILEYVNSVEEAVEEADLVSLHMPPTAENTHLFNLDMFKQFKKGAILMNMARGALVETKDLLEALDQGLLEGAGIDTYEFEGPYIPKNCQGQDISDKDFLRLINHPKVIYTPHAAYYTDEAVKNLVEGALNACVEVIETGTTTTKVN

SEQ ID NO: 1271 - DNA, 252 bp, Streptococcus agalactiae
ttgactgaccacccagccatacaaagcccaaaactagcagcacagatacctaaattagcagcaccagaaccaattccggacaaactaattgccaaagcaatcccaactgttgtgattggagatacgatcaagaaacagaaaatcatcgcaattaaaattgacatcaaaacaggttgtaaaccaagtaatgaagcaatcccttgtccacgccaaacgcatgaagaaacttttgttttcagaaaactagattca

SEQ ID NO: 1272 - protein, 84 aa, Streptococcus agalactiae
MTDHPAIQSPKLAAQIPKLAAPEPIPDKLIAKAIPTVVIGDTIKKQKIIAIKIDIKTGCKPSNEAIPCPRQTHEETFVFRKLDS

SEQ ID NO: 1273 - DNA, 303 bp, Streptococcus agalactiae
atggctaatgtattagcaaaaccgaagattatgctacctatgatatcttcagcagcaatactaggaattctcggagctctctttaatattcaaggaacaccagctagtgcaggttttggtatcagtggtttgattggaccgattaatgctcttaatttagcaaaaggtggatggtcagttatgaatatgttattgataattataatatttgttgctgcaccaattatattgaattttatttttaattacctctttataaaagtacttaaaattattgatccaatggactataaattagatatt

SEQ ID NO: 1274 - protein, 101 aa, Streptococcus agalactiae
MANVLAKPKIMLPMISSAAILGILGALFNIQGTPASAGFGISGLIGPINALNLAKGGWSVMNMLLIIIIFVAAPIILNFIFNYLFIKVLKIIDPMDYKLDI

SEQ ID NO: 1275 - DNA, 543 bp, Streptococcus pyogenes
atgattggtcaaggaatagcgtctctacttggtttacaacctattttgatgtctctccttattgccatgattttctgcttccttattgtttctccaattacaacggtaggaattgctcttgcgattaacttatctggtattggttcaggtgccgcaagctttggactttgcttagcaggttgggctgttaattcaaaaggaacttcacttgctcacgtcttgagatcaccgaaaatttcaatggccaacgttttatcaaaaccaaaaatcatgttgccaatgttatgttctgcagctgtacttggtgttattggtgctatctttaatattcaaggaacacctgctagtgcaggctttggaattagtggtttgatcggacctatcaatgcccttaatttagctaaaggcggatggtgtccagtaaatattctacttatcattatcatttttgtaggggcaccaattgttctcaatatgatctttaactacctttttatcaaggtgcttaaagtgattgatccaatggattacaaacttgatatc

SEQ ID NO: 1276 - protein, 181 aa, Streptococcus pyogenes
MIGQGIASLLGLQPILMSLLIAMIFCFLIVSPITTVGIALAINLSGIGSGAASFGLCLAGWAVNSKGTSLAHVLRSPKISMANVLSKPKIMLPMLCSAAVLGVIGAIFNIQGTPASAGFGISGLIGPINALNLAKGGWCPVNILLIIIIFVGAPIVLNMIFNYLFIKVLKVIDPMDYKLDI

SEQ ID NO: 1277 - DNA, 618 bp, Streptococcus agalactiae
gtgaaatcacaaacaatcattattagtaggaggcatcttatgtcggatgttgtcgaaaaacaaacaactaaatcgtttataatgaacgtattaaatggtttagctttagggactgttattgtcttgataccaggagcaatccttggagaattaatgaaagctttactgccaatgtggagcggctttgcaactttaatcgctgcaacagcagttgcaacaagtatgatggggcttgttattggtattatggttggtctcaattttaaatttaatcccattcaatcagcatcactaggattagcggttatgtttgcaggtggagctgcaaccttccttaaaggcgctattatgctaaaaggaacaggcgatatcattaacatgggaattactgctgccttaggtgtccttttgatccaatttttatctgacaagacgaaatcattcactttgattgtcattccaacagtaacactcttactagttggaggagtaggtcatgtgttattaccttatgtcaaaatgattaccaccatgattggacaagggacacgccgtacgcatgaaaactttctcttcatccttttgtgcccggacatcaattttgaaaagattcctttt

SEQ ID NO: 1278 - protein, 206 aa, Streptococcus agalactiae
MKSQTIIISRRHLMSDVVEKQTTKSFIMNVLNGLALGTVIVLIPGAILGELMKALLPMWSGFATLIAATAVATSMMGLVIGIMVGLNFKFNPIQSASLGLAVMFAGGAATFLKGAIMLKGTGDIINMGITAALGVLLIQFLSDKTKSFTLIVIPTVTLLLVGGVGHVLLPYVKMITTMIGQGTRRTHENFLFILLCPDINFEKIPF

SEQ ID NO: 1279 - DNA, 1056 bp, Streptococcus pyogenes
atgacaacaacagataaagagacatttagttcttttatgaataaggtcttggctggtacagcgattgctatcgttgtggcactcattccaaatgctattttagcgactttcttaaaaccgcttttgccaaatatggcagctgctgaatttttacacattgtgcaagtcttccaattcttcacgccgattatggctggtttcttgattgggcaacaatttaagtttaatcctatgcaacagttggctgttggtggagctgcttatatcggttctggagcctgggcttatacagaagtcattcaaaaaggtgtggcgacaggaacattccaacttagaggtattggggacttaatcaatatgatgattacagctagccttgcggttttagctgtgaaatattttgggaataaatttggctctttaaccattatcttgttacctatcactataggaactggcgtaggttatattggttggaaatttttgccttatgtgtcttacgtgacaaccctgatcggacaagggattaattcttttacaaccttacaacctattttaatgtctattttaattgcagttgctttctcgcttatcattgttagtccgatttcaactgttgcaatcggtttagctattgggcttaatggaatggctgcgggagcagcttctatgggaattgcatcgacagcagcagtcttagtgtgggcgacgcttaaagttaataaatctggtgtaccaattgctatcgcacttggggctatgaaaatgatgatgccaaacttcttgaaacatcctatcatggctattccgatggtgttcactgcagcaattagctcattaacagtaccattgtttaatcttgttggaacaccagcttcatctggttttggcttagttggtgcagtaggtccgattgcttctttagcaggtggtagctcaatacttattattatccttgcttggatcattgttccgtttgcggttgcttttgcggcgcataaggtttctaaagatattctaaaactgtataaagaagacattttcgtctttgaaggc

SEQ ID NO: 1280 - protein, 352 aa, Streptococcus pyogenes
MTTTDKETFSSFMNKVLAGTAIAIVVALIPNAILATFLKPLLPNMAAAEFLHIVQVFQFFTPIMAGFLIGQQFKFNPMQQLAVGGAAYIGSGAWAYTEVIQKGVATGTFQLRGIGDLINMMITASLAVLAVKYFGNKFGSLTIILLPITIGTGVGYIGWKFLPYVSYVTTLIGQGINSFTTLQPILMSILIAVAFSLIIVSPISTVAIGLAIGLNGMAAGAASMGIASTAAVLVWATLKVNKSGVPIAIALGAMKMMMPNFLKHPIMAIPMVFTAAISSLTVPLFNLVGTPASSGFGLVGAVGPIASLAGGSSILIIILAWIIVPFAVAFAAHKVSKDILKLYKEDIFVFEG

SEQ ID NO: 1281 - DNA, 882 bp, Streptococcus agalactiae
atggatattagacaacttacttactttattgctgttgcagaagcaaaaaattattcacgcgctgcaaaaagtctttttgtgacccaacctacactttcacaatccattaaaaaattagaagcagaattaaatactattttattcttacaaaatggtcgtcaactcgctttaactgaagcaggagaaattctctatgagaaaggacaattgttgatgactaatgttaatcaaatggttacggagatccagcaattaaatcaagaaaaaaaggaaggtatccgtgtagggcttacttctctttttgctattcaatttatgaaacagatttcaacttttatggctacacattcaaatgttgaagtatctttgattcaagatggttcccgtaaattacaagaattgttagcaaaaggaaagatcgatattggcttattgtcctttccaagtacccgcaatgatatcactatcgaaccactgcaaacctcaactaaaggatataaagtaagcattgtcatgccaaaatcgcatcctcttgcaacacttcctgaaattgaacttaatgatttaagagattataaagttgcctcactcaacgaacattatatgctaggagagatgttgcctcgtaaatgtcgtgctttaggatttgacccccatatcgtctttaaacacaatgactgggaagttcttattcatagtttacaagacctcaatgcagtcactattttaccaagtgaatttgaaagcattagccaagttcaagatttatgctgggtcccacttaaggataaaaataatttttatccgattggtattgcttaccgaaatgatacttcttttagtcctatgattgaagaatttttaagtcttttaaagaccaat

SEQ ID NO: 1282 - protein, 294 aa, Streptococcus agalactiae
MDIRQLTYFIAVAEAKNYSRAAKSLFVTQPTLSQSIKKLEAELNTILFLQNGRQLALTEAGEILYEKGQLLMTNVNQMVTEIQQLNQEKKEGIRVGLTSLFAIQFMKQISTFMATHSNVEVSLIQDGSRKLQELLAKGKIDIGLLSFPSTRNDITIEPLQTSTKGYKVSIVMPKSHPLATLPEIELNDLRDYKVASLNEHYMLGEMLPRKCRALGFDPHIVFKHNDWEVLIHSLQDLNAVTILPSEFESISQVQDLCWVPLKDKNNFYPIGIAYRNDTSFSPMIEEFLSLLKTN

SEQ ID NO: 1283 - DNA, 480 bp, Streptococcus pyogenes
ttgtcccaaggaaaaatcgatattggtctcctctcctttctaagtattcgaaaggatattaccattgagctattacaaacgtccacaaaaggctataaggtcagtatcgttctcctcaaacagcaccctttggcgcaacatcctcagttaaaacttaaagatttaaaaggctataagattgcttctttaaacgatcactacatgttaggcgaaatgcttcctagaaaatgccgagctctcggttttgaaccagatattgtctttaaacacaatgattgggaagttcttattcatagtttgcacgatttaaataccttgactatcctcccgagtgattttgagagtcttaatcaggtagataacttagtttggattcctttgcaagataaaaataatttttaccctattgggattgcttaccgagatgatgcgagtttcagtccagttattgaggaatttttaagccttttaaaaacgaac

SEQ ID NO: 1284 - protein, 160 aa, Streptococcus pyogenes
LSQGKIDIGLLSFLSIRKDITIELLQTSTKGYKVSIVLLKQHPLAQHPQLKLKDLKGYKIASLNDHYMLGEMLPRKCRALGFEPDIVFKHNDWEVLIHSLHDLNTLTILPSDFESLNQVDNLVWIPLQDKNNFYPIGIAYRDDASFSPVIEEFLSLLKTN

SEQ ID NO: 1285 - DNA, 867 bp, Streptococcus agalactiae
atgctactatttaatagaaattgttgtagggattatcaaaaggaggaagaaatgattttaaaaatttgtcgtgcagcatatagtttacaatggggaggtgtttaccaattagctttgctggattatcctcgaattaaggcgtttgaattggaaaggataggagctttcatagcttacgagaaacaatataaaagaaaaactgagatacaatgtgacgataaacatctcctcgcaaaaattgttcattttttaaaatacaatagttttacttttccctatattcccaaatatagagaagcggcagctacttttaatgaggatggtattagtttaacttctgattttttaagccatacatgtacgattgaaactgcaaaactaatttttaaagaaggtaaaatcttatcagcagttaaagcctttaataagcctgctgaagtactggtaaaagataagaggaatgctgctggagaccctaaagattactttgactatgtgatgttgaactggtcaaataccaattctggttatcgtttagtaatggaaagattgttaggcaaagcaccatctgaacaggagttaacagtaggttttaagccaggggtcagttttcattttacttatcaagatatcatcaatcatcctgattctatttttgatggttatcatcctgctaaaattaaaaatcagctttctttagcagaacatttagttgcatgtgttatcccaaaacattatcaagaagattatcaaagccttgtgcccaatgacttgaaacacagggtttattatttagattactgtaacgaaacactttatgagtggaatcaaaaagtttatgattttctttgtcatttggaaaataaa

SEQ ID NO: 1286 - protein, 289 aa, Streptococcus agalactiae
MLLFNRNCCRDYQKEEEMILKICRAAYSLQWGGVYQLALLDYPRIKAFELERIGAFIAYEKQYKRKTEIQCDDKHLLAKIVHFLKYNSFTFPYIPKYREAAATFNEDGISLTSDFLSHTCTIETAKLIFKEGKILSAVKAFNKPAEVLVKDKRNAAGDPKDYFDYVMLNWSNTNSGYRLVMERLLGKAPSEQELTVGFKPGVSFHFTYQDIINHPDSIFDGYHPAKIKNQLSLAEHLVACVIPKHYQEDYQSLVPNDLKHRVYYLDYCNETLYEWNQKVYDFLCHLENK

SEQ ID NO: 1287 - DNA, 771 bp, Streptococcus agalactiae
atgagcggtgaaaattctatttctttaatgtcattactaatggcatcgtcattagttttgattactttatttttttcttactggcaaaagttaaacctagaaaaagaagtgattattagcgctatccgagcagtgattcaattattagcagtgggttttttgctagactatatatttggttatcaaaatcctattttcacagctcttttaatgctattcatgattattaatgcttcttataacgcagctaagcgtggtaaagggattaataaagggtttgttatttcatttatagctattgggtcagggactataatcactttatctgtcttgattttttcaggaattttaaaatttgttccgaatcaaatgattcctgtaggtggtatgattattagtaattctatggtagcaatcggtttgtgctataaacaattattgtccgaatttagaagtaaacaagaggaagtggagacaaaattagctttaggagcagatattttgccagcttcgattgatattattcgtgatgttatcaaaactggtatggtacctacaattgattcagctaaaacacttgggattgtatctttgccagggatgatgacagggttaattcttgctggaacttcacctatccaagcggttaaataccaaatgatggtgacgtttatgctattagcaacgacttcgatagcttcttttgtagctacttatttggcttataaaattttctttaataatcgtaagcaattagtagtaacaaaagat

SEQ ID NO: 1288 - protein, 257 aa, Streptococcus agalactiae
MSGENSISLMSLLMASSLVLITLFFSYWQKLNLEKEVIISAIRAVIQLLAVGFLLDYIFGYQNPIFTALLMLFMIINASYNAAKRGKGINKGFVISFIAIGSGTIITLSVLIFSGILKFVPNQMIPVGGMIISNSMVAIGLCYKQLLSEFRSKQEEVETKLALGADILPASIDIIRDVIKTGMVPTIDSAKTLGIVSLPGMMTGLILAGTSPIQAVKYQMMVTFMLLATTSIASFVATYLAYKIFFNNRKQLVVTKD

SEQ ID NO: 1289 - DNA, 654 bp, Streptococcus agalactiae
atgtcctatttaacctttaaacacgttgattttaaaacggatgataagttggttttaaatgatatcaactttgcaattgatgaaggtgattttgtttctattgtagggccatctggaagtggtaagagtactgtattaaaattagccagtggtttaatgagtcctactgcaggtcatattttctttgatggaaaagatttgaaccaattagaaccgattgaaagtcgaaaaatgatttcttactgttttcaaacgccacatttatttggtaatacagtggaagacaatattagttttccttaccacattcgacacgaaaaagtagattatagacgcgttgatgatttatttcaacgttttgaaatggaccagtcttacctgaaacaggatgtcaaaaaactatcaggaggagaaaagcaacgtattgctctgattaggcaattattgtttgaacctaaagttttactcttagatgaagttacttcggctttagacaatcataataaagctattgttgaaaaggttattaaatcattacatgacaaaggaataacgattttgtggattacgcatgatgaggaacagagtcgtcgatttgccaataaagtcttaaaagttgtcaatggtagtattgaagcaatggaggttataaaa

SEQ ID NO: 1290 - protein, 218 aa, Streptococcus agalactiae
MSYLTFKHVDFKTDDKLVLNDINFAIDEGDFVSIVGPSGSGKSTVLKLASGLMSPTAGHIFFDGKDLNQLEPIESRKMISYCFQTPHLFGNTVEDNISFPYHIRHEKVDYRRVDDLFQRFEMDQSYLKQDVKKLSGGEKQRIALIRQLLFEPKVLLLDEVTSALDNHNKAIVEKVIKSLHDKGITILWITHDEEQSRRFANKVLKVVNGSIEAMEVIK

SEQ ID NO: 1291 - DNA, 1152 bp, Streptococcus pyogenes
ttgactaagccaattatcacatttaacaatgtttcaaaaacatttgaggacagtggaacacaggttctaaagaacattaactttgaccttgaagaaggaaaattttacaccctgcttggagcttctggctctggaaaatcaactattttaaatattatggcgggcctactagatgccagcagcggagacatttatttagatggggaacgtattaatgatttgccgattaataaacgtgacattcataccgttttccaaaattatgccctcttccctcatatgactgtttttgagaatgttgcctttgctttgaagctgaagaaagtggacaagaaagagattgctaagcgcgtgaaagaaaccttgaaaatggttcaattagaagggtttgaaaatcgttctatccagaagttgtctggtggtcaacgtcaacgtgttgccattgcgcgtgcgattatcaatcaaccgcgtgtggtcttacttgacgaaccactctcagcccttgatttgaaattaagaacagagatgcaatatgaattacgtgaattgcaacaacgtctaggcattacctttgtttttgttactcacgatcaagaagaagccttggccatgagtgattggatttttgtcatgaatgaaggtgaaattgttcagtcgggaacaccagtggatatttacgatgagccaattaatcattttgttgctaattttattggagaatctaatattattaacggtaccatgattgaagactatcttgtctcctttaacgggaaagaatttgaatctgtggacggtggaatgcgccctaatgagcctgttgaagtggttattcgtcctgaagatcttcaaattactttgccagaagaagggaaattacaagttaaggttgatacccaattattccgcggggttcactacgaaattattgcctatgatgaattgggtaatgaatggatgattcattctacccgcaaagctatcgaaggagaagttatcggattagattttacccctgaagatcttcatatcatgcgtcttaatgagactgaagaggaatttgatgcccgtattgaagaatatgtggaaatggatgagcctgaagatggattgattaatgccattgaggaggagcgtaatgaagaaaacctc

SEQ ID NO: 1292 - protein, 384 aa, Streptococcus pyogenes
LTKPIITFNNVSKTFEDSGTQVLKNINFDLEEGKFYTLLGASGSGKSTILNIMAGLLDASSGDIYLDGERINDLPINKRDIHTVFQNYALFPHMTVFENVAFALKLKKVDKKEIAKRVKETLKMVQLEGFENRSIQKLSGGQRQRVAIARAIINQPRVVLLDEPLSALDLKLRTEMQYELRELQQRLGITFVFVTHDQEEALAMSDWIFVMNEGEIVQSGTPVDIYDEPINHFVANFIGESNIINGTMIEDYLVSFNGKEFESVDGGMRPNEPVEVVIRPEDLQITLPEEGKLQVKVDTQLFRGVHYEIIAYDELGNEWMIHSTRKAIEGEVIGLDFTPEDLHIMRLNETEEEFDARIEEYVEMDEPEDGLINAIEEERNEENL

SEQ ID NO: 1293 - DNA, 177 bp, Streptococcus agalactiae
ttgcaactatcaccaataaatgctgcaataaagaaaataataagaaaagttacaatattgaaggacatttttggatttgcagcaagggctccagcagcaaataataaactatcacctggtaaaaatggaaagatgacagccccagtttcaacgaaaataacgaggaagagcaataga

SEQ ID NO: 1294 - protein, 59 aa, Streptococcus agalactiae
MQLSPINAAIKKIIRKVTILKDIFGFAARAPAANNKLSPGKNGKMTAPVSTKITRKSNR

SEQ ID NO: 1295 - DNA, 636 bp, Streptococcus agalactiae
atgtttttaatcgattttattttacatattgatactcatatctatgctatggctaacactgttggtaattggacctatctattgctcttcctcgttattttcgttgaaactggggctgtcatctttccatttttaccaggtgatagtttattatttgctgctggagcccttgctgcaaatccaaaaatgtccttcaatattgtaacttttcttattattttctttattgcagcatttattggtgatagttgcaacttcttgattggtcgtacatttggttaccgttttatcaaacatcctttctttcgtcgtttcattaaagaaaaaaatatccgagatgctgagctttattttgagaaaaaaggtactgctgccatcattttagggcgctatatccctattatcagaacctttgttccttttgtagcaggtattagtcagctccctccaaaagtatttatcaaacgcgccttcattgcagcattatcttggtcagttattgcaacaggttctggttttctctttggtaatattccttttgtgaagcagcacttctcgcttattatcttgggaattgtatttgttaccttaattcctgtccttatttctggtgtcaaatcatatcggaacactaag

SEQ ID NO: 1296 - protein, 212 aa, Streptococcus agalactiae
MFLIDFILHIDTHIYAMANTVGNWTYLLLFLVIFVETGAVIFPFLPGDSLLFAAGALAANPKMSFNIVTFLIIFFIAAFIGDSCNFLIGRTFGYRFIKHPFFRRFIKEKNIRDAELYFEKKGTAAIILGRYIPIIRTFVPFVAGISQLPPKVFIKRAFIAALSWSVIATGSGFLFGNIPFVKQHFSLIILGIVFVTLIPVLISGVKSYRNTK

SEQ ID NO: 1297 - DNA, 225 bp, Streptococcus agalactiae
gtgttaaatagaaatttttggatacattacttagtgttccgatatgatttgacaccagaaataaggacaggaattaaggtaacaaatacaattcccaagataataagcgagaagtgctgcttcacaaaaggaatattaccaaagagaaaaccagaacctgttgcaataactgaccaagataatgctgcaatgaaggcgcgtttgataaatacttttggagggagc

SEQ ID NO: 1298 - protein, 75 aa, Streptococcus agalactiae
MLNRNFWIHYLVFRYDLTPEIRTGIKVTNTIPKIISEKCCFTKGILPKRKPEPVAITDQDNAAMKARLINTFGGS

SEQ ID NO: 1299 - DNA, 471 bp, Streptococcus agalactiae
atgcttgatagaaccattcgtcaatatcaaaatcgcagagataccactcttcccgatgcaaattggaaaccattaggttggcatcaagtagctactaatgaccattatggacatgcagtcgacaaggggcatttaattgcctatgctttagctggaaatttcaaaggttgggatgcttccgtgtcaaatcctcaaaatgttgtcacacaaacagctcattccaaccaatcaaatcaaaaaatcaatcgtggacaaaattattatgaaagcttagttcgtaaggcggttgaccaaaacaaacgtgttcgttaccgtgtaactccattgtaccgtaatgatactgatttagttccatttgcaatgcacctagaagctaaatcacaagatggcacattagaatttaatgttgctattccaaacacacaagcatcatacactatggattatgcaacaggagaaataacactaaat

SEQ ID NO: 1300 - protein, 157 aa, Streptococcus agalactiae
MLDRTIRQYQNRRDTTLPDANWKPLGWHQVATNDHYGHAVDKGHLIAYALAGNFKGWDASVSNPQNVVTQTAHSNQSNQKINRGQNYYESLVRKAVDQNKRVRYRVTPLYRNDTDLVPFAMHLEAKSQDGTLEFNVAIPNTQASYTMDYATGEITLN

SEQ ID NO: 1301 - DNA, 480 bp, Streptococcus pyogenes
atgccttacttactaagtcgacacgacagtatcgaaatcgctatcaaacggataatgcttatcgtaactttaagcccagcaggttggcaccgattgcaccacttaaaaggaagttatgatcacgcggttgatagagggcatttgctaggttatgctttagttggtggactgaaaggttttgatgcttctactggtaatcctgataatattgccactcaactaagttgggctaatcaagcaaataaaccctacttgacaggtcagaattactatgaaggtttagtacgtcgtgctttagataaggggcatcgcgtccgctaccgtgtcaccctactttatgatggtgataatctactagccagcggtagccatttggaggctaaatcctctgatgacagcttgacttttaacgtgtttgttccaaatgtccaagcaggattgaccgctgactatcggacgggacaaatagctatcaatctc

SEQ ID NO: 1302 - protein, 160 aa, Streptococcus pyogenes
MPYLLSRHDSIEIAIKRIMLIVTLSPAGWHRLHHLKGSYDHAVDRGHLLGYALVGGLKGFDASTGNPDNIATQLSWANQANKPYLTGQNYYEGLVRRALDKGHRVRYRVTLLYDGDNLLASGSHLEAKSSDDSLTFNVFVPNVQAGLTADYRTGQIAINL

SEQ ID NO: 1303 - DNA, 216 bp, Streptococcus agalactiae
atgttctacatgaagttagctaaccgtctatcactagctgctacgattgttaatgaagcaaatgccaattctccatttggtattattatacatagtgataaggctgaaaacgttgaatggaacgattttgagacacaattccctgatttattcaattcaccaaaaaaagaggagtctcctaaaaaaagtctatggcaacatttctttagtcaaaaa

SEQ ID NO: 1304 - protein, 72 aa, Streptococcus agalactiae
MFYMKLANRLSLAATIVNEANANSPFGIIIHSDKAENVEWNDFETQFPDLFNSPKKEESPKKSLWQHFFSQK

SEQ ID NO: 1305 - DNA, 456 bp, Streptococcus pyogenes
atgactaatttagaagataagctattaaaaggagcctggggagaaagaagattaaatcctgagcagcaacgctactatctaggaacgtatgctgaacgagtcgttttaagtgctttattagacgaagctcaaactaaaacagtaaaagactatttgaaaagagaattaccgagccttcaattagtctatcaacctttacacttaaaaatctcttccaagctggcacctcaacttcaaatactctatatgaaattagcaaaagaaaaccatttacctgttactattattacagaaacgcatatgacttcaccttttgcgtttatccttcataccgaccacgcaataaatctgaaggaaacacgtttagaagtcatcttaaagcagacaaaaaacgatcaacttagcaaacaaactcctgaaaaaaccaaatccttttggaaaagatttttgaaaaaa

SEQ ID NO: 1306 - protein, 152 aa, Streptococcus pyogenes
MTNLEDKLLKGAWGERRLNPEQQRYYLGTYAERVVLSALLDEAQTKTVKDYLKRELPSLQLVYQPLHLKISSKLAPQLQILYMKLAKENHLPVTIITETHMTSPFAFILHTDHAINLKETRLEVILKQTKNDQLSKQTPEKTKSFWKRFLKK

SEQ ID NO: 1307 - DNA, 483 bp, Streptococcus agalactiae
atggaaatttgggatgcttatgaccaatatgggttcattacaggtcttacacttaatagggatcaaaatatcccacaaggcttattccacttagttgttgatgttatcctttttcatgaggatggtgacgtattgatgatgaaacggcaccctaaaaagaaagcttttcctgcttatttcgaagccaccgctggcggatctgcccttaaaggagaaaatgctaagcaagctattctaagggaactcaaagaagaaactggtatcgttcctcaatgtctaacctttcttaatagagagtggttctctgagcgttcttactttgtagaccattttatcgcaaaatacaatggtgcaaaagatataattacattgcaagaaggagagaccgttgactatatctggttaaaaccagaatatattgatttatttttatctaaaaacaaattaataccctctcaaataaaactcttaaaatccttaatc

SEQ ID NO: 1308 - protein, 161 aa, Streptococcus agalactiae
MEIWDAYDQYGFITGLTLNRDQNIPQGLFHLVVDVILFHEDGDVLMMKRHPKKKAFPAYFEATAGGSALKGENAKQAILRELKEETGIVPQCLTFLNREWFSERSYFVDHFIAKYNGAKDIITLQEGETVDYIWLKPEYIDLFLSKNKLIPSQIKLLKSLI

SEQ ID NO: 1309 - DNA, 639 bp, Streptococcus agalactiae
atgattaaaggtttgttagtcatggacgttgattcaaccttaataatggaagaagctattgatttattagctattgaagcaggggtggggaaacaggttgctgcactgactgacgctgcaatgcgtggcgagttagattttgaagaagctttgaagaaaagagtagcgctacttaaaggtttgcctgttactattttgacagatatattatcctcaatacattttactccaggggcttatgaattgattaaagagtgtcacaagcgtcagatgaaagttggtcttgtatcaggaggttttcacgagacgattgatatcttagctaagcaattacaagttgattatgtcaaagcgaatcgtcttggtgtcaaaggtggttttctcactggcgaagttgagggagagattgtcactaaagaagtgaaaaaaataaagttaaaagagtgggcttctgaaaatcacttagacctttcacaaaccatcgcaatgggagatggtgccaatgatttaccaatgatcaaatccgctggggtaggaattgctttttgtgcaaaaccaattgtcagagaagaagctgcgtatcagattaatgaaaaaaatttgcttaaggtatttgatattattgatgcaaatgaaaac

SEQ ID NO: 1310 - protein, 213 aa, Streptococcus agalactiae
MIKGLLVMDVDSTLIMEEAIDLLAIEAGVGKQVAALTDAAMRGELDFEEALKKRVALLKGLPVTILTDILSSIHFTPGAYELIKECHKRQMKVGLVSGGFHETIDILAKQLQVDYVKANRLGVKGGFLTGEVEGEIVTKEVKKIKLKEWASENHLDLSQTIAMGDGANDLPMIKSAGVGIAFCAKPIVREEAAYQINEKNLLKVFDIIDANEN

SEQ ID NO: 1311 - DNA, 1722 bp, Streptococcus agalactiae
atgtcgagcggaatcatattgctgcttgtggctatagtcctgcttgtgattattgcctacgtagtcggcgtcgtaataagaaaacgtaatgatacattaattgcaaacttagaaactagaaaacaagagttagttgaccttcctgtgcaagaggagattgagcaagtcaaattgcttcatttgattggccaaagtcaatcaacttttagagaatggaaccaaaaatggactgatttatcaactaattcatttaaagatattgattttcatttagttgaagctgaaaatcttaatgattcatttaattttgtgcgtgctaagcacgagattgataatgttgatagtcagctaactattatagaagaagatattgtttcgattcgtgaagctttagaagttttaaaagagcaagaagagaaaaatagtgcccgtgtaacacatgctttggacctatacgaaacacttcaaaaatcaatttctgaaaaagaagataattacgggacaaccatgccagaaattgaaaagcagttgaaaaatatcgaggctgaattttcacattttgtgaccttaaactcaactggtgacccgattgaagcttctgaagttttgaataaagcagaggagcatacgattgctttagggcaaattacagaacaaattccagctattgttgctaaattagaagacgattttccagatcagttagatgatttggagacaggatatcgtcgtcttttagaggaaaactaccatttccctgaaaaggatattgaacaacgttttcaagaagttcgtgaggctattcgttcgaattcagatggtttagttagtttggatctagatcgtgctcgcgatgaaaatgaacatattcaagaaaaaattgataaactttatgatatttttgaacgtgagattgctgcttataaagtagctcataaggatagtaaaattattcctcaattccttgctcatgcaaaatctaacaatgaacaactggggcatgaaatcaaacgattatctgctaaatatatcttaaatgaaaatgaaagcttaagtttacgttccttcacaaatgatttggaagaaattgaaacaaaggttttaccttctgtagaaaattttggtcaagaagcttcaccttatactcatctacaaattttatttgagcgtacgttgaaaacattgactactgttgaagaaaatcaaatggaagtttttgaagccgttaaaactattgaaagcgttgagacacgagcacgccaaaatatggataagtatgttaacaagctccatatgattaaacgtttcatggaaaaacgcaatcttccaggaatcccgcaagacttcttaagcactttctttacaacaagttctcaaattgaggcacttattaatgaactcagtcgcggtcgtattgatattgaggctgtttcacgtttaaatgatgtgactacaaatgctatcgctaatttagagcaagctacatatctagttgttcaagatgcgactctcacagagcagttactacagtattcaaaccgttatcgtagttttgaacaaaatgtgcaaaagagctttgaacaagctttgtacttatttgaagttgaacataactataaagcatctttcgatgaaatttcatacgcacttgagactgtggaaccaggtgtaactgaccgttttgtgacgtcttatgaaaagacacaagaacgtattcgtttc

SEQ ID NO: 1312 - protein, 574 aa, Streptococcus agalactiae
MSSGIILLLVAIVLLVIIAYVVGVVIRKRNDTLIANLETRKQELVDLPVQEEIEQVKLLHLIGQSQSTFREWNQKWTDLSTNSFKDIDFHLVEAENLNDSFNFVRAKHEIDNVDSQLTIIEEDIVSIREALEVLKEQEEKNSARVTHALDLYETLQKSISEKEDNYGTTMPEIEKQLKNIEAEFSHFVTLNSTGDPIEASEVLNKAEEHTIALGQITEQIPAIVAKLEDDFPDQLDDLETGYRRLLEENYHFPEKDIEQRFQEVREAIRSNSDGLVSLDLDRARDENEHIQEKIDKLYDIFEREIAAYKVAHKDSKIIPQFLAHAKSNNEQLGHEIKRLSAKYILNENESLSLRSFTNDLEEIETKVLPSVENFGQEASPYTHLQILFERTLKTLTTVEENQMEVFEAVKTIESVETRARQNMDKYVNKLHMIKRFMEKRNLPGIPQDFLSTFFTTSSQIEALINELSRGRIDIEAVSRLNDVTTNAIANLEQATYLVVQDATLTEQLLQYSNRYRSFEQNVQKSFEQALYLFEVEHNYKASFDEISYALETVEPGVTDRFVTSYEKTQERIRF

SEQ ID NO: 1313 - DNA, 1722 bp, Streptococcus pyogenes
atgtcaagcggaattatcttgctgattgtggctatagtcctactagtgattatcgcctatctagtgggtgtcatcatacgaaagcgtaatgattccctaattaccagtctagaagaacgaaaacaggccttgtttgctttgcctgttaatgatgaaattgaagaagtaaagtcacttcatttgataggacagagccaaacctcttttcgggaatggaatcagaaatgggtagacttaactgtgaattcgtttgcagatattgaaaatcatatttttgaagctgaaaatttgaatgatacgtttaattttattcgcgccaagcatgagattaatagcgttgaaagtcagcttaatcttgttgaagaagatatcgcttctattcgtgaagcacttaatatcttaaaagagcaagaagaaaaaaatagtgctcgtgtcacccatgctcttgatttatatgaaaagctccaagcttctatttctgagaatgaagataattttggttcaactatgcctgaaattgacaaacagatgaaaaacattgaaactgaattttcacagtttgtcgcactcaactcatcaggtgatcctgtagaagcttctgaagttctggatagagcagaagagcatactattgctctagggcagattacagagcagattccagctattgtggccaagttggaagatgattttccagatcagttagatgatttggaaacaggatatcgccgtttacttgaagaaaactatcattttccagaaaaaaacattgaggcacgttttcaggagattcgtgagtctattcgtgccaattcatcagagttagttacacttgacttggatcgtgctagagaagaaaacacgcatattcaagaacgcattgattctctttatgaagtctttgagcgcgaaattgccgcttataaggtagctgctaaaaatagtaagatgctacctcgttacctagaacatgtgaaacgtaataatgaacaactcaaagatgaaattgcacgtttatcacgtaaatatattctaagtgaaacggaaagtctgactgttaaggcatttgagaaggatattaaagagatagaagacagtacacttgctgttgcagaacaatttggtttacaagaaaaaccattttcagaactgcaagtgacttttgaacgcagtataaagacgcttactaatgtcgagtcaggtcaaatggatgtttttgcagcagttaaagatattgaaaaaattgaatcacaggcacgccataaccttgatgtttatgttactcagcttcatatgattaaacgttatatggaaaaacgtcacttgcctggaattccacaagactttcttagtgctttctttacaacgagttcacaattggaagctttgatggatgagcttagtagaggacggatcaatattgaggcagtgtcacgtttgtcggaagttgcgacggttgctattgctaatctagaagatttaacctatcaagtggttcaaaatgctaccttgactgaacaattactacaatattctaatcgctatcgttcttttgaagcaggagttcaaagtagttttgaacatgctttgagacttttcgaagtagaaaatgattatcaggcttcttttgatgaaatttcttatgctcttgaaacagttgaacctggggtaacagatcggtttgttaactcttatgaaaaaacacgagagcacattcgtttt

SEQ ID NO: 1314 - protein, 574 aa, Streptococcus pyogenes
MSSGIILLIVAIVLLVIIAYLVGVIIRKRNDSLITSLEERKQALFALPVNDEIEEVKSLHLIGQSQTSFREWNQKWVDLTVNSFADIENHIFEAENLNDTFNFIRAKHEINSVESQLNLVEEDIASIREALNILKEQEEKNSARVTHALDLYEKLQASISENEDNFGSTMPEIDKQMKNIETEFSQFVALNSSGDPVEASEVLDRAEEHTIALGQITEQIPAIVAKLEDDFPDQLDDLETGYRRLLEENYHFPEKNIEARFQEIRESIRANSSELVTLDLDRAREENTHIQERIDSLYEVFEREIAAYKVAAKNSKMLPRYLEHVKRNNEQLKDEIARLSRKYILSETESLTVKAFEKDIKEIEDSTLAVAEQFGLQEKPFSELQVTFERSIKTLTNVESGQMDVFAAVKDIEKIESQARHNLDVYVTQLHMIKRYMEKRHLPGIPQDFLSAFFTTSSQLEALMDELSRGRINIEAVSRLSEVATVAIANLEDLTYQVVQNATLTEQLLQYSNRYRSFEAGVQSSFEHALRLFEVENDYQASFDEISYALETVEPGVTDRFVNSYEKTREHIRF

SEQ ID NO: 1315 - DNA, 1950 bp, Streptococcus agalactiae
atgacagaagaaacaaagaatatggaacaacgtgctcaagaatatgacgcaagtcagattcaagtattagaaggtttagaagctgttcgcatgcgtccaggcatgtatatcggttcgacttcgaaagaagggcttcatcaccttgtatgggaaattgttgataactcaattgatgaagccttagctggatttgcaggacatattaaagtttacattgaaccagataactctattacagttgttgatgatggtcgcggtattccggtagatatccaagaaaaaactggaagaccagctgtagagacagtttttacagttctccatgccggtggtaaatttggtggtggcggatacaaggtttctggtggcttacatggtgtagggtcatctgttgttaatgcattgtcaacacaattagatgtcaaggtttataaaaatggcaaggttcattatcaagaataccaacgcggtgttgttgttaatgatcttgaaattatcggtgatactgacttatcaggaacaacagttcactttacgcctgacccagaaattttcactgaaaccactgtatttgattttgataaattagccaaacgtattcaggaattagcttttttaaatcgtggactaagaatctccatttcagacaagcgagaaggtcaagaagttgaaaaagaatatcactatgaaggtggtataggttcatacgttgagtttatcaatgagaacaaagaagtgatttttgaaaatcctatttatactgacggtgaattagatggtatttcagttgaagtagcaatgcagtatactactggatatcaagagactgttatgagttttgcaaataacatccacactcatgaaggaggaacgcacgaacaaggatttcgtactgccttgacacgtgtgattaatgattacgctaaaaagaataagattctcaaagaaaatgaagataatttaactggagaagatgttcgtgaaggtttaacagcagttatatctgttaaacatccaaatccacaatttgaaggacaaactaaaacaaaacttggaaattctgaagttgttaaaattacaaatcgtctctttagcgaagctttcaatcgattcctattagaaaatccacaagtagctaagaagattgttgaaaaaggaattttggcatctaaagcccgtattgcagcaaaacgggcgcgtgaagtaacacgtaaaaagtcaggcttagagatttcaaacttacctgggaaactggctgattgctcatctaataatgctgagatgaatgaactttttatagtggagggagattctgcgggagggtctgcaaaatcaggacgtaatcgtgagtttcaagcaattttaccgattaggggtaagattctaaacgttgaaaaagctacaatggataaaattttagcaaacgaagaaatccgaagtctcttcacagctatgggaactggatttggtgcagattttgatgtatcaaaagtcagatatcaaaaattagtcattatgactgatgccgatgttgatggagctcacatcagaactttacttttaactctgatttatcgttttatgcgacctgttttggaagcaggatatgtttatatcgctcaaccaccaatctatggtgtcaaagtaggaagtgagattaaagcttatattcagccaggggtcaatcaagaagaggaattacgtcaagctctagatacctatagttcaggacgttcaaaacctactgtacaacgttacaaaggtctaggtgagatggatgaccatcaactttgggaaacaacaatggatcctgaaaaccgcttgatggcacgtgtctcagttgatgatgcagcagaagcagataagattttcgatatgctaatgggagatcgagtagaaccacgacgtgaattcattgaagctaatgctgtttatagtaacttagatatc

SEQ ID NO: 1316 - protein, 650 aa, Streptococcus agalactiae
MTEETKNMEQRAQEYDASQIQVLEGLEAVRMRPGMYIGSTSKEGLHHLVWEIVDNSIDEALAGFAGHIKVYIEPDNSITVVDDGRGIPVDIQEKTGRPAVETVFTVLHAGGKFGGGGYKVSGGLHGVGSSVVNALSTQLDVKVYKNGKVHYQEYQRGVVVNDLEIIGDTDLSGTTVHFTPDPEIFTETTVFDFDKLAKRIQELAFLNRGLRISISDKREGQEVEKEYHYEGGIGSYVEFINENKEVIFENPIYTDGELDGISVEVAMQYTTGYQETVMSFANNIHTHEGGTHEQGFRTALTRVINDYAKKNKILKENEDNLTGEDVREGLTAVISVKHPNPQFEGQTKTKLGNSEVVKITNRLFSEAFNRFLLENPQVAKKIVEKGILASKARIAAKRAREVTRKKSGLEISNLPGKLADCSSNNAEMNELFIVEGDSAGGSAKSGRNREFQAILPIRGKILNVEKATMDKILANEEIRSLFTAMGTGFGADFDVSKVRYQKLVIMTDADVDGAHIRTLLLTLIYRFMRPVLEAGYVYIAQPPIYGVKVGSEIKAYIQPGVNQEEELRQALDTYSSGRSKPTVQRYKGLGEMDDHQLWETTMDPENRLMARVSVDDAAEADKIFDMLMGDRVEPRREFIEANAVYSNLDI

SEQ ID NO: 1317 - DNA, 1950 bp, Streptococcus pyogenes
atgattgaagaaaataaacattttgaaaaaaaaatgcaagaatacgatgccagtcaaattcaggttctagaagggctggaggctgtccgcatgcgtccagggatgtatattggctcgacagctaaagagggtttgcatcatttagtctgggaaattgttgacaactcaattgacgaagcattagcaggttttgcctctcatattaaagtctttattgaagcagataattccattacagtagtagatgatggccgtggaattccagttgatatccaagccaagacaggacgtcccgccgttgaaacagtttttacagtcttacacgcaggtggtaaatttggtggaggcggctataaggtttctggaggattacatggtgtagggtcatctgttgttaatgctttatcaacacaattagatgtacgtgtttataaaaacggccaaattcattaccaagaatttaaacgcggggctgttgtagcagatcttgaggtcattggaaccactgatgtgactggcacgaccgtacactttacacccgatccagaaatttttaccgaaacgactcagtttgattacagtgttttagcaaaacgtattcaagagttagcctttttgaatcgtggtttaaaaatttccattacagataagcgctcaggtatggaacaagaagaacatttcctttatgaaggtggaattggttcttatgttgaatttttaaatgataaaaaagatgttatctttgaaacgcccatctatacagatggtgaattagaaggtattgcagttgaagtagccatgcaatacacgactagctatcaagaaacagtcatgagttttgctaataatattcatactcatgaaggtggaacgcatgaacaaggctttagagcggctcttactcgggtcatcaatgactacgctaagaaaaataaaattcttaaagaaaatgaggacaatttgacaggagaagatgttcgtgaaggtttgacggcggtaatttctgttaagcatccaaatcctcaatttgaaggtcaaaccaaaacaaaattgggcaactcagaagtggttaagatcactaatcgtctctttagtgaggcctttcaacgttttcttttggaaaacccacaagttgctcgtaagattgtggaaaaagggattttggcttctaaagctagaattgcagctaagcgagcccgcgaagtcacccgcaaaaaatcaggcttagaaatttcaaacttacctggaaaattagcagactgttcgtcaaatgacgctaaccaaaacgaacttttcatcgtcgaaggagattcagcgggtgggtcggccaaatcaggtcgtaaccgagagtttcaagctatcttgcctattcgcggtaaaattttgaacgtggaaaaagcaactatggataagattcttgccaacgaagaaattagaagtctctttaccgctatgggtacaggttttggtgcagattttgacgtgtcaaaagctcgctaccaaaagctggttatcatgaccgatgccgatgtggatggcgctcatattagaaccttacttttaaccttgatttaccgctttatgagacctgttctagaagctggctatgtttacatcgcccagccacctatttatggtgttaaggtcggtagtgagattaaagagtatattcagccaggtattgatcaagaagaccaattaaaaacagctcttgaaaaatatagtattggtcgttcaaaaccaactgttcaacgttataaaggtcttggggaaatggatgaccatcaactttgggaaactactatggatcctgaaaatcgtttgatggcgcgtgtgacagttgatgatgccgcagaagcagataaagtatttgatatgttaatgggagatcgtgttgaaccaagacgtgatttcattgaggaaaatgcggtttatagtacactggatatt

SEQ ID NO: 1318 - protein, 650 aa, Streptococcus pyogenes
MIEENKHFEKKMQEYDASQIQVLEGLEAVRMRPGMYIGSTAKEGLHHLVWEIVDNSIDEALAGFASHIKVFIEADNSITVVDDGRGIPVDIQAKTGRPAVETVFTVLHAGGKFGGGGYKVSGGLHGVGSSVVNALSTQLDVRVYKNGQIHYQEFKRGAVVADLEVIGTTDVTGTTVHFTPDPEIFTETTQFDYSVLAKRIQELAFLNRGLKISITDKRSGMEQEEHFLYEGGIGSYVEFLNDKKDVIFETPIYTDGELEGIAVEVAMQYTTSYQETVMSFANNIHTHEGGTHEQGFRAALTRVINDYAKKNKILKENEDNLTGEDVREGLTAVISVKHPNPQFEGQTKTKLGNSEVVKITNRLFSEAFQRFLLENPQVARKIVEKGILASKARIAAKRAREVTRKKSGLEISNLPGKLADCSSNDANQNELFIVEGDSAGGSAKSGRNREFQAILPIRGKILNVEKATMDKILANEEIRSLFTAMGTGFGADFDVSKARYQKLVIMTDADVDGAHIRTLLLTLIYRFMRPVLEAGYVYIAQPPIYGVKVGSEIKEYIQPGIDQEDQLKTALEKYSIGRSKPTVQRYKGLGEMDDHQLWETTMDPENRLMARVTVDDAAEADKVFDMLMGDRVEPRRDFIEENAVYSTLDI

SEQ ID NO: 1319 - DNA, 558 bp, Streptococcus agalactiae
atgaattatcatgattatatttgggatttgggtggtacactacttgataattacgaaagttccacacgtgcttttgtagagactttgaaagaatttggatatcaagcagaccacgatagtgtgtatcaaaaattaaaagagtcaacagcagatgcaattgcatattttatccctgaagaagctgattttttaaaagagtataaggctaatgaagctaaggttttggaaacaccaattctattccaaggggcaaaagaacttttagcgaaaattcaaagacaaggtagtcgtaattttttggtgtctcatcgtgataatcaagttatagttattctggaaaaaacagaaattattgactattttacagaagtagtgactgctgataacggcttttcaaggaaacctagtcccgagagtatgctttatttgaaagaaaaataccaaattgataattgtttagtaataggcgatcgtgatatagataagcaagcaggagaatcggctggttttgataccttattagtcgatgggtcaaaatcattgatggagataatagag

SEQ ID NO: 1320 - protein, 186 aa, Streptococcus agalactiae
MNYHDYIWDLGGTLLDNYESSTRAFVETLKEFGYQADHDSVYQKLKESTADAIAYFIPEEADFLKEYKANEAKVLETPILFQGAKELLAKIQRQGSRNFLVSHRDNQVIVILEKTEIIDYFTEVVTADNGFSRKPSPESMLYLKEKYQIDNCLVIGDRDIDKQAGESAGFDTLLVDGSKSLMEIIE

SEQ ID NO: 1321 - DNA, 567 bp, Streptococcus pyogenes
atgaaaggtatgaattatcaagattatatatgggatttgggaggtaccttactcgataattacgagctttcaacccaagcttttgtccaaacgctagcttttttcagccttccaggagatcacgatgctgtttaccaaaaattaaaagaatcaaccgctatcgctgtggcaatgtttgctcctaatgagccagaatttttgcatgtgtataggctaagagaagcagacaaattggcacaacccatttggtgtttgggagctaaagaaattttgggaaagatagcgacttcaggttcgcgaaattttttaatttctcatcgagattgtcaggtgaaccaacttttagagcaagctgggttgctaatctattttacagaagtcgtgacagcttcaaatggctttgctcggaaaccaaatcctgaaagtttgttttatttaaaagaaaagtatgatattaatagtggattagtaattggagatcggctaattgataaacaagcaggacaagcagcgggttttaataccttgcttgttgacggtagaaaaaacctattggagatagtaacg

SEQ ID NO: 1322 - protein, 189 aa, Streptococcus pyogenes
MKGMNYQDYIWDLGGTLLDNYELSTQAFVQTLAFFSLPGDHDAVYQKLKESTAIAVAMFAPNEPEFLHVYRLREADKLAQPIWCLGAKEILGKIATSGSRNFLISHRDCQVNQLLEQAGLLIYFTEVVTASNGFARKPNPESLFYLKEKYDINSGLVIGDRLIDKQAGQAAGFNTLLVDGRKNLLEIVT

SEQ ID NO: 1323 - DNA, 1224 bp, Streptococcus agalactiae
atgaataaaaaaggaagtcctatgtcacaaaaatcaaactattttaaagggcaaattgattatgctgttgtgataccagtattttttttattaatgattggtttagcctcaatttatgttgcaacgatgaatgattatccttctaatatctatatcgcgatgtttcagcaggtgtcttggattattatggggtgtattattgcatttgtcgttatgcttttcagtactgaatttttatggaaagccacgccctatctgtatgctttaggactaaccctaatggttcttcccttaattttttatagtccacagctttttgcggcaacaggtgctaaaaattgggtgaccattggctcggtaactttgtttcaaccgtcagagtttatgaagatttcctatattttaatgttatctcgaataactgttagttttcatcagaaaaatcgcaaaacttttcaagatgattggaagttgctaggattgtttggtttggttacattgccagtgatgattcttctaatgttacaaaaagatttaggaacagcattagttttccttgccattttgtcaggtttaatccttttatcgggcatatcttggtggataatcttgccaattttatctactatcgttctttttatagctagctttttgatgatttttatctcaccaaacggcaaggaatggttttataatttggggatggatacatatcaaatcaaccgtttatctgcttggattgatccatttagttttgcagactcaattgcttatcaacaaacacagggtatggtatcaattggaagtggcggggtaacaggtaaaggttttaatattttagagctctcggttcctgttcgtgaaagtgacatgatttttactgtcattgctgagaattttggcttcattggttcggcgattgttttagggttatatctcattatcatttaccgtatgttaaggatcaccattgaatctaataatcaattttatacttttatatcaactggttttatcatgatgattgttttccatgtttttgaaaatattggtgcagcagttggtatattacctctaacaggaatcccacttccgtttatttcgcaaggtggaagttcattactaagtaatcttattggaattggattggtcttatccatgtcttatcaaaatacagttcgtcaggccaaggctaatggatcacatttgaagtatcgtagtata

SEQ ID NO: 1324 - protein, 408 aa, Streptococcus agalactiae
MNKKGSPMSQKSNYFKGQIDYAVVIPVFFLLMIGLASIYVATMNDYPSNIYIAMFQQVSWIIMGCIIAFVVMLFSTEFLWKATPYLYALGLTLMVLPLIFYSPQLFAATGAKNWVTIGSVTLFQPSEFMKISYILMLSRITVSFHQKNRKTFQDDWKLLGLFGLVTLPVMILLMLQKDLGTALVFLAILSGLILLSGISWWIILPILSTIVLFIASFLMIFISPNGKEWFYNLGMDTYQINRLSAWIDPFSFADSIAYQQTQGMVSIGSGGVTGKGFNILELSVPVRESDMIFTVIAENFGFIGSAIVLGLYLIIIYRMLRITIESNNQFYTFISTGFIMMIVFHVFENIGAAVGILPLTGIPLPFISQGGSSLLSNLIGIGLVLSMSYQNTVRQAKANGSHLKYRSI

SEQ ID NO: 1325 - DNA, 186 bp, Streptococcus agalactiae
ttgtctatcagaacagatatagatgagtttaaagaagcgattgataaaggctatatttcagggaacacagtagcgatagtgcgtaaaaacggaaagatatttgattatgtgttactacacgaagaagtgagagaagaagaggttgttacagttgagagagtgcttgatgtactgaggaagttatca

SEQ ID NO: 1326 - protein, 62 aa, Streptococcus agalactiae
MSIRTDIDEFKEAIDKGYISGNTVAIVRKNGKIFDYVLLHEEVREEEVVTVERVLDVLRKLS

SEQ ID NO: 1327 - DNA, 180 bp, Streptococcus pyogenes
atgctaacatacgacgagtttaagcaagcgattgacaatggatatatcgcaggcgatacagtagcgatcgtgcgtaaagacggacagatttttgattatgtgttgccacatgagaaagtaaagaatggagaagttgtgactaaggaaaaagtggaagaggtgctggtggagctttcgaga

SEQ ID NO: 1328 - protein, 60 aa, Streptococcus pyogenes
MLTYDEFKQAIDNGYIAGDTVAIVRKDGQIFDYVLPHEKVKNGEVVTKEKVEEVLVELSR

SEQ ID NO: 1329 - DNA, 198 bp, Streptococcus agalactiae
atgtcacaagaaaaactaaaatcaaaattagatcaagcaaaaggtggtgctaaagaaggctttggcaaaataaccggtgataaagagttagaagcaaaaggatttatcgaaaaaacaattgctaaaggcaaagaactagcagatgatgctaaagatgctgttgaaggggcagtagatgctgtcaaagaaaaactgaag

SEQ ID NO: 1330 - protein, 66 aa, Streptococcus agalactiae
MSQEKLKSKLDQAKGGAKEGFGKITGDKELEAKGFIEKTIAKGKELADDAKDAVEGAVDAVKEKLK

SEQ ID NO: 1331 - DNA, 198 bp, Streptococcus pyogenes
atgtcagaagaaaaattaaaatcaaaaattgagcaagcatctggtggcctaaaagaaggtgctggtaagttgacaggtgataaagagctagaagcaaaaggatttgttgaaaaaacaattgctaaaggcaaagaacttgcagacgatgcaaaggaagcggttgaaggtgctgtagatgccgttaaggaaaaattaaaa

SEQ ID NO: 1332 - protein, 66 aa, Streptococcus pyogenes
MSEEKLKSKIEQASGGLKEGAGKLTGDKELEAKGFVEKTIAKGKELADDAKEAVEGAVDAVKEKLK

SEQ ID NO: 1333 - DNA, 609 bp, Streptococcus agalactiae
atgaagaatatggcgctccctaaaatggctaccgttaagacaaaaacagctcttaaaaagactcaaaaaacgtatcctcaaaacttactcaaccagaaatttaatcctgataaacctaatcaagtatggtctactgacttcacctatatttctattggatataagaaatatgtctatctctgcgcaataattgatctctattctagaaaatatattgcttggaaattgagtcatcgtatggatgcaaagttagcatgtgacactctagaattagctcttaataaaagaaagattgaaggaacacttctctttcattccgaccaagggtcacaatttaaggccagggaatttagaaaaataattgatgacaacaatatcatgcattctttttctaaacctagatatccttatgataatgccgtaactgaagcatttttcaagtatttaaagcatagacaaatcaaccaaaaaaattatcaaaatatcaaacaggttcaattagactgctttgaatacattgagaatttttataacaattacatcccacatacggctaatctaggactaacccctaatcagaaagaagaaaattattttaacgcaataaaa

SEQ ID NO: 1334 - protein, 203 aa, Streptococcus agalactiae
MKNMALPKMATVKTKTALKKTQKTYPQNLLNQKFNPDKPNQVWSTDFTYISIGYKKYVYLCAIIDLYSRKYIAWKLSHRMDAKLACDTLELALNKRKIEGTLLFHSDQGSQFKAREFRKIIDDNNIMHSFSKPRYPYDNAVTEAFFKYLKHRQINQKNYQNIKQVQLDCFEYIENFYNNYIPHTANLGLTPNQKEENYFNAIK

SEQ ID NO: 1335 - DNA, 1080 bp, Streptococcus pyogenes
gtgttacaatctgttttaaaagacacaaaaacgaaaggacagcctatgtcaacagttaaacgctatgatgaagaattcaaacaatctcttgttaacctttatcaaactggaaaaactcggtctgaactctgtaaagactatggggtatccgcttctgcgcttgcaaaatggatcaaacagtattcccaagtcaaactcgaagataattctgtacttactgccaagcaaatacaagagctacaaaaacgtaatgcgcagcttgaagaggagaaccttatcctaaaaaaaagcaagtgccatattcatgcaaaacttaaagtaagactcctcgctgtttatcggttacgctttgaacacgtcacaacaaccttgtatcgtgttttacgtgtcaatcgctccacttactataaatttctaaaacataagccctcaaaaagagaattggataatcaaatttatagaaaacaaatacttgagatttataccaaagcaaacaaaagacttggtgtgaagtctatcaaagtcattcttcaaagagactacgacacaaaaatctctgaaggaagaatttaccgtctaatgaagaatatggcgctccctaaaatggctaccgttaagccaaaaacagctcttaaaaggactcaaaaaacgtatcctcaaaacttactcaaccagaaatttaatcctgacaaacctaatcaagtatggtctactgacttcacctatatttctattggatataagaaatatgtctatctctgcgcaatacttgatctctattctagaaaatgtattgcttggaaactgagtcaccgtatggatgcaaagttagcatgtgacactctagaattagctcttaataaaagaaagattgaaggaacacttctctttcattccgaccaagggtcacaatttaaggccagggaattgagaaaaataattgatgacaacactatcatgcattctttttctaaacctggatatccttatgataatgccgtaactgaagcatttttcaagtatttaaagcatagacaaatcaaccaaaaaaagtatcaaacaggttcaattagactgctt

SEQ ID NO: 1336 - protein, 360 aa, Streptococcus pyogenes
VLQSVLKDTKTKGQPMSTVKRYDEEFKQSLVNLYQTGKTRSELCKDYGVSASALAKWIKQYSQVKLEDNSVLTAKQIQELQKRNAQLEEENLILKKSKCHIHAKLKVRLLAVYRLRFEHVTTTLYRVLRVNRSTYYKFLKHKPSKRELDNQIYRKQILEIYTKANKRLGVKSIKVILQRDYDTKISEGRIYRLMKNMALPKMATVKPKTALKRTQKTYPQNLLNQKFNPDKPNQVWSTDFTYISIGYKKYVYLCAILDLYSRKCIAWKLSHRMDAKLACDTLELALNKRKIEGTLLFHSDQGSQFKARELRKIIDDNTIMHSFSKPGYPYDNAVTEAFFKYLKHRQINQKKYQTGSIRLL

SEQ ID NO: 1337 - DNA, 93 bp, Streptococcus agalactiae
atggaaaaaagaaatgatatcgataaagaatatggtaaaaacttaaggctcaagtctttcgcgtctttttgcatatcagctgttgaaacaaat

SEQ ID NO: 1338 - protein, 31 aa, Streptococcus agalactiae
MEKRNDIDKEYGKNLRLKSFASFCISAVETN

SEQ ID NO: 1339 - DNA, 1317 bp, Streptococcus agalactiae
atgaagaaattaaaaatattcccaaaaatgttcatacaaatattttctattcttggaatactaattatattagttcattcattattcttttttatctttcctaaaacatatttggagacgaggaaagtaaaaatccacattatggcagatgaaatttctaaaaatatgaatggaaaagagttaaaatatttagaccaaactttggagctttattctaaaagtagtgacataaaggtatttataaaaaaaaataataacaaaaatgaattacaaataaatgataatataaatgttaatgtaaaaagtgatagtaattctttaataattgaagaaagggaaattaaacttcatgatggcaaaaaaatacatcttcaatttgtttcaacagctgatatgcaaaaagacgcgaaagacttgagccttaagtttttaccatattctttatcgatatcatttcttttttccattgttatttctttaatttatgctaaatctataaaaaacaatatacaagaaataactatggttactgataaaatgataaaacttgacaaagaaacaagattgaaaattagttctaatgatgaaattggacaactaaaacagcaaatcaatgacttatattgtgctttattgaatacaattaatgatttggaatttaaaaataaggaaattttaaagttagaaaaattgaaatatgatttttttaagggggcgtcccacgaacttaaaactcctctttccagcctaaagatattacttgagaatatgaaatataatatcggaaaatataaagatagagacttttatatcagtgagtgtattaatattgtagataacttaacaaagaatgtctcgcaaatattatctttttattctataaaagacttgaataatgatgaagaatatttaaatgttggtgatacattagatgaagtattagaaaaatactctatcttagtaaatcaaaaaaaaataaatattaataaggaattattagactataatatttatataggaaaaacggcactaaatattgtattttctaatttgattagcaatgcagtaaaatatactaatcgaaatggaataattaatatcaaaatagctaatgattggttacttatagaaaactcatatgataaaaataaaatttcgaaaataaataaaattttagatgctagttttgatctaaaattggataatagtaatggattaggattaaatatagtaaagaatatacttaataagtataatataaagtatgaaatattacatggtgaaaattattttatatttaaaataaaaataatctct

SEQ ID NO: 1340 - protein, 439 aa, Streptococcus agalactiae
MKKLKIFPKMFIQIFSILGILIILVHSLFFFIFPKTYLETRKVKIHIMADEISKNMNGKELKYLDQTLELYSKSSDIKVFIKKNNNKNELQINDNINVNVKSDSNSLIIEEREIKLHDGKKIHLQFVSTADMQKDAKDLSLKFLPYSLSISFLFSIVISLIYAKSIKNNIQEITMVTDKMIKLDKETRLKISSNDEIGQLKQQINDLYCALLNTINDLEFKNKEILKLEKLKYDFFKGASHELKTPLSSLKILLENMKYNIGKYKDRDFYISECINIVDNLTKNVSQILSFYSIKDLNNDEEYLNVGDTLDEVLEKYSILVNQKKININKELLDYNIYIGKTALNIVFSNLISNAVKYTNRNGIINIKIANDWLLIENSYDKNKISKINKILDASFDLKLDNSNGLGLNIVKNILNKYNIKYEILHGENYFIFKIKIIS

SEQ ID NO: 1341 - DNA, 1386 bp, Streptococcus pyogenes
gtgagactaatcaaaaaaacctttttggtcatcaatggcttaattattgtagtggttacctctattttgttagtgctttattttgcaatgccaatttattacaccaaagtcaaagacaaagaagttaagtgtgaatttgaccaaacaagcaagcaaatcaaaggcaaaacggtaaccgagattagagatatcctaacaaaaaaaatcaacaaagataatatttggtacagcttagtagacagtgataaccaactgctctatccttccttgcagctcctagacggcgtcagtgaaagcaaagacagtcaaaatgttaatatcgtcaccacctttgacaactcttattctaatgttaaggtgatgagtcaaaaagtaaccctacgcgatggaaaaaaaatgacattgcttgggcaatcttcacttcaacccgtaacagatgctagcaaagttctccttgacctctacccgtcactattgattttttcagtgaccgtagggagtattgtcgcctacttatatagtaggacttctagccggcgtatccttagcatgtcacaaaccgccaaaaaaatggtcaacctagaaccaaacttaacgtgtaccattcacggcaaagatgaaatagcaatgttggctagtgatattaaccgtttgtatgcgagtctttcaacgagcatcaaatccttgcaaaaagagtatgaaaaagcttctgattcagaaagagagaaatctgagtttttacgcatgacatcgcacgagctaaagacaccaatcactagtgttatcggaatgattgatggaatgctctataatgttggtgactttgcagatcgtgacaaatatttgcgaaagtgccgagacgtccttgaagggcaagcccaactggttcaatccattttatctttatctaagattgaaaccctagcttctcaaaatcaagaactgttttcactaaaaagcagcctagaagaagaaatggaagtctttctcgtcttatcagaactaaaacacctcaaagtgactatcaatctcgaagaacaattcgtcaaagccaataaagtatatctactaaaggcgattaaaaatattattgacaatgcctttcactataccaaatcaggcggccaagtgatgattcaactaaaagacaaccaactagtgattaaaaatgaagcagagacattattgacacaacagcagatgaaacagttattccaaccgttttatcgaccagattatagtcgtaacaggaaagacggtggtacaggattggggctgtttatcacccaccagattcttgatcagcatcatctggcttatcgctttgttgttcttgatcaaagatggatggtatttacgattgattttccatcccatcatgacgat

SEQ ID NO: 1342 - protein, 462 aa, Streptococcus pyogenes
VRLIKKTFLVINGLIIVVVTSILLVLYFAMPIYYTKVKDKEVKCEFDQTSKQIKGKTVTEIRDILTKKINKDNIWYSLVDSDNQLLYPSLQLLDGVSESKDSQNVNIVTTFDNSYSNVKVMSQKVTLRDGKKMTLLGQSSLQPVTDASKVLLDLYPSLLIFSVTVGSIVAYLYSRTSSRRILSMSQTAKKMVNLEPNLTCTIHGKDEIAMLASDINRLYASLSTSIKSLQKEYEKASDSEREKSEFLRMTSHELKTPITSVIGMIDGMLYNVGDFADRDKYLRKCRDVLEGQAQLVQSILSLSKIETLASQNQELFSLKSSLEEEMEVFLVLSELKHLKVTINLEEQFVKANKVYLLKAIKNIIDNAFHYTKSGGQVMIQLKDNQLVIKNEAETLLTQQQMKQLFQPFYRPDYSRNRKDGGTGLGLFITHQILDQHHLAYRFVVLDQRWMVFTIDFPSHHDD

SEQ ID NO: 1343 - DNA, 663 bp, Streptococcus agalactiae
atggaggtatctatgaaaatattaactgttgaagatgataagttgataagagagggaataagtgaatacctttcagaatttggatatactgttattcaggctaaagatggaagggaagccttgtcaaaatttaatagtgatataaacttggttatcttagacattcagataccttttataaatggtttagaagtgttgaaagaaattagaaagaaaagcaatttaccaattctaattttgactgcatttagtgatgaagaatataaaattgatgcatttactaatttagtagatggatatgtagaaaaaccattttcattgcctgttttaaaggctagaatagattctttaattaagaagaattttggacatttagagaagtttgaatataagaatctttcggtaaattttaatagttatacagctaaaataaatgatgaaaaaatagatgtaaatgcaaaagaactcgaaatactaaaatgtttattggataatgatggacaagttttaacaagaatgcaaattattgattatgtctggaaggatagcgaagagatcccttatgatcgagtagtagatgtatatataaaagaacttagaaaaaaattacaattagactgtataactactataagaaatgtaggatataaattggagagaaaa

SEQ ID NO: 1344 - protein, 221 aa, Streptococcus agalactiae
MEVSMKILTVEDDKLIREGISEYLSEFGYTVIQAKDGREALSKFNSDINLVILDIQIPFINGLEVLKEIRKKSNLPILILTAFSDEEYKIDAFTNLVDGYVEKPFSLPVLKARIDSLIKKNFGHLEKFEYKNLSVNFNSYTAKINDEKIDVNAKELEILKCLLDNDGQVLTRMQIIDYVWKDSEEIPYDRVVDVYIKELRKKLQLDCITTIRNVGYKLERK

SEQ ID NO: 1345 - DNA, 651 bp, Streptococcus pyogenes
atgtttaaaatattagtagttgaagatgatgataccatcagtcaagtgatttgtgagtttttaaaagcgaataactatgatccagattgtgtatttgatggccaagctgccttagacaagtggcagacaacgtcttatgatctgattattttagacatcatgctcccttccttaagtggcttagaagtgctaaaaacaattcgaaagacatcagatgtccctattattatgctaacggcattagatgacgagtacacacagcttgtaagcttcaaccatttgattagtgattatgtgaccaaaccattttcaccactcattttaatcaaacgtatcgaaaatgtattacgcgtctctactccagatgaaaagcgccaaatcggagacttacttgttgatgagaccgaacatagcgtctattggcaaggaacattggtcaaactaaccaaaaaagaatatgacattattgattatttagcaaaacgtcaccaaaaaattgtcaccagagaccaattgatggatgacatatggggctattctgaactggacacgcgtgtccttgacaaccacatcaagaaccttcgtaaaaaaatgacgggtattcccctcaagacaattacaggcatgggctatttattgggagagcgtgag

SEQ ID NO: 1346 - protein, 217 aa, Streptococcus pyogenes
MFKILVVEDDDTISQVICEFLKANNYDPDCVFDGQAALDKWQTTSYDLIILDIMLPSLSGLEVLKTIRKTSDVPIIMLTALDDEYTQLVSFNHLISDYVTKPFSPLILIKRIENVLRVSTPDEKRQIGDLLVDETEHSVYWQGTLVKLTKKEYDIIDYLAKRHQKIVTRDQLMDDIWGYSELDTRVLDNHIKNLRKKMTGIPLKTITGMGYLLGERE

SEQ ID NO: 1347 - DNA, 1374 bp, Streptococcus agalactiae
atgataaaaaatgcatttgcttatgtaactagaaaaagcttaaaatcattaattattatattagttattctatcaatggcaactttaagcatcattagtttatctattaaagatgccacagatagagcttctaaggaaacatttgctaatataacaaacagtttttctatggaaataaatagacaagtaaatccaggaacacctaggggtggaggaaatgtaaaaggtgaagatattaaaaagatatctcaaacaaacagtatagactcctatgtaaaaagaataaacagcgtcgcagacctagttgatcatgatataattgaaactcaagatacacttgcaaatcaatcacctgaaagagcaaagaattttaagagaacagttatgttaacaggggttaatgactcagcaaaagaaacaaaatttgtatcagaagcatataagttagtagaaggaaagcatttagaaaataaagataaaaataaaattttaatgcataaagatttggcaaaaaaaaacaatctcaaagttggagataaaataaaaataaaatctaatttgtttgatgctgacaatgaaaaagttgcaaatgaaactgtagaagtagaaattaaaggtttatttgatggtcataatagcggtggggtaagtgcagcacaagaactatacgaaaatacactaatcactgacgttcattcagctgctaaagtttatggtaatacagaagatacagccgtataccaagatgcaacattctttgtaaaaggtgataagaatcttgatagtgtaataaaagatcttgggaaactagatataaattggagagaatataatttgattaaaagttcatcaaattatcctgcgctgcaacaatctatatccggtatctattctatttcaaacaaattatttgttggctcattaatatttgcaggagttgtagtttcattattacttttcttatggatgaatgccagaaagaaagaaatagcagtattactatcattaggtatatctaaattagaaatttttggtcaatttataatcgagatggtatttatatccattcccgcacttcttggatcttatttcttagctcaatatacagctgataagctagggaataatatattgaataaagttactggcgatatagctaaacaaatagctagacaatctgcatctagtcaattaggcgggggggcagaagctgaaggattcaacaagactctttcaggtttagatataaatgtattacctaaattcataatttatgtagttatatttatgagttttgtacttcttgtatcattgattctttcttcaatttatacattaagaaagaatccaaaagagttattaattgataataat

SEQ ID NO: 1348 - protein, 458 aa, Streptococcus agalactiae
MIKNAFAYVTRKSLKSLIIILVILSMATLSIISLSIKDATDRASKETFANITNSFSMEINRQVNPGTPRGGGNVKGEDIKKISQTNSIDSYVKRINSVADLVDHDIIETQDTLANQSPERAKNFKRTVMLTGVNDSAKETKFVSEAYKLVEGKHLENKDKNKILMHKDLAKKNNLKVGDKIKIKSNLFDADNEKVANETVEVEIKGLFDGHNSGGVSAAQELYENTLITDVHSAAKVYGNTEDTAVYQDATFFVKGDKNLDSVIKDLGKLDINWREYNLIKSSSNYPALQQSISGIYSISNKLFVGSLIFAGVVVSLLLFLWMNARKKEIAVLLSLGISKLEIFGQFIIEMVFISIPALLGSYFLAQYTADKLGNNILNKVTGDIAKQIARQSASSQLGGGAEAEGFNKTLSGLDINVLPKFIIYVVIFMSFVLLVSLILSSIYTLRKNPKELLIDNN

SEQ ID NO: 1349 - DNA, 1218 bp, Streptococcus pyogenes
atggaaaattggaaattcgctcttagctcaatttgggggcataagatgcgctcaatcctgacaatgttgggaattatcatcggtgtagcagcagttgtgattattatggggttgggaaatgctatgaaaaatagtgtaacaagcacattttctagcaagcaaaaagatattcaactctattttcaagaaaaaggagaagaagaagacctgtatgccggattgcacacgcatgaaaataatcacgaagtgaagccagagtggttagaacaaattgttaaagatatcgatggtattgattcttattactttaccaattctgctacttctactatttcgtatgaaaaaaagaaagtagacaatgcttcgatcataggggtaagtaaagattattttaatataaaaaactatgatatcgtagctggtcgtacactaacagataatgattattctaatttttcgcgtatcattcttttagatacagtattagccgatgacctatttggcaaaggtaattataagtcagctttaaataaagtggtaagtttatctgataaagattatttagttattggtgtttataaaactgatcagacgccagtttcttttgatggattatcaggcggcgctgtcatggcgaatactcaggtagcttcagagtttggcaccaaagaaataggatctatctacattcatgtgaacgatattcaaaacagtatgaacttaggaaatcaagcagctgatatgctaaccaacatatcgcatattaaagatggacagtacgctgtccctgataatagcaaaatcgttgaagaaatcaatagtcagttcagtatcatgacaacagtcataggttcaattgcagcgatctctcttttagtgggaggaattggtgttatgaatattatgttggtatctgtcacagagcgaactagagaaattggtttacgtaaagcacttggtgcaacacgcctgaaaattttatcacaatttttgattgaatccgttgttctaacagttcttggaggcttgataggattattattagctcaattaagtgtaggggctttaggaaatgcgatgacattaaaaggagcttgtatttctcttgatgtggccttaatagcagttttattttctgcctcaataggtgtcttttttggaatgttgccagctaataaagctagtaagttagatccaattgaggcattacgttatgaa

SEQ ID NO: 1350 - protein, 406 aa, Streptococcus pyogenes
MENWKFALSSIWGHKMRSILTMLGIIIGVAAVVIIMGLGNAMKNSVTSTFSSKQKDIQLYFQEKGEEEDLYAGLHTHENNHEVKPEWLEQIVKDIDGIDSYYFTNSATSTISYEKKKVDNASIIGVSKDYFNIKNYDIVAGRTLTDNDYSNFSRIILLDTVLADDLFGKGNYKSALNKVVSLSDKDYLVIGVYKTDQTPVSFDGLSGGAVMANTQVASEFGTKEIGSIYIHVNDIQNSMNLGNQAADMLTNISHIKDGQYAVPDNSKIVEEINSQFSIMTTVIGSIAAISLLVGGIGVMNIMLVSVTERTREIGLRKALGATRLKILSQFLIESVVLTVLGGLIGLLLAQLSVGALGNAMTLKGACISLDVALIAVLFSASIGVFFGMLPANKASKLDPIEALRYE

SEQ ID NO: 1351 - DNA, 654 bp, Streptococcus agalactiae
atggatatattagaaataaagaatgtaaattacagttacgcaaattctaaagaaaaagttttgtcaggagtaaatcaaaaatttgaacttggaaagttttatgcgatagtagggaagtcaggaacaggaaaatccacacttctttccttacttgcaggacttgataaagttcaaacaggaaaaatcttgtttaagaatgaagatatagaaaagaaaggatatagtaatcacagaaaaaataatatatctttggtatttcaaaattataatttaatagattatttatcgccgattgaaaatattagactagtaaataaatcagtagatgagagtatcttgttcgaattaggtttagataaaaaacaaataaaaagaaatgttatgaaattatctggtggtcagcaacaaagggtagctattgctagggcactggtatcagatgccccaataatactagctgatgagcctaccggtaacctagacagtgttactgctggagaaataattaatatattaaaggaattagctcaagatagaaataaatgtgtaatagttgtaacacatagtaaggaagtagcagattctgcggatatcattttagaactaagtggtaaaaagttgaaaaaagtaaataaaatgaatttggaggttgaa

SEQ ID NO: 1352 - protein, 218 aa, Streptococcus agalactiae
MDILEIKNVNYSYANSKEKVLSGVNQKFELGKFYAIVGKSGTGKSTLLSLLAGLDKVQTGKILFKNEDIEKKGYSNHRKNNISLVFQNYNLIDYLSPIENIRLVNKSVDESILFELGLDKKQIKRNVMKLSGGQQQRVAIARALVSDAPIILADEPTGNLDSVTAGEIINILKELAQDRNKCVIVVTHSKEVADSADIILELSGKKLKKVNKMNLEVE

SEQ ID NO: 1353 - DNA, 711 bp, Streptococcus pyogenes
atggaggggcagatggcttttattgaattaaaacaggtttcaaaatcttatcagataggagagacgactgtttttgccaaccacgaagtgtcttttgagattaataaaggagaactagtggttattttgggagcatccggagctggtaaatcgacagtcctcaatattttggggggcatggacacagtagatgcaggtcaagtaattattgatggcaaagacattgctcattacacgtctaaggccttaactcagtatcgtcggaatgctattggtttcgtttttcaattttataatttggttcctaatttgacagctaaagaaaatgttgaattagcagttgaaattgtagcagatgctttagatcctgtgaccattttaaaggaagtaggactcagtcatcgtctggatcattttcctgctcagctctcaggtggtgaacagcaacgggtttcgatagcacgtgccttagctaaaaaccctaaattgcttctttgtgatgaacctacaggtgcccttgactaccaaacaggaaagcaaattctaaccctcttacaggatatggcacaaactaaggggaccacggtagttattgtaacccacaatgctgctattgctccgatagctgatcgtgtcatttttatgcatgatgcacaggttaccaagacagtcattaataaggaacctgcaagcattgagacaattgattat

SEQ ID NO: 1354 - protein, 237 aa, Streptococcus pyogenes
MEGQMAFIELKQVSKSYQIGETTVFANHEVSFEINKGELVVILGASGAGKSTVLNILGGMDTVDAGQVIIDGKDIAHYTSKALTQYRRNAIGFVFQFYNLVPNLTAKENVELAVEIVADALDPVTILKEVGLSHRLDHFPAQLSGGEQQRVSIARALAKNPKLLLCDEPTGALDYQTGKQILTLLQDMAQTKGTTVVIVTHNAAIAPIADRVIFMHDAQVTKTVINKEPASIETIDY

SEQ ID NO: 1355 - DNA, 105 bp, Streptococcus agalactiae
ttgtttaaggcaagctctgtagattctaaactaccagaatacattaaaattttatttgcaattctattattctctgatttatttaatatttcttggctagttgaa

SEQ ID NO: 1356 - protein, 35 aa, Streptococcus agalactiae
MFKASSVDSKLPEYIKILFAILLFSDLFNISWLVE

SEQ ID NO: 1357 - DNA, 1275 bp, Streptococcus agalactiae
gtgataaaaaatgctatagcatatattaccagaaaaaaaaatagaacacttattatatttgctattttaacaattgttctttcttgcttgtattcatgtttaacaataatgaaatcaagtaatgaaatagaaaaggctttatatgaaagttctaattcttcaatatcaattacaaaaaaagatggtaaatattttaatattaatcaatttaagaatattgaaaaaataaaagaggttgaagaaaaaatatttcaatatgatggattagcaaaattgaaagatcttaaagtagttagtggtgagcaaagtataaatagagaagatttatctgacgaatttaaaaatgttgtttcactagaagctacaagtaatactaaaagaaatcttttatttagtagtggagtatttagttttaaagaaggaaaaaatatagaagaaaatgataagaattcaattcttgttcatgaagaatttgctaaacaaaacaaactaaaattgggtgatgaaattgatcttgaattactagatacggaaaaaagtggaaaaataaaaagtcataaatttaaaattataggaatcttttctggtaaaaaacaggaaacatatacaggattatcatctgattttagcgaaaatatggtttttgtagattattcaactagccaagaaatattaaataaatcagagaataatagaattgcaaataaaattttaatgtattctggtagtttagaatctacagagcttgccttaaacaaattgaaagactttaaaattgataagtcaaagtattctattaagaaagataataaagcattcgaagagtctttagagtcagtgagtggaataaaacatataattaaaataatgacttattcgattatgttaggtggaatagttgttctttcattaatcttgattctatggttaagagaaagaatttatgaaataggtatatttttatctattggaacaactaagatacaaattataaggcaatttatatttgagttaatattcatatcaataccaagtataatatcctccttatttttagggaatctactattaaaagtaattgtagaaggatttattaactcagagaactcaatgattttcggtggaagtttaataaataaaagcagttttatgttaaacataacaacacttgcagaaagttatttaatattaataagtattattgttttatcagttgtaatggcctcttcattaatattatttaagaaaccaaaagaaatattatcaaaaataagt

SEQ ID NO: 1358 - protein, 425 aa, Streptococcus agalactiae
MIKNAIAYITRKKNRTLIIFAILTIVLSCLYSCLTIMKSSNEIEKALYESSNSSISITKKDGKYFNINQFKNIEKIKEVEEKIFQYDGLAKLKDLKVVSGEQSINREDLSDEFKNVVSLEATSNTKRNLLFSSGVFSFKEGKNIEENDKNSILVHEEFAKQNKLKLGDEIDLELLDTEKSGKIKSHKFKIIGIFSGKKQETYTGLSSDFSENMVFVDYSTSQEILNKSENNRIANKILMYSGSLESTELALNKLKDFKIDKSKYSIKKDNKAFEESLESVSGIKHIIKIMTYSIMLGGIVVLSLILILWLRERIYEIGIFLSIGTTKIQIIRQFIFELIFISIPSIISSLFLGNLLLKVIVEGFINSENSMIFGGSLINKSSFMLNITTLAESYLILISIIVLSVVMASSLILFKKPKEILSKIS

SEQ ID NO: 1359 - DNA, 1215 bp, Streptococcus pyogenes
atggaagatattattgcagctttaagctctatattatcacacaagatgcggtcaattttgacaatgctagggattattatcggtattggtgccattatcgcaatcttttcaatcatcgaaggtaataccgaaaataccaaaagacagttgattggtggcagcaataacactattaacattgtgtttaacaaaaaaagtagtattgaccctaaatttccagacaagtcaaatgctaaaaaaccagactatcttccttttatggctgaagaagagcttagcaaaatacagcaagtcaaaggcgtcaaaaatgccctgatctcatatggtattgatgacaaagtctaccatctaggccaaaaatcatctgcaaagatttctgccatcacaaaaaacgtagctgaagtgagacgcatgacatttattaaaggcagtgacttttcagacaaagactttattgaccaaaaacaggtgatttaccttgaaaaaagcttgtatgagtcactatttccaaaagacgatggccttggaaaatttgtcgaagtgatgggaaatcccttcagggtcattggggtgtttgaatcaaaagaacaaagtggcctcacaagtgggactgagaaaattgcttatatcccgctacatcagtggtataatattaatggtgtagtggatgcgacacctgagatcacgatccagacctatcgcgcagatgacctcaaacctgtagcaaagcgtgtcagtgatatgctcaatcaaacgatccctaaatcagattatatgtttggtgtcatgaaccttaaagaatttgaacgccaactagacaacctaaacaaatctaattttgtgttattagctggtattgctagtatctctcttattgtaggtggtattggtgtgatgaacattatgctagtatcagttaccgaaagaacgagagaaattgggatcaaaaaagcgcttggcgctagacgtaagcttattttaaaacaatttttaattgaagcggtcattctaaccttgctaggtggtgtgataggggttatttcagggatggtatcaggattgatcatcacaagatcactcgaatatccctatatcctatccttgttctcagttgtcttgagtttagcgttttgttgtattatagggattgtctttggactattaccagccattaaagcgtctaagctagacccaattgaagcattgcgatttgaa

SEQ ID NO: 1360 - protein, 405 aa, Streptococcus agalactiae
MEDIIAALSSILSHKMRSILTMLGIIIGIGAIIAIFSIIEGNTENTKRQLIGGSNNTINIVFNKKSSIDPKFPDKSNAKKPDYLPFMAEEELSKIQQVKGVKNALISYGIDDKVYHLGQKSSAKISAITKNVAEVRRMTFIKGSDFSDKDFIDQKQVIYLEKSLYESLFPKDDGLGKFVEVMGNPFRVIGVFESKEQSGLTSGTEKIAYIPLHQWYNINGVVDATPEITIQTYRADDLKPVAKRVSDMLNQTIPKSDYMFGVMNLKEFERQLDNLNKSNFVLLAGIASISLIVGGIGVMNIMLVSVTERTREIGIKKALGARRKLILKQFLIEAVILTLLGGVIGVISGMVSGLIITRSLEYPYILSLFSVVLSLAFCCIIGIVFGLLPAIKASKLDPIEALRFE

SEQ ID NO: 1361 - DNA, 159 bp, Streptococcus agalactiae
ttgggcggcattggagcgcataaattttacgcaggaaaaataggccaggtttttttatatattatttttagtattacctttattcctggaattatcgaccttatcgaagctttgatggctctcggaaaacaaactgatgaatatggaaatatcatcgtt

SEQ ID NO: 1362 - protein, 53 aa, Streptococcus agalactiae
MGGIGAHKFYAGKIGQVFLYIIFSITFIPGIIDLIEALMALGKQTDEYGNIIV

SEQ ID NO: 1363 - DNA, 93 bp, Streptococcus agalactiae
ttgaaaaacccaaagaaactttcagttggtgcattatcaatacatttgccaatccgggacatggataaggtcagaccagcttgttgtatgata

SEQ ID NO: 1364 - protein, 31 aa, Streptococcus agalactiae
MKNPKKLSVGALSIHLPIRDMDKVRPACCMI

SEQ ID NO: 1365 - DNA, 258 bp, Streptococcus agalactiae
ttgatgaacattctggggattagttcagtcattcgtcgtgttagccatgcttgtacaaaagctggtgacagattttacgaagaaaatattcttaatcgtgaatttacagccacagctcataaccagaaatggtgcacagatgtcacctatcttcaatacggtctgggagctaaagcttatctcagtgcgattaaagacctgtataacggttctattatcgcttatgagattagtcacaacaatgaaatccacttgtta

SEQ ID NO: 1366 - protein, 86 aa, Streptococcus agalactiae
MMNILGISSVIRRVSHACTKAGDRFYEENILNREFTATAHNQKWCTDVTYLQYGLGAKAYLSAIKDLYNGSIIAYEISHNNEIHLL

SEQ ID NO: 1367 - DNA, 90 bp, Streptococcus agalactiae
gtgttcaaggctaccttgatggaaaaggctctcttagagatatttgtaaatggtatgatatctcaagtcgctctgttctccaaaagtgga

SEQ ID NO: 1368 - protein, 30 aa, Streptococcus agalactiae
MFKATLMEKALLEIFVNGMISQVALFSKSG

SEQ ID NO: 1369 - DNA, 402 bp, Streptococcus agalactiae
ttgatatactccacattagctaaagaacagggtgttcaaggctaccttgatggaaaaggctctcttagagatatttgtaaatggtatgatatctcaagtcgctctgttctccaaaagtggataaaacggtatactagtggtgaagacttgaaagccactagtagaggatatagccgtatgaaacaaggaaggcaagccacatttgaagaacgtgtagagattgttaactacaccattgcccatgggaaagactatcaagcagctattgagaagtttggtgtttcctaccaacaaatttattcttgggtgcgtaagcttgagaagaatggctcacaaggtttggttgatagacgtgtgaaagggttggagagtaggcctgatttaaccgagattgagcaactt

SEQ ID NO: 1370 - protein, 134 aa, Streptococcus agalactiae
MIYSTLAKEQGVQGYLDGKGSLRDICKWYDISSRSVLQKWIKRYTSGEDLKATSRGYSRMKQGRQATFEERVEIVNYTIAHGKDYQAAIEKFGVSYQQIYSWVRKLEKNGSQGLVDRRVKGLESRPDLTEIEQL

SEQ ID NO: 1371 - DNA, 216 bp, Streptococcus agalactiae
atgatattgattacactaacaaatatttatcaattaataaaacttgggattatcatttcaaccaaagatacctgccaacaaaaaacaaaagtagtatcagaaatataccaattgacaatgatacattattttttttgcatgaatttacaaaaaataaaaacgacagattattcgacaaactttcaaataatgcagtcaataaaactatccgaaaaa

SEQ ID NO: 1372 - protein, 72 aa, Streptococcus agalactiae
MILITLTNIYQLIKLGIIISTKDTCQQKTKVVSEIYQLTMIHYFFCMNLQKIKTTDYSTNFQIMQSIKLSEK

SEQ ID NO: 1373 - DNA, 579 bp, Streptococcus agalactiae
ttgataaaaatttgtaaagaaaaatcacaacatcaatcgtatgcagcgttatacctcatcgctaaaactggcatgcgcttcgctgaatgtttaggtttaacagttaatgatattgattacactaacaaatatttatcaattaataaaacttgggattatcatttcaaccaaagatacctgccaacaaaaaacaaaagtagtatcagaaatataccaattgacaatgatacattattttttttgcatgaatttacaaaaaataaaaacgacagattattcgacaaactttcaaataatgcagtcaataaaactatccgaaaaataactggtcgcgaggtacgagtgcactctctcaggcatacatttgcaagctatctaatttccatctctcaagttttagatcacgagaatttaaatatcactttagaagtttacgcacatcaattacaagaacaaaaagataggaacgataaacttaatcagagaaatttggggcggatttggggcaaaatagctctaaaccgctatttacatgcaatgaatatgtcccctgccggaatctactactattgtacacaa

SEQ ID NO: 1374 - protein, 193 aa, Streptococcus agalactiae
MIKICKEKSQHQSYAALYLIAKTGMRFAECLGLTVNDIDYTNKYLSINKTWDYHFNQRYLPTKNKSSIRNIPIDNDTLFFLHEFTKNKNDRLFDKLSNNAVNKTIRKITGREVRVHSLRHTFASYLISISQVLDHENLNITLEVYAHQLQEQKDRNDKLNQRNLGRIWGKIALNRYLHAMNMSPAGIYYYCTQ

SEQ ID NO: 1375 - DNA, 177 bp, Streptococcus agalactiae
atgttatatatagatgagtttaaagaagcgattgataaaggctatatttcagggaacacagtagcgatagtgcgtaaaaacggaaagatatttgattatgtgttgccgcacgaggaagtgagagatgatgaagttgtgacagttgagagtgtagaagaggtgttgagggaattgaag

SEQ ID NO: 1376 - protein, 59 aa, Streptococcus agalactiae
MLYIDEFKEAIDKGYISGNTVAIVRKNGKIFDYVLPHEEVRDDEVVTVESVEEVLRELK

SEQ ID NO: 1377 - DNA, 201 bp, Streptococcus agalactiae
ttgtattttactttattaacaaggatgattgaaatggataaagaattaacacctcaagaaaaagcaaataaaaagtgggcagaaaacaatagagaacatagaacctatctatcaaaacgatctactgctcgtagttttattaacaaaaatgctacaaaagaagacttattagaattaaaacaattaattgaaagcaaactc

SEQ ID NO: 1378 - protein, 67 aa, Streptococcus agalactiae
MYFTLLTRMIEMDKELTPQEKANKKWAENNREHRTYLSKRSTARSFINKNATKEDLLELKQLIESKL

SEQ ID NO: 1379 - DNA, 198 bp, Streptococcus agalactiae
atgtcacaagaaaaactaaaatcaaaagttgaacaagcatcaggtagcctaaaagaaggagctggtaagctaactggcgataaagagttagaggcaaaaggttttgtcgaaaaaacaattgctaaaggtaaagaactagcagatgatgctaaagatgctgttgaagaggcagtagatgttgtcaaagaaaaactgaaa

SEQ ID NO: 1380 - protein, 66 aa, Streptococcus agalactiae
MSQEKLKSKVEQASGSLKEGAGKLTGDKELEAKGFVEKTIAKGKELADDAKDAVEEAVDVVKEKLK

SEQ ID NO: 1381 - DNA, 108 bp, Streptococcus agalactiae
gtgtactacttttacaaattcaaaaaaatagaaatttttagcaagaatcgcctgatactagctgttcttgcttttttatttgctaaagaaagatatagatgttataat

SEQ ID NO: 1382 - protein, 36 aa, Streptococcus agalactiae
MYYFYKFKKIEIFSKNRLILAVLAFLFAKERYRCYN

SEQ ID NO: 1383 - DNA, 1086 bp, Streptococcus agalactiae
ttgtggcttgacattatttttaaaaaaagtataattatcttaacaagacaaaccccccattcctttataggcagatacgttctgatatggggctttttttatatcgttaggagagttatgaaacaacctttagctttgacatgggaagatcaaattagactacttgaaaaacgtggattaattgttaaagctgatgatgtagagaaaatcaaacatatcagttattatagaattaaagaatttgcaaaaccacttgaaataaagcaacaagatggtgaggagcaggatattttatatgataatattgagtttgcagaagttttggcaagatattatcaggataaaaacttaagaatctatctactgcacgctattgaaaaaattgaagtgtctattaaaacaaaaatttcttttgttttgggggatagatatggggcgttcggatatttaaatttctcttcatgggctaataggaataagtttacaaaatatgatattgaaaaaagacaatttaggattaaaaagaatttattgaatactgtaagaaaatctcaactaactgagttacaaaaatcaattaaccttgatctagatggattcccaacagtgtggcttgctattgatttattgatgtttggtgacatcgtttcaatcttaacaatcatgagtgagaagaacattaaacagatttgtcaatattacagttgtacaccagaagaacttgtttcgtggcttaaatgtttgaatttcataagaaatgtatgtgctcataattcaaatgtactggatattcaaatcacaacaaagcctaaacttcgttcagaatggagaaattatattgatacagtaataattaaacataacgtgactaaaccttctaataagttatccgttattattgctattgtagtctatcttgtaaatactattaattccaaatatcaatggagaaatatacagtctagtttgaaggctctttgtaaagaagatgacagtagggcaaagcttttaggttttaaagattatgattctgttaaagcaatgattaatgggataaagtgtactacttttacaaattcaaaaaaa

SEQ ID NO: 1384 - protein, 362 aa, Streptococcus agalactiae
MWLDIIFKKSIIILTRQTPHSFIGRYVLIWGFFYIVRRVMKQPLALTWEDQIRLLEKRGLIVKADDVEKIKHISYYRIKEFAKPLEIKQQDGEEQDILYDNIEFAEVLARYYQDKNLRIYLLHAIEKIEVSIKTKISFVLGDRYGAFGYLNFSSWANRNKFTKYDIEKRQFRIKKNLLNTVRKSQLTELQKSINLDLDGFPTVWLAIDLLMFGDIVSILTIMSEKNIKQICQYYSCTPEELVSWLKCLNFIRNVCAHNSNVLDIQITTKPKLRSEWRNYIDTVIIKHNVTKPSNKLSVIIAIVVYLVNTINSKYQWRNIQSSLKALCKEDDSRAKLLGFKDYDSVKAMINGIKCTTFTNSKK

SEQ ID NO: 1385 - DNA, 744 bp, Streptococcus agalactiae
atgatgagtggaagaaaggtcaataatatggtaattaatattgagcaagctatcgcatggatggcatctagaaaaggtaaagttacttactcgatggactatcgaaatggtccttcatcttacgattgctctagctctgtctattttgctctacgctcagcaggcgcatcagataatggctgggcagtaaatacagaatatgagcacgattggttgataaaaaacggttatgttcttattgcagaaaatactaattggaatgcgcaaagaggtgatatttttatttggggtaaacgtggggcttcggctggagcttttggacatactggtatgtttgttgatccagacaatattattcactgtaattatggttataactcaattacagtgaataaccatgatgaaatctggggatataatggtcaaccttatgtttacgcttatcgttacgctaggaaacagtcaaatgctaaggttgataatcaatcagttgtatctaaatttgaaaaagagttagacgttaacacaccgctaagtaattcaaatatgccatattacgaagcaacaatttcagaagattattacgttgagtccaagcctgacgtcaatagcactgataaggagttgcttgttgctggtactagagttcgagtttacgaaaaagtaaaaggctgggcaaggataggcgctccacagtctaatcagtgggtagaagatgcttacttaattgatgcaacagatatg

SEQ ID NO: 1386 - protein, 248 aa, Streptococcus agalactiae
MMSGRKVNNMVINIEQAIAWMASRKGKVTYSMDYRNGPSSYDCSSSVYFALRSAGASDNGWAVNTEYEHDWLIKNGYVLIAENTNWNAQRGDIFIWGKRGASAGAFGHTGMFVDPDNIIHCNYGYNSITVNNHDEIWGYNGQPYVYAYRYARKQSNAKVDNQSVVSKFEKELDVNTPLSNSNMPYYEATISEDYYVESKPDVNSTDKELLVAGTRVRVYEKVKGWARIGAPQSNQWVEDAYLIDATDM

SEQ ID NO: 1387 - DNA, 1332 bp, Streptococcus pyogenes
atggctacatatcaggaatataaaagtcgttcaaatggcaatgcttacgatattgatggatcgcttggtgcgcaatgttgggatggctacgcagactactgtaagtatctaggactgccatacgcaaactgtacaaatacaggatatgcaaaggatatatgggaacaacgtcacaaaaatggtattttaaactactttgacgaagtagagactatgcaagctggagatgtcgcaatttttatggtagttgcaggtgttacaccgtatagccatgtggctatttttgatagtgatgcaggtagtggatacggatggtttttaggtcaaaaccagggtggagcaaacggagcatataatttagtaaaaataccatattcaacgacttatcctactgcatttagaccaaaagtttttaaaaatgcagttactgttataggtaatataggactaaataaaggcgattattttattgatgtatcagcttatcaacaagcagacttaaccgctacttgtcagcaagctggcactactaaaacgattatcaaagtatccgagtcactcgcttggctgtctgataggcatcagcaacaagctaatactagtgaccctattggttattatcactttggacgatttggaggagatagcaacttagcgcaacgagaagcagatttatttctgtccaatttaccaaccaaaaaagtctcttacttagtcattgattatgaagactctgcaagtgccgacaaagaagctaacactaatgcagttattgcgtttatggataaaattgcaaacgctggatataagcctgtttattacagctataaaccatttacgcttaataatattgattatcagcaaattatcgctaagtacccaaacagcatttggatagctggttatccagactacgaagtacgaacagagccactttgggagttcttcccttcaatggatggtgtgcgctggtggcagttcacaagtgtaggagtagcaggtggtttagataaaaatattgtattattagcagatgatagtagcaaagtggatatacctaagattgacaaaccacaaagccagcttacttttaatcaaaagctagatactaacactaaattagacaactcgaatgtaccttactacgaagcaacccttagaacagactattatgtagagtctaagccaaacgcaagtagcgctgataaagaatttatcaaggcaggaactcgtgtaagagtctatgaaaaagtgaatggatggtcacgtattaacgcttctcagtctgaccagtgggtcgaagataagtatttatctaatgcaacacaagta

SEQ ID NO: 1388 - protein, 444 aa, Streptococcus pyogenes
MATYQEYKSRSNGNAYDIDGSLGAQCWDGYADYCKYLGLPYANCTNTGYAKDIWEQRHKNGILNYFDEVETMQAGDVAIFMVVAGVTPYSHVAIFDSDAGSGYGWFLGQNQGGANGAYNLVKIPYSTTYPTAFRPKVFKNAVTVIGNIGLNKGDYFIDVSAYQQADLTATCQQAGTTKTIIKVSESLAWLSDRHQQQANTSDPIGYYHFGRFGGDSNLAQREADLFLSNLPTKKVSYLVIDYEDSASADKEANTNAVIAFMDKIANAGYKPVYYSYKPFTLNNIDYQQIIAKYPNSIWIAGYPDYEVRTEPLWEFFPSMDGVRWWQFTSVGVAGGLDKNIVLLADDSSKVDIPKIDKPQSQLTFNQKLDTNTKLDNSNVPYYEATLRTDYYVESKPNASSADKEFIKAGTRVRVYEKVNGWSRINASQSDQWVEDKYLSNATQV

SEQ ID NO: 1389 - DNA, 333 bp, Streptococcus agalactiae
atgaacgaatttataacacaaatcattacagtatcagtaccaatttttggtatcatcgcaggtattctcacgcacaaagtaaaaaaattacttataaaaaaaggtggagaaaaagctgttaaaattgcagaaattgtcgctcgtaatgctgttgaggcagttgaacaaatatctgtggaagttggtattaagggacaagataagctaacagaagctaaaacagctgttattgatggtttatcgcaatataatatcagtttaacagagactcagttagaaacatttatcgaagctgcggttaaacgcatgaatgatgagtggaagaaaggtcaa

SEQ ID NO: 1390 - protein, 111 aa, Streptococcus agalactiae
MNEFITQIITVSVPIFGIIAGILTHKVKKLLIKKGGEKAVKIAEIVARNAVEAVEQISVEVGIKGQDKLTEAKTAVIDGLSQYNISLTETQLETFIEAAVKRMNDEWKKGQ

SEQ ID NO: 1391 - DNA, 300 bp, Streptococcus agalactiae
atgacagtagaacaagcagaaagaatcgctcaatcacaatttgtgtgggctattctctttatcttgctttttatgattgtggttggttatctggtgcgaacgtctgataagcgtgagaaaaagctaatggatttccatgaccaatcaaaatcagaatctaacaaacgtgaagagtggctcaaaggtcacttagataaaaatacagaacagttacaggacatttctcagaccattggtgttgtccaaaaggagatgtcttatatgagtgaccgcattggtcgtctagaaaaagaggagaaa

SEQ ID NO: 1392 - protein, 100 aa, Streptococcus agalactiae
MTVEQAERIAQSQFVWAILFILLFMIVVGYLVRTSDKREKKLMDFHDQSKSESNKREEWLKGHLDKNTEQLQDISQTIGVVQKEMSYMSDRIGRLEKEEK

SEQ ID NO: 1393 - DNA, 210 bp, Streptococcus agalactiae
atgaagatcttattgctattggttagaatttttttacaggaagaagggatagatatgatgattaaattatttgcgattgacttatattatggacgtatggcttggtcaagttttgttaaaaagggattttcagagtttattaataacaaaacaaaagagcaacttgcaattatgtgcgatgaagaattacttgctgaaattttagcaagt

SEQ ID NO: 1394 - protein, 70 aa, Streptococcus agalactiae
MKILLLLVRIFLQEEGIDMMIKLFAIDLYYGRMAWSSFVKKGFSEFINNKTKEQLAIMCDEELLAEILAS

SEQ ID NO: 1395 - DNA, 375 bp, Streptococcus agalactiae
gtgtcgtgcactggtcaatataacagtcaatataacaaaggagacgatatgtttacaattaacacaaaattcccacaagttcttgaggataaaagtattatgggagtgactgcaattgtgtcagttgatttaccacacgtgaaaggtaacttaacttttgatttaccacctgagtctgaaaataaatcttttgcagaaacgcttgaaaagtgtgagcagatattttacgacgaaaagtataaagataaagctcagtctgaaaaaatgactgaactaagtacatcaacatcaacaggcacacaaacacttatcaatctgataagtacgctttacgcaaaagaggttttaaaagatgaagatcttattgctattggt

SEQ ID NO: 1396 - protein, 125 aa, Streptococcus agalactiae
MSCTGQYNSQYNKGDDMFTINTKFPQVLEDKSIMGVTAIVSVDLPHVKGNLTFDLPPESENKSFAETLEKCEQIFYDEKYKDKAQSEKMTELSTSTSTGTQTLINLISTLYAKEVLKDEDLIAIG

SEQ ID NO: 1397 - DNA, 2004 bp, Streptococcus agalactiae
atgggaactgctacatatagtaggtcgtgggggaataacctgacacttgaaatattgtctgcttggaataagccaaatatcgcaagtaatacaagcacagtcaatgtacaagtttttttaaaaatgtctagttatggctatatttcaataggtgaaactagacctttaaaaataacagttgatggtagagctgagaccatcaatgttaatccatcgataaattacggacagagaaaactattatttgctaaagattacattgttaatcataattcagatggaaataaaccactattcaatatttcagcatattatccaataaactttagcaattatggtgaagcgactgcaaatcagtctatctcgctacctaaaattaatagacttagtgtatcaagtgctattagtggtgtgctaggtaatgcagtaactatcacaatcaatagatattcaacgtcatttactcacaatttgaaatatgattttaagggtagtacaggtactatcgcaactggcgttggtactagctatttgtggactataccgccaacgtttgctaatttactgcctaatgaattaactggtacaggtaatctgattgttgagacgatggatggatcagcaaagattggtgagacaaaatatactttatcaataacaatacctaatacagctacttataagccaaaattgtcaagtatcactctatctgatacaaatactttaactagtagcattgttagtggaaacaattttgttaggattataagtaaagttaaagttgattttggctcagctattggaaacaacggttcaacaataacaagttataatgctgaaattgtcgggaaaagtaactcaattatcggtaatggtagcgtatttgataaattggacttttttggttcagcaacaatcagagcaacggtaactgatagcagaggtctaacatcagaaccagttgacacaaaaattaatgtcattgattattttttaccaattgttacaagtgcaaaagtagtcaggtctcagcaaaatcctgacattttacaagtcttgccatttgttaagattgcaccaattatagttggtggaatacaaaaaaaccaactcaaaatgtcggtatctgttgcaccatacaatactggtatctatgcagttgatagtggcgcagctacaaatacctggtcaacaatttcccaaatgtcaggcgcccctttaaatcttggcggcacttatgacaagtcaaaatcatggcttgttaagatttcggtgagtgataacctaatgtcagcaacaccaataatacaaccagttgcaagtgagtttgtacttgtaactaaagcaccttctggtgttgcatttgggaaaatttgggaacatggcattattgatgccaaaggcgatgtttatgttgacggtactatttattgtggcgataaggcgatacagcaaaaaccacttgctttaaataatggtggctcttttagacatgacgacaccgacctaaatagcttgcaagacacaggtttttattgtgtatttagaggtgctaatagaccggctggggcaggtcctgggtacgtaacagttgtaagacatgagacagcaaactatgcttatcaacaattttacgaccgcacaaataaaactatatttacgcgcttgctggaaaacggtgtttggagcggttggagtgagtatgttaaaaaagatagcttacaaacgactggctggataacaattggcaacggttttaaatataagcggaaaggtgatgacatagacttgatgtataattttgcttctaatggattacagagatggtctgttggtaatatgccatctggtttaatacctcaagagttgatgtttgcgataactggatggacacttgctccagacaaatcaatccacttacaaatcaatgcatcgggattgattgagtgtataaatcctggcgcttactcaaatacttacagaggtgtcgtgcactggtcaata

SEQ ID NO: 1398 - protein, 668 aa, Streptococcus agalactiae
MGTATYSRSWGNNLTLEILSAWNKPNIASNTSTVNVQVFLKMSSYGYISIGETRPLKITVDGRAETINVNPSINYGQRKLLFAKDYIVNHNSDGNKPLFNISAYYPINFSNYGEATANQSISLPKINRLSVSSAISGVLGNAVTITINRYSTSFTHNLKYDFKGSTGTIATGVGTSYLWTIPPTFANLLPNELTGTGNLIVETMDGSAKIGETKYTLSITIPNTATYKPKLSSITLSDTNTLTSSIVSGNNFVRIISKVKVDFGSAIGNNGSTITSYNAEIVGKSNSIIGNGSVFDKLDFFGSATIRATVTDSRGLTSEPVDTKINVIDYFLPIVTSAKVVRSQQNPDILQVLPFVKIAPIIVGGIQKNQLKMSVSVAPYNTGIYAVDSGAATNTWSTISQMSGAPLNLGGTYDKSKSWLVKISVSDNLMSATPIIQPVASEFVLVTKAPSGVAFGKIWEHGIIDAKGDVYVDGTIYCGDKAIQQKPLALNNGGSFRHDDTDLNSLQDTGFYCVFRGANRPAGAGPGYVTVVRHETANYAYQQFYDRTNKTIFTRLLENGVWSGWSEYVKKDSLQTTGWITIGNGFKYKRKGDDIDLMYNFASNGLQRWSVGNMPSGLIPQELMFAITGWTLAPDKSIHLQINASGLIECINPGAYSNTYRGVVHWSI

SEQ ID NO: 1399 - DNA, 4122 bp, Streptococcus agalactiae
atgttaacaattcatggaccggatttaaaacctgtcctttttttggataatgataaacaaggagctttgaactactttaaccacaagtggtatagaaagcaaaagactggctcgtctgtactagaattctccgtttacaaaaaagatttgcttggcgatagcccacttagtcataaatatcacgtactaaacgatcaagcatttgtctcttttgtgcacaaaggtaaagtacaattgttaaacatcatgaaaattgatgaagatgaaaaacaaattgattgttattgcgaaaaccttaatttagagttgctaaacgagtattgtaacgcatataaagcaactaaagcgatgtcgtttgaagagtatctcgtgcagtttgacattttgagctggggggctttgacagttggcacaaacgaagttaaggacaaaaaacttacattggaatggactagtcaagaaactaagttagctcgtcttttgtcaattgctaataatttcgatgcagaaattgagtttgagacaaagcttaatttcaatcacacgtttaagcaactcatcattaatatttacaaagaatacgaggagggcaaatcttatggtgtagatcgtgataagaccgacgtgatattacgctatcaaaaaaatatttctgggataaggaaaacagttgacaagcgccagatttataacgctattagaccatacggcaaaaaaactgttagaggcgagcgcgttatttctaatcctgtaactcgtaaagtcactaaaacggttggttcaaatcgcacgtacttaggcggagaccttaaatattatggtcatacaatcaaaaaagctaacgtacaagctattattaactacgcagtgcaatataatattttgccaagtggaatcatcacgcaactttatttagagagtttttggggtgattcgacagttggtaaacgtgacaacaactgggcaggtatgagcggtggagcacagacgcgtccaagtggagtaaaagtcactactgggatggctcgtcctgcaaacgagggtggaacatacatgcactatgcaagtgtagatgactttttaaaagattacacttatcttttagcaaaacaagggatttataatgtcgtcggcaaaaagaatatagcagactatacaaaagggctttttagagctggtggagctaaatatgactatgcagcagcaggatatcaaagctacacaaatttgatgactaatatccgaaatggtatcaataaagtaactggaaatatcctcaatacgattgataagctgtggcagactcctgtaaagcccataaccgccgtaaacgtcgctagaagagccactaaaacaatacaagctattaatgaggctactaagctgaaagggcgcagaatcggttctggacagtgttatgcgctatctgggtggtatgcaaaaaaattggatggcgcttggattgacagctcgattggtggtattagaggtcgtatcggaggcggtatggctgctgccttaatcggcactgattataactggggtgcatatgggtggaaggtagataaatcacctaacgctggaaacttaaaagctggtggtatttataatgtacgagcaaatcgaggcgctcctttttataccacaggctgggggcatacaggtattatcaagagtgtctccaagaccagagttactgttttggagcaaaactttgttggtcgcatgtatgttgtcgaaaactcatatgacattaactctttcgcatctggattacaaacagtatgttaccctcgtgaaatagcgcaaggtatgtctgttaacggcgcaacaacacagcaagtaagtggtgggacacagatatcgtacgaagaagtcgtacaagaggctcagacagaatcatacgaagaagaacaaatcatctatattgacaactctatctacaaagagtggaaagatgaaaacggtaaagtagagtactatctcaaaaatggatttttgtacgcaccactttcaagagaccgctatccatctgttttaaccggtaatgagacacgagacaactggatacgaaaagacatggaagtcgagactgatagtcaagaagtcttgatgtcaacaggtctaaaagacttaaaagcacacgcatatccagcaattacatacgaagttgatggctatgttgacttagaacttggtgatgttgtgcggatacaggacgacggatacgagccaccgctgattttgacagcacgagtagttgagcaagaaatatccataacaaatcccagctctaacaaaactaaattcagcaattttgtcgaaaaagaaagtcagttagcttctgatttaatcagtgatatgttgcgtctatacgatgagtcaattccatacgaaatcaaactagctacttcgaatggtgtcgcttttaaaaatggcactggtgaatctgtcctaactcctagcttgcaaaagaacgggaaagactatgaagcagtttatttttataaaaatggtgactcgctaattgatatcggaccatcgctaatcgttaaagcaagcgactttaaccacgttttaaatataacagttgaggcatatttaaatgaggaacttgtagcaagcacacaaatatcatttacagacactgaagacggtgctgacgggaaagatggcgcaccgggaccacaaggacctcccggtgtaaacggactgcaaggtccaaaaggtgaccaaggcattcaaggtccagctggtgctgacggtaaagcgacttatacgcatatagcatacgcccttgacgagaacggatcaactggctttagtgtatctgataacgttggcaaaacgtacataggtatgtatgttgatgataatatcatagactcaaacgaccctaaaaagtacaagtggaatttgataaaaggcgcagatggtgctagaggtatccaaggtccagctggtgctgacggtaagacaccttactggcatgtagcgtatgcaaacagctcagatgggacagttgactttagcgtgtctgatagtgcaaacaagcgctacattgggcaatatactgactacgatgcaatagattcaagtgaccctaaaaaataccgctggactgacatggttgggacggttgtcgtcgggacaaacaatctgattgatggtacaaaatcattttttgggactgattggtttacttctgcaacgctagaagacgagaacctctctaattgtcctttcacgcttaaaaaatggattagtgggcaaaaagtgtcgcatgcaaaagatatcatggtcgagcaaggtgtaacgtacacttttagtgcttatgttaaacgtgaggtagctgggaatttatatttttatctttatgatatagcagatggttttattactagcgataccccacgagagacaattataaaaaacgttgactctagtctcagacgttttgaaatcacttttacaccaactaagacaggtaggattagaccaaggttcgcgatggtgtcatcggagcaaggtagtttcagctctggtgggtttatgctcgttaggggaaataaaacaggcgactggcaggaatcagaagctgataaagcaagtaatcttgattcaaaagctgatcaagaattaacccaagcacaaattctagctcttgaagaaagaactgctatagcaagagaaaatgcaattgctgaggctatgcagaatacactcagtgaagttgaaactaagtggaagctttggtatgacttaaatacgatagacgaaaagcaaaaagttgcaaacgacatcgctcaattgtttgatcgtacaactgagtttaaacaactattaggtgaggcaagtgcaagatttagctttatcaacaatgaaacgttgattggtgaagagggcgttgctatcggtgacaaaggcggaaaagcaaagttatttctatcaaatgacagcatttcatttgtgacaaatggtgttgctcagatgacattgacaggtgataccttaacaataaaaaatggactgtttacagagcgtatacaaattggaaattttgttgaagaagtctatgacagaaatccattatttaatgttatcagagcaattagaaatagt

SEQ ID NO: 1400 - protein, 1374 aa, Streptococcus agalactiae
MLTIHGPDLKPVLFLDNDKQGALNYFNHKWYRKQKTGSSVLEFSVYKKDLLGDSPLSHKYHVLNDQAFVSFVHKGKVQLLNIMKIDEDEKQIDCYCENLNLELLNEYCNAYKATKAMSFEEYLVQFDILSWGALTVGTNEVKDKKLTLEWTSQETKLARLLSIANNFDAEIEFETKLNFNHTFKQLIINIYKEYEEGKSYGVDRDKTDVILRYQKNISGIRKTVDKRQIYNAIRPYGKKTVRGERVISNPVTRKVTKTVGSNRTYLGGDLKYYGHTIKKANVQAIINYAVQYNILPSGIITQLYLESFWGDSTVGKRDNNWAGMSGGAQTRPSGVKVTTGMARPANEGGTYMHYASVDDFLKDYTYLLAKQGIYNVVGKKNIADYTKGLFRAGGAKYDYAAAGYQSYTNLMTNIRNGINKVTGNILNTIDKLWQTPVKPITAVNVARRATKTIQAINEATKLKGRRIGSGQCYALSGWYAKKLDGAWIDSSIGGIRGRIGGGMAAALIGTDYNWGAYGWKVDKSPNAGNLKAGGIYNVRANRGAPFYTTGWGHTGIIKSVSKTRVTVLEQNFVGRMYVVENSYDINSFASGLQTVCYPREIAQGMSVNGATTQQVSGGTQISYEEVVQEAQTESYEEEQIIYIDNSIYKEWKDENGKVEYYLKNGFLYAPLSRDRYPSVLTGNETRDNWIRKDMEVETDSQEVLMSTGLKDLKAHAYPAITYEVDGYVDLELGDVVRIQDDGYEPPLILTARVVEQEISITNPSSNKTKFSNFVEKESQLASDLISDMLRLYDESIPYEIKLATSNGVAFKNGTGESVLTPSLQKNGKDYEAVYFYKNGDSLIDIGPSLIVKASDFNHVLNITVEAYLNEELVASTQISFTDTEDGADGKDGAPGPQGPPGVNGLQGPKGDQGIQGPAGADGKATYTHIAYALDENGSTGFSVSDNVGKTYIGMYVDDNIIDSNDPKKYKWNLIKGADGARGIQGPAGADGKTPYWHVAYANSSDGTVDFSVSDSANKRYIGQYTDYDAIDSSDPKKYRWTDMVGTVVVGTNNLIDGTKSFFGTDWFTSATLEDENLSNCPFTLKKWISGQKVSHAKDIMVEQGVTYTFSAYVKREVAGNLYFYLYDIADGFITSDTPRETIIKNVDSSLRRFEITFTPTKTGRIRPRFAMVSSEQGSFSSGGFMLVRGNKTGDWQESEADKASNLDSKADQELTQAQILALEERTAIARENAIAEAMQNTLSEVETKWKLWYDLNTIDEKQKVANDIAQLFDRTTEFKQLLGEASARFSFINNETLIGEEGVAIGDKGGKAKLFLSNDSISFVTNGVAQMTLTGDTLTIKNGLFTERIQIGNFVEEVYDRNPLFNVIRAIRNS

SEQ ID NO: 1401 - DNA, 1044 bp, Streptococcus pyogenes
atgttgacatcaaagcaccataatctcaacaaactagtctggcgctacgggctaacctcagccgctgccgtccttctagcctttggaggcggggcaagcagcgttaaggctgaggtttcttctacgactatgacgtcgagtcaaagagagtcaaaaataaaagagatcgaagaaagtcttaaaaaatatccagaagtgtccaatgagaaattttgggaaagaaagtggtatggaacctattttaaagaagaagattttcaaaaggagctaaaagattttactgagaagaggcttaaggagattctagatttaattggtaaatctggaatcaagggagaccgtggtgagactggtcctgctggcccagccggaccacaaggtaaaactggtgagaggggcgcccaaggtcctaaaggtgaccgcggtgagcaaggaatccaaggtaaagctggtgaaaaaggtgagcgcggtgaaaaaggcgacaaaggtgaaaccggtgaacgcggtgaaaaaggcgaagctggaatccaaggcccacaaggtgaagctggtaaagatggcgctccaggtaaagatggagctccaggcgaaaagggtgaaaaaggtgaccgcggtgaaaccggagctcagggtccagtaggcccacaaggtgaaaaaggtgaaacgggcgcccaaggcccagcaggcccacaaggtgaggcaggcaaaccaggtgagcaaggcccagcaggcccacaaggtgaagcaggccaaccaggcgaaaaagctccagaaaagagcccagaaggcgaagcaggccaaccaggcgaaaaagctccagaaaagagcaaagaggtaactccagctgcagaaaaacctgctgacaaagaagctaaccaaacgccagaacgccgcaatggcaatatggctaagacacctgtagccaacaaccacagacgtctaccagcaactggtgagcaagccaacccattctttacagcagcagcagtagcagtgatgacaacagctggtgtcctagccgttacaaaacgcaaagaaaacaac

SEQ ID NO: 1402 - protein, 348 aa, Streptococcus pyogenes
MLTSKHHNLNKLVWRYGLTSAAAVLLAFGGGASSVKAEVSSTTMTSSQRESKIKEIEESLKKYPEVSNEKFWERKWYGTYFKEEDFQKELKDFTEKRLKEILDLIGKSGIKGDRGETGPAGPAGPQGKTGERGAQGPKGDRGEQGIQGKAGEKGERGEKGDKGETGERGEKGEAGIQGPQGEAGKDGAPGKDGAPGEKGEKGDRGETGAQGPVGPQGEKGETGAQGPAGPQGEAGKPGEQGPAGPQGEAGQPGEKAPEKSPEGEAGQPGEKAPEKSKEVTPAAEKPADKEANQTPERRNGNMAKTPVANNHRRLPATGEQANPFFTAAAVAVMTTAGVLAVTKRKENN

SEQ ID NO: 1403 - DNA, 1518 bp, Streptococcus agalactiae
gtggtagattacaaaactgtaagatgtcattttggcgatgtcgaattgactaagtggattactattacagacggctttactgtctttagtggcgcagactacgacccggagctaaaagaaattggtggcaaagatggtagcatttttattggaacgaaaactaagcataaagtaataaaagtcccattctgggtaaaatacaatacaatagaagattacgatgccctacaattggctttatcttctaaaaagcctaagatgttgatgtttagccacatacctggacgctattatttagctgtccaggttggggatttgaactttaaagaaatcaagatgaacggctttggtgagataacgtttatagttgcagatgcatatgctcattcaacgtcatacagacgcattaaagactatactcaagacggaaataaaatgaccttcaagattaaaaataacgggacagcccctgcgtttccgatatttagaattaagcacttgggtgaaaatggctatattggaattacaaatgagactggagcatttgcggttggttctcctgaagaagaagacgggactatcgttcatcgtaacgaaaccctttttgattactcaaaagcgattgcacaagctttagaaggtgcgcccaacgtcgcaaaactcaactatatgccaccaacatttgactcggaattaaagcgcatgcgccttgataatattttaggctctggcaaaggtggagagtatgtagctattggtgctagaggaactacaccgggttacggcgagcatgttggaacacggacatttattattaatcctgactcaaacggcgaatatactctcaatgaacacttgtggtggaaacagatttttattgctaccgcgcaggatcaaaaaggatttttaaagctttgcgtgacaggtgaaaatgatgaattcctctatgggattgaaacttacaaacgcaaaaacggctttgaaacagagtataacttttttgctcttgatgatgatggcgttggatggcgcttttataagcagtttgaattccaagcggatagaaattatcacaatcctttttcgatgaatagaagcagggcggttgagatttttagagaagaagataagtttcgtatttactttaacggtgcgcatcatcatgtaactgttccgtcccttaaaggaaaaaaatctcgcaagatacatcttgcgatggggacatgcagtgatagctctaaatatatcaactacaacctgtttgaaaaagtcaattttgaaaaaatgggagtgtctcattacaacaatattgtcaataagtaccaaccaggggatgaggttatcattaactttgaaaatgacactgtaagtacaaaagatatcgattcaatacaagatgtggtgttaggttctaagatgatttcgattccgccaggagagtcagaactagtcgtacacttgtctagctgggtcgcagcgctacctgatatatcaattgattttgaagagaggtacaaa

SEQ ID NO: 1404 - protein, 506 aa, Streptococcus agalactiae
MVDYKTVRCHFGDVELTKWITITDGFTVFSGADYDPELKEIGGKDGSIFIGTKTKHKVIKVPFWVKYNTIEDYDALQLALSSKKPKMLMFSHIPGRYYLAVQVGDLNFKEIKMNGFGEITFIVADAYAHSTSYRRIKDYTQDGNKMTFKIKNNGTAPAFPIFRIKHLGENGYIGITNETGAFAVGSPEEEDGTIVHRNETLFDYSKAIAQALEGAPNVAKLNYMPPTFDSELKRMRLDNILGSGKGGEYVAIGARGTTPGYGEHVGTRTFIINPDSNGEYTLNEHLWWKQIFIATAQDQKGFLKLCVTGENDEFLYGIETYKRKNGFETEYNFFALDDDGVGWRFYKQFEFQADRNYHNPFSMNRSRAVEIFREEDKFRIYFNGAHHHVTVPSLKGKKSRKIHLAMGTCSDSSKYINYNLFEKVNFEKMGVSHYNNIVNKYQPGDEVIINFENDTVSTKDIDSIQDVVLGSKMISIPPGESELVVHLSSWVAALPDISIDFEERYK

SEQ ID NO: 1405 - DNA, 2010 bp, Streptococcus agalactiae
atggctactaacttaggacaagcttacgtgcagattatgccgtcggctaaaggaatctctggatctataagtaagacgttagacccagaagcgtcaagcgcaggtagctctgcaggtagcctattaggaggtaaattgattgggatattggggagtgtcattgcagctgctaaaataggcgaaatggtcacaaaagcaatatcgtcatcaatttcagaaggagcggcgcttcagcagtcacttggaggagtagaaacccttttcaaaagcaacgcaaatttagtaaaaaaatatgcagacgaagcctataaaacaactggcttatcagcgaatgcgtatatggaaagtgtcaccggctttagtgctagtttgcttcagtcgctcggaggggatacggccaaagcggcaaaagtcgcaaatatggctatgatagacatggctgataactctaacaagatgggtacatctatggaaagtattcagtacgcttatcaaggttttgcgaagcaaaattacacgatgttggacaatttgaaactcgggtatggcggtacgcaagaagaaatgaaacgtttgctttcagatgcccaaaagctaactggaaaaaaatatgatatttcaaatctctcagatgtatatgaagctattcacgctattcaagggaaaatagggataaccggaacaaccgctaaagaggcagcaacaacgttcacaggttcttttgaagctatgaaagcagcttcgaaaaacttgttggggaaaatggctttaggtgaggatatcaaaccatcgctaaaagcgctgtttgatacaacaagcaactttgtattgaataactttataccaatgctaacaaatgtttttaaaggatttggttcggttatttcgttaactttctcagagctaatacctaaaattgttggttttatgcaaacaagcggtccgtcgctaatgcaatctggcattagctttattattagctttgttaacggatttctaacagcctatcctgcatttttaacagtggcaggaaaaatatttacagatttcgtatcttttgtaatgcaaagtatacctggactcttgcaagctggggctactctcgtcctgaatctaatagatggaatattagctaacttacctcaaatagcaacttcggcagtatctgtgatatcaagctttatatcaatgttgcaagcaaattacccggcaattttaaaaaaaggttttgaaattttaagttacttagtgcaagggattatagcaagattacctgatatcgttattactgttggaaaactcatagcgattttagcaggagcgatagcaagtaatctacctaaagtgctagctcttggagttcagttactcatcacttttgttaaagggattctgagtgtcataggtaaaataaacgaaacagctaacaatattggtgaaaagcttatcaatgcaatcaaatcgattgatttgttgagtgcaggtagagctataatgcgaggtttcttacgaggtttagaggatgtttggggagatattcaaaattttgtcggagatattgcagggtggattaaagatcacaaaggaccaataagttacgatagacgtttacttattccagccggcaacgcaatcatgcaaggtctgcatcaaggacttgttgataaatttaaaccagttaaaaacttagttaacggaatggccgaagaaattcagtcttcattcggaaatcctcaactagcttttgatatggatactaacgtaaacaatggctttgagcgaataggtactttaaataaaaatttatctagtcaagtgactagtacagataattacactagcggcaatgctgctttgttatctgccatcaaaaatttagccgatagacctattgttgtgtctgcgcaatttgataaaaatgaatttgccagagtcgttgctaagccaatagcagcgagacaaaaatttgacgaacagacagaagaaagactgagaggtataaacaggtgg

SEQ ID NO: 1406 - protein, 670 aa, Streptococcus agalactiae
MATNLGQAYVQIMPSAKGISGSISKTLDPEASSAGSSAGSLLGGKLIGILGSVIAAAKIGEMVTKAISSSISEGAALQQSLGGVETLFKSNANLVKKYADEAYKTTGLSANAYMESVTGFSASLLQSLGGDTAKAAKVANMAMIDMADNSNKMGTSMESIQYAYQGFAKQNYTMLDNLKLGYGGTQEEMKRLLSDAQKLTGKKYDISNLSDVYEAIHAIQGKIGITGTTAKEAATTFTGSFEAMKAASKNLLGKMALGEDIKPSLKALFDTTSNFVLNNFIPMLTNVFKGFGSVISLTFSELIPKIVGFMQTSGPSLMQSGISFIISFVNGFLTAYPAFLTVAGKIFTDFVSFVMQSIPGLLQAGATLVLNLIDGILANLPQIATSAVSVISSFISMLQANYPAILKKGFEILSYLVQGIIARLPDIVITVGKLIAILAGAIASNLPKVLALGVQLLITFVKGILSVIGKINETANNIGEKLINAIKSIDLLSAGRAIMRGFLRGLEDVWGDIQNFVGDIAGWIKDHKGPISYDRRLLIPAGNAIMQGLHQGLVDKFKPVKNLVNGMAEEIQSSFGNPQLAFDMDTNVNNGFERIGTLNKNLSSQVTSTDNYTSGNAALLSAIKNLADRPIVVSAQFDKNEFARVVAKPIAARQKFDEQTEERLRGINRW

SEQ ID NO: 1407 - DNA, 2355 bp, Streptococcus pyogenes
atggcaacagaacttggtcaagcgtatgtgcaaattatgccatccgctcgtggaataagtggagcaatctcgaagcaacttgatcccgaagcaaggtcggctggattgagcgctggttcgctcattggtggtaatctcgttaaaatgattggtggtgccattgcagctgctggaatcggtaagatgatttcgtctgccttgtccgctggtgctgatttgcagcaatcttttggtggtattgacacattgtataagggcgctgagactgctgtcaaagggtttgctaaagaggcatacaaagctggaatatcagcaaatacttatgcagagcaagcagtttcaatgggtgcatctctaaagcaatcacttggaggtgatgctgtcgcggctgccaaggctgctaacatggcaatcatggatatggccgacaactcggctaagatgggtactgatatcacatcaatccaaatggcttaccagggatttgctaagcaaaactatacaatgcttgataacctaagacttgggtacggcggcacaaaagaagagatgaagcgtcttttatcagacgctgaaaagttacctgccgctatgggcaagaagtttgatttgagtaattatgctgatgtggttgaggctatacacttggtacaggataacatgggtatcgctggagttgctgctgaagaagcaaaaactacattttcaggctcactagctgctatgaagtcctcttttacaaatgtaatggcaggtttatcactaggagatgatatcagaccggctttacgaggactggctgagacaacttctaatttcttatttggtaactttattccgatggtggcaaatatctttaaaggattaccatcggcaattggtacttttattggagccgcagctcctattatcacaagtcaattccaaggtctaatgagtagccttggaattagtattgatttaagtcctattactgctaaatttgcacagattggccaaaatttacaacctgtttttaacggtttaaaaacggcttttagtcagttgccatcattttttactagcattggtagtgcagttgcaccagtaatagacactattattagcggattagccagattagatttcagtggttttgaggctttaatttcagcaattttaccagccctacaggcaggtttttctaacttcgctgcgattgttggaccagctatctcaggagttgttgactcgtttgttggcatgtggaatgcagcacaacctttaatttcgatactaagtgatgccttgatgccagtatttcaaattttagggtctttcttaggtggtgttgtaaaaggtgcgcttatgggagttagctttgcctttgatgcagttaaagtggctatacaactagtcacaccaattattgacttgctggttcaaggtcttaattttgtacaacctgttctcagtgtcattgcagaatggattggagttgctatcggtatgtttggtaatttaggcacagccggccaaggcttgagcgcttttattaagagcgcttggactaacattcagactgcaatttcaactgctggaacaatcatatctacggttattgactacataaaattagcgttcagtggtgccggttctgcagttggcgtcctaaaaaacattttctcacttgcttggatggcaatgggagacgcaataaatgtggctaagggtatcataagctctgttataaatggcataaaatcagccttcagtagttttagtagcttagtgtctagtgttggttcagcagtaaatggagttatcgattcaatctcaagcacaattagaggtttggcaaacattgatatttctggagctggtgccgcaattatgaatggtttcttaaacggtttgaaatcagcttggggagccgtcaaaagttttgtgagcggtatcgccaactggattgcagaacataaaggacctatctcttatgatagagttctactaaaacctgctggtaaagcaattatgggtggacttaatacaagcttgattgacggctttaaagaggttaaatcaaatgtctctggcatggctgacgaccttgcaagcaccatgacaggtaaaagtctatctctcggtatcgatgctaaaccaagcgtcacagctgatgacttactatcaagcaatattagtactaaaactacagtcggttctgctacaagtgacttgtcattattctttgttaaggtgcttgctctgttgcaagatatccttgataaaaatacggatgtctatctagacaaagaaaaagtcagcgctattttatacgaagaatttgccaaaattatggctagagaggggattgta

SEQ ID NO: 1408 - protein, 785 aa, Streptococcus pyogenes
MATELGQAYVQIMPSARGISGAISKQLDPEARSAGLSAGSLIGGNLVKMIGGAIAAAGIGKMISSALSAGADLQQSFGGIDTLYKGAETAVKGFAKEAYKAGISANTYAEQAVSMGASLKQSLGGDAVAAAKAANMAIMDMADNSAKMGTDITSIQMAYQGFAKQNYTMLDNLRLGYGGTKEEMKRLLSDAEKLPAAMGKKFDLSNYADVVEAIHLVQDNMGIAGVAAEEAKTTFSGSLAAMKSSFTNVMAGLSLGDDIRPALRGLAETTSNFLFGNFIPMVANIFKGLPSAIGTFIGAAAPIITSQFQGLMSSLGISIDLSPITAKFAQIGQNLQPVFNGLKTAFSQLPSFFTSIGSAVAPVIDTIISGLARLDFSGFEALISAILPALQAGFSNFAAIVGPAISGVVDSFVGMWNAAQPLISILSDALMPVFQILGSFLGGVVKGALMGVSFAFDAVKVAIQLVTPIIDLLVQGLNFVQPVLSVIAEWIGVAIGMFGNLGTAGQGLSAFIKSAWTNIQTAISTAGTIISTVIDYIKLAFSGAGSAVGVLKNIFSLAWMAMGDAINVAKGIISSVINGIKSAFSSFSSLVSSVGSAVNGVIDSISSTIRGLANIDISGAGAAIMNGFLNGLKSAWGAVKSFVSGIANWIAEHKGPISYDRVLLKPAGKAIMGGLNTSLIDGFKEVKSNVSGMADDLASTMTGKSLSLGIDAKPSVTADDLLSSNISTKTTVGSATSDLSLFFVKVLALLQDILDKNTDVYLDKEKVSAILYEEFAKIMAREGIV

SEQ ID NO: 1409 - DNA, 369 bp, Streptococcus agalactiae
atgctaaaaatggacgaagatgctcttgtctgtgatttagctgaaacttatcacatatatgattacaaacagctaccacctctaaaagtagctgttttttctttaggcttgagagaagaatcaagaatcaatcgagttatttcaggtaatagagtctcatttgaaagacgaatactagctgggatgtttgacagacttggaatgctcatttggatgaaaacgacagatggccaaaaaggtaaaaatagaccagaaatggtttcaacaatgtttgataatcaacagaaagatagtgaagttgtttcattcggcagtggcaaggatttcgaagaaactagaaataacattcttgggtttggaggtgatagc

SEQ ID NO: 1410 - protein, 123 aa, Streptococcus agalactiae
MLKMDEDALVCDLAETYHIYDYKQLPPLKVAVFSLGLREESRINRVISGNRVSFERRILAGMFDRLGMLIWMKTTDGQKGKNRPEMVSTMFDNQQKDSEVVSFGSGKDFEETRNNILGFGGDS

SEQ ID NO: 1411 - DNA, 369 bp, Streptococcus pyogenes
atgatagcaaaagatgatgatgcattgacttgtgatttagctgaaacatacggcatatatgattacagacagctacctgcttatcaggtggctgtttttgctgtcggtttgagatctaactctaggataaaaatggcattatctggagagactgaggctttggatactgttttgttagctggtatttatgataatactaatttgctgttttggtctaaaactaaggatggtcaatctggtcaaaacaaacctaaatccgtggtggaagctatatctggatctaaatcacaaaaagctaatgatgtcatttcttttgtgtctggcgaggattttgaaaatgcacgtaaacaattactaggaggtgatggc

SEQ ID NO: 1412 - protein, 123 aa, Streptococcus pyogenes
MIAKDDDALTCDLAETYGIYDYRQLPAYQVAVFAVGLRSNSRIKMALSGETEALDTVLLAGIYDNTNLLFWSKTKDGQSGQNKPKSVVEAISGSKSQKANDVISFVSGEDFENARKQLLGGDG

SEQ ID NO: 1413 - DNA, 243 bp, Streptococcus agalactiae
atgaaaacatcgtcaggttttgaatataagattgaagaatcgcgtttaaaaaattatgaattagtagaggcactagcggatttagaaagcaatccgctgtctttaccgaaagttctacgtttgttgctaggtgaccaagtagaaagtttaaaaaatcatttacgcgctagcgacgggactgtttcgacggaggcgttgatggaagaagtgaaagaaatttttgaaagtggtcaattaaaaaaa

SEQ ID NO: 1414 - protein, 81 aa, Streptococcus agalactiae
MKTSSGFEYKIEESRLKNYELVEALADLESNPLSLPKVLRLLLGDQVESLKNHLRASDGTVSTEALMEEVKEIFESGQLKK

SEQ ID NO: 1415 - DNA, 261 bp, Streptococcus pyogenes
atggaaatcttaaaaggaaaaacaacatcaggatttgaatacgaaattcctaaaaaacgattaaaaaactttgaacttgttgaagctattgcagaagaggaaactgatccaacagcggtagttaaaatcgttaatttgttacttggtgatgctgctaagtctctaaaagaacatgtacgagatgcagaaggtatcgtagacgttgaagctatcggagtagaaatcaaagaaatttttgaaagtcaaaaagatttaaaaaac

SEQ ID NO: 1416 - protein, 87 aa, Streptococcus pyogenes
MEILKGKTTSGFEYEIPKKRLKNFELVEAIAEEETDPTAVVKIVNLLLGDAAKSLKEHVRDAEGIVDVEAIGVEIKEIFESQKDLKN

SEQ ID NO: 1417 - DNA, 555 bp, Streptococcus agalactiae
atggtagcaaattcatcaaacgttactacggctaaacctaaaattggtggtgctatttatactgcgccgctaggaacagaattacccaaagacacagcatcagagttaaatgaagcttttaagtcattagggtacatttccgaagacggcttatcaaacgaagataaacgagaatcagaagagatccaagcgtggggtggcgatgttgtagaatctgcccaaaaaagtaaagcagataaatttacatatacattgattgaagcattgaatattgaagtactcaaagaaatctatggcaaagataatgtaactggagaccttaaaaccgggattactgttaaatcaaattcaaaaccactagaggaacattgtttggttatcgagatgattttgaaaaacaatacagttaaacgtattgtaataccaaaagggaaagtatccgaagttggtgaaattaagtatgtcgacaacgaagcggctggttatgagacaacgttacaagcgtttcctgatgcggaaggaaacactcactatgaatatataaaaggagctggt

SEQ ID NO: 1418 - protein, 185 aa, Streptococcus agalactiae
MVANSSNVTTAKPKIGGAIYTAPLGTELPKDTASELNEAFKSLGYISEDGLSNEDKRESEEIQAWGGDVVESAQKSKADKFTYTLIEALNIEVLKEIYGKDNVTGDLKTGITVKSNSKPLEEHCLVIEMILKNNTVKRIVIPKGKVSEVGEIKYVDNEAAGYETTLQAFPDAEGNTHYEYIKGAG

SEQ ID NO: 1419 - DNA, 594 bp, Streptococcus pyogenes
ttgatgaataagaatgatactaaaaatgtaacatctgcaaagcccaagaccggtggggcgatttattcggcaccgcttggtactgaattgcccaaggatgcaaaatcagaattaaatactaaatttaagaatttgggttatgtatccgaggatggtgtggtcaatgaagatacacgttcatccgaaaatattaaagcgtggggtggagatattgtcggggctgtacagacagaaaaagaggataaatttacttataagctgattgagtcactaaatgtagaagtcttaaaagaagtttatggcgctgtcaatgttactggagatttaagtgggggaatccagattaaatcaaattcaaaagagttagaagctcacgtaattgttgttgacatgatcatgaatggcggcattcttaaacgaattgtcttaccaaatgcaaaagtcgatgaggtaggtgaaattaagtatgttgacggcgaagtcgttggttatgaaacaacactaaaatgtttcccggacaaggatggtgatacacaccgtgagtatattgtaaaacctggagaagctaataaaaaagaaaacagctttgaaatg

SEQ ID NO: 1420 - protein, 198 aa, Streptococcus pyogenes
LMNKNDTKNVTSAKPKTGGAIYSAPLGTELPKDAKSELNTKFKNLGYVSEDGVVNEDTRSSENIKAWGGDIVGAVQTEKEDKFTYKLIESLNVEVLKEVYGAVNVTGDLSGGIQIKSNSKELEAHVIVVDMIMNGGILKRIVLPNAKVDEVGEIKYVDGEVVGYETTLKCFPDKDGDTHREYIVKPGEANKKENSFEM

SEQ ID NO: 1421 - DNA, 234 bp, Streptococcus agalactiae
atgagtaagtttaaattcaagctcaataaagctggtgttgctgaattgatgaaatcatcagaaatgcagcaggtattaaccactaaggccacagccatcagagaacgttgtggcgatggttacgcccaagatatccatgtcgggaaaaatagggctaatgctatggtcagcgctaaaaccataaaggccaagaaagataactcaaaaaacaacacattgttgaaggcggtgcga

SEQ ID NO: 1422 - protein, 78 aa, Streptococcus agalactiae
MSKFKFKLNKAGVAELMKSSEMQQVLTTKATAIRERCGDGYAQDIHVGKNRANAMVSAKTIKAKKDNSKNNTLLKAVR

SEQ ID NO: 1423 - DNA, 234 bp, Streptococcus pyogenes
atgagtaagtttaaattcaagcttaatagagctggtgttgccgaattgatgaaatcatcagaaatgcagcaggtattaaccactaaggccacagccatcagagaacgttgtggtgatggttatgtccaagatatccatgttgggaaaaatagggctaatgctatggtcagtactaaaaccataaaggccaagaaagataactcaaaaaataacacactgttgaaggcggtgcga

SEQ ID NO: 1424 - protein, 78 aa, Streptococcus pyogenes
MSKFKFKLNRAGVAELMKSSEMQQVLTTKATAIRERCGDGYVQDIHVGKNRANAMVSTKTIKAKKDNSKNNTLLKAVR

SEQ ID NO: 1425 - DNA, 180 bp, Streptococcus agalactiae
ttgaccggaaaaaaagttgaatatatcttggcaattccaaaaggagataagcatgattgggaggataaagaggtttgcttttttgacaaaaagtggcgcactgtcggcctagctcttgaaggtattgaagagcttattccgcttgaatggaataagaaagttatggtggaaagatatgag

SEQ ID NO: 1426 - protein, 60 aa, Streptococcus agalactiae
MTGKKVEYILAIPKGDKHDWEDKEVCFFDKKWRTVGLALEGIEELIPLEWNKKVMVERYE

SEQ ID NO: 1427 - DNA, 327 bp, Streptococcus pyogenes
ttgaaagggataacagttgctttagccgataagtcgattagcggaaaagacccttttggaaatcctgtaacagttgattttgatatcaaaattgagaatgtgcttgttgcaccagcaactaccgaagatatcactaatcagttatctttgaccggaaaaaaggttgaatatgtcttggctataccaaaaggagacgaacacgattgggaaaataaggaagttagatttttcggcaaaaaatggcgcacagtaggaattccactagaaggtattgaagagcttataccactagactggaataagaaagttatggtggaaagatatgag

SEQ ID NO: 1428 - protein, 109 aa, Streptococcus agalactiae
LKGITVALADKSISGKDPFGNPVTVDFDIKIENVLVAPATTEDITNQLSLTGKKVEYVLAIPKGDEHDWENKEVRFFGKKWRTVGIPLEGIEELIPLDWNKKVMVERYE

SEQ ID NO: 1429 - DNA, 429 bp, Streptococcus agalactiae
atgacaaattttgcgacaacagatgacgtcattttattatggcgtcaattatccgttgacgaaatcaagcgtgctgaggctttgttagagactgtctctgacacgttgaggttagaagcaagtaaagtgggtaagaatctagatgaaatgattttggaaactccttactttgctactgtattgaaatcggtaactgtagatattgtagcgagaacgctgatgactgctacacaaggtgaaccgatgtcgcaagaaagtcaatcggcacttggctacacttggtctggaacttatttggttccaggaggtggtctttttattaaggatagtgagttgaagcgtctcggactaaaaaaacagcgatatggaggaattgagctttatggggaaattgaaaggaataacagttactttagtcgacaagacgat

SEQ ID NO: 1430 - protein, 143 aa, Streptococcus agalactiae
MTNFATTDDVILLWRQLSVDEIKRAEALLETVSDTLRLEASKVGKNLDEMILETPYFATVLKSVTVDIVARTLMTATQGEPMSQESQSALGYTWSGTYLVPGGGLFIKDSELKRLGLKKQRYGGIELYGEIERNNSYFSRQDD

SEQ ID NO: 1431 - DNA, 420 bp, Streptococcus pyogenes
gtgggcaatttcgcaacaacagatgacgtcattttgttatggcgtcccttatctgttgacgaattgaaacgtgcaaatgcactcttgaaagtcgtatcagatacattaagaatggaagctgacaaagttggcaaagacttagataaaacgatggttgataagccttattttgttaatgttattaaatcggttacggttgacattgtagcgagaacgctgatgacatctactcgaggcgaaccaatggcccaagagagccaatcagctttaggatacacatggtcaggcacttatttagttccaggcggcggtctttttattaaggacagtgagttgaagcgtcttggactaaaaaaacaacgatatggaggaattgaactttatggcgaaattgaaagggataacagttgctttagccga

SEQ ID NO: 1432 - protein, 140 aa, Streptococcus pyogenes
VGNFATTDDVILLWRPLSVDELKRANALLKVVSDTLRMEADKVGKDLDKTMVDKPYFVNVIKSVTVDIVARTLMTSTRGEPMAQESQSALGYTWSGTYLVPGGGLFIKDSELKRLGLKKQRYGGIELYGEIERDNSCFSR

SEQ ID NO: 1433 - DNA, 900 bp, Streptococcus agalactiae
atggcagaatcaattaaagcaggaacgttatttaaaccagaactagtaacagaaattatgagtaaagtgaaaggtcactctacgcttgcgaaattatctggtcaaacaccaatcccgttcaacggagtagaacaatttgttttcaacttggatggtaatgctcagattgttggtgaaggtgagcaaaaattagggaataccgcaaaggtcacttctaaaattattaaaccgctgaagtttgtttatcaggcacgtatgactgacgaatttaagtacgcctcagaagaaaaacgattgaatttcttaaaacattatgctgacggttttgctaaaaaaatggcggaggcttttgatattgcagctattcatggccttgaacctcgcacaatgacagatgcctcattcaaagctacaaactcatttgatggggtcgtgactggtaatgtcatcaaatacgaagcagataaaattgacgacaatattgatgcagctgttacaacgattgtagcaaatggaaatgatgtgacaggtatcgctttgtcaccacaggcaggacaagatatgtctaaacgaaaagataaatttgataatgtgatgtatcctgaatttcgattcgggcaacgtccaagcaacttctttaatatgactttagacatcaacaagacacttactatgaaaggtggcacagctaaagatgaccatgctattgtcggagatttccagaatatgttcaagtggggttatgctgaaaatatcccaatggaaatcattgagtatggagacccagatggctctggacgtgatctaaaggcttataatgaaatcctgctccgtacagaagcattcataggatggggaattttagatgagaaagcattctctcgcgttgaggtacaagga

SEQ ID NO: 1434 - protein, 300 aa, Streptococcus agalactiae
MAESIKAGTLFKPELVTEIMSKVKGHSTLAKLSGQTPIPFNGVEQFVFNLDGNAQIVGEGEQKLGNTAKVTSKIIKPLKFVYQARMTDEFKYASEEKRLNFLKHYADGFAKKMAEAFDIAAIHGLEPRTMTDASFKATNSFDGVVTGNVIKYEADKIDDNIDAAVTTIVANGNDVTGIALSPQAGQDMSKRKDKFDNVMYPEFRFGQRPSNFFNMTLDINKTLTMKGGTAKDDHAIVGDFQNMFKWGYAENIPMEIIEYGDPDGSGRDLKAYNEILLRTEAFIGWGILDEKAFSRVEVQG

SEQ ID NO: 1435 - DNA, 909 bp, Streptococcus pyogenes
atgggaacagaaacatcaaaagcgagcttatttgacaaacatttagtatcagatcttatcaataaagttaaggggcatagctcactagctaaactatctagccaaaaacctattccgtttaacggatctaaagaatttacgtttacattagattctgatattgatgtggttgctgaaaacggtaaaaaaacacacggtggcttatcgctagagcctgttactatcgtaccaatcaaggttgagtatggtgctcgtctttctgatgaatttttatatgcaacagaagaggaaaagattgatattttgaaagcttttaacgaagggtttgcgaaaaaactcgctcgtggtattgacctaatggcgatgcatggtatcaatccacgtacaaaaaaagcgtctgacgttatcggcacgaatcactttgatagtaaagtgacgcaagtggttaaatttacagagagcgaagacgctgatgcaaatatcgaagcagctgttaatctaattcaggggtctgaaggtgtagtgacagggcttgcgatggatacagagttttcaacagcactggcgaaagttaccaatggggagatggggcctaaaatgtaccctgaacttgcttggggagcgaatccagatagcatcaatggcttgaaatcgtccgtcaatactactgttggtgctggagctgatgaagcagaatccaaagatttagtaattattggcgattttgaaagcatgtttaagtggggttatgcaaaacaaattccaatggaaatcattaaatacggtgatcctgataattcggggaaagaccttaaagggtataaccaaatttacttacgtgctgaggcgtatatcggctggggtattttggacgctaagagctttgctcgtgtcactaaaggagaagta

SEQ ID NO: 1436 - protein, 303 aa, Streptococcus pyogenes
MGTETSKASLFDKHLVSDLINKVKGHSSLAKLSSQKPIPFNGSKEFTFTLDSDIDVVAENGKKTHGGLSLEPVTIVPIKVEYGARLSDEFLYATEEEKIDILKAFNEGFAKKLARGIDLMAMHGINPRTKKASDVIGTNHFDSKVTQVVKFTESEDADANIEAAVNLIQGSEGVVTGLAMDTEFSTALAKVTNGEMGPKMYPELAWGANPDSINGLKSSVNTTVGAGADEAESKDLVIIGDFESMFKWGYAKQIPMEIIKYGDPDNSGKDLKGYNQIYLRAEAYIGWGILDAKSFARVTKGEV

SEQ ID NO: 1437 - DNA, 588 bp, Streptococcus agalactiae
ttgttacacaacgaagccaaaaagaaagcaaagaaccagctgttaaaaaacgacatccggaagggtgtttttttactgctaaaaaatctaccgaactgccgggaaagcaggagaaaggacgttaatatgtcagaatttaaagttattgaaacacaagaagagttggacacgattgtgaaagctcgcattgctcgagaacgtgagaagtatcaagattacgaccaactgaaaactcgtgttgaagaactagaaaccgaaaacagcagcttacaaactgctttgaatgatgctaaatcaaacactgatagctatacagagaaaattaccactttggaaaatcaaatcgctggttatgaggcagcaaatttacggacaaaggtagcgttacagtatggcttaccaatcgatttagctaatcgtttgcaaggcgatgatgaagacgggctcaaggtggatgcagaacgcttagcatcttttatcaagccgtctcaaccacaaccgccaacaaagtcaaatgaaccgattattaccgaccaaaaagaagcaggttggattgaaatggcacgtaatttagttaacaaaggagaa

SEQ ID NO: 1438 - protein, 196 aa, Streptococcus agalactiae
MLHNEAKKKAKNQLLKNDIRKGVFLLLKNLPNCRESRRKDVNMSEFKVIETQEELDTIVKARIAREREKYQDYDQLKTRVEELETENSSLQTALNDAKSNTDSYTEKITTLENQIAGYEAANLRTKVALQYGLPIDLANRLQGDDEDGLKVDAERLASFIKPSQPQPPTKSNEPIITDQKEAGWIEMARNLVNKGE

SEQ ID NO: 1439 - DNA, 459 bp, Streptococcus pyogenes
atgtcagaatttaaagttattgaaacacaagaagagttggacacgattgtgaaagctcgcattgctcgagaacgtgagaaatatcaagattacgaccaactgaaaactcgtgttgaagaactagaaaccgaaaacagcagcttacaaactgctttgaatgatgctaaatcaaacactgatagctatacggaagagattagcaccctgaagaatcaaattgccgattatgagacggcaaatttacggacaaaggtagcgttacagtatggcttaccgattgatttagctgatcgtttgcaaggagatgatgaagatggactcaaagtagatgcagaacgcttagcatcctttattaagccatcccaaccacaaccgccagcaaaatcaaacgaaccaaatatcgatagtaatgcagacgcaaattacagagcgttagtgcaaggattaagtacagaagat

SEQ ID NO: 1440 - protein, 153 aa, Streptococcus pyogenes
MSEFKVIETQEELDTIVKARIAREREKYQDYDQLKTRVEELETENSSLQTALNDAKSNTDSYTEEISTLKNQIADYETANLRTKVALQYGLPIDLADRLQGDDEDGLKVDAERLASFIKPSQPQPPAKSNEPNIDSNADANYRALVQGLSTED

SEQ ID NO: 1441 - DNA, 1413 bp, Streptococcus agalactiae
atggttactaagacgaaagcaaagcttggcaatcagcgacctactcaatcggtaaatttacattttgctaaaactctagctcatgaagccatcaattactacaaaaaaacaggtctaagttgctacttgtggcaagagaatatgctcatacctatgatggctatcaacgaagataacctgtgggtgcatcaaaaatacggctacgctattcctcgacgaaacggaaaaacagaagtcgtttacatacttgagctgtgggctttgcataaaggattgaaaatcttgcatactgctcacagaattagcacttctcactcttcgtttgaaaaagtaaaaaaatatcttgaaatgtcaggatatgttgacggagaagattttatatcaaacaaagccaaagggcaggagcgtattgagtttaaatctagcggttctgttatccagtttaggactaggacatcaaatggaggtcttggtgagggatttgacctactaattattgatgaggcgcaagaatacactgccgagcaagaatcagcgttgaaatacacggtaactgatagcgataacccaatgactattatgtgtggaacgccaccgaccatggtatctactggtacagtctttgaatcttatcgtaaagagtgtttaaaaggtgacagacgctactctggatgggcagaatggtctgttgacgaaatgcaaccaatacatgacgtaaaaagttggtatgttgccaacccgtccatgggataccacttaaatgagcgtaaaattgaagctgaattaggtgaggatgaaattgatcacaatatccagcgcttaggatattggccgtcatttaaccagaaatcagttatatctgaaaaggagtgggctaaactaaaagttgagcaagtaccagaactcaaaagtaagttatttgttgggattaagtttggccaagacggtaacaacgtatcattgtcaattgcagcaagagcatcagaaaataaagtatttgttgaggctattgactgtttatccgttagaaatggaactcaatggattattaactttttgaaatcggctgacattgctaaagttgttgttgatggcgcaagcggtcaagaattacttgctcaagagatgagagagcatggtttaaagaaaccagaattgcctaaagttgctgaaattatcacagctaacacgatgtgggaacaaggtatcatgcaagagactatctgccacaacgaccagccatctttgacagcggtagttacaaactgcgaaaaaaggcaaattggctcgaatggtggttttgggtataaatcgctttatgatgatagagacattagcttaatggacagtgcattgcttgcgcactggatttgttacacaacgaagccaaaaagaaagcaaagaaccagctgt

SEQ ID NO: 1442 - protein, 471 aa, Streptococcus agalactiae
MVTKTKAKLGNQRPTQSVNLHFAKTLAHEAINYYKKTGLSCYLWQENMLIPMMAINEDNLWVHQKYGYAIPRRNGKTEVVYILELWALHKGLKILHTAHRISTSHSSFEKVKKYLEMSGYVDGEDFISNKAKGQERIEFKSSGSVIQFRTRTSNGGLGEGFDLLIIDEAQEYTAEQESALKYTVTDSDNPMTIMCGTPPTMVSTGTVFESYRKECLKGDRRYSGWAEWSVDEMQPIHDVKSWYVANPSMGYHLNERKIEAELGEDEIDHNIQRLGYWPSFNQKSVISEKEWAKLKVEQVPELKSKLFVGIKFGQDGNNVSLSIAARASENKVFVEAIDCLSVRNGTQWIINFLKSADIAKVVVDGASGQELLAQEMREHGLKKPELPKVAEIITANTMWEQGIMQETICHNDQPSLTAVVTNCEKRQIGSNGGFGYKSLYDDRDISLMDSALLAHWICYTTKPKRKQRTSC

SEQ ID NO: 1443 - DNA, 1428 bp, Streptococcus pyogenes
ttgaaaggaataagtatggttactaagacgaaaacaaagcttggcaatcagcgacctactcaatcggtaaatttacattttgctaaatctctagcgcatgaagctattaattactacaaaaaaacagggctaagctgctatccatggcaagtaaatatgcttatcccaattatggccatagatgaaaatggtctgtgggttcatcaaaagtatgggtatgctatcccacggcgtaacggtaagacggaagtagtctatattgttcagctgtgggctttgcataaaggtttaaaaatcttgcatacagctcatcgaattagcacatctcatgcatcattcgaaaaggtaaaaaaataccttgagatgtcaggttatgttgatggagaagactttatatcaaataaagccaagggtcaagagcgtatagagttcaaagccagcggcgctgttatccagttccgaactaggacatcaaacggtggacttggtgagggatttgacttacttatcattgacgaggcacaagaatacacatctgagcaagaatcagcattgaagtacacagttactgatagtgataatccaatgactattatgtgtggaacgccgccaacgatggtatctactggtacagtatttgaagcatatcggaaagattgcttaaaaggcaataagcgttattctggttgggctgaatggtcagttcctgagatggttaagattaacgatgtatcttcctggtatatttccaacccatctatgggattccacctcaacgagaggaaaatcgaagctgaattaggtgaagatgagattgatcacaacatccaacgcttaggttattggccatcctttaaccaaaaatcagttatatccgaaaaagaatgggcaaaactcaaagttgagcaagtgccagaactcaaaagcaagctttttgtcggtatcaagtttggtcaagatggcaacaacgtatcactatcaattgcagcaagaacatcagaaaataaggtatttgttgagactattgactgtttatcggtcagaaatggaactcaatggattattaattttttgaaatcggctgatatcgctaaggttgtcattgatggtgcaagtggtcaagaattacttgctcaggagatgaaagatcaaggtctaaagaaaccagaattgcctaaagttgctgaaattatcacagctaacatgatgtgggagcaggggatcatgcaggaaaccatttgtcatagtgatcagccatctttgacagcagtagtcacaaactgtgaaaagaggcaaattggctctaatggtggttttgggtataaatcgctttatgatgatagagacattagcttaatggacagtgcattgcttgcgcactggatttgttacacaacgaagccaaaaagaaagcaaagaaccagctgt

SEQ ID NO: 1444 - protein, 476 aa, Streptococcus pyogenes
LKGISMVTKTKTKLGNQRPTQSVNLHFAKSLAHEAINYYKKTGLSCYPWQVNMLIPIMAIDENGLWVHQKYGYAIPRRNGKTEVVYIVQLWALHKGLKILHTAHRISTSHASFEKVKKYLEMSGYVDGEDFISNKAKGQERIEFKASGAVIQFRTRTSNGGLGEGFDLLIIDEAQEYTSEQESALKYTVTDSDNPMTIMCGTPPTMVSTGTVFEAYRKDCLKGNKRYSGWAEWSVPEMVKINDVSSWYISNPSMGFHLNERKIEAELGEDEIDHNIQRLGYWPSFNQKSVISEKEWAKLKVEQVPELKSKLFVGIKFGQDGNNVSLSIAARTSENKVFVETIDCLSVRNGTQWIINFLKSADIAKVVIDGASGQELLAQEMKDQGLKKPELPKVAEIITANMMWEQGIMQETICHSDQPSLTAVVTNCEKRQIGSNGGFGYKSLYDDRDISLMDSALLAHWICYTTKPKRKQRTSC

SEQ ID NO: 1445 - DNA, 186 bp, Streptococcus agalactiae
atggaattattgcagtacaataataagaaaatttcacttgttgacattgatgatgagatatggactggaacagcatactattgcgatgctgatacaaatgagacccccgaggacgtcttagtcgtaaaaaacgagagaggatatacagaaatttctgaatcagaaatcaaatcaattgaaatcatt

SEQ ID NO: 1446 - protein, 62 aa, Streptococcus agalactiae
MELLQYNNKKISLVDIDDEIWTGTAYYCDADTNETPEDVLVVKNERGYTEISESEIKSIEII

SEQ ID NO: 1447 - DNA, 1218 bp, Streptococcus agalactiae
atggttgatgatgtcttacctaagctactaaaatctgttcaacaggattttgaaaagcattttggcaaaagtgaggtcgttgctaaggcttttgcagaattgcaagctaaaaaagcgacttataagacagtcaacgagtttgctgtagaggttggacggcttttgtcgttggctctggcaaactctgttatttctgatgagttaccagatggtaaaatgtattataatattgctaatcgtctcgtgaatgatacactgagacataattataagttaatttctgattatgcaggcgatgtccagcaaaatttaaacaaacaggctaaaattagtttaaaaattcaacgtccaccgcttaatcaagataaaattgacgggttagtcaatcgtttggcgagtgaacctgtatttgacgatgtcaagtggcttctcgatgagccaattgttaattttagtcaatctatcgttgatgattgtatcagagctaatgctgatttccactttaaaacgggactgaaaccaactatagaacgtatatcaacaggtaagtgctgcgattggtgtgaccgattagctggtcgctacgtttaccacgaagaaccaaaagatttttacaagaggcatcaacattgtcagtgtgttatcgactatcatcctaaaaacggcaagcgtcagaattcatggtcgaaaaagtggacaaaagaaactactgatatactagaacgacgcaaacagatgaatattgacatcagagacaataaccgtaagtctgatatcaaagaatataaggaaatagtatccattttaggtacaaaagcccctatttctctagctaaattccaagacttgaagtataatgatggtataagatatgagcgattaaaagaccaagcacacatccaaggaaactttaaaaacggaagttggctagataaggtaaatcctgaaaaacaagctcggcatatcaaatcaaccgctggagaaggtaagagttatttcttcgatgatgtggataccgatgttttataccaaaagtataaacagactggtgaattaatcaagaatagaaggggacggactcataaggaacttattgatttaccagaagatatttcgataggtattgatatttactcaggaaatttagtaaatggcctgactattcattacggaaagaccggatcgcacattgttccaacttatcatgaaaggagagag

SEQ ID NO: 1448 - protein, 406 aa, Streptococcus agalactiae
MVDDVLPKLLKSVQQDFEKHFGKSEVVAKAFAELQAKKATYKTVNEFAVEVGRLLSLALANSVISDELPDGKMYYNIANRLVNDTLRHNYKLISDYAGDVQQNLNKQAKISLKIQRPPLNQDKIDGLVNRLASEPVFDDVKWLLDEPIVNFSQSIVDDCIRANADFHFKTGLKPTIERISTGKCCDWCDRLAGRYVYHEEPKDFYKRHQHCQCVIDYHPKNGKRQNSWSKKWTKETTDILERRKQMNIDIRDNNRKSDIKEYKEIVSILGTKAPISLAKFQDLKYNDGIRYERLKDQAHIQGNFKNGSWLDKVNPEKQARHIKSTAGEGKSYFFDDVDTDVLYQKYKQTGELIKNRRGRTHKELIDLPEDISIGIDIYSGNLVNGLTIHYGKTGSHIVPTYHERRE

SEQ ID NO: 1449 - DNA, 1491 bp, Streptococcus pyogenes
atggttgatgatgtcttacctaagctactaaaatctgttcgacaagattttgaaaagtattttggcgaaagtgatgttgtaaccaaggcttttgcagaattgcaagctaaaaaagtgacctataaaacagtcaatgagtttgctattgaagtcggaagacttttatctttggctctgacaggttctgttagctcggataaattaccagacggtaaaatgtattacaatatcgctaagcgtctcttagatgagactatgggacggaattacaaattgatttcaggttatgctggtgatgttcagcggattttaaatgagaatgctcagattggtctaaaggtgcaacgtccaccgctaaatcgagacaagattaacgggatggtaaatcgtttggatagcgagaatacatttgatgatgtaaaatggctgtttggtgaaccgattgttaatttttcgcagtccattgtggatgataccatcaaggcaaatgcggatttacaatataaaacaggtatgacgccacaggttgtcagaacagaaagtggcaactgttgtgaatggtgtcgtgaggttgttggcacttatagttatccaaaagtccctaaggacgtatggagaagacatcagcggtgtcgatgtacgcttgactatgacccgaagaatggaaaagttcagagtgcttggagtaaaatctggcgaaagaaagaaaaaactcaagaatctatagaaagggttgaaaaatttaaggaaagtgctctagtagaatctatcaaaaatgatatcgctaagttagatatgacaaaggttggtccgagtgatataattgatatagggaaacgtatcaattatcactttagagtttcagaacatataggagataaagagaaattaaaagaaattttctcaaattttcgtgaaatcggtggagaaatacctaaaaatacttgggcaaaaggttcatctaaacttgttaaagaccagctacaagaggcttttcaaaattatccaactgagtgggcagctgttccggacggtattggtaaaaaactaaaagctataaaaaggaagcgcggttacttcgatggatatgatgaagatttagttattgctacaaatggaacaagaaaaacaacaccttaccatgagataggacatatgattgaactggttaatcctgatttagtaagattagagaaagcctgggtagataaaagaactgctaatgaagctgaggttcgcttgaaagatatttttccaagttcaaattatggtattggggaagttactaagaaagatgactttatatcaccatatattggtaaatactacagcgatgcagctgaagttttcactatgggattacaaggtatttttgttcctgaagaacgatttgctaagtcctttgacaaaaaaacatggaaatatgactacaagacaatcaatgacgaccctgaatttttgaattttattattggattatttgtgaaagtg

SEQ ID NO: 1450 - protein, 497 aa, Streptococcus pyogenes
MVDDVLPKLLKSVRQDFEKYFGESDVVTKAFAELQAKKVTYKTVNEFAIEVGRLLSLALTGSVSSDKLPDGKMYYNIAKRLLDETMGRNYKLISGYAGDVQRILNENAQIGLKVQRPPLNRDKINGMVNRLDSENTFDDVKWLFGEPIVNFSQSIVDDTIKANADLQYKTGMTPQVVRTESGNCCEWCREVVGTYSYPKVPKDVWRRHQRCRCTLDYDPKNGKVQSAWSKIWRKKEKTQESIERVEKFKESALVESIKNDIAKLDMTKVGPSDIIDIGKRINYHFRVSEHIGDKEKLKEIFSNFREIGGEIPKNTWAKGSSKLVKDQLQEAFQNYPTEWAAVPDGIGKKLKAIKRKRGYFDGYDEDLVIATNGTRKTTPYHEIGHMIELVNPDLVRLEKAWVDKRTANEAEVRLKDIFPSSNYGIGEVTKKDDFISPYIGKYYSDAAEVFTMGLQGIFVPEERFAKSFDKKTWKYDYKTINDDPEFLNFIIGLFVKV

SEQ ID NO: 1451 - DNA, 1266 bp, Streptococcus agalactiae
atgaactatatgggtatgggctatcttcagaggaagttagctctttttaagactggtgtagataaaagatatcgctattatgctatggacgacagagacaacacacgaagtattgtcatgcctgacaatgtgcgtgagatgtacaggtctgtgattgaatggaccgctaaaggagttgatagtctggcagatcgcattatttttagggaattcgctaatgatgattttaatgcttgggaaatttttaaagctaataacccggatatcttttttgatacggctattcaatcggcgctaattgcatcttgttgctttgtgtatattatgccagggaaggaagatagcctgcccaaaatgcaagttattgaagcgagtaaagcaacaggcattcttgacccgactacatttttgctgacagaaggttatgcagtcttagagtcggattcaaatgagaaccctacattagaagcttattttacaggcgaaaaaacctggtactatcccaaagatgagaaaccatatagcattgataactcgacaggacaccctttgcttgtccctgtaattcataggccagatgctgtacgtcccttcggacgtagtcgtataaccaaagctgggatgtatcaccaaaaggccgccaaacgtactttagagcgtgcggaagttactgcagagttttatagtttccctcaaaagtatgttctcggaatggatcctgatgcagaacctatggaaaaatggcgtgctactgtttcgacgttattagagatatcaaaagatgaagatggagacaaaccaacagttgggcaatttacaacagcaagcatggcccctttcatggatcatttaaaaatgtacgcttcattattcgcgggtggctctggacttactcttgatgaccttggtttcccttctgacaatccatcatcagtggaagccattaaagcagcgcatgagaatttaagagcggcaggacgcaaagctcaacgctctttctcttctggttttttaaatgtggcttatattgctgtttgtttgagagatgatttcccttatcttcgtaatcagttcatggatactgaaattaaatgggaacctctttttgaagctgatgcaaatatgctaactttggtcggtgatggtgctattaagcttaatcaagctattcctggtttcatggatgcagacgttattcgggacttaactggtgtaaaaggttctgacaatccaattccaaaagctacggaggtgacaactgatggt

SEQ ID NO: 1452 - protein, 422 aa, Streptococcus agalactiae
MNYMGMGYLQRKLALFKTGVDKRYRYYAMDDRDNTRSIVMPDNVREMYRSVIEWTAKGVDSLADRIIFREFANDDFNAWEIFKANNPDIFFDTAIQSALIASCCFVYIMPGKEDSLPKMQVIEASKATGILDPTTFLLTEGYAVLESDSNENPTLEAYFTGEKTWYYPKDEKPYSIDNSTGHPLLVPVIHRPDAVRPFGRSRITKAGMYHQKAAKRTLERAEVTAEFYSFPQKYVLGMDPDAEPMEKWRATVSTLLEISKDEDGDKPTVGQFTTASMAPFMDHLKMYASLFAGGSGLTLDDLGFPSDNPSSVEAIKAAHENLRAAGRKAQRSFSSGFLNVAYIAVCLRDDFPYLRNQFMDTEIKWEPLFEADANMLTLVGDGAIKLNQAIPGFMDADVIRDLTGVKGSDNPIPKATEVTTDG

SEQ ID NO: 1453 - DNA, 1266 bp, Streptococcus pyogenes
atgaattatatgggtatgggctatcttcgtaggaagttagctctttttaaaactggagttgataaaagatatcgttattatgccatggatgacagagacgacacacgaagtattgtcatgccaaataatgtgcgtgaaatgtacaggtctgtgttagaatggaccgctaaaggggttgatagccttgcggaccgtattattttcagggagtttaccaacgatgattttaatgcttgggaaatttttaaagcgaataaccctgatatcttttttgatacagccatacagtcagcattaattgcatcttgttgctttgtgtacatcatgccaggagcggaagacggcttacctaaaatgcaagttatcgaagctagtaaagcgacggggatacttgacccaactacatttttattaacagagggttatgcaattttagagtctgactcaaacggtaatcctacgttagaggcctatttcacagacaaagacatctggtattatccaaaaaaagggaaaccatataatattaaaaatccaacaggtcaccccttgcttgtacctatcattcacagaccagacgcagttagaccatttggtcgcagtcgcattaccaaggctggaatgtatcatcaaaaggcagcgaagagaacgcttgagagagcagaggttacggctgagttttactcattcccacaaaaatatgttttgggaatggatccagacgctgaaccgatggaaaagtggcgtgctacggtgtcaacgttactcgaaatctcaaaagacgaggatggcgacaagccaacagttgggcaattcacaacagcaagcatggcccctttcatggaacacttgaaaatgtatgcttcgctatttgctggtggttccggtctcactcttgatgaccttggttttccatctgacaacccatcgtctgttgagtcaataaaagcggcacatgagaatttgagagcagcaggacgcaaagctcaacgttctttttcttctggatttctaaatgtggcgtatattgctgtttgtttaagagatgaatttccttatcttcgtaatcaattcatggatacagtaattaaatgggagcctctctttgaagctgatgcaaatatgctaactttagtaggggatggagctatcaaacttaatcaagctatccctggtttcatggatgcagatgttatccgtgatttaacgggagtaaaaggggctgataaacctatacctgctatcacggaggtaacaactgatggt

SEQ ID NO: 1454 - protein, 422 aa, Streptococcus pyogenes
MNYMGMGYLRRKLALFKTGVDKRYRYYAMDDRDDTRSIVMPNNVREMYRSVLEWTAKGVDSLADRIIFREFTNDDFNAWEIFKANNPDIFFDTAIQSALIASCCFVYIMPGAEDGLPKMQVIEASKATGILDPTTFLLTEGYAILESDSNGNPTLEAYFTDKDIWYYPKKGKPYNIKNPTGHPLLVPIIHRPDAVRPFGRSRITKAGMYHQKAAKRTLERAEVTAEFYSFPQKYVLGMDPDAEPMEKWRATVSTLLEISKDEDGDKPTVGQFTTASMAPFMEHLKMYASLFAGGSGLTLDDLGFPSDNPSSVESIKAAHENLRAAGRKAQRSFSSGFLNVAYIAVCLRDEFPYLRNQFMDTVIKWEPLFEADANMLTLVGDGAIKLNQAIPGFMDADVIRDLTGVKGADKPIPAITEVTTDG

SEQ ID NO: 1455 - DNA, 354 bp, Streptococcus agalactiae
ttgaaaaagaaatgtttaatttgtaaaaagactttccaagctaaaaccaacagaagtttatattgttcagaagaatgccgcaaaaagggcattcgtgagaaacaacgcaaattgatgaagcaaaaacgagccgataaaaagaaagagaaaattaaggttctaaatactaacgcagatgtgacagaaaagcctaaaaaaatacgtaatttggtacaacactataaaaaactaaagagggaaattttagacaatgagtctgaatttggttttacaggaatcgcgcttgttgagggtatagatattcacgaagaaaactttgtagatttagttatgcaaaaaataaaggagcaacaa

SEQ ID NO: 1456 - protein, 118 aa, Streptococcus agalactiae
MKKKCLICKKTFQAKTNRSLYCSEECRKKGIREKQRKLMKQKRADKKKEKIKVLNTNADVTEKPKKIRNLVQHYKKLKREILDNESEFGFTGIALVEGIDIHEENFVDLVMQKIKEQQ

SEQ ID NO: 1457 - DNA, 354 bp, Streptococcus pyogenes
ttgaaaaagaaatgcttaatttgcaaaaaaaacttccaagcaaaaaccaatagaactttatattgctctgaagaatgccgtaagaaaggcaatcgtgagaaacaacgtaaattgatgaaacaaaaacgggctgaacagaggaaagaaaaaaagaaagtcctaaatcctaacacagatgtgacagaaaagcctaaaaaaatacgtaatttagcgcagcactataaaaaactaaaaaaggaaattttggcaaatgaatctgaatttggttttactggaataacacttattgaaggaatagatgtacatgaagaaaactttgtagatttagtcatgcaaaaaataaaggagcagaaa

SEQ ID NO: 1458 - protein, 118 aa, Streptococcus pyogenes
LKKKCLICKKNFQAKTNRTLYCSEECRKKGNREKQRKLMKQKRAEQRKEKKKVLNPNTDVTEKPKKIRNLAQHYKKLKKEILANESEFGFTGITLIEGIDVHEENFVDLVMQKIKEQK

SEQ ID NO: 1459 - DNA, 417 bp, Streptococcus agalactiae
gtggttcgaatccactcacacgctttactcagtcatcacattgtggtggctttttattacaattgtaagaggggatgttgcaaactgcgtgcagataaaaaaggtacccaccgggtcgcgttcgaaaaaaataaacgccggctgctaaaaaccgcccacctatgcggtatctgtggccggccagtagataagtcattgaagtatccacatccgctaagtgcagcaattgatcatattgttcctattgcaaaaggtggtcatccgtcatcaatagataacttacagttaacacattggcaatgtaataggcaaaagtctgacaagttatttatcaatcagacagccgtacgggctactgttgtaggaaatagaaacttacctcaaagccgagactggtcgtcctacgcatctaaagaa

SEQ ID NO: 1460 - protein, 139 aa, Streptococcus agalactiae
MVRIHSHALLSHHIVVAFYYNCKRGCCKLRADKKGTHRVAFEKNKRRLLKTAHLCGICGRPVDKSLKYPHPLSAAIDHIVPIAKGGHPSSIDNLQLTHWQCNRQKSDKLFINQTAVRATVVGNRNLPQSRDWSSYASKE

SEQ ID NO: 1461 - DNA, 342 bp, Streptococcus pyogenes
atgtctcagttaagggcagataaaaaaggtacccaccgggtagcatttgacagaaataaaaagaagttactaaaggcagccactgtctgtggtatctgtggcaagccagtggacaagtctcttaagtatccacatccattaagcgcagcaatagatcatatagttcctatcgcaaaaggtggtcatccatcagcgcttgagaacttacagttaactcactggcagtgcaacaggcagaagtctgataagttgtttgctaaccaagcaagcaacgagccaaagacaattggcaacagaaaccttcctcaaagtcgagactggtcatcttttgcatttaaaaag

SEQ ID NO: 1462 - protein, 114 aa, Streptococcus pyogenes
MSQLRADKKGTHRVAFDRNKKKLLKAATVCGICGKPVDKSLKYPHPLSAAIDHIVPIAKGGHPSALENLQLTHWQCNRQKSDKLFANQASNEPKTIGNRNLPQSRDWSSFAFKK

SEQ ID NO: 1463 - DNA, 264 bp, Streptococcus agalactiae
atgaaagaaaaaacaatttttatatcaaaaaaatatgcaaatgactttaacaatgacaaatataatttgtcctctggctattattttagaagtggtgaaaaacatgatattgctattgttaaatatggtgaaaaagattatttaaaaaatactgatttagcatatgttgtatgcgataagatcgttgacgcagactctataagcttcgtttatcatggtgaatatgaaacttggcattttaaactattaaacacagaagcaaat

SEQ ID NO: 1464 - protein, 88 aa, Streptococcus agalactiae
MKEKTIFISKKYANDFNNDKYNLSSGYYFRSGEKHDIAIVKYGEKDYLKNTDLAYVVCDKIVDADSISFVYHGEYETWHFKLLNTEAN

SEQ ID NO: 1465 - DNA, 531 bp, Streptococcus agalactiae
atgaatattgaagaagcgaagaaattgatagacaaacagtctattggtaaaggtggtgtcggcgacattccagtagtgaaaacacatattgtaaaagtattactcgaccagattgaccaacctcaaccagaagtgccacggtttgtggctgattggtacgagaagcataaagatagcttagagtgcgatttatatttatatcacatgtcgatatacgatgaagaagtcgaaaaagatgacttctattactggatgcaaacatcaaaaaatccagtctacacacttattaatatgcaccaattcggctacaccatccaaaaagagaagctgtatacggttgagatacctaatccgaatgaaagacagttaagttttgtgctgatgagacaacttagcggaaatgtaagtatcaaagttatgcatagagataacttagacttactaaagacagataatgatttacaactaacagaatccgaaatccgcaaagatttcgactgggcgtggcagtttagagaagaggtggtggaa

SEQ ID NO: 1466 - protein, 177 aa, Streptococcus agalactiae
MNIEEAKKLIDKQSIGKGGVGDIPVVKTHIVKVLLDQIDQPQPEVPRFVADWYEKHKDSLECDLYLYHMSIYDEEVEKDDFYYWMQTSKNPVYTLINMHQFGYTIQKEKLYTVEIPNPNERQLSFVLMRQLSGNVSIKVMHRDNLDLLKTDNDLQLTESEIRKDFDWAWQFREEVVE

SEQ ID NO: 1467 - DNA, 459 bp, Streptococcus pyogenes
atgaatatagaagaagcgaaagaattagtagataattcaaaattttatggaaagactagcagtgttataaaagccgaggttcgcgacattatagaccagttaaaccaaccaaaaccagaagtaccgcagtgtgtggcggattggatagaagagtgcaaagaagaagatttaactttaaaaggcttgttttctaacagcgatatgcctgcaaaaatttttgattggatttttggtagtgacgaaaattgtaggttaatggctgaagcatggattaacggctacacagtagaaaaagaaaagctctacactgtcgacttaccaaacggtcaacctttagtgcgcggcataaacactttgtattttagtcaaaatctagcaaccgaaaatgtaaaactcaccgaatccgaaatccgcaaagattttgaatgggcgtggcagtttgctgaagaggtgactgaa

SEQ ID NO: 1468 - protein, 153 aa, Streptococcus pyogenes
MNIEEAKELVDNSKFYGKTSSVIKAEVRDIIDQLNQPKPEVPQCVADWIEECKEEDLTLKGLFSNSDMPAKIFDWIFGSDENCRLMAEAWINGYTVEKEKLYTVDLPNGQPLVRGINTLYFSQNLATENVKLTESEIRKDFEWAWQFAEEVTE

SEQ ID NO: 1469 - DNA, 330 bp, Streptococcus agalactiae
ttgtcattaattgatgaagtaaaagaatgcggttcagaatctcacaaaaaatggtttgataggtactttgatggtttaaaaatcgaggagaaacttaaacagtctgcgatgaaaggattctctggttataaaatctctattccaaaaaatgatgaatacttagctagacgacttgatagccaaaaaacaatagatttactaaaataccgacttggtgacggttttgatgtcgaaataaaaaatcttgaatcatcatataaaatctttggtaaaccagttgtactaagtagagatttatttattttttggaggacaggagataagaatgga

SEQ ID NO: 1470 - protein, 110 aa, Streptococcus agalactiae
MSLIDEVKECGSESHKKWFDRYFDGLKIEEKLKQSAMKGFSGYKISIPKNDEYLARRLDSQKTIDLLKYRLGDGFDVEIKNLESSYKIFGKPVVLSRDLFIFWRTGDKNG

SEQ ID NO: 1471 - DNA, 288 bp, Streptococcus agalactiae
gtggatagaggagatgacgaaatgactgaacaacagatgattgattgcttgctttatgagttagcaaaaaaagacaaattgaacattagacgaaacaatatcataacgtttttatcgattgtgctgatggctatatctattttaaacgtcgcactgcaagaccactacaagtcgcaaattacagaattacggacacagttaagcaggacacaaaagcagcttaaacgtgctagtgatgatagagctagacagacaaaacggattgctgagctgactggaaatggggga

SEQ ID NO: 1472 - protein, 96 aa, Streptococcus agalactiae
MDRGDDEMTEQQMIDCLLYELAKKDKLNIRRNNIITFLSIVLMAISILNVALQDHYKSQITELRTQLSRTQKQLKRASDDRARQTKRIAELTGNGG

SEQ ID NO: 1473 - DNA, 267 bp, Streptococcus pyogenes
atgactgaagaacagatgattgattgcttgctttatgagttagtaaaaaaagacaaagcaatcaaaaagaaaagcatcattatcgctgcactaacagttatgctgattgtcgtatcagggctttgcgtatcgcttaaaagctattatgaaccgcaaatatacggactacgtacacagctaagcaggacacaaaagcagcttaaacgtgcgagtgagcaaaatcagagacagacaaagcggattgctgatttaacgaataacggaggg

SEQ ID NO: 1474 - protein, 89 aa, Streptococcus pyogenes
MTEEQMIDCLLYELVKKDKAIKKKSIIIAALTVMLIVVSGLCVSLKSYYEPQIYGLRTQLSRTQKQLKRASEQNQRQTKRIADLTNNGG

SEQ ID NO: 1475 - DNA, 162 bp, Streptococcus agalactiae
atgacaaaagaagaagtaattgcatttctgacagaacagcgtgatttgcggcttgttggatatgagtggggaaaagacaatctgtccgtttttgcgagatggcaattagaacaagcaaatatgtatttagatgtcattgagtggatagaggagatgacgaaa

SEQ ID NO: 1476 - protein, 54 aa, Streptococcus agalactiae
MTKEEVIAFLTEQRDLRLVGYEWGKDNLSVFARWQLEQANMYLDVIEWIEEMTK

SEQ ID NO: 1477 - DNA, 414 bp, Streptococcus agalactiae
atgataccgaattttagagcgtttaataaagagaccaaaaagatgtatggtgttgacggctttgaattaagtgtgcgcaaaatatatagatgcagcttagcagatgatgagtttcgttgtggtcgcttagagacgtttcattttgtcgaggataactttgacgattatatcctcatgcaatcaacaggaatgtttgacaaaaacggtgttgagatttttgatggtgatatagttttaacaacacgtctcatagattacacatataaaaattttaaaggtgtagtaaaaatgttagaaggtcgctggttaattgacacaggtaaagatgcggttggtttgtggactgaagttgatgagaacgaagcaatcggaaacatatatcaaaacagcgaattactagaaagcgtggaagaa

SEQ ID NO: 1478 - protein, 138 aa, Streptococcus agalactiae
MIPNFRAFNKETKKMYGVDGFELSVRKIYRCSLADDEFRCGRLETFHFVEDNFDDYILMQSTGMFDKNGVEIFDGDIVLTTRLIDYTYKNFKGVVKMLEGRWLIDTGKDAVGLWTEVDENEAIGNIYQNSELLESVEE

SEQ ID NO: 1479 - DNA, 243 bp, Streptococcus pyogenes
atgataccaaattttagagggtttaacaaaaaaactaaaaaaatgtatagcattgatggctttaaatcaagtgaacgcaaaatatacagatgcagcttagcagatgatgagtttcgctctggtcgcttagagacattccattttgtagaggataatcttgtggaaaagtgcaacagaccacctgaacgattttatcgacaaaaacaagtacgcaaaagtgacaggcgacttatggcaaggcag

SEQ ID NO: 1480 - protein, 81 aa, Streptococcus pyogenes
MIPNFRGFNKKTKKMYSIDGFKSSERKIYRCSLADDEFRSGRLETFHFVEDNLVEKCNRPPERFYRQKQVRKSDRRLMARQ

SEQ ID NO: 1481 - DNA, 354 bp, Streptococcus agalactiae
ttgaagagattgacagatgaattaataaatcaattttacaaaatttttgacaatgggattgtaaggcaaattaaaaagctagatgtagattgtaaaaaagccgagcaaataagatgtagcgttacaaataacagacgtcgaaaaaccctgccaagaccgtacgttatcgaagcgtttaaagattattttgacgaagatacctatgcacagatgtatatcaaatcatatcgtgagtatcacaacccaaatgaccacgagacggaactttttgtaaaactaaaaagagcgcacaaagatactaagttagagcattacaaggaagttaagcgattgatgtacgcagcaatgaccttt

SEQ ID NO: 1482 - protein, 118 aa, Streptococcus agalactiae
MKRLTDELINQFYKIFDNGIVRQIKKLDVDCKKAEQIRCSVTNNRRRKTLPRPYVIEAFKDYFDEDTYAQMYIKSYREYHNPNDHETELFVKLKRAHKDTKLEHYKEVKRLMYAAMTF

SEQ ID NO: 1483 - DNA, 486 bp, Streptococcus agalactiae
ttgaagaggaatatgacttttaagacagaatttgaaataccaatcgaaccaaaacctcaaactagacctaagttcagcaaatttggtacgtacgaagatccaaagatgaagagatggcgaaaagaggtttctggatggatagaaaaaaattatgatggaccgtttttcgatgattgcataaaggtagaggtaaccttttacatgaaagcccccaaaacgctatcaaaagagcctacacaacgttctaaaggtaaaacaatacaaatatatcagaacttcgtgcgtgagcttatatggcacgctaagaagcctgatattgataatctgattaaagctgtttttgatagtatttccgatgcaggttacgacagaatacagaaatcaggtatcgtttggtcagatgacaatatcgtatgcgatttaagagcaaagaaaaaatacagtcagaatccaagaataaaagtgaggattgaagagattgacaga

SEQ ID NO: 1484 - protein, 162 aa, Streptococcus agalactiae
MKRNMTFKTEFEIPIEPKPQTRPKFSKFGTYEDPKMKRWRKEVSGWIEKNYDGPFFDDCIKVEVTFYMKAPKTLSKEPTQRSKGKTIQIYQNFVRELIWHAKKPDIDNLIKAVFDSISDAGYDRIQKSGIVWSDDNIVCDLRAKKKYSQNPRIKVRIEEIDR

SEQ ID NO: 1485 - DNA, 291 bp, Streptococcus agalactiae
ttgggaaagccgtgtaagggaaaaccttacgcacggtttgacgaggggtttctgaggagatggctcaaatcagcgacctactctacaaaaatgacgaagccgaggaaacaaaggatatatgcaatatatgatgacgacaaatttgtcgacgttggcacaaaagaagagttatcggcacggcttggaattaaaaaagcaacaatagaacagtacatgactaaatcatatcaagcgttagctagctcaaaacgaattgcattgttggtagggattgaagaggaatatgacttt

SEQ ID NO: 1486 - protein, 97 aa, Streptococcus agalactiae
MGKPCKGKPYARFDEGFLRRWLKSATYSTKMTKPRKQRIYAIYDDDKFVDVGTKEELSARLGIKKATIEQYMTKSYQALASSKRIALLVGIEEEYDF

SEQ ID NO: 1487 - DNA, 1317 bp, Streptococcus agalactiae
atgattgctcagaaagctataaacatctttgaaaaggttcaagtatttcaacggaagatatatctatcgaccaaggcagataataagcgaaagtttggtgttttatacgacaaagtatatcgtaaagatatcctgaaagttgcgtggttctatgtaaaaaggaataaaggttcggcaggcattgatgacttcacgattgaagaaattgaagcctacggtgtacagaaatttcttgatgaaatagaagaccagttgagaaacaagaaatatcaacctaaggcagtaaagcgagtttatattccaaaagcgaatggtaaaaagagaccgttgggaattccgacagtccgagatagagttgttcaaacagctgtgaaaatagttatagaaccgatattcgaagcggactttcaagaattttcttatggttttagacctaagcgaagtgctaaccaagctataagagagatatataaatatctcaattatggttgtgagtgggttattgatgccgacttaaaaggttactttgacacgatacctcatgataagttactacttttagttaaggaacgagtaactgataagtctattatcaagttacttagtttatggctagaagcaggtatcatggaagacaatcaagtgagaagtaatattttaggtactccacaaggaggtgtcatatcaccgttgttagcgaatatctacctaaatgctttagacagatattggaagaacaatcggttagaaggaagagggcatgatgcccacttgatacgttatgcggatgactttgttattctatgctcaaataatccgaagaaatattatcagtatgcgaaacagcgtattgataagctaggattaacattgaacgaagaaaagacaagaattgtgcatgcgacagagggatttgattttctaggctatacgcttaggaaatcaaaatctcacaaaagtggtaagtataaaacctactactatccttcaagaaaatctatgaaatcaataaaaggcaaagtaaaagatgttatccaaacaggacaacacctgaaccttcctgatgtcatggaaagattgaatccaatgttgagaggatgggctaattatttcaaagctgggaactctaagcaacacttcaagagtatagataactatgtcatatataatctaacaattatgcttagaaagaagcacaagaagtctggaaagggatggagggaacatccgccgtcatggtactataactactttggactggtttgtttaaggaagttgagtaccaatatcaatgatgatagtcagagatatggtaga

SEQ ID NO: 1488 - protein, 439 aa, Streptococcus agalactiae
MIAQKAINIFEKVQVFQRKIYLSTKADNKRKFGVLYDKVYRKDILKVAWFYVKRNKGSAGIDDFTIEEIEAYGVQKFLDEIEDQLRNKKYQPKAVKRVYIPKANGKKRPLGIPTVRDRVVQTAVKIVIEPIFEADFQEFSYGFRPKRSANQAIREIYKYLNYGCEWVIDADLKGYFDTIPHDKLLLLVKERVTDKSIIKLLSLWLEAGIMEDNQVRSNILGTPQGGVISPLLANIYLNALDRYWKNNRLEGRGHDAHLIRYADDFVILCSNNPKKYYQYAKQRIDKLGLTLNEEKTRIVHATEGFDFLGYTLRKSKSHKSGKYKTYYYPSRKSMKSIKGKVKDVIQTGQHLNLPDVMERLNPMLRGWANYFKAGNSKQHFKSIDNYVIYNLTIMLRKKHKKSGKGWREHPPSWYYNYFGLVCLRKLSTNINDDSQRYGR

SEQ ID NO: 1489 - DNA, 414 bp, Streptococcus agalactiae
atgattaacaacattgtactagtaggtcgcatgaccaaggatgccgaacttcgttatacaccaagtaatcaagcggtagctactttttcacttgcagttaatcgtaattttaaaaatcaatctggcgaacgtgaggctgattttattaactgtgttatttggcgccaacaagctgaaaacttggctaactgggcaaaaaaaggtgctttggttggaattacaggtcgtatccaaacgcgtaattatgaaaaccaacaaggtcaacgtatctatgtaacagaagttgttgcggaaaatttccaattattagaaagtcgcaatagccaacaacagactaatcaaagcggcaatagttctaattcttattttggcaatgccaacaaaatggatatttcagatgatgacttaccattc

SEQ ID NO: 1490 - protein, 138 aa, Streptococcus agalactiae
MINNIVLVGRMTKDAELRYTPSNQAVATFSLAVNRNFKNQSGEREADFINCVIWRQQAENLANWAKKGALVGITGRIQTRNYENQQGQRIYVTEVVAENFQLLESRNSQQQTNQSGNSSNSYFGNANKMDISDDDLPF

SEQ ID NO: 1491 - DNA, 489 bp, Streptococcus pyogenes
atgattaataatgtagtactagttggtcgtatgaccaaggatgcagaacttcgttacacaccaagtcaagtagctgtggctaccttcacacttgctgttaaccgtacctttaaaagccaaaatggtgaacgcgaggcagatttcattaactgtgtgatctggcgtcaaccggctgaaaatttagcgaactgggctaaaaaaggtgctttgatcggagttacgggtcgtattcagacacgtaactacgaaaaccaacaaggacaacgtgtctatgtaacagaagttgttgcagataatttccaaatgttggaaagtcgtgctacacgtgaaggtggctcaactggctcatttaatggtggttttaacaataacacttcatcatcaaacagttactcagcgcctgcacaacaaacgcctaactttggaagagatgatagcccatttgggaactcaaacccgatggatatctcagatgacgatcttccattc

SEQ ID NO: 1492 - protein, 163 aa, Streptococcus pyogenes
MINNVVLVGRMTKDAELRYTPSQVAVATFTLAVNRTFKSQNGEREADFINCVIWRQPAENLANWAKKGALIGVTGRIQTRNYENQQGQRVYVTEVVADNFQMLESRATREGGSTGSFNGGFNNNTSSSNSYSAPAQQTPNFGRDDSPFGNSNPMDISDDDLPF

SEQ ID NO: 1493 - DNA, 144 bp, Streptococcus agalactiae
gtgtttgttgtcgggtcctgcgaaaaagatatcccgttattggcaaaagctgttgtgattgcttctgtaacattttcaagcggcacgtatttgcttttgaaaaatgggttatccttatcttttagtggttgttttacctctagc

SEQ ID NO: 1494 - protein, 48 aa, Streptococcus agalactiae
MFVVGSCEKDIPLLAKAVVIASVTFSSGTYLLLKNGLSLSFSGCFTSS

SEQ ID NO: 1495 - DNA, 672 bp, Streptococcus agalactiae
atgaggaaatcagaaagtataacagaatatgctaaagccttttgtaaagctcagctagaggtaaaacaaccactaaaagataaggataacccatttttcaaaagcaaatacgtgccgcttgaaaatgttacagaagcaatcacaacagcttttgccaataacgggatatctttttcgcaggacccgacaacaaacacagaaaacggttatatcgatgttgcaacgcttgtcatgcacacgagcggcgaatgggttgagtacgggcctttaagtgttaaacctacaaaaaatgatgtacaaggcgctggttcggctatcacttacgcaaaacgctatgcactatcggcaatttttgggataacaagcgatcaagatgatgacggcaacgaagatagtaaaccaaacaattccaggcaatcgccaaaagctacaactaaaaaaacacaaaagacaggatatcaaacaccaaaaatcagcaatatccaaatcgagacttacaagtctgatttaaatgatattgcgaaagccacaaaccaaaacgttgaagagttaacaaaatggctaaccgatactttaaaagtgggggaactagaaaatttgcatacggaacacattgtttcagcagacgaattaatcaataaactcaaaaagaaagcaggactaaaaaatgat

SEQ ID NO: 1496 - protein, 224 aa, Streptococcus agalactiae
MRKSESITEYAKAFCKAQLEVKQPLKDKDNPFFKSKYVPLENVTEAITTAFANNGISFSQDPTTNTENGYIDVATLVMHTSGEWVEYGPLSVKPTKNDVQGAGSAITYAKRYALSAIFGITSDQDDDGNEDSKPNNSRQSPKATTKKTQKTGYQTPKISNIQIETYKSDLNDIAKATNQNVEELTKWLTDTLKVGELENLHTEHIVSADELINKLKKKAGLKND

SEQ ID NO: 1497 - DNA, 480 bp, Streptococcus agalactiae
atggcttatttatacgaattagaaggtatttacgcacaattacagtcaatggatttagacgaagaaacattccaagatacacttgacagcattgattttcagtcagacttagaaaataacattgagtattttgtcaaaatgttaaaaaatgtgcaggctgatgctgaaaagtataaagccgaaaaagaagctttttataaaaagcaaaaacaagcggaagccaaagcggaaaaatacaaagagacgatcaggcttgcaatggaattgagtcaaaagaaaaaagttgacgctggaatgtttaaggtgtctttgcgaagaagtaaaaaagttgagattttggacgaaacaaaaattcctcttgattacatgcaagaaaaaattgaatacaaaccaatgaaagctgaaatctcaaaagctttgaaatctggaattgatatatctggagttgaactaatcgaaacagaaagtttgcaggtaaag

SEQ ID NO: 1498 - protein, 160 aa, Streptococcus agalactiae
MAYLYELEGIYAQLQSMDLDEETFQDTLDSIDFQSDLENNIEYFVKMLKNVQADAEKYKAEKEAFYKKQKQAEAKAEKYKETIRLAMELSQKKKVDAGMFKVSLRRSKKVEILDETKIPLDYMQEKIEYKPMKAEISKALKSGIDISGVELIETESLQVK

SEQ ID NO: 1499 - DNA, 159 bp, Streptococcus agalactiae
gtgaacgaagaaatatatgagtctagtcgttactggcaaagtagatacagcgacttgatgtctgattatcttaaagaagctgaagaaaatatagagttaaagaaacagttgaagagattaaaagccgaaaattggcagctgaaacacagaaagaggaaa

SEQ ID NO: 1500 - protein, 53 aa, Streptococcus agalactiae
MNEEIYESSRYWQSRYSDLMSDYLKEAEENIELKKQLKRLKAENWQLKHRKRK

SEQ ID NO: 1501 - DNA, 273 bp, Streptococcus agalactiae
atgcgatttaggaagggatatatggttgaaatcagaattaacggtgagtcaatcacatttgatagcaattttagggatgcgcttatatttacggtagatcacctaaaaaattatgacgatccttctttgaggcagacttacaacgagtttaaagattatacagacgaggacttgatgggatatatcagcacagaatttgatgtagacccggaaatgtttgttgatactaattcagacagcagatggaaaattaaacaacgaattttagaggac

SEQ ID NO: 1502 - protein, 91 aa, Streptococcus agalactiae
MRFRKGYMVEIRINGESITFDSNFRDALIFTVDHLKNYDDPSLRQTYNEFKDYTDEDLMGYISTEFDVDPEMFVDTNSDSRWKIKQRILED

SEQ ID NO: 1503 - DNA, 138 bp, Streptococcus agalactiae
atgacaaaacaacatagagaaacgcttatctggtaccgagcaagtcatcaagagcgtgagaagctgcttgattttgggctagttgataaatcacagtacgtgacactattgcggcaattgcgcaagaaatatgcgatt

SEQ ID NO: 1504 - protein, 46 aa, Streptococcus agalactiae
MTKQHRETLIWYRASHQEREKLLDFGLVDKSQYVTLLRQLRKKYAI

SEQ ID NO: 1505 - DNA, 138 bp, Streptococcus pyogenes
atgacaaaacaacatagagaaacacttatctggtaccgagcaagtcatcaagagcgtgagagattgcttgattttggactagttgataaagcacggtacgtgacactattgcggcaattgcgtaagaaatatgcgatt

SEQ ID NO: 1506 - protein, 46 aa, Streptococcus pyogenes
MTKQHRETLIWYRASHQERERLLDFGLVDKARYVTLLRQLRKKYAI

SEQ ID NO: 1507 - DNA, 231 bp, Streptococcus agalactiae
atggatcaggagatttttaatttttttaacaaacaaatcaaaaaagattttggtaaaacggcgagtaaagagacttttgctaagtttgctagttactgcgccgaaggaatcgaaaaaaatggagttaagccaatttttaattggataaacctatacgcttttggaaccggtatgacaacagcagaagcagaccgattaagaatagagcgatataaacaggagaatacgtta

SEQ ID NO: 1508 - protein, 77 aa, Streptococcus agalactiae
MDQEIFNFFNKQIKKDFGKTASKETFAKFASYCAEGIEKNGVKPIFNWINLYAFGTGMTTAEADRLRIERYKQENTL

SEQ ID NO: 1509 - DNA, 231 bp, Streptococcus pyogenes
atggatcaggagatttttaatttttttaacaaacaaatcaaaaaagattttggtaaaacggcgagtaaagagacttttgctaagtttgctagttactgcgccgaaggaatcgaaaaaaatggagttaagccaatttttaattggataaacctatacgcttttggaactggtatgacaacagcagaagcagaccggttgagaatagagcgatataaacaggagaatgcgtta

SEQ ID NO: 1510 - protein, 77 aa, Streptococcus pyogenes
MDQEIFNFFNKQIKKDFGKTASKETFAKFASYCAEGIEKNGVKPIFNWINLYAFGTGMTTAEADRLRIERYKQENAL

SEQ ID NO: 1511 - DNA, 858 bp, Streptococcus agalactiae
atggcagataacaaaaagtattactatctaaaattaaaagaaaatttttttgaaagtgatgaagcaatcattttagaaagtatgcctgacggctatatctatagcaatattttgctcaagctatacctaagaagtttaaaaaatgacggtttattaatgtttaacaaccttatcccttacaacgcacaaatgcttgcaacgattacaagacatcaggttggcactgtcgaaaaggctattcaaatttttagagacctacaactaattgaaattcttgataatggtgctatatatatgacaaatattcaaaattttgtcggaaaatcaagcactgaggctgacaggatacgaaaactaagagcaaaaaataacagtggtgtacaaatgttgtacaaatgtacaccagagatagagatagagaaagataaaaagatagatataaatatagataaagagttagaactagaacaagataaagaagataggtttgttgatgttgttgaagcaaatcttggtagaggtcttgtaaagtttgagttcgacatgattaatgactatctcattggacaaaatgtctcaaaggatttgtttttggaagctgttaaagtagcagttgctaataatgtccgcaaatttaattacatcgctcgcattttggataattggattaatgatgggataaagactcctgaacaagcatatcaggctcaaagagactttaaagctaaaaaagctaacaaaacaatgcaatcacaatccaacgttcctagctggtctaatccagactacaaaggaccagatttaaaagaatttgcactaggaagcatagacgatatagaagatggatcaggagatttt

SEQ ID NO: 1512 - protein, 286 aa, Streptococcus agalactiae
MADNKKYYYLKLKENFFESDEAIILESMPDGYIYSNILLKLYLRSLKNDGLLMFNNLIPYNAQMLATITRHQVGTVEKAIQIFRDLQLIEILDNGAIYMTNIQNFVGKSSTEADRIRKLRAKNNSGVQMLYKCTPEIEIEKDKKIDINIDKELELEQDKEDRFVDVVEANLGRGLVKFEFDMINDYLIGQNVSKDLFLEAVKVAVANNVRKFNYIARILDNWINDGIKTPEQAYQAQRDFKAKKANKTMQSQSNVPSWSNPDYKGPDLKEFALGSIDDIEDGSGDF

SEQ ID NO: 1513 - DNA, 384 bp, Streptococcus pyogenes
atggacgaaaaaaagctttttgaaaatttccaattaacttttggacggatgatatcgccatttgaaatcgaagatattcaaaagtggattcacgaagataacatgccaattgaagttgtcaaccttgccttaagagaagcggtagaaaacaacaaaatcagttggaagtatatcaataaaatcttagttgattggtataaatctggagatacgacagtagaaaaggtcagagacaggttgcaacggtttgacgatagtaaaaaacaacgaagtgtaactacctcaaacgtcccaagctggtcgaatccagactacaaagaaccagatttagaagaatttgctctaggaagcatggacggtatagaagatggatcaggagatttt

SEQ ID NO: 1514 - protein, 128 aa, Streptococcus pyogenes
MDEKKLFENFQLTFGRMISPFEIEDIQKWIHEDNMPIEVVNLALREAVENNKISWKYINKILVDWYKSGDTTVEKVRDRLQRFDDSKKQRSVTTSNVPSWSNPDYKEPDLEEFALGSMDGIEDGSGDF

SEQ ID NO: 1515 - DNA, 246 bp, Streptococcus agalactiae
gtggatcgagaaaaggagtatgatatggaaaatccaatgacaggagtagcaatactagcatttatcgctttacttgcatatctcggcaatcgtaatagcaatcaaaagacaattactaagactgttgagacggtgttagataactaccaagttgtgcgaaaggttgagagaccaaaacgcacggattttatagagttacctaccccaggatcatgcgggaaagtttggggcaaggatagacctttt

SEQ ID NO: 1516 - protein, 82 aa, Streptococcus agalactiae
MDREKEYDMENPMTGVAILAFIALLAYLGNRNSNQKTITKTVETVLDNYQVVRKVERPKRTDFIELPTPGSCGKVWGKDRPF

SEQ ID NO: 1517 - DNA, 126 bp, Streptococcus agalactiae
ttgacaaggttggcggtcgttcaacaaaagttaaaaaatttgaagaatggagaaaattacaaaatgaaaaaattatttaactttattttcgcaaaacaaaaaagaagaaagaccaaaatggacaat

SEQ ID NO: 1518 - protein, 42 aa, Streptococcus agalactiae
MTRLAVVQQKLKNLKNGENYKMKKLFNFIFAKQKRRKTKMDN

SEQ ID NO: 1519 - DNA, 228 bp, Streptococcus agalactiae
atgctagcaaaacttaaaagcggtatcgaagtaccttacgaagagctttggcttaatgataacgacttatccgaatttattggaaagtcatttgaccaaacgcagcgattactaagaaagatgtacaaagacagaaattatcgcaaatacattgacaaggttggcggtcgttcaacaaaagttaaaaaatttgaagaatggagaaaattacaaaatgaaaaaattatt

SEQ ID NO: 1520 - protein, 76 aa, Streptococcus agalactiae
MLAKLKSGIEVPYEELWLNDNDLSEFIGKSFDQTQRLLRKMYKDRNYRKYIDKVGGRSTKVKKFEEWRKLQNEKII

SEQ ID NO: 1521 - DNA, 801 bp, Streptococcus agalactiae
atgatagacaaaatatttgttaataaaactaacaaaccgctagaaaggaactatatgaatcaactaataaacatcaccctaaacgaaaatcaagaaccagttgtcagtggtagagatttacacaatgtacttaatataaaaactcaatatactaaatggcttgaaaggatgtcggaatatggttttgaagaaaacgttgactatatagctattagtcaaaaaagactaacagctcaaggtaaccgtacagaatatatagaccacgttctcaagctagacatggcaaaagagattgctatgttacagcgaaacgagaaatcaaaacaggtacgcaaatacttcatccaggttgaaaaagacttcaatagtcctgagaaaatcatggcgagagccttgctcatggcagataagaaaatcactaacttaacgatggaaaataatcaattgcagttagatttaaaagaagctcaaaagcaagcgcgttatcttgatctaatcattgagagcaagggagctttgcgagtaacacagattgctgctgattatggtatgtctgtcaataaattcaataaaacactattagaatttggtgtgcagcacaaagtgaatggacaatggattctctataaacgacatatgggcaaaggttacacagacagtcacacatttgactatcaagacaaaaacggccatacaagagccaatgtgacgacgacgtggacacaaaaggggcgtctattcctgtacgagttgttgaaagacaacaatattttgccactaattgaacaggaagacattgta

SEQ ID NO: 1522 - protein, 267 aa, Streptococcus agalactiae
MIDKIFVNKTNKPLERNYMNQLINITLNENQEPVVSGRDLHNVLNIKTQYTKWLERMSEYGFEENVDYIAISQKRLTAQGNRTEYIDHVLKLDMAKEIAMLQRNEKSKQVRKYFIQVEKDFNSPEKIMARALLMADKKITNLTMENNQLQLDLKEAQKQARYLDLIIESKGALRVTQIAADYGMSVNKFNKTLLEFGVQHKVNGQWILYKRHMGKGYTDSHTFDYQDKNGHTRANVTTTWTQKGRLFLYELLKDNNILPLIEQEDIV

SEQ ID NO: 1523 - DNA, 726 bp, Streptococcus pyogenes
atgaatcaactaattaacgtaacactaaacgaaaatcaagaaccagttgtcagtggtcgtgatttgcacaaagtacttgaaattaaaacacaatatacaaaatggcttgagcgaatgagcgaatatggtttcgttgaaaacgaagacttcatggctattagtcaaaaaagactaacagctcagggcaatcaaacagaatatacagaccacgttctaaaactagacatggcaaaagaaatagctatgcttcaacgcaatgaaaaatctaaagaagtccgtaaatacttcatccaggttgaaaaagatttcaacagtcctgagaaaatcatggcaagggcgttgctgatggcggacaagaaagtgcataaattagaggctcagattgaggcagaccgtccaaaggtgctatttgctgatgccgtaagtgctagccatacctctatattggtcggagaacttgcaaagttactcaagcagaatggggtaaatattggagcgactcgtctcttcacttggcttcgtaaacacggctatcttatcaagcgtaatggccgagattggaatatgcctactcagaaaagcgtagagcttggacttataagggtcaaggaaactagcatcacccattctgatggccatattacagtaagcaagacacctctggtaaccggaaaaggtcagcaatactttatcaacaaatttcttaatcaggaatatctaccagtt

SEQ ID NO: 1524 - protein, 242 aa, Streptococcus pyogenes
MNQLINVTLNENQEPVVSGRDLHKVLEIKTQYTKWLERMSEYGFVENEDFMAISQKRLTAQGNQTEYTDHVLKLDMAKEIAMLQRNEKSKEVRKYFIQVEKDFNSPEKIMARALLMADKKVHKLEAQIEADRPKVLFADAVSASHTSILVGELAKLLKQNGVNIGATRLFTWLRKHGYLIKRNGRDWNMPTQKSVELGLIRVKETSITHSDGHITVSKTPLVTGKGQQYFINKFLNQEYLPV

SEQ ID NO: 1525 - DNA, 189 bp, Streptococcus agalactiae
atgcaacaatttaatctaaaacaactacgagagaaaaaaggatttactcaaaatgaattagctgataaagctaacgttagtcgttcgctcgtggttggtttagaaacaggttcatattcagagacatctacagcatctctgaagaaattggcgaaagctttggacgtaaagattaaggatttatttttt

SEQ ID NO: 1526 - protein, 63 aa, Streptococcus agalactiae
MQQFNLKQLREKKGFTQNELADKANVSRSLVVGLETGSYSETSTASLKKLAKALDVKIKDLFF

SEQ ID NO: 1527 - DNA, 204 bp, Streptococcus pyogenes
atgaagaacctcaaattaaaagcagcgcgtgcaggcaaagatttgtctcaacaagctctagcagatttggtaggcgtctccagacaaaccattgcggctgttgaaaaaggtgattacaacccaacgattaatctttgcattgccatttgtcgagtgcttgataagactttagatgaccttttttgggaagctgatgattctcgt

SEQ ID NO: 1528 - protein, 68 aa, Streptococcus pyogenes
MKNLKLKAARAGKDLSQQALADLVGVSRQTIAAVEKGDYNPTINLCIAICRVLDKTLDDLFWEADDSR

SEQ ID NO: 1529 - DNA, 804 bp, Streptococcus agalactiae
atgattgaaagtcttgatataaagacgattttgcttggttctgctactctcttaggaactactgccataaagaaagctgaaaatcctgcaagagctattgatgatttaatgacattaattggttttgaaaaattacatgaaatagctgaaaatcgaagaaataagtacattactaacagaaacgattttattcaaaaattagctaaagaaatacaagatgttgttagtaaaaatattgaaaatctacaagaacctagtctttcgatagctggaccggctttagaagcatctaaattttatttagaagaagaagaacttagaaatttatttacaaaattgattgcttcatctatggataaatcaaaaaatgaattcaaccatccatcttttattgagataataaaacagtttgataaaattgatgcacaaaatttcaaaattatctcagatttatactttaaaaaaggtttcgttgcaactggtacctactatacgacaataattggtcaagataagccgttagagcatattgctagtcatgtattcgtagataatttagaacaaaatgatatagctattcaaagttcatcattaactaatttagaaagactaggactaattcaaattaattacaaagcacacgtagatgagaaagaatattacaacattcttaataatagctttataactaaaaagaacagtgaattaaaagaacaaaacaaaagagtactaacaaatctaggaatgataactcttactttatttggtgttagattttcaaaaacttgtttacctgacgtttcg

SEQ ID NO: 1530 - protein, 268 aa, Streptococcus agalactiae
MIESLDIKTILLGSATLLGTTAIKKAENPARAIDDLMTLIGFEKLHEIAENRRNKYITNRNDFIQKLAKEIQDVVSKNIENLQEPSLSIAGPALEASKFYLEEEELRNLFTKLIASSMDKSKNEFNHPSFIEIIKQFDKIDAQNFKIISDLYFKKGFVATGTYYTTIIGQDKPLEHIASHVFVDNLEQNDIAIQSSSLTNLERLGLIQINYKAHVDEKEYYNILNNSFITKKNSELKEQNKRVLTNLGMITLTLFGVRFSKTCLPDVS

SEQ ID NO: 1531 - DNA, 837 bp, Streptococcus pyogenes
atgattgattttagtaatatcgaaacatattggccaatgacttctagtgcttttggtttgtttattacccaaggtggtctgaaacctatctttacatcgctaaaccacatgtggtattcaaaatatggatacctaactgagcgaaaagcaaaattaaaagagattgaaaatgaatacatctatgagattgaaaaaagaaaattagaaaatcaagaaaaattcaaaaatgagattgattgcgaattttctaaaataccgcaaactagtttaaaagaacccgttgagtatatcttatatcctgcgataaatgagtcagagcaatatttaagtaacgaaacacttagaaatatgttcgctagaacgatagcttcaacatttaatcaggacaaagaaaaggatcttcactcagcttttgttcaaatcatcaaacaaatgacaccacttgatgcacaaaatctattattgataaatcaagagggaaataatctcattgcaaatctacaaataggagtacactacagtaaagaaaacctttcaggaaccgttaacaaggcaaataatatatacttatcaaagttagattactcaccagatattattgcttcttctattgataatttaaccagattagggctaatcaaagttgattatcttcattatccattggattcaaattatgaatcaattaaacaaacaacaatttacaaatctcttgaaagtgaaattaacactcttaatttattcaaaacatcaaacacaaaatatgatattaagattgaaaaaggaaaggtctccttaacagatttcggaaaaaaatttatttcagtttgtctagaa

SEQ ID NO: 1532 - protein, 279 aa, Streptococcus pyogenes
MIDFSNIETYWPMTSSAFGLFITQGGLKPIFTSLNHMWYSKYGYLTERKAKLKEIENEYIYEIEKRKLENQEKFKNEIDCEFSKIPQTSLKEPVEYILYPAINESEQYLSNETLRNMFARTIASTFNQDKEKDLHSAFVQIIKQMTPLDAQNLLLINQEGNNLIANLQIGVHYSKENLSGTVNKANNIYLSKLDYSPDIIASSIDNLTRLGLIKVDYLHYPLDSNYESIKQTTIYKSLESEINTLNLFKTSNTKYDIKIEKGKVSLTDFGKKFISVCLE

SEQ ID NO: 1533 - DNA, 186 bp, Streptococcus agalactiae
atggagtttatttatttactaattataccatcaatagtttcatttgttgtatctatcttttggtcaaaactagtcttcaaaaaagtagtagaaattatgacaaaaatggatgttgatcaacaagagctgaatgaaacaatgagagctcaaattttagaagaaatcaaaacattacgaaacgtcagg

SEQ ID NO: 1534 - protein, 62 aa, Streptococcus agalactiae
MEFIYLLIIPSIVSFVVSIFWSKLVFKKVVEIMTKMDVDQQELNETMRAQILEEIKTLRNVR

SEQ ID NO: 1535 - DNA, 156 bp, Streptococcus agalactiae
atgaattggaaaaaactaatgctaggcgatttagaacacacgtttactagtcgtgatggcaaggaaaaaacaagcgttgaatttgaaggcggcgtattgccagcactgttagtgctaggtggtatcacttggctgatcgcttggcttattacaaaa

SEQ ID NO: 1536 - protein, 52 aa, Streptococcus agalactiae
MNWKKLMLGDLEHTFTSRDGKEKTSVEFEGGVLPALLVLGGITWLIAWLITK

SEQ ID NO: 1537 - DNA, 156 bp, Streptococcus pyogenes
atgaattggaaaaaactaatgtttggcgatttagaacacacgtttactaatcatgatggcaaagaaaaaacaagcatcgaatttgaaggtggagttttaccagctctgttagtgttgggcggtattgcttggatgatcgcttggtttattacaaaa

SEQ ID NO: 1538 - protein, 52 aa, Streptococcus pyogenes
MNWKKLMFGDLEHTFTNHDGKEKTSIEFEGGVLPALLVLGGIAWMIAWFITK

SEQ ID NO: 1539 - DNA, 222 bp, Streptococcus agalactiae
atggctaaaaatcaacatgtcgtacctaaccctaatggcggttgggatataaaaggtgcaggcaacagtcgtgcgaccaaacacacaacaacccaagccgaagctgtcgaaatcgctactggtatcgctaaaaacaatagcagtgaagttattatccatggcaaaaatggacgaattcgcgaacgtaacagctatggtaacgatccattcccacctaaaggt

SEQ ID NO: 1540 - protein, 74 aa, Streptococcus agalactiae
MAKNQHVVPNPNGGWDIKGAGNSRATKHTTTQAEAVEIATGIAKNNSSEVIIHGKNGRIRERNSYGNDPFPPKG

SEQ ID NO: 1541 - DNA, 141 bp, Streptococcus agalactiae
gtggaagaatctatattgaactctaagcgctacacaaaacttgtcgtagagacagaagatggcaaaaaaatagcagaagttactttgacggaagcaacccctgctgatggatacgtgattaggttaacccctaattatgac

SEQ ID NO: 1542 - protein, 47 aa, Streptococcus agalactiae
MEESILNSKRYTKLVVETEDGKKIAEVTLTEATPADGYVIRLTPNYD

SEQ ID NO: 1543 - DNA, 888 bp, Streptococcus agalactiae
ttgtcaagtatgttggacaaaaaacttgaaaaaaatttttttgtactgtataatatgtttaaaatgttagacattatattaaaggaattcgatatgcatctaggaaaatatataaaaaagtatcgagataccaataatctgagcatggctgaattcgctaaagaatcaggcatcagcaaagcttacgtttctattcttgaaaaaaacagagatcctcgtaacggaaaagaaatcatcccatctattccgattataaagaaagtttctgacacaattggcatctcttttgatgatttattaaattcgctagacgaaaatcagatagtcgcgttaaatgaaacgaaaactgaaaaaaatctaacttcctctaccctacaaaaaatcacttctacttcttctcaattagaacaacctagacaagaaaaagtccttagcttcgctaacgaacaattagaagaacaaaataaagttgtttctatgttcgatagaaaagttgaggagacagaaaattatatcactgactacgttgaggggttagttgctgctggtctgggggcataccaagaagacaatttacatatggaagttaaactacgggctgatgatgtccccgataagtatgatactattgcgaaagtagctggtaattcaatggaaccacttattcaagataacgatttactgttcgtcaaggtatctagtcaagtcgatatgaatgatatagggatattccaagtcaatggaaaaaactttgtaaaaaaactcaaacgtgattatgacggcgcttggtacttgcaaagtttaaataaaagctatgaggaaatctatctttcagagaacgacaacatccgcacgataggagaagtcgtagatatttacagggagaat

SEQ ID NO: 1544 - protein, 296 aa, Streptococcus agalactiae
MSSMLDKKLEKNFFVLYNMFKMLDIILKEFDMHLGKYIKKYRDTNNLSMAEFAKESGISKAYVSILEKNRDPRNGKEIIPSIPIIKKVSDTIGISFDDLLNSLDENQIVALNETKTEKNLTSSTLQKITSTSSQLEQPRQEKVLSFANEQLEEQNKVVSMFDRKVEETENYITDYVEGLVAAGLGAYQEDNLHMEVKLRADDVPDKYDTIAKVAGNSMEPLIQDNDLLFVKVSSQVDMNDIGIFQVNGKNFVKKLKRDYDGAWYLQSLNKSYEEIYLSENDNIRTIGEVVDIYREN

SEQ ID NO: 1545 - DNA, 813 bp, Streptococcus pyogenes
ttgatttataatcatggttttgatataatttacttatcaaaattaaaaaggaggtatcctatggagcaattaggggaccgaataagaaagttgagagaagggcgcaacatgactcagactgaactttcagaaatattgggcatgaaaacctatactactgtttcaaagtgggagaagaatgaaaattttccaaaaggtaaagacctaaaaaaactagcagagattttcaacgttacctctgactatcttttaggactcacagatagtaaacttgggaaaatcacaatacagaacgaacaacctgaaatcgtttctatatacaaccaactagaacaacctagacaagaaaaagtcctcaacttcgctaacgaacaattagaagaacaaaataaaaccgtttctatattcgataaaaaatctgaggagacagaagattatatcactgactacgttgagggattggttgccgctggtcttggggcataccaagaagacaatttacacatgaaagttaaactacgttctgatgatgtccccgatgagtatgatactattgcaaaagtagctggcgattcaatggaaccacttattcaagacaacgatttgctattcatcaaggtatctagccaagtcgatatgaatgatatagggatattccaagtcaatggtaaaaactttgtaaaaaaactcaagcgtgattatgatggcgcttggtacttgcaaagtttaaataaaagctatgaggaaatctatctatcaaaggatgacgacatccgcacaatcggtgaagttgtggatatttatagggaatat

SEQ ID NO: 1546 - protein, 271 aa, Streptococcus pyogenes
LIYNHGFDIIYLSKLKRRYPMEQLGDRIRKLREGRNMTQTELSEILGMKTYTTVSKWEKNENFPKGKDLKKLAEIFNVTSDYLLGLTDSKLGKITIQNEQPEIVSIYNQLEQPRQEKVLNFANEQLEEQNKTVSIFDKKSEETEDYITDYVEGLVAAGLGAYQEDNLHMKVKLRSDDVPDEYDTIAKVAGDSMEPLIQDNDLLFIKVSSQVDMNDIGIFQVNGKNFVKKLKRDYDGAWYLQSLNKSYEEIYLSKDDDIRTIGEVVDIYREY

SEQ ID NO: 1547 - DNA, 555 bp, Streptococcus agalactiae
atgctggaaaaagttgaacgcttaatctcggaaattaatagaatacaccttgtttattcgcaagattattttgaaactgggaaagttgaaaagattaatctaaaacataccttttcaaaagtacctgttcaagcgattttagattaccgcttgaatttacacgaatctatcaatgattacttgatgaaagctgatgttaaggatattccttatgtctatcgcgtaaaaacatcggaaagtatcttagacaaaattgaacgtttttccaaaagacaagatggttatcctgtgaattctattctcaatgacatttttggcgctcgtatcattttatcttctgaggatatttcacaagtgatggaacaacttgatgaatggaaagataagtttgacttaaaaaactggtatttacgagataaagataattacacaggaatacacgtttatttcaagaataagagcaatcactactatccttgggagttgcaaatttgggatgagaaagatgttgatcagaacattgaaagccataaattatttaaacgtcattttgta

SEQ ID NO: 1548 - protein, 185 aa, Streptococcus agalactiae
MLEKVERLISEINRIHLVYSQDYFETGKVEKINLKHTFSKVPVQAILDYRLNLHESINDYLMKADVKDIPYVYRVKTSESILDKIERFSKRQDGYPVNSILNDIFGARIILSSEDISQVMEQLDEWKDKFDLKNWYLRDKDNYTGIHVYFKNKSNHYYPWELQIWDEKDVDQNIESHKLFKRHFV

SEQ ID NO: 1549 - DNA, 213 bp, Streptococcus agalactiae
ttgaaaatttatggagattatcacacgcacttatttagacactcgcatatatcatttttagcagaaaaagggataccgctaaatgcgataatggatagagttggtcacagcgatccaaaaacaacattatctatttacagtcacacaactgtaaatatgaaagaaattataaataaacaaactgccccttttgtgccccttttaaaatcggaa

SEQ ID NO: 1550 - protein, 71 aa, Streptococcus agalactiae
MKIYGDYHTHLFRHSHISFLAEKGIPLNAIMDRVGHSDPKTTLSIYSHTTVNMKEIINKQTAPFVPLLKSE

SEQ ID NO: 1551 - DNA, 282 bp, Streptococcus pyogenes
ttgaaaatttacggagattatcacacgcacttatttagacactcgcatatatcatttttagcagaaaaagggataccgctaaatgcgataatggatagagttggtcacagcgatccaaaaacaacattatctatttacagtcacacaactgtaaacatgaaagaaattataaataaacaaactgacccttttaaaaccggaataaaacaaaaagcctttgatgtaaaggctttttcagtgacaataatgacccctgccggaatcgaaccagcaactactcct

SEQ ID NO: 1552 - protein, 94 aa, Streptococcus pyogenes
LKIYGDYHTHLFRHSHISFLAEKGIPLNAIMDRVGHSDPKTTLSIYSHTTVNMKEIINKQTDPFKTGIKQKAFDVKAFSVTIMTPAGIEPATTP

SEQ ID NO: 1553 - DNA, 417 bp, Streptococcus agalactiae
gtgatggacgcacaaaaaacggctaatccgctgagacaagtacttaagattagtaagagaaggagaataaaaatgaatccattaattcaaagtttgacagaaggtcaacttcgttctgatatccctgagttccgtgctggtgatactgtacgtgttcacgctaaagttgtcgaaggtactcgcgaacgtattcagatctttgaaggtgttgttatctcacgtaaaggtcaaggaatctcagaaatgtacacagtacgtaaaatttctggtggtatcggtgtagagcgtacattcccaattcacactcctcgtgttgataaaatcgaagttgttcgttatggtaaagtacgtcgtgctaaactttactacttacgcgcattgcaaggtaaagctgcacgtattaaagaaatccgtcgt

SEQ ID NO: 1554 - protein, 139 aa, Streptococcus agalactiae
MMDAQKTANPLRQVLKISKRRRIKMNPLIQSLTEGQLRSDIPEFRAGDTVRVHAKVVEGTRERIQIFEGVVISRKGQGISEMYTVRKISGGIGVERTFPIHTPRVDKIEVVRYGKVRRAKLYYLRALQGKAARIKEIRR

SEQ ID NO: 1555 - DNA, 345 bp, Streptococcus pyogenes
atgaatccattaatccaaagtttgacagaaggtcaacttcgctctgatatccctaacttccgtcctggtgacactgttcgcgttcacgcaaaagttgtcgaaggaactcgcgaacgtatccagatctttgaaggtgttgttatttcacgtaaaggtcaagggatctcagaaatgtacactgttcgtaaaatctcaggtggtatcggggtagagcgtacattcccaatccacacaccacgtgttgacaaaatcgaagttatccgccacggtaaagtccgtcgtgcgaaactttactacttgcgtgcattacaaggtaaagcagctcgtatcaaagaaattcgtcgt

SEQ ID NO: 1556 - protein, 115 aa, Streptococcus pyogenes
MNPLIQSLTEGQLRSDIPNFRPGDTVRVHAKVVEGTRERIQIFEGVVISRKGQGISEMYTVRKISGGIGVERTFPIHTPRVDKIEVIRHGKVRRAKLYYLRALQGKAARIKEIRR

SEQ ID NO: 1557 - DNA, 387 bp, Streptococcus agalactiae
atgaaggctcargcgattgtcacaagccaagggagaattgtttctttggatattgcagtgaactattgccacgatatgaagttgttcaaaatgagtcgcagaaacatcggacaagctgctaaaatcttggcagacagtggttatcaagggatcatgaagatgtattcacaagcgcaaactccgaggaaatcaagcaaacttaagccactaactcttgaagataaaacctataaccatacgctatccaaagagagaatcaaggttgagaatatttttgccaaagtaaaaacgtttaaaatattttcaacaacctatcgaaatcgacgcaaacggtttggattacgaatgaatttgattgctggaatgatcaaccgtgaactaggattt

SEQ ID NO: 1558 - protein, 129 aa, Streptococcus agalactiae; identical to SEQ ID NO: 690

SEQ ID NO: 1559 - DNA, 453 bp, Streptococcus agalactiae
ttgctaaacccatataaacggattttcacacttggattgttagctacttttttattgtttatcttccattttggacgatattcaggactgggaacaaatctaattgaggctagcttcactaataagaacctttatgattatgattggttgttaaaattgtgtttgacagttattactttggctgcaggttatcagggaggagaagtaactcccttatttgcaatcggagcaagtttaggagtgattattgcgcccattttaggtttgccagttattttagttgctgctttaggctatactagcgtttttgggagtgcaacgaatactctgttaggtcctatcttaataggaggcgaagtctttggctttgccaacactccttattttgttattgtatgtcttgttgcttactccatatcacatgctcatacgatttatggtgctcaatctaga

SEQ ID NO: 1560 - protein, 151 aa, Streptococcus agalactiae
MLNPYKRIFTLGLLATFLLFIFHFGRYSGLGTNLIEASFTNKNLYDYDWLLKLCLTVITLAAGYQGGEVTPLFAIGASLGVIIAPILGLPVILVAALGYTSVFGSATNTLLGPILIGGEVFGFANTPYFVIVCLVAYSISHAHTIYGAQSR

SEQ ID NO: 1561 - DNA, 1272 bp, Streptococcus pyogenes
gtggtgacattaatgattaaatcaattgcaacactgcctaaaccttccttgaaagaagtgttaggactagtaggattagcacttcccatagggggcgcggttggagtggttgatgttatttttggcaaagggcttttgtttctttccgaatatcgcgatcaccaccttttcttgcttcttccatttcttgccctagcaggccttgttatcgtttttctttacgataagttaggcaaagaggttcgtcaagggatgggattggtttttcaggtagggcatggtcaaaaaaatcagattcctcctatgctcattcctcttattttgttctcaacttgggtaacccacttatttggagcgagtgcgggtagagaaggggtagccgttcaaataggagctactatctctcattattgtcggagatttgtgactagtcaagaagccgcacgacatcttttgattatggggatggcagccggttttgcagggctttttcaaacgccaattgctgctgtcgtatttgccctcgaggttttattagtaggaacgcttcgttattccgctttattgccttccttagttgctgcttacgtggcttcttggacttcccatgccttgggattagagaaatttacgattgttcttgaagaaacattgaccataactcccttaacattggttaaattaattgggttaggccttatttttggtctggtgggaaatagttttgcctatttacttggctggtttaaaccttacctcagtcaaaagctaccaaatccttatttccggattgcttttatcggtgctttgttatctatctgtctgatgattggtcacgtcggaagatatagtggtctaggaaccaatttgattgcggcagctttttctggccaaactatcctaacttacgactggcttttaaaaatgatcgtgacggtgattagcttatctgcaggctttcaaggtggtgaagtgacgcctctatttgctattggagcttctttaggcatcgttttggccccttacttaggtcttcctgtactgttggttgctgcacttggttacaccacggtatttggaagtgcaacaaataccttttgggcccctatctttattgggatagaggtctttggtccagagaatgccctagcatattttgtcacctcggctgcagcctatatggttagtcacagacattccatttacagttatcaaaaagtagtcatgatcaatttaaaagacatgacggtaaatcagatggatttaaaaaaa

SEQ ID NO: 1562 - protein, 424 aa, Streptococcus pyogenes
VVTLMIKSIATLPKPSLKEVLGLVGLALPIGGAVGVVDVIFGKGLLFLSEYRDHHLFLLLPFLALAGLVIVFLYDKLGKEVRQGMGLVFQVGHGQKNQIPPMLIPLILFSTWVTHLFGASAGREGVAVQIGATISHYCRRFVTSQEAARHLLIMGMAAGFAGLFQTPIAAVVFALEVLLVGTLRYSALLPSLVAAYVASWTSHALGLEKFTIVLEETLTITPLTLVKLIGLGLIFGLVGNSFAYLLGWFKPYLSQKLPNPYFRIAFIGALLSICLMIGHVGRYSGLGTNLIAAAFSGQTILTYDWLLKMIVTVISLSAGFQGGEVTPLFAIGASLGIVLAPYLGLPVLLVAALGYTTVFGSATNTFWAPIFIGIEVFGPENALAYFVTSAAAYMVSHRHSIYSYQKVVMINLKDMTVNQMDLKK

SEQ ID NO: 1563 - DNA, 714 bp, Streptococcus agalactiae
gtgattaaacgatttgataattatgctcagtacgtacttgttttaggttttagcttactaattggtggtgtggttggggctattacagcagtctttggacgtgttctattattcctgacagcctttagaagtgattatatagcttacctactcccttttcttagcattgttggtttatttatagtttttgtctatcaaaaatttgggggtaagagtgttaaagggatgggattggtatttgaagtaggtcatggtaatgaggagactattccgaaacgtcttgttcctctcgtgatattaacaacttggttaacccacttatttggtggtagtgcaggtcgtgagggggttgctgtacagattggggctaccgtttcacactactttcaaaaatattgccgtttacaaaacgcttctcaacttttcctagtaatgggaatggcagcaggttttgctggtttatttcagactcctttagctgctactttttttgcgattgaagttttggtagtaggtcgtttaatggtttcgtatgtattaccaagtttaattgctgccctgacagcaaatttcgtctcacattctttaggtttagaaaaattttctcatagtatagcaacatcaatggcgttaacaccagatattattctaaaattattggttttaggactatgttttggtctgtgtggtaatttattgctttattttattggc

SEQ ID NO: 1564 - protein, 238 aa, Streptococcus agalactiae
MIKRFDNYAQYVLVLGFSLLIGGVVGAITAVFGRVLLFLTAFRSDYIAYLLPFLSIVGLFIVFVYQKFGGKSVKGMGLVFEVGHGNEETIPKRLVPLVILTTWLTHLFGGSAGREGVAVQIGATVSHYFQKYCRLQNASQLFLVMGMAAGFAGLFQTPLAATFFAIEVLVVGRLMVSYVLPSLIAALTANFVSHSLGLEKFSHSIATSMALTPDIILKLLVLGLCFGLCGNLLLYFIG

SEQ ID NO: 1565 - DNA, 273 bp, Streptococcus agalactiae
atggaattagaagagattcgtcaagaaatagatgaaatagatcagcaattagtaagccttttagaaactagaatgggtctaattttagaggtcatagcatttaaaaagaaacatcgacttccagttttagataataatcgtgaaaacgaagtgcttaacaatgtattgaagaaagtccaaaaccatcaatttgacgatgtgatacgagcaactttcaaagacattatgacagaatctcgtgtttatcaaaaggagaatattgtagacggtgat

SEQ ID NO: 1566 - protein, 91 aa, Streptococcus agalactiae
MELEEIRQEIDEIDQQLVSLLETRMGLILEVIAFKKKHRLPVLDNNRENEVLNNVLKKVQNHQFDDVIRATFKDIMTESRVYQKENIVDGD

SEQ ID NO: 1567 - DNA, 282 bp, Streptococcus pyogenes
atgcgtttagaaaagatacgacaagaaatcaatggtattgatcaccacttggttgccttattagaaaagcggatggcacttgtagagcaagtaacagcttataaactagccaatcacttgcctgtcttagatcaggcgagggaaaatcagatcctagatagggtttcttatctcgttaaagaccaagcatttgagccagctatccatgagacatttaaaaccattatgtctctttcacggcagtatcaaacgcaacacttaacaggtggtgacattaatgat

SEQ ID NO: 1568 - protein, 94 aa, Streptococcus pyogenes
MRLEKIRQEINGIDHHLVALLEKRMALVEQVTAYKLANHLPVLDQARENQILDRVSYLVKDQAFEPAIHETFKTIMSLSRQYQTQHLTGGDIND

SEQ ID NO: 1569 - DNA, 2487 bp, Streptococcus agalactiae
ttgatgtatgcaaccaatattttaagacttggagtttctatgacattaacctttgggaaaccttctataacgatacgccgtctaggagtgataactagtacatatatgatgctaggttttatcttattatgtggatttttgcatcctagtacaatttatagtgaggaaataaaatctgatataaactcttttatatcaatagatgatgaaaaaactactgttcccatatttgactctactttagataagcttactaattcaatagaggagaggcagttagaattagattctgatacatcggacagtttaatagtagatgatcaaaaagataaagatatggtaatagtcttaggtgattctgacagtcaagaaaaattgtcacctcctctaaaatcggaaatagcgacagaagaaaatcgtaaacaggcaaatttagcagaactaaatgcaactcaacctaataatagaactacctatattatacccgaaagcagtcattccattgcagaacaacagagattcctgatagaatcaaagggttattcggttgcattacttaatagcgatgaatttagaaagacagcgagagaggatagaggttttgaaagggataagttgaggtctttggatatcattcctaagggagatttatcgacaagtaatgtcataggtaatacggacattgctagtcagatatcgttgggctttaaaaagaatgcgatacaggaacaccatcttactaaaacattctctcaaaaggatggaaagttatcgtctgttatagaggggatgcttgctattggcaaagagaaagtagagaaggaaataaaatatagtggtaatttatggcaaaaattaaaagctaaggcacactgccttgtttgctgtgttgataatttgaattttgaagatataaaatcttattttcaatattattgtcatctaaaccatcagctcaaattacctaaaggtgctatactttctgctaaaacagaagtatataggggaggagattttgggagaaaaaataaagataatgtgtttggttaccgtatcccctcattattaaaaacggaaaaaggaactttacttgtgggagctgatgaaagaattgagcaagcttgtgattggggaaacataggaatggttattcgccgtagtgaggatgatggtgtcacttggggaaaaagagaaactattgtcaatctccgtaataaccctagagttccgctagttactagtggtgactatagtggctcacctattaatatggatatggcattagttcaagatactagctctaagacgaaacgtattttttcaatatatgatatgtttccagaaggaagaggcgttattagtattgctaacacacctgaaaaagaatatacccaaatcggaggacagtcttatcttaatttatataataatggaaagaaatcgaaggtttttactatccgtgacaaaggtattgtatataattttaaagggaaaaagactgattatcatgttataacagaaactactaaaagtgaccattcaaatctaggggatatttataagggaaaacagctacttggaaatatatattttacaaaacataaaacgtcaccatttcgtttagcaaaatcaagctatgtgtggatgtcatatagcgatgatgatggtaggacatggtcatcacctagagatataacagcaagtcttcgtcagaaaggcatgaaatttttaggaataggacctggaaaaggtatagttttaaaatgggggccacacgctggtcgtattattattcctgcctattctacgaattggaaatctcatctaagaggttcacaatcttcacgcctaatttattcagacgaccatggaaaaacgtggcatactggaaaagcagtcaatgataaccgtatactttctaatggtgaaaaaattcactccttaacaatggataataaaaaagaacaaaatacagaatccgtacccgttcaattgaaaaatggggacattaagttatttatgaggaatctaactggtaacctagaagtagccacaagtaaagacggcggggagacttggcaaaaccatgttaaacgatataaggaagttcatgatgcttacgtccaattatcagctattcgctttgagcatgacaaaaaagagtatattttattagtgaatgctaatgggccaggtaagaagcgtcaagatggatatgcacgtctagcgcaagttaatcgaaatggtagttttaagtggttatatcaccatcacattcaagatggttcgtttgcttacaactctgttcaacaacttaataatgataaatttggtgtcctttatgaacatagagaaaaacatcaaaatagttttactttaaattacaaagtttttaattggagttttcttagtcaaaatacagagaagcaaggcactttatgggagaaaatggcagcaaattggcatgttttgtttaaattttattta

SEQ ID NO: 1570 - protein, 829 aa, Streptococcus agalactiae
MMYATNILRLGVSMTLTFGKPSITIRRLGVITSTYMMLGFILLCGFLHPSTIYSEEIKSDINSFISIDDEKTTVPIFDSTLDKLTNSIEERQLELDSDTSDSLIVDDQKDKDMVIVLGDSDSQEKLSPPLKSEIATEENRKQANLAELNATQPNNRTTYIIPESSHSIAEQQRFLIESKGYSVALLNSDEFRKTAREDRGFERDKLRSLDIIPKGDLSTSNVIGNTDIASQISLGFKKNAIQEHHLTKTFSQKDGKLSSVIEGMLAIGKEKVEKEIKYSGNLWQKLKAKAHCLVCCVDNLNFEDIKSYFQYYCHLNHQLKLPKGAILSAKTEVYRGGDFGRKNKDNVFGYRIPSLLKTEKGTLLVGADERIEQACDWGNIGMVIRRSEDDGVTWGKRETIVNLRNNPRVPLVTSGDYSGSPINMDMALVQDTSSKTKRIFSIYDMFPEGRGVISIANTPEKEYTQIGGQSYLNLYNNGKKSKVFTIRDKGIVYNFKGKKTDYHVITETTKSDHSNLGDIYKGKQLLGNIYFTKHKTSPFRLAKSSYVWMSYSDDDGRTWSSPRDITASLRQKGMKFLGIGPGKGIVLKWGPHAGRIIIPAYSTNWKSHLRGSQSSRLIYSDDHGKTWHTGKAVNDNRILSNGEKIHSLTMDNKKEQNTESVPVQLKNGDIKLFMRNLTGNLEVATSKDGGETWQNHVKRYKEVHDAYVQLSAIRFEHDKKEYILLVNANGPGKKRQDGYARLAQVNRNGSFKWLYHHHIQDGSFAYNSVQQLNNDKFGVLYEHREKHQNSFTLNYKVFNWSFLSQNTEKQGTLWEKMAANWHVLFKFYL

SEQ ID NO: 1571 - DNA, 1446 bp, Streptococcus agalactiae
atgcaggtatttttaaatattgtcaataaattctttgatccaattatccatatgggttcgggagttgtgatgctaattgtcatgacaggtttagccatgatatttggagtgaagttttctaaagcacttgaaggtggtattaagttagctattgctcttacgggtattggtgctattattggtattttaactggtgctttttctgaatcacttcaagcttttgttaaaaatacaggaatcaatctaagcattattgacgttggttgggctccattagcaactattacatggggatcaccatatacgctttacttcttattaatcatgcttattgtcaatattgttatgattgttatgaaaaaaacggataccttagatgttgatatttttgatatttggcatttatctatcacaggtcttttaattatgtggtatgctaaaaaaaataatctaccaacacttttatctgtcattattgcaactgtagctattatcttcgttggtgttctaaaaattatcaattctgatttgatgaaacctacctttgatgatttattggggacaggtccaacttctcccatgacttcaacgcatatgaattatatgatgaaccccattattatggttttggataagctttttgataaagtttttccagggctagataaatatgactttgacgcggctaaattaaataaagccattggattctggggctctaagttctttattggtatgattttaggacttgtcatagggattatgggcaaccccgtgttctcatttgcagcattaggtggctggttttctctcggttttacagcaggtgcttgtttagagttgttctctttgattggttcttggttcattgctgcagtagaaccactttctcaaggaattactaattttgctaatggtaaaatgcatggtcgtcgtttcaatattggtttggactggccatttattgccggacgtgcagagatttgggcatgtgctaacattcttgcaccgattatgctagtagaagctattttactctctaaagttggtaatggtattctaccgcttgctggtattatcgcaatgggcgtaacccctgctttactggttgttacacgtggccgtttaattcgtatgattacctttggaacattgctattaccgctatttcttttatcaggaacaatgattgccccatttgcaactgaattagctaaaaaggtaggcgcattcccagctggggcgcgagcaggttcacttatcactcactctacactagaaggccctatggagaaaatctttggttacgttattggtaaagcgacaacaggtcaattatcagcgattataacattaattatttttgcgacagcttatcttggtttgtttatgtggtatgctaaacaaatgaaacgccgtaatgcagaatatgcagctaatcaaaaa

SEQ ID NO: 1572 - protein, 482 aa, Streptococcus agalactiae
MQVFLNIVNKFFDPIIHMGSGVVMLIVMTGLAMIFGVKFSKALEGGIKLAIALTGIGAIIGILTGAFSESLQAFVKNTGINLSIIDVGWAPLATITWGSPYTLYFLLIMLIVNIVMIVMKKTDTLDVDIFDIWHLSITGLLIMWYAKKNNLPTLLSVIIATVAIIFVGVLKIINSDLMKPTFDDLLGTGPTSPMTSTHMNYMMNPIIMVLDKLFDKVFPGLDKYDFDAAKLNKAIGFWGSKFFIGMILGLVIGIMGNPVFSFAALGGWFSLGFTAGACLELFSLIGSWFIAAVEPLSQGITNFANGKMHGRRFNIGLDWPFIAGRAEIWACANILAPIMLVEAILLSKVGNGILPLAGIIAMGVTPALLVVTRGRLIRMITFGTLLLPLFLLSGTMIAPFATELAKKVGAFPAGARAGSLITHSTLEGPMEKIFGYVIGKATTGQLSAIITLIIFATAYLGLFMWYAKQMKRRNAEYAANQK

SEQ ID NO: 1573 - DNA, 1449 bp, Streptococcus agalactiae
atgatgcaaccttttttagacattattaacaagattctgggatttcctattcagttgggatcaggtgtggtcatgctgattgtcatgacaggtttagccatgattttcggggttaaattcacaaaggcactggaaggtgggattaagttagccatcgctttgacagggattggagccattattggaattttgacgggggctttttcagagtctttacaggcctttgttaaaaatacagggatcagtttaaacattattgatgtcggttgggcaccgcttgcaacaattacctggggttccccttacaccctttatttcttgctggtgatgctggtggttaatattgtcatgattgtcatgaaaaaaacggacacccttgacgtcgatatttttgatatttggcatttgtccattacgggtctattgattatgtggtatgcggctcgtaaccatttaccagtctttgtgtctcttttgattgctactgtggcagttattcttgttggggtactgaaaatcattaactctgatttgatgaaaccgacctttgatgaccttcttgggacagggcctcaatcaccaatgacttcaactcacatgaactacatgatgaatccaatcattatggtcttagataagatttttgacaaggtctttccggggctggataaatatgactttgatgctgctaaattgaacaaaaaaattggcttctggggctctaagttctttatcggaatggctctaggttttgtgattgggattatgggagatcctcatttcactgttgaatctatcaaaaattggtttggcctaggctttaccgcgggtgcctgcttggaacttttctctttgattggctcttggtttatcgcagctgttgagcctttgtcacaagggattaccaattttgccaatgctagaatgcatgggcgtcgtttcaatatcggtttggactggcccttcattgctggtcgtgctgaaatctgggcctgtgccaatattcttgccccaatcatgttgattgaagccgttctcctatcaaaagttggcaatgggattttaccactggcaggaattattgctatggggatgacaccagctcttcttgtggtcacacgtggtcgtttgattcgcatgattatttttggttccctcttattgccattattcctcttgtcaggaactatgattgctccatttgcgacagagttggctaaaaaagtaggggcttttccagcaggtacaagcgctggttccttgattacgcattcaacacttgaaggaccaatggaaaaaatttttggttatgtgattggtcaagcgacaacaggtcagattgcctcaatcatcacgctaatcatctttgtggccatttacctaagtctctttgcttggtatgctaaccaaatgaaggcacgtaacgctgaatatgcgaaaacaatgaaa

SEQ ID NO: 1574 - protein, 483 aa, Streptococcus pyogenes
MMQPFLDIINKILGFPIQLGSGVVMLIVMTGLAMIFGVKFTKALEGGIKLAIALTGIGAIIGILTGAFSESLQAFVKNTGISLNIIDVGWAPLATITWGSPYTLYFLLVMLVVNIVMIVMKKTDTLDVDIFDIWHLSITGLLIMWYAARNHLPVFVSLLIATVAVILVGVLKIINSDLMKPTFDDLLGTGPQSPMTSTHMNYMMNPIIMVLDKIFDKVFPGLDKYDFDAAKLNKKIGFWGSKFFIGMALGFVIGIMGDPHFTVESIKNWFGLGFTAGACLELFSLIGSWFIAAVEPLSQGITNFANARMHGRRFNIGLDWPFIAGRAEIWACANILAPIMLIEAVLLSKVGNGILPLAGIIAMGMTPALLVVTRGRLIRMIIFGSLLLPLFLLSGTMIAPFATELAKKVGAFPAGTSAGSLITHSTLEGPMEKIFGYVIGQATTGQIASIITLIIFVAIYLSLFAWYANQMKARNAEYAKTMK

SEQ ID NO: 1575 - DNA, 303 bp, Streptococcus agalactiae
atgatcaaaatattagcagcttgtggtgcaggcgtaaactcaagtcatcaaattaaagatgctatcgagacacaattaggagatagaggttacaatgtacattgtgatgctgttatggttaaggatatcactgaggaaatggtcaacaaatatgatatctttactcctattgctaaaactgatttaggttttaatgtaccaattccagttgtagaagcaggacctattctttatcgcataccagttatgagcgaaccggtctttactgctttagaacaagttatcaaagaacacaatctatca

SEQ ID NO: 1576 - protein, 101 aa, Streptococcus agalactiae
MIKILAACGAGVNSSHQIKDAIETQLGDRGYNVHCDAVMVKDITEEMVNKYDIFTPIAKTDLGFNVPIPVVEAGPILYRIPVMSEPVFTALEQVIKEHNLS

SEQ ID NO: 1577 - DNA, 303 bp, Streptococcus pyogenes
atgattaaaattctagcagcctgcggtgcaggggttaactcaagccatcaaattaaagatgcgattgaaactcagatgagtgaccgtggttacgatgttcactgtgatgcggtgatggtcaaagacatcacagaagaattggtgtctcgttatgatatttttacgccgattgcaaaaactgacttgggatttgagatgccgattcccatagtagaagcaggaccgattctctatcgtatcccaatcatgagtgagcctgtttttgctgaattagagcgcgtgattaaagaaaatcatttgcag

SEQ ID NO: 1578 - protein, 101 aa, Streptococcus pyogenes
MIKILAACGAGVNSSHQIKDAIETQMSDRGYDVHCDAVMVKDITEELVSRYDIFTPIAKTDLGFEMPIPIVEAGPILYRIPIMSEPVFAELERVIKENHLQ

SEQ ID NO: 1579 - DNA, 471 bp, Streptococcus agalactiae
gtgtttgctgtgactcaagatattttatttattgatgcccattctcaggaagaattatttgacttagtatcaaaagcattgataaaacaacactatgttagtcctaactaccgacaggcagtaaaagaaagggagagagagtttccaacggggttaaaaattgatttaaaagatgggactcctattcaatatgttgctattccacacactgaaacgcagtattgtctagtagatagaatcttttatgtcaaaaatagtcagccaattactttcaaacatatgattaatccagaagaggagtgtagggttcaggattttttcttcatcattaatagtaggaatagtaaccaaagtgatattttatctaatttgattaccttctttattacaaaaggaaacctagatcggctacatgagcttggcgacaataaagaaaaaattaatcattatttaatagaaaaaggagtgttt

SEQ ID NO: 1580 - protein, 157 aa, Streptococcus agalactiae
MFAVTQDILFIDAHSQEELFDLVSKALIKQHYVSPNYRQAVKEREREFPTGLKIDLKDGTPIQYVAIPHTETQYCLVDRIFYVKNSQPITFKHMINPEEECRVQDFFFIINSRNSNQSDILSNLITFFITKGNLDRLHELGDNKEKINHYLIEKGVF

SEQ ID NO: 1581 - DNA, 471 bp, Streptococcus pyogenes
gtgtttcctaatattctatttactgaagcaaggacgcagccagagctttttgatcttgttgctagccacttggaaaaggttgggtatgtgacgcaagagtaccatcaggctttagtggagcgtgaggcggtatttccgacaggactcaaagtggacctcaaagatgggtcagatattttgtatgcggctattccgcatacagaaaccaagtattgcttggttgatcaagtggtctatgttagaaatagtcaagcccttacctttaagcacatgattaatccagaggaagactgtttggtaacggatttcttctttattatcaatagtcaaaacgagggtcaaacgacgattctatccaatctcattaccttctttattacgaaaggcaatcttagctatctagccagtctaaaagatgataaacaagctatttcaaactatttaatagaaaaaggagtgtttcagcatgat

SEQ ID NO: 1582 - protein, 157 aa, Streptococcus pyogenes
VFPNILFTEARTQPELFDLVASHLEKVGYVTQEYHQALVEREAVFPTGLKVDLKDGSDILYAAIPHTETKYCLVDQVVYVRNSQALTFKHMINPEEDCLVTDFFFIINSQNEGQTTILSNLITFFITKGNLSYLASLKDDKQAISNYLIEKGVFQHD

SEQ ID NO: 1583 - DNA, 774 bp, Streptococcus agalactiae
atgttaaagcgagaaagattacaaaaaataatagaaaaagtcaatataaatggcattgtcactgttaatgaaatcatggaagaacttgatgtatcagacatgactgttaggcgtgacttggatgaattagataaagcaggactgttaatacgcatccatggtggtgcacaaaaagtaaatgcatcaccaactccacaaaattatgaaaaatcaaacactgaaaaatacgatattcaaacaaatgaaaaattagaaattgcccaatttgcaaaacaattcatcaatgatggtgaaacaatctttattgggcctggaacaaccttagagaaattagccacgcaattacttgattttaaaattagggtagtaaccaatagccttcctgttttcaatattctgaatcaaagttcaacacttgaccttatccttgtagggggagagtacagagaaattactggtgcttttgtcggttctgttactattaactctattaaatcacttaatttttcaaaagctttcgttagtagtaatggtgtttttgaaaagtctatcgctacttacgacgagggagaaggtgaaattcagcgcattgctcttaataattcctttgaaaaattccttttagttgatagccaaaaatttggtaaatatgatttttatactttttatcaattagacgatattgattttgtattaacagatcataatattgataatgttgttaaggagcaatacagtagcttcaccaaaattttaactaataacaattacatg

SEQ ID NO: 1584 - protein, 258 aa, Streptococcus agalactiae
MLKRERLQKIIEKVNINGIVTVNEIMEELDVSDMTVRRDLDELDKAGLLIRIHGGAQKVNASPTPQNYEKSNTEKYDIQTNEKLEIAQFAKQFINDGETIFIGPGTTLEKLATQLLDFKIRVVTNSLPVFNILNQSSTLDLILVGGEYREITGAFVGSVTINSIKSLNFSKAFVSSNGVFEKSIATYDEGEGEIQRIALNNSFEKFLLVDSQKFGKYDFYTFYQLDDIDFVLTDHNIDNVVKEQYSSFTKILTNNNYM

SEQ ID NO: 1585 - DNA, 768 bp, Streptococcus pyogenes
atgttaaaaagagaaagacttctaaaaattaccgaaatagtcaatgagcaaggtattgttactgtgaatgatattattcagactttaaacgtttctgatatgacagttcgtagagacttagatgaactggaaaaagccggcaaattgatccgcatccatggaggtgcacaaagcattaccatgcctaataaaaaagagcggtcaaatattgaaaaacaaaccgttcaaacaaaggaaaaatgggaactagcttcatatgcgacacaactagtcaatgatggtgaaacaatctttattggtccaggaacaactttagaatgtttcgctgagcagttaaaaaatcgtcagattcgcattgtgaccaatagcctccctgtctttaacatccttcaggacagcgaaaccattgacctgattcttatcggtggtgaataccgatctattacaggagcttttgtagggtcccttgccagtcaaaatatctcatccttaaaatttgccaaggcttttattagctgtaatggtatttataaaaacgatattgcaacttatagcgaaactgaaggagagattcaaaagctagcttttaataattctattgaaaaatacctcttggtagataaccaaaaattcaatgcctacgacttcttcattttttaccatttaaacaacattgatgctgttgttacagattcgcaaataactgaggacgttatcgaacgttatagtcagttcacgcaattattagtagcccacgaaaacaaggag

SEQ ID NO: 1586 - protein, 256 aa, Streptococcus pyogenes
MLKRERLLKITEIVNEQGIVTVNDIIQTLNVSDMTVRRDLDELEKAGKLIRIHGGAQSITMPNKKERSNIEKQTVQTKEKWELASYATQLVNDGETIFIGPGTTLECFAEQLKNRQIRIVTNSLPVFNILQDSETIDLILIGGEYRSITGAFVGSLASQNISSLKFAKAFISCNGIYKNDIATYSETEGEIQKLAFNNSIEKYLLVDNQKFNAYDFFIFYHLNNIDAVVTDSQITEDVIERYSQFTQLLVAHENKE

SEQ ID NO: 1587 - DNA, 1137 bp, Streptococcus agalactiae
atgacacatgagcattgggtaccaaagaaagatttatcagagtcggaattaaaagcagctcaagaatttctttcaggaaaatctgaagcaaatcaagacaaaccaaaaacaggtaaaacagctcaagaaatctatgaggcaattgaaccaaaagcaattgttaaacctgaagatttattatttggaattgcacaagcgacagactataagaatggtacatttgtaattcctcataaagatcattaccattatgtggaattaaaatggtttgatgaagaaaaagatcttttagctgattcagataagacatattctttagaagactatttagctacggctaaatattacatgatgcacccagaaaaacgtcctaaagttgaaggatggggtaaagatgctgaaatttataaggaaaaggactctaataaagcagataaaccaagtcctgcaccaactgataataaatcaacatcaaattctagtgacaaaaacttaagtgctgcagaagtattcaaacaagcaaaaccagaaaaaattgtaccgcttgataaaattgctgctcacatggcatatgcagttggatttgaagatgatcaattgattgttcctcatcatgatcattatcataatgttcctatggcatggtttgacaagggtggtttatggaaagcaccagaaggctatacattacaacaactcttctcaacaattaaatactacatggaacatcctaatgaattaccaaaagaaaaaggttggggacacgacagtgatcataacaaaggctcaaataaagacaataaagccaaaaattatgctccagatgaagaacctgaagattcagggaaagtaactcacaactatggtttttatgatgttaataaagggtcagacgaagaagaaccagaaaaacaagaagatgaatcagagctagatgaatatgaactaggaatggcacaaaacgctaagaaatatggtatggatagacaatcttttgaaaagcaactcatccaattatcaaataaatatagtgtaagttttgaaagctttaattatattaatggtagtcaagttcaagttactaaaaaagatggctctaaagtgcttgttgatattaaaacactaacagaagtgaaa

SEQ ID NO: 1588 - protein, 379 aa, Streptococcus agalactiae
MTHEHWVPKKDLSESELKAAQEFLSGKSEANQDKPKTGKTAQEIYEAIEPKAIVKPEDLLFGIAQATDYKNGTFVIPHKDHYHYVELKWFDEEKDLLADSDKTYSLEDYLATAKYYMMHPEKRPKVEGWGKDAEIYKEKDSNKADKPSPAPTDNKSTSNSSDKNLSAAEVFKQAKPEKIVPLDKIAAHMAYAVGFEDDQLIVPHHDHYHNVPMAWFDKGGLWKAPEGYTLQQLFSTIKYYMEHPNELPKEKGWGHDSDHNKGSNKDNKAKNYAPDEEPEDSGKVTHNYGFYDVNKGSDEEEPEKQEDESELDEYELGMAQNAKKYGMDRQSFEKQLIQLSNKYSVSFESFNYINGSQVQVTKKDGSKVLVDIKTLTEVK

SEQ ID NO: 1589 - DNA, 2475 bp, Streptococcus pyogenes
gtgaagaaaacatatggttatatcggctcagttgctgctattttactagctactcatattggaagttaccaacttggtaagcatcatatgggttcagcaacaaaggacaatcaaattgcctatattgatgatagcaaaggtaaggcaaaagcccctaaaacaaacaaaacgatggatcaaatcagtgctgaagaaggcatctctgctgaacagatcgtagtcaaaattactgaccaaggctatgtgacctcacatggtgaccattatcatttttacaatgggaaagttccttatgatgcgattattagtgaagagttgttgatgacggatcctaattaccgttttaaacaatcagacgttatcaatgaaatcttagacggttacgttattaaagtcaatggcaactattatgtttacctcaagccaggtagcaagcgcaaaaacattcgaaccaaacaacaaattgctgagcaagtagccaaaggaactaaagaagctaaagaaaaaggtttagctcaagtggcccatctcagtaaagaagaagttgcggcagtcaatgaagcaaaaagacaaggacgctatactacagacgatggctatatttttagtccgacagatatcattgatgatttaggagatgcttatttagtacctcatggtaatcactatcattatattcctaaaaaggatttgtctccaagtgagctagctgctgcacaagcctactggagtcaaaaacaaggtcgaggtgctagaccgtctgattaccgcccgacaccagccccagccccaggtcgtaggaaagccccaattcctgatgtgacgcctaaccctggacaaggtcatcagccagataacggtggctatcatccagcgcctcctaggccaaatgatgcgtcacaaaacaaacaccaaagagatgagtttaaaggaaaaacctttaaggaacttttagatcaactacaccgtcttgatttgaaataccgtcatgtggaagaagatgggttgatttttgaaccgactcaagtgatcaaatcaaacgcttttgggtatgtggtgcctcatggagatcattatcatattatcccaagaagtcagttatcacctcttgaaatggaattagcagatcgatacttagccggccaaactgaggacgatgactcaggttcagatcactcaaaaccatcagataaagaagtgacacatacctttcttggtcatcgcatcaaagcttacggaaaaggcttagatggtaaaccatatgatacgagtgatgcttatgtttttagtaaagaatccattcattcagtggataaatcaggagttacagctaaacacggagatcatttccactatataggatttggagaacttgaacaatatgagttggatgaggtcgctaactgggtgaaagcaaaaggtcaagctgatgagcttgctgctgctttggatcaggaacaaggcaaagaaaaaccactctttgacactaaaaaagtgagtcgcaaagtaacaaaagatggtaaagtgggctatatgatgccaaaagatggcaaggactatttctatgctcgtgatcaacttgatttgactcagattgcctttgccgaacaagaactaatgcttaaagataagaaacattaccgttatgacattgttgacacaggtattgagccacgacttgctgtagatgtgtcaagtctgccgatgcatgctggtaatgctacttacgatactggaagttcgtttgttatccctcatattgatcatatccatgtcgttccgtattcatggttgacgcgcgatcagattgcaacaatcaagtatgtgatgcaacaccccgaagttcgtccggatatatggtctaagccagggcatgaagagtcaggttcggtcattccaaatgttacgcctcttgataaacgtgctggtatgccaaactggcaaattatccattctgctgaagaagttcaaaaagccctagcagaaggtcgttttgcaacaccagacggctatattttcgatccacgagatgttttggccaaagaaacttttgtatggaaagatggctcctttagcatcccaagagcagatggcagttcattgagaaccattaataaatctgatctatcccaagctgagtggcaacaagctcaagagttattggcaaagaaaaacgctggtgatgctactgatacggataaacccaaagaaaagcaacaggcagataagagcaatgaaaaccaacagccaagtgaagccagtaaagaagaagaaaaagaatcagatgactttatagacagtttaccagactatggtctagatagagcaaccctagaagatcatatcaatcaattagcacaaaaagctaatatcgatcctaagtatctcattttccaaccagaaggtgtccaattttataataaaaatggtgaattggtaacttatgatatcaagacacttcaacaaataaaccct

SEQ ID NO: 1590 - protein, 825 aa, Streptococcus pyogenes
VKKTYGYIGSVAAILLATHIGSYQLGKHHMGSATKDNQIAYIDDSKGKAKAPKTNKTMDQISAEEGISAEQIVVKITDQGYVTSHGDHYHFYNGKVPYDAIISEELLMTDPNYRFKQSDVINEILDGYVIKVNGNYYVYLKPGSKRKNIRTKQQIAEQVAKGTKEAKEKGLAQVAHLSKEEVAAVNEAKRQGRYTTDDGYIFSPTDIIDDLGDAYLVPHGNHYHYIPKKDLSPSELAAAQAYWSQKQGRGARPSDYRPTPAPAPGRRKAPIPDVTPNPGQGHQPDNGGYHPAPPRPNDASQNKHQRDEFKGKTFKELLDQLHRLDLKYRHVEEDGLIFEPTQVIKSNAFGYVVPHGDHYHIIPRSQLSPLEMELADRYLAGQTEDDDSGSDHSKPSDKEVTHTFLGHRIKAYGKGLDGKPYDTSDAYVFSKESIHSVDKSGVTAKHGDHFHYIGFGELEQYELDEVANWVKAKGQADELAAALDQEQGKEKPLFDTKKVSRKVTKDGKVGYMMPKDGKDYFYARDQLDLTQIAFAEQELMLKDKKHYRYDIVDTGIEPRLAVDVSSLPMHAGNATYDTGSSFVIPHIDHIHVVPYSWLTRDQIATIKYVMQHPEVRPDIWSKPGHEESGSVIPNVTPLDKRAGMPNWQIIHSAEEVQKALAEGRFATPDGYIFDPRDVLAKETFVWKDGSFSIPRADGSSLRTINKSDLSQAEWQQAQELLAKKNAGDATDTDKPKEKQQADKSNENQQPSEASKEEEKESDDFIDSLPDYGLDRATLEDHINQLAQKANIDPKYLIFQPEGVQFYNKNGELVTYDIKTLQQINP

SEQ ID NO: 1591 - DNA, 1398 bp, Streptococcus agalactiae
atgaatcgtaaaaaaacagttattattagtgctttatcagtagctctatttggtactggtgtaggtgcttaccaattaggtagctataatgcccaaaaatcagacaatagtgtttcttatgtgaaaacagataaatctgatagcaaagcacaagcaacagctgtaaataaaacgcccgaccaaatcagtaaagaagaaggcatatctgcagaacaaatcgttgttaaaattactgacgacggttatgtgacttctcatggagaccattaccattattacaatgggaaagtgccatatgatgccatcattagtgaagaattgattatgaaagaccctagctatgtctttaataaagctgatgtcattaatgaagtcaaagatggttatattatcaaagttaacggtaagtattacctctatcttaaagaaggtagcaaacgaacaaatgttcgtacaaaggaacaaatccaaaagcaacgcgaagaatggtctaagggtggttctaagggagaatcaggaaagcatagtagtgcaaaaactcaagctttatcagccagcgtacgtgaagcgaaagctagcggtcgctatactacagatgatggttatgtttttagtccaacagatgtcattgatgacatgggagatgcctttttagtaccacatggcgatcatttccattatatcccgaaagctgatttatctccatcagagttatcagccgcacaggcatattggaaccgcaagactggccgatcaggtaatagctcaaaaccatcaaattcaagttcatacattcatgcaagtgcaccaagcggtaatgtatcaacaggaagacatgctaatgcccctatttctattccaagagtcactcacgcaaatcactggtcaaaaccagctggtaatcatgctacggcaccaaaacaccatgcacctacaaccaaaccaatcaacaaagattctgctttagacaaaatgttgaaacgtttatatgctcaaccgttatatgctcgtcacgtagaaagtgatggtttggtttatgacccagcacaagttaatgctttcacagcaatcggtgtttctattccgcacggtaatcatttccactttattcactataaggatatgtctccattagagttagaagcaacaaggatggtggcagagcatagaggacatcatattgatgcattagggaaaaaagattctacagagaaaccaaagcatatttctcatgaacctaataaggaacctcacacagaggaagaacaccatgcagtaacaccgaaagaccaacgtaaaggcaaaccaaatagccagattgtctacagtgctcaagaaattgaagaggcaaaaaagctggtaaatacacaacatctgatggttacattatatgacaca

SEQ ID NO: 1592 - protein, 466 aa, Streptococcus agalactiae
MNRKKTVIISALSVALFGTGVGAYQLGSYNAQKSDNSVSYVKTDKSDSKAQATAVNKTPDQISKEEGISAEQIVVKITDDGYVTSHGDHYHYYNGKVPYDAIISEELIMKDPSYVFNKADVINEVKDGYIIKVNGKYYLYLKEGSKRTNVRTKEQIQKQREEWSKGGSKGESGKHSSAKTQALSASVREAKASGRYTTDDGYVFSPTDVIDDMGDAFLVPHGDHFHYIPKADLSPSELSAAQAYWNRKTGRSGNSSKPSNSSSYIHASAPSGNVSTGRHANAPISIPRVTHANHWSKPAGNHATAPKHHAPTTKPINKDSALDKMLKRLYAQPLYARHVESDGLVYDPAQVNAFTAIGVSIPHGNHFHFIHYKDMSPLELEATRMVAEHRGHHIDALGKKDSTEKPKHISHEPNKEPHTEEEHHAVTPKDQRKGKPNSQIVYSAQEIEEAKKLVNTQHLMVTLYDT

SEQ ID NO: 1593 - DNA, 921 bp, Streptococcus agalactiae
atgaaaaggatacggaaaagccttatttttgttctcggagtagttaccctaatttgcttatgtgcttgtactaaacaaagccagcaaaaaaatggcttgtcagtagtgactagcttttatccagtatattccattacaaaagcagtttctggtgatttgaatgatattaaaatgattcgatcacagtcaggtattcatggttttgaaccctcatcaagtgatgttgctgccatttatgatgctgatctatttctttatcattcgcacacactagaagcttgggcgagacgtttggaacctagtttgcatcactctaaagtatctgtaattgaagcttcaaaaggtatgactttggataaagttcatggcttagaagatgtagaggcagaaaaaggagtagatgagtcaaccttgtatgaccctcacacttggaatgaccctgtaaaagtatctgaggaagcacaactcatcgctacacaattagctaaaaaggatcctaaaaacgctaaggtttatcaaaaaaatgctgatcaatttagtgacaaggcaatggctattgcagagaagtataagccaaaatttaaagctgcaaagtctaaatactttgtgacttcacatacagcattctcatacttagctaagcgatacggattgactcagttaggtattgcaggtgtctcaaccgagcaagaacctagtgctaaaaaattagccgaaattcaggagtttgtgaaaacatataaggttaagactatttttgttgaagaaggagtctcacctaaattagctcaagcagtagcttcagctactcgagttaaaattgcaagtttaagtcctttagaagcagttcccaaaaacaataaagattacttagaaaatttggaaactaatcttaaggtacttgtcaaatcgttaaatcaa

SEQ ID NO: 1594 - protein, 307 aa, Streptococcus agalactiae
MKRIRKSLIFVLGVVTLICLCACTKQSQQKNGLSVVTSFYPVYSITKAVSGDLNDIKMIRSQSGIHGFEPSSSDVAAIYDADLFLYHSHTLEAWARRLEPSLHHSKVSVIEASKGMTLDKVHGLEDVEAEKGVDESTLYDPHTWNDPVKVSEEAQLIATQLAKKDPKNAKVYQKNADQFSDKAMAIAEKYKPKFKAAKSKYFVTSHTAFSYLAKRYGLTQLGIAGVSTEQEPSAKKLAEIQEFVKTYKVKTIFVEEGVSPKLAQAVASATRVKIASLSPLEAVPKNNKDYLENLETNLKVLVKSLNQ

SEQ ID NO: 1595 - DNA, 918 bp, Streptococcus pyogenes
atgaaaaaaggtttttttctcatggctatggtcgtgagtttagtaatgatagcagggtgtgataagtcagcaaaccccaaacagcctacgcaaggcatgtcagttgtaaccagcttttacccaatgtatgcgatgacaaaagaagtatctggagacctcaatgatgtgaggatgatccaatcaggtgcaggcattcattcctttgaaccgtctgtaaatgatgtggcagctatttatgacgcggatttgtttgtttaccattcacataccttagaagcttgggcaagggatctagaccctaatttaaaaaaatcaaaggttgatgtgtttgaagcgtcaaaacctttgacactagatagagtcaaagggctagaagatatggaagtcacacaaggcattgatcctgcgacactttatgacccacatacctggacagatcccgttttagctggtgaggaagctgttaatatcgctaaagagctaggacgtttggatcctaaacacaaagacagttacactaaaaatgctaaggctttcaaaaaagaagcagagcaactaactgaagaatacactcaaaaatttaaaaaggtgcgctcaaaaacattcgtgacgcagcacacggcattttcttatctggctaaacgattcggcttgaaacaacttggtatctcgggcatttccccagagcaagagccctctcctcgccaattgaaagaaattcaagactttgttaaagaatacaacgtcaagactatttttgcagaagacaatgtcaatcccaaaattgctcatgctattgcgaaatcaacaggagctaaagtaaagacattaagtccacttgaagctgctccaagcggaaacaagacatatctagaaaatcttagagcaaatttggaagtgctctatcaacagttgaag

SEQ ID NO: 1596 - protein, 306 aa, Streptococcus pyogenes
MKKGFFLMAMVVSLVMIAGCDKSANPKQPTQGMSVVTSFYPMYAMTKEVSGDLNDVRMIQSGAGIHSFEPSVNDVAAIYDADLFVYHSHTLEAWARDLDPNLKKSKVDVFEASKPLTLDRVKGLEDMEVTQGIDPATLYDPHTWTDPVLAGEEAVNIAKELGRLDPKHKDSYTKNAKAFKKEAEQLTEEYTQKFKKVRSKTFVTQHTAFSYLAKRFGLKQLGISGISPEQEPSPRQLKEIQDFVKEYNVKTIFAEDNVNPKIAHAIAKSTGAKVKTLSPLEAAPSGNKTYLENLRANLEVLYQQLK

SEQ ID NO: 1597 - DNA, 441 bp, Streptococcus agalactiae
atgaaaatcattattcaacgtgttaatcaagcaagtgtttctattgaagatgatgtagtcggatctattgagaagggtttagtacttctagttgggattgctccagaagatacaacagaagatattgcttatgcagttcgtaaaattactagcatgcgtattttttctgatgatgaggggaaaatgaacctttcaattcaagacattaaaggaagcgtcttatctatctcacaatttacactctttgcagataccaaaaaaggaaatcgtccagcttttactggggcagctgatcctgttaaagcgaatcagttttatgatatctttaatcaagaattagcaaatcatgtttcggtagaaacaggtcaatttggagctgatatgcaagtcagtctgattaatgatggaccagtaactatcgttttagatactaaaaataaa

SEQ ID NO: 1598 - protein, 147 aa, Streptococcus agalactiae
MKIIIQRVNQASVSIEDDVVGSIEKGLVLLVGIAPEDTTEDIAYAVRKITSMRIFSDDEGKMNLSIQDIKGSVLSISQFTLFADTKKGNRPAFTGAADPVKANQFYDIFNQELANHVSVETGQFGADMQVSLINDGPVTIVLDTKNK

SEQ ID NO: 1599 - DNA, 441 bp, Streptococcus pyogenes
atgaaacttgtcttgcaacgggtcaaagaggcctctgtttctattgatgggaaaattgctggcgctattaatcaagggttgttgttgttagtaggtgtgggaccagatgataatgcagaagatttggcttacgctgtgcgaaaaatagtcaacatgcgcattttttcagatgctgatggcaagatgaaccagtctatccaagacatcaagggcagtatcttatctgtgtcgcaatttaccctttatgctgacaccaaaaagggaaaccgtcctgcctttactggtgctgctaagccagatttggctagtcagttgtatgatagctttaatgaacaattggcagagtttgtgccagttgagcgtggcgtttttggggcagatatgcaggttagtctcatcaatgatggaccagttacgattattttagacacgaaatgtcac

SEQ ID NO: 1600 - protein, 147 aa, Streptococcus pyogenes
MKLVLQRVKEASVSIDGKIAGAINQGLLLLVGVGPDDNAEDLAYAVRKIVNMRIFSDADGKMNQSIQDIKGSILSVSQFTLYADTKKGNRPAFTGAAKPDLASQLYDSFNEQLAEFVPVERGVFGADMQVSLINDGPVTIILDTKCH

SEQ ID NO: 1601 - DNA, 2214 bp, Streptococcus agalactiae
atggtcaaagaaattaatttaacaggagaagaggttgttgcaatcacatcccagtacatgagtgagacggatgttgcttttgtaaaatttgccttaaattacgcaaccgcagctcattattatcaagcaagaaagtcgggcgagccctacattattcatccaattcaagtagcaggtattcttgcagatttacaccttgatgccgttacggtagcttgtggttttttacatgatgttgtagaagatacggaaattacccttgatgagattgaaactgattttggcaaggatgttcgcgatattattgacggcgtaacaaaattgggtaaagtggagtacaaatctcatgaagaacagttagcagaaaatcaccgtaaaatgttaatggctatgtctaaggatatccgtgttattttggttaagctcgctgaccgcttacataatatgagaacccttaaacacctcagaaaagataaacaagagcgtatttcacgtgagactatggaaatatacgctcctttagcgcatcgtttggggattagtcgtatcaagtgggaattagaagatttatcttttcgttacttgaatgagacggaattttataagatttctcatatgatgagtgaaaaacgtcgtgaacgcgaagagttggttgatataattgtcgataaaatcagatcctatactgaggaacagggtttatatggtgatatttatggtagaccaaaacacatttattctatttacagaaaaatgcgtgataaaaagaaacgctttgatcagatttatgatttaattgcgatacgctgtatcatggaaactgctagtgatgtttatgccatggtggggtatatccatgagttatggcgtcctatgccaggaaggtttaaagattatattgcggcaccaaaggccaatggttatcaatctattcacacgacggtttatggacctaaagggccaattgaaattcagattcgaactaaagaaatgcatcaagttgccgagtttggtgttgcagcccattgggcctataaaaaaggaatcaccagtaaggttaatcaagcagagcaatcggttggtatgggatggattcaagaattagttgagcttcaagatgaatcaaaagacgccaaggattttgttgactctgttaaggaagatatctttacagaacgcatctatgtttttaccccaaatggtgctgttcaggaattgccaagggaatctggaccaattgattttgcttatgctattcacacgcaagttggagaaaaagctactggcgctaaagtaaatggacgtatggttccattgactgctaagttaaaaacaggagatgttgttgagattatcacaaaccctaattcatttggaccaagtcgtgactggattaagattgttaagaccaataaagctcgcaataaaattcgtcagttcttcaaaaaccaagataaagaaacttctattaataaaggtagagaattactggttgattatttccaagaacaaggttatgtgcctaacaaatatttagataagaaacatattgaagaaatccttccacgtgtcagtgttaaaagtgaggaagctttgtatgcagccgtaggttttggtgatttgagtccgattagtatttttaataaactgacggaaaaagaacgccgtgaggaggaacgtgctaaggctaaagcggaagcagacgaacttattaacggtggtgaaatcaaaaccgataagcgtgatgttctcaaagttaagagtgaaaatggtgttatcattcaaggagcttcaggtttattaatgcgtattgcaaaatgttgtaatcccgttcctggagatctcattgaaggctatataactaaaggtagaggcgtggctatccatcgttcagattgtcaaaatttaaagagtcaggagaactacgaacaacgtttgattgatgttgagtgggatgatgatggatctaaaaaagagtacatggctgaaatcgatatttatggtttgaatcgtagtggcctccttaatgatgttcttcaaaccttatcaaatgcaacaaagctagtatcgacagtaaatgcacaaccaacaaaagatatgaaatttgctaatattcatgttagctttggaatttcaaatttagcacaattgacaactgtggttgataaaatcaaaattatcccagatgtttattctgttaaacgtacgaatggt

SEQ ID NO: 1602 - protein, 738 aa, Streptococcus agalactiae
MVKEINLTGEEVVAITSQYMSETDVAFVKFALNYATAAHYYQARKSGEPYIIHPIQVAGILADLHLDAVTVACGFLHDVVEDTEITLDEIETDFGKDVRDIIDGVTKLGKVEYKSHEEQLAENHRKMLMAMSKDIRVILVKLADRLHNMRTLKHLRKDKQERISRETMEIYAPLAHRLGISRIKWELEDLSFRYLNETEFYKISHMMSEKRREREELVDIIVDKIRSYTEEQGLYGDIYGRPKHIYSIYRKMRDKKKRFDQIYDLIAIRCIMETASDVYAMVGYIHELWRPMPGRFKDYIAAPKANGYQSIHTTVYGPKGPIEIQIRTKEMHQVAEFGVAAHWAYKKGITSKVNQAEQSVGMGWIQELVELQDESKDAKDFVDSVKEDIFTERIYVFTPNGAVQELPRESGPIDFAYAIHTQVGEKATGAKVNGRMVPLTAKLKTGDVVEIITNPNSFGPSRDWIKIVKTNKARNKIRQFFKNQDKETSINKGRELLVDYFQEQGYVPNKYLDKKHIEEILPRVSVKSEEALYAAVGFGDLSPISIFNKLTEKERREEERAKAKAEADELINGGEIKTDKRDVLKVKSENGVIIQGASGLLMRIAKCCNPVPGDLIEGYITKGRGVAIHRSDCQNLKSQENYEQRLIDVEWDDDGSKKEYMAEIDIYGLNRSGLLNDVLQTLSNATKLVSTVNAQPTKDMKFANIHVSFGISNLAQLTTVVDKIKIIPDVYSVKRTNG

SEQ ID NO: 1603 - DNA, 2229 bp, Streptococcus pyogenes
atgaggaacgaaatggcaaaaataatgaacgtaacaggagaagaagtcattgccttagcggccacctatatgaccaaggctgatgtggcttttgtggcaaaggctttagcatatgcaacagcggcccatttctaccaagtgagaaagtcaggcgaaccctatatcgtccatccgattcaggtggcggggattctggctgatttgcatctggatgctgtgacagttgcttgtggctttttacatgatgtcgtagaagatacggatattaccttagatgagatcgaagcagactttggccatgatgctcgtgatatcgttgatggtgtcaccaagttaggtgaagttgagtacaaatctcatgaggagcaactcgccgaaaaccatcgcaaaatgctgatggctatgtccaaagatattcgcgtgattttggtgaaattggctgaccgcctgcataatatgcgcaccctcaaacatttgcgcaaggacaaacaagagcgcatttcgcgcgaaaccatggaaatctatgcccccttggcgcatcgtttggggattagtcgcatcaaatgggaactagaagatttggcttttcgttacctcaatgaaaccgaattttacaaaatttcccatatgatgaaagaaaaacgtcgcgagcgtgaagctttggtagaggctattgtcagtaaggtcaaaacctatacgacacaacaagggttgtttggagatgtgtatggccgaccaaaacacatttattcgatttatcggaaaatgcgggacaaaaagaaacgattcgatcagatttttgatctgattgccattcgttgtgtcatggaaacgcaaagcgatgtctatgctatggttggctatattcatgagctttggcgtcccatgccaggccgcttcaaggattatattgcagctcctaaagctaatggctaccagtctattcataccaccgtgtatgggccaaaaggacctattgagattcaaatcagaactaaggacatgcatcaagtggctgagtacggggttgctgctcactgggcttataaaaaaggcgtgcgtggtaaggtcaatcaagctgagcaagccgttggcatgaactggatcaaagagctggtagaattgcaagatgcctcaaatggcgatgcagtggactttgtggattcggtcaaagaagacattttttctgaacggatttatgtctttacaccgacaggggccgttcaggagttaccaaaagaatcaggtcctattgattttgcttatgcgatccatacgcaaatcggtgaaaaagcaacaggtgccaaagtcaatggacgtatggttcctctcactgccaagttaaaaacaggagatgtggttgaaatcatcaccaatgccaattcctttggccctagtcgagactgggtaaaactggtcaaaaccaataaggctcgcaacaaaattcgtcagttctttaaaaatcaagacaaggaattgtcagtgaataaaggccgtgatttgttggtgtcttattttcaagagcagggctacgttgccaataaataccttgacaaaaaacgcattgaagccatccttccaaaagtcagtgtgaagagcgaagaatcactctatgcagccgttgggtttggtgacattagtcctatcagtgtctttaacaagttaaccgaaaaagagcgccgtgaagaagaaagggccaaggctaaagcagaagctgaagaattggttaagggcggtgaggtcaaacacgaaaacaaagatgtgctcaaggttcgcagtgaaaatggagtcattatccaaggagcatcaggcctcttgatgcggattgccaagtgttgtaatcctgtacctggtgatcctattgacggctacattaccaaagggcgtggcattgcgattcacagatcggactgtcataacattaagagtcaagatggctaccaagaacgcttgattgaggtcgagtgggatttggacaattcgagtaaagattatcaggctgaaattgatatctatgggctcaatcgtagtggtctgcttaatgatgtgctccaaattttatcaaactcaaccaagagcatatcgacagtcaatgctcagccgaccaaggacatgaagtttgctaatattcacgtgagctttggcattccaaatctgacgcatctgaccactgttgtcgaaaaaatcaaggcagttccagatgtttatagcgtgaagcggaccaatggc

SEQ ID NO: 1604 - protein, 743 aa, Streptococcus pyogenes
MRNEMAKIMNVTGEEVIALAATYMTKADVAFVAKALAYATAAHFYQVRKSGEPYIVHPIQVAGILADLHLDAVTVACGFLHDVVEDTDITLDEIEADFGHDARDIVDGVTKLGEVEYKSHEEQLAENHRKMLMAMSKDIRVILVKLADRLHNMRTLKHLRKDKQERISRETMEIYAPLAHRLGISRIKWELEDLAFRYLNETEFYKISHMMKEKRREREALVEAIVSKVKTYTTQQGLFGDVYGRPKHIYSIYRKMRDKKKRFDQIFDLIAIRCVMETQSDVYAMVGYIHELWRPMPGRFKDYIAAPKANGYQSIHTTVYGPKGPIEIQIRTKDMHQVAEYGVAAHWAYKKGVRGKVNQAEQAVGMNWIKELVELQDASNGDAVDFVDSVKEDIFSERIYVFTPTGAVQELPKESGPIDFAYAIHTQIGEKATGAKVNGRMVPLTAKLKTGDVVEIITNANSFGPSRDWVKLVKTNKARNKIRQFFKNQDKELSVNKGRDLLVSYFQEQGYVANKYLDKKRIEAILPKVSVKSEESLYAAVGFGDISPISVFNKLTEKERREEERAKAKAEAEELVKGGEVKHENKDVLKVRSENGVIIQGASGLLMRIAKCCNPVPGDPIDGYITKGRGIAIHRSDCHNIKSQDGYQERLIEVEWDLDNSSKDYQAEIDIYGLNRSGLLNDVLQILSNSTKSISTVNAQPTKDMKFANIHVSFGIPNLTHLTTVVEKIKAVPDVYSVKRTNG

SEQ ID NO: 1605 - DNA, 2400 bp, Streptococcus agalactiae
atgtcaaaacattatttttcaaaaagcgtattcgctttaactgtcttaacagctacagcaacaagtggtttagctgttcaagcagaagacattgttacaacaccaagttcaacctctacaaaggttgaatcaactacccccactagcacaattgcagaggaaaagtcaaacgttacttctactccaactgcaataactgatgcttcaacagccacaagcacaaataccactaccaataaccaaaatccacagcctgttgccacagaagccacaactagtgatctcaaacctattgaaggtgaaaaagttgaccttcgcatcatgtcaaccacagacctacacaccaatttagttaactatgattattatcaagataaagaatctcaaaaaatagggttagcaaaaactgctgtccttattgaagaagcaaaaaaagaaaatcctaataccgtcttagttgataacggagatgtcattcaagggacacctttaggaacttataaagcaatcgttaaacctgtcgcagaaaatgaagaacatcctatgtaccaagccatgaatgctcttggttatgatgcatcaacactaggtaatcatgagtttaattacggtttagattacctcaaaaaaatcattgctacagccaaccttccaatcctcaacgcaaatgttttggatttcaaaacacatcaaccagtttttaaaacttatgacatcattactaaaaccttcaaagattcaacaggaagagctgttgcactaaatattgggattacaggaattgtacctcctcaaatcttaaactgggacaaggctaacctagagggaaaggttattgtcaaagattcagttaaagcaatcgaagaaatcgttcctactatgcgtgctaaaggagcagatgtcattctcgttttatcacactctggcattggagatgatcgatatgaagaaggtgaagaaaacgttggctatcaaattgccagcatcaagggagtggatgccgttgttacgggacactcacacgctgaatttccatcaggtaacggtactggcttctatgaaaaatacactggagttgatggtatcaatggaaaaataaatggaacacctgttacaatggcaggcaagtacggggatcatcttggtattattgatttaggacttagttatactaatggaaaatggcaagtctccgaaagtagtgctaaaatccgtaaaattgatatgaactcaacaactgctgacgagcgtatcattgcattggctaaggaagcacacgatggcactatcaactatgttcgccaacaagtaggtacaacaactgcgccaattacaagttactttgcactagttaaagatgacccttcagttcaaattgttaacaacgctcaacgttggtacgttgcaaatgaattgaaaggaacacctgaggcaaatttaccacttctatctgctgcagcaccatttaaagctggaacacgcggcgatgctaccgcatatactgatattccagctggacctgttgcaattaaaaacgtagctgatctttacctttatgataatgttactgcacttttaaaagtgaccggagcagacttacgtgaatggttagaaatgtccgctggtcaatttaaccaaattgaccctaacaataaagcaccacaaaatattatcaataccgaatatcgtacctataattttgacgttattgacggcttgacttataaatttgatattacacaacctaataaatacaataaagatggaaaagttgttaatagtcaagctagtcgagtacgcgatttaatgtacaatggtaagcctgttgcagacaaacaagagtttatgattgtgaccaataactaccgtgctagtggtaccttccctggggctaaaaatgccacaatgaaccgtttgctgaacttagaaaatcgccaaactattatcaactatattatttcagagaaaaccatcaatcctacagctgataataactggggcttcacagagtctattaaagaccttgatttacgattccaaacagccgataaagctaaaaatcttgttactaatagcaaggatattcagtatatcgctagttctaccaaagatgaaggatttggtgattatcgatttgtctatactgaacaagaaaaagtagaccttactgagccatcacatcaagaaaagttaagccaaatagaaaaacaaaaaattcaccacatggttgcaactgcttatacaaaagcaaaagcttctccaaatattacaggcactgtctatacacaacagaaagaaaaaacattacctaaaactggacaagaaaaacaatcttatctggctttctttggtgtcgcaatacttggactcgtgggaagtttacttaaaaagaaacaaata

SEQ ID NO: 1606 - protein, 800 aa, Streptococcus agalactiae
MSKHYFSKSVFALTVLTATATSGLAVQAEDIVTTPSSTSTKVESTTPTSTIAEEKSNVTSTPTAITDASTATSTNTTTNNQNPQPVATEATTSDLKPIEGEKVDLRIMSTTDLHTNLVNYDYYQDKESQKIGLAKTAVLIEEAKKENPNTVLVDNGDVIQGTPLGTYKAIVKPVAENEEHPMYQAMNALGYDASTLGNHEFNYGLDYLKKIIATANLPILNANVLDFKTHQPVFKTYDIITKTFKDSTGRAVALNIGITGIVPPQILNWDKANLEGKVIVKDSVKAIEEIVPTMRAKGADVILVLSHSGIGDDRYEEGEENVGYQIASIKGVDAVVTGHSHAEFPSGNGTGFYEKYTGVDGINGKINGTPVTMAGKYGDHLGIIDLGLSYTNGKWQVSESSAKIRKIDMNSTTADERIIALAKEAHDGTINYVRQQVGTTTAPITSYFALVKDDPSVQIVNNAQRWYVANELKGTPEANLPLLSAAAPFKAGTRGDATAYTDIPAGPVAIKNVADLYLYDNVTALLKVTGADLREWLEMSAGQFNQIDPNNKAPQNIINTEYRTYNFDVIDGLTYKFDITQPNKYNKDGKVVNSQASRVRDLMYNGKPVADKQEFMIVTNNYRASGTFPGAKNATMNRLLNLENRQTIINYIISEKTINPTADNNWGFTESIKDLDLRFQTADKAKNLVTNSKDIQYIASSTKDEGFGDYRFVYTEQEKVDLTEPSHQEKLSQIEKQKIHHMVATAYTKAKASPNITGTVYTQQKEKTLPKTGQEKQSYLAFFGVAILGLVGSLLKKKQI

SEQ ID NO: 1607 - DNA, 2049 bp, Streptococcus pyogenes
ttgatctataacgattacgttaacttattaggagattttatgaaaaaatattttattttaaaaagtagtgtattgagtatcctgactagttttactctattagttacagatgttcaagcagatcaagttgatgtgcaattccttggcgtcaatgattttcacggcgctcttgataataccggaacagcttacacaccaagtggtaaaataccaaatgctgggacggctgctcaattaggtgcttatatggatgacgctgagatagacttcaagcaagcaaatcaagacggaacaagtatacgtgttcaagctggagatatggtcggagccagtcctgctaactctgcacttttacaagatgagcctactgtcaaagtctttaacaaaatgaaatttgaatatggcactcttggtaatcatgaatttgacgaaggactagatgaatttaaccgtatcatgacaggtcaagcgcctgatcctgaatcaacaattaatgatatcaccaaacaatatgagcacgaagcttcgcatcaaaccatcgtcattgctaatgttattgataaaaaaaccaaggatatcccctatggttggaaaccttatgctataaaagacatagccattaatgacaaaatcgttaagattggcttcattggtgttgtgactacagagattccaaatctcgttttaaagcaaaactatgaacactatcaatttttagatgtagctgaaaccattgccaaatatgctaaagaactacaagaacaacatgttcatgctattgtggttttagctcatgttcctgcaacaagtaaagatggtgttgttgatcatgaaatggctacggttatggaaaaagtgaaccaaatctatcccgaacatagcattgatattatttttgcaggacataatcatcaatacactaatggaactatcggtaaaacacgtatcgttcaagccctctctcaaggaaaagcttatgcagatgtccgtggtacgctagatactgataccaatgattttattaaaactccatcagcaaatgttgttgctgtagcaccaggtatcaaaacagaaaattcagatatcaaagctataataaatcatgctaatgatattgttaaaacagttactgaacgaaaaatcggaactgcaactaattcttcaactatttctaaaacagaaaatattgataaagaatctcctgtcggtaacttagcaacaacggctcagcttactattgctaagaaaacttttccaactgttgactttgctatgaccaataatggtggtattcgaagtgacctagttgtcaaaaatgaccggaccatcacctggggagctgcacaggctgtacaaccatttggtaatatccttcaagtcattcaaatgactggtcaacacatttacgatgtcctaaatcagcaatacgatgaaaaccagacctattttcttcaaatgtcaggtttaacatacacttatacagataatgatcctaagaactctgatacccccttcaagatagttaaggtttataaagacaatggtgaagaaattaacttaacaactacttacaccgttgttgtcaacgactttctttatggtggtggtgatggcttttcagcatttaaaaaagctaaattaatcggagctattaacacagatactgaagctttcatcacatatatcacaaatttagaagcatcaggtaaaactgttaatgctactataaaaggggttaaaaattatgtaacttcaaaccttgaaagttcgacaaaagttaatagtgctggtaaacacagtatcattagtaaggtttttagaaatcgtgatggcaatacagtgtctagtgaagtcatttcagaccttttgacttctactgaaaacactaataacagccttggcaaaaaagaaacaacaacaaacaaaaatactatctctagttccactcttccaataacaggggacaattataaaatgtctcctattatgacaatccttgccttgataagcttaggtggactaaacgcttttattaaaaaaaggaaatcc

SEQ ID NO: 1608 - protein, 683 aa, Streptococcus pyogenes
LIYNDYVNLLGDFMKKYFILKSSVLSILTSFTLLVTDVQADQVDVQFLGVNDFHGALDNTGTAYTPSGKIPNAGTAAQLGAYMDDAEIDFKQANQDGTSIRVQAGDMVGASPANSALLQDEPTVKVFNKMKFEYGTLGNHEFDEGLDEFNRIMTGQAPDPESTINDITKQYEHEASHQTIVIANVIDKKTKDIPYGWKPYAIKDIAINDKIVKIGFIGVVTTEIPNLVLKQNYEHYQFLDVAETIAKYAKELQEQHVHAIVVLAHVPATSKDGVVDHEMATVMEKVNQIYPEHSIDIIFAGHNHQYTNGTIGKTRIVQALSQGKAYADVRGTLDTDTNDFIKTPSANVVAVAPGIKTENSDIKAIINHANDIVKTVTERKIGTATNSSTISKTENIDKESPVGNLATTAQLTIAKKTFPTVDFAMTNNGGIRSDLVVKNDRTITWGAAQAVQPFGNILQVIQMTGQHIYDVLNQQYDENQTYFLQMSGLTYTYTDNDPKNSDTPFKIVKVYKDNGEEINLTTTYTVVVNDFLYGGGDGFSAFKKAKLIGAINTDTEAFITYITNLEASGKTVNATIKGVKNYVTSNLESSTKVNSAGKHSIISKVFRNRDGNTVSSEVISDLLTSTENTNNSLGKKETTTNKNTISSSTLPITGDNYKMSPIMTILALISLGGLNAFIKKRKS

SEQ ID NO: 1609 - DNA, 90 bp, Streptococcus agalactiae
ttggcctcagtttttagtgatgactatatttgtttctttttaagtaaacttcccacgagtccaagtattgcgacaccaaagaaagccaga

SEQ ID NO: 1610 - protein, 30 aa, Streptococcus agalactiae
MASVFSDDYICFFLSKLPTSPSIATPKKAR

SEQ ID NO: 1611 - DNA, 1125 bp, Streptococcus agalactiae
ttgaattgcgaggaacttctagcgacgttgaacgtatcgcaaatattatcgttgaaacattatcgaactttaaagcctaaaggaaatagtatggaaacaacattaaactacattaaaaccctgacatcaatcccttcaccaacagggtttacccaaacaatcatgacctatatcatcaaagaattggaagcgtttggctactcaccaattcgcacaaacaagggaggcgtcatggtttctctaaaaggaaaaaatgatactaaacatcgcatgataactgctcaccttgatacacttggtgctatggttagggccatcaaaccagatggtcggttaaaaattgaccttattggtggatatacatacaatgccattgaaggagaaaactgtactatacacctctcaaaaaatggtaaagaaatttctggaactgctcttattcatcaaactagtgtccatgtttacaaagacgctggaactgctgaacgtaatcaaacaaatatggaaattcgtttagatgagaaagtaacaactgctgacgaaacacgtgctttaggcatccaggtcggtgatttcatttcatttgatccgcgtacaatcataacagacagcggctttattaaatcacgttacctagatgacaaggtatccgctggtatcctaatggaacttctttctgtttacaagaaagaagacattcaacttccttatactactcatttctactttagtgcctttgaagagctaggacatggagcaaattcaagcatcccaaatgaaactgtagaatatctagcagttgatatgggagctatgggagacgatcaagaaactgacgaatatactgtctctatctgtgttaaagatgcttctggtccttatcattatgaattacgtcaacatcttgtttctctagctgaaaacaataatattccttataaacttgatatttatccttattatggtagtgacgcctccgctgccatgcgtgctggtgcggaagttaaacacgcgctacttggtgcaggtattgaatctagtcattcttatgaacgtacccatatcgattctattcaagcaactgaactcttagtggatgcctatctcaaaagcaatatggtggac

SEQ ID NO: 1612 - protein, 375 aa, Streptococcus agalactiae
MNCEELLATLNVSQILSLKHYRTLKPKGNSMETTLNYIKTLTSIPSPTGFTQTIMTYIIKELEAFGYSPIRTNKGGVMVSLKGKNDTKHRMITAHLDTLGAMVRAIKPDGRLKIDLIGGYTYNAIEGENCTIHLSKNGKEISGTALIHQTSVHVYKDAGTAERNQTNMEIRLDEKVTTADETRALGIQVGDFISFDPRTIITDSGFIKSRYLDDKVSAGILMELLSVYKKEDIQLPYTTHFYFSAFEELGHGANSSIPNETVEYLAVDMGAMGDDQETDEYTVSICVKDASGPYHYELRQHLVSLAENNNIPYKLDIYPYYGSDASAAMRAGAEVKHALLGAGIESSHSYERTHIDSIQATELLVDAYLKSNMVD

SEQ ID NO: 1613 - DNA, 495 bp, Streptococcus agalactiae
atggtagccacgctcattattatcaggggaaattcagctagcggaaagtctacaatagctaagcaacttcaagccgaattaggggaaaatacccttctcttatctcaggattaccttcgtagagagatgttaggaactaaggatggtgaaaatactactaccattccccttttgatcaatttactaaattatggttaccataactgttcctacatcatccttgaaggcatacttcgttctgattggtatacgcctgtttggaaacatattttaaaacataaccccaacaatacttatgcttattactatgatttaagctttcaagaaactgttaaaagacattcaactcgacttaaatctttagaatttggagaagattctcttgcaagatggtggcttgagaaagatttcttaaaagagatacctgaaaaaatattaacaaaagctatgagtttagaggatgtcaaaaaacttataatgaccgacgttttacct

SEQ ID NO: 1614 - protein, 165 aa, Streptococcus agalactiae
MVATLIIIRGNSASGKSTIAKQLQAELGENTLLLSQDYLRREMLGTKDGENTTTIPLLINLLNYGYHNCSYIILEGILRSDWYTPVWKHILKHNPNNTYAYYYDLSFQETVKRHSTRLKSLEFGEDSLARWWLEKDFLKEIPEKILTKAMSLEDVKKLIMTDVLP

SEQ ID NO: 1615 - DNA, 1035 bp, Streptococcus agalactiae
atgaaagaaaaacagtcgaaaaggcttatttatatactactggttgtttccattatttttataagtgtttttacatacagtattagccagccttctaaactacttccaccaaaagaattagttattctaagtccaaatagtcaagccattttaacaggaacgattccagcttttgaggaaaaatacggtataaaagttaagcttattcaaggtgggacagggcaactaatagatagattaagtaaggagggtaagcagttgaaggcggatattttctttggaggaaattatacgcaatttgaaagtcataaggcattgtttgagtcttacgtatcaaagaatgttcatactgttattccagactatatccatccaagtgatacggcgacaccttatactataaatgggagtgtcttgattgtaaataacgaattagctaagggacttaccatcaagagttatgaagatttattacagccttccttaaaaggtaaaattgcctttgcagatccgaatacttcctctagtgctttctcacaactcactaatatactcttggccaagggtggttacaccaatccaaaagcgtggaactatgttaaaaagctacaacataatattaatgctatcaaatcttctagctcttcagaagtttatcaatcagttgcagaaggaaaaatgattgtggggctgacttacgaagaccctagtgtcaatttgcaaaaaagtggtgccaatgtttctattgtatatccgacagaagggacagtttttgtcccatcttcggttgcaattataaagaatgctccttctatgaaagaagcaaagttatttattaattttatgctttctttagatgttcaaaatgcctttgggcagtcaacgagtaaccgacctattcgtaaagatgcccaaacgagtaatggcatgaaagctttaaaggatattgctactcttaaagaagattatcgctatgtcactaagcataagggccaaatccttaaaacctataatcgtattcgtagaaatgctgat

SEQ ID NO: 1616 - protein, 345 aa, Streptococcus agalactiae
MKEKQSKRLIYILLVVSIIFISVFTYSISQPSKLLPPKELVILSPNSQAILTGTIPAFEEKYGIKVKLIQGGTGQLIDRLSKEGKQLKADIFFGGNYTQFESHKALFESYVSKNVHTVIPDYIHPSDTATPYTINGSVLIVNNELAKGLTIKSYEDLLQPSLKGKIAFADPNTSSSAFSQLTNILLAKGGYTNPKAWNYVKKLQHNINAIKSSSSSEVYQSVAEGKMIVGLTYEDPSVNLQKSGANVSIVYPTEGTVFVPSSVAIIKNAPSMKEAKLFINFMLSLDVQNAFGQSTSNRPIRKDAQTSNGMKALKDIATLKEDYRYVTKHKGQILKTYNRIRRNAD

SEQ ID NO: 1617 - DNA, 1044 bp, Streptococcus pyogenes
atgttaaaactcaaacgcaaatggctattaagctttttgttagtaataattattctagcaatcgttaacgttgcaatgtatatattctcatcgtcaaaaaaagatagtgctaaagaattagttatcttgactcctaatagccaaactattttaacagggactattccagcctttgaggaaaagtatggggttaaagtaagattaatccaaggtgggacgggccaacttattgatcaattaggtcgaaaagataaaccattaaacgctgatattttctttggtggcaattacactcaatttgaaagccataaagatttatttgaatcttatgtttctccgcaggtttctactgtcatttcagattaccaattgcctagtcatcgcgcaaccccatatacgatcaatggcagtgtactgattgttaataacgaattagcaagaggacttcatattaccagttatgaggatttgctacaaccagctttaaaaggcaaaattgcttttgctgatcccaacagttcatcaagtgccttctcacagctgactaatatattgttagctaagggggggtacacaaacgctgacgcttgggcttacatgaagcgcttgttggtcaatatgaattctattagggctacgagttcttcagaagtctatcaatctgtcgctgagggtaagatgattgttgggctaacctacgaagatccttgtatcaacctgcaaaaaagtggtgccaatgtttccattgtttatccaaaagaaggaacggtgtttgtgccctcctctgttgctattatcaaacatgcgccaaacatgacagaggctaagctctttattaattttatgttatcacgtgatgtgcaaaatgcctttggccaatcaaccagtaaccgacccattcgtcaagatgcccaaaccagtcacgacatgaaagccttagaaacgatagctactttgaaagaggattatgcttatgttaccaagcacaagaaaaaaatagtggctacgtacaaccagttgcgccaacggttggaaaaagctaag

SEQ ID NO: 1618 - protein, 348 aa, Streptococcus pyogenes
MLKLKRKWLLSFLLVIIILAIVNVAMYIFSSSKKDSAKELVILTPNSQTILTGTIPAFEEKYGVKVRLIQGGTGQLIDQLGRKDKPLNADIFFGGNYTQFESHKDLFESYVSPQVSTVISDYQLPSHRATPYTINGSVLIVNNELARGLHITSYEDLLQPALKGKIAFADPNSSSSAFSQLTNILLAKGGYTNADAWAYMKRLLVNMNSIRATSSSEVYQSVAEGKMIVGLTYEDPCINLQKSGANVSIVYPKEGTVFVPSSVAIIKHAPNMTEAKLFINFMLSRDVQNAFGQSTSNRPIRQDAQTSHDMKALETIATLKEDYAYVTKHKKKIVATYNQLRQRLEKAK

SEQ ID NO: 1619 - DNA, 771 bp, Streptococcus agalactiae
atgtatagattacttatcgttgaggatgagcaccttattcgtaagtggttacgctatgctattgattatcaatcattgaatattttagtggttggtgaagcaaaagatggtaaagaaggagctcaattaattcaggaagagcagccagacattgttttaagtgatattaatatgccaattatgacagcattcgatatgtttgaggcaaccaaaggacaatcttatgccaaaattattttatctggctatgctgattttccaaatgcgcaatcagctattcactatggcgttcttgaatttttaacaaaaccactagaaaagcaagctttgattgattgtttaaaaacaattatggctagaattgaggaacataaggagaagcacctacaagagcatacagaattgtatttacctctaccacaagctaatgaccaagttcctgaagttattaaagatatgctagcatggattcatagccattttcatgggaaaattgtgattagccagttagctcacgatttaggttacagtgaaagttatctttacacagtcactaaaaagcaccttcatataactttgagtgattatataaatcaatatcgtattaatcaagccattcagttgatgtttagagaaccagacctaatggtttaccaaattgcagaagctgttggtatttatgattatcgttattttgatagggtttttaaaaagtacttgggtcagacagtaaaagcgtttaaggaagaacatatttttaaacaaatggat

SEQ ID NO: 1620 - protein, 257 aa, Streptococcus agalactiae
MYRLLIVEDEHLIRKWLRYAIDYQSLNILVVGEAKDGKEGAQLIQEEQPDIVLSDINMPIMTAFDMFEATKGQSYAKIILSGYADFPNAQSAIHYGVLEFLTKPLEKQALIDCLKTIMARIEEHKEKHLQEHTELYLPLPQANDQVPEVIKDMLAWIHSHFHGKIVISQLAHDLGYSESYLYTVTKKHLHITLSDYINQYRINQAIQLMFREPDLMVYQIAEAVGIYDYRYFDRVFKKYLGQTVKAFKEEHIFKQMD

SEQ ID NO: 1621 - DNA, 786 bp, Streptococcus pyogenes
atgtacaaattagtcattattgaagatgaacatattattaggaaatggttgcgatacgctattgattataaagctttagatattttggtcattggcgaggctaaagatggcaaagaaggagctgttttaatcaaagagagtcaaccagatatcgttttaaccgatattaacatgcccatcatgacagcttttgacatgtttgaagtaacaaaagatcaaacttacgccaaaattattttatctggctatgctgattttccaaatgcaaggtctgccatacactacggtgtacttgaatttttaacaaaaccgattgaaaaagcagctctttgggaatgtcttcaaaccattattgctaaaatagaaaagcaaaaggggtctaatcaaaaaacagatgcttgcgtctatattcccttaccccagatgactgatcagattcctgaagtagtcaaagatattttggagtgggtacatgctcattttcaagacaagatcagcacgagccgcctagctcatgacttagggtatagtgagagttatatctatcaaaatatcaaaaagcatcttcagatgcctttaagtgattacattaatcaatatcggattaatcaggcaattcaattgatgcaacaagaaccagatttaatggtatatgaaatagcacaagctgtaggtatttatgactatcgctattttgatagggtttttaaaaagtatctaggacaaactgtaaaggcttttaaagaagagcattttatgaaagataccgataggagtaagccatgt

SEQ ID NO: 1622 - protein, 262 aa, Streptococcus pyogenes
MYKLVIIEDEHIIRKWLRYAIDYKALDILVIGEAKDGKEGAVLIKESQPDIVLTDINMPIMTAFDMFEVTKDQTYAKIILSGYADFPNARSAIHYGVLEFLTKPIEKAALWECLQTIIAKIEKQKGSNQKTDACVYIPLPQMTDQIPEVVKDILEWVHAHFQDKISTSRLAHDLGYSESYIYQNIKKHLQMPLSDYINQYRINQAIQLMQQEPDLMVYEIAQAVGIYDYRYFDRVFKKYLGQTVKAFKEEHFMKDTDRSKPC

SEQ ID NO: 1623 - DNA, 135 bp, Streptococcus agalactiae
atggcgctagaattttttactgcgatgcgatcggctagaactctagatttttgtcgtaaaatcacaaaaataataactgatgatactagagaaaaaaggacgaccagagttactggtatcaggggacgatacatg

SEQ ID NO: 1624 - protein, 45 aa, Streptococcus agalactiae
MALEFFTAMRSARTLDFCRKITKIITDDTREKRTTRVTGIRGRYM

SEQ ID NO: 1625 - DNA, 1653 bp, Streptococcus agalactiae
atggaaatgagaggatatagaatggaagaacgctttaagaaacgactacaagatgatatctctaaacatttttcccgccagtctttaattttatccttgttattgattgcacttttcgtccttttttctttagcgcctcaacagataggtctttataaagatgttaattcagtttcctatagttataagcaattgattcaaaaacatgataccttattagatgacttaggtaaaaatagtttgaaaccatttgtctcaggacacttaggaagtgctgatttgagtaagcaatattatcatttaaggaatcatttacaaagtcaaacagaacttttagtattctcacctaatcaagaacttttgtttgctagtaattcacatttaggtaatttttttagtaagtctatttacattagtgaagttttagataaggctaaaataaatcaaaggctactaaaaattattgtggatagtgagggagggcattaccttgcactcattaagccaattatagttaataaaaaagtttcaggttatgcctttttattgatgaatgggaaagactttttacttccaacgaaggctattaactcagacttgattattgccgatcagctaaataatagctttacttttactaatcgtgattttatctcctctagtttagataaggtagatagtcaattcttaactagatattttagttttcacgatcatcgagcttttgttgttaggaaagtagctctgcaagacaatatcctactttacatgtatcgtcccctgataccagtaactctggtcgtccttttttctctagtatcatcagttattatttttgtgattttacgacaaaaatctagagttctagccgatcgcatcgcagtaaaaaattctagcgccataaatcaaatggtgctagatatggatgccatttcccgccaagaaaaatctagtattgagcttgatagtcaagatgaatttcaatatctatctgtgcaaatcaatcagatggtttcacggttaaaagatttacatgagaaaactcttgatttggaaacacaaaagttgttgtttgaaaagaggatgttagaagctcagtttaatcctcacttcctttataatacccttgagacaattttaataaccagtcactatgattcacaattaacagaaagaatcgttatacaactaacaaaattattgcgctatagccttagtggtagcacagaagcagctgtgcttaaggatgatttagcaatcattgaatcctaccttttgattaatcaagtgagatttgaagaattaacttacactatttcagtatctcctgaacttgaacacatgcgtgtaccaaaacttttcttgttaccgctaattgagaatgctattaaatatggcttaaaagaacgtcatgatgtagcaataaacatagatatttggcaagatagtgatggaatttggtttactgtttcaaataatggatcaggtattagtttggctaggcaacaagccatacgtacaatgttaagatcaactcactcgcatcatgggcttattaattcttatagacgattacaatatcaattttcaacagtattgttagagtttacgaagacagatgatgcttttcgagttagctatatagtaaaggag

SEQ ID NO: 1626 - protein, 551 aa, Streptococcus agalactiae
MEMRGYRMEERFKKRLQDDISKHFSRQSLILSLLLIALFVLFSLAPQQIGLYKDVNSVSYSYKQLIQKHDTLLDDLGKNSLKPFVSGHLGSADLSKQYYHLRNHLQSQTELLVFSPNQELLFASNSHLGNFFSKSIYISEVLDKAKINQRLLKIIVDSEGGHYLALIKPIIVNKKVSGYAFLLMNGKDFLLPTKAINSDLIIADQLNNSFTFTNRDFISSSLDKVDSQFLTRYFSFHDHRAFVVRKVALQDNILLYMYRPLIPVTLVVLFSLVSSVIIFVILRQKSRVLADRIAVKNSSAINQMVLDMDAISRQEKSSIELDSQDEFQYLSVQINQMVSRLKDLHEKTLDLETQKLLFEKRMLEAQFNPHFLYNTLETILITSHYDSQLTERIVIQLTKLLRYSLSGSTEAAVLKDDLAIIESYLLINQVRFEELTYTISVSPELEHMRVPKLFLLPLIENAIKYGLKERHDVAINIDIWQDSDGIWFTVSNNGSGISLARQQAIRTMLRSTHSHHGLINSYRRLQYQFSTVLLEFTKTDDAFRVSYIVKE

SEQ ID NO: 1627 - DNA, 1647 bp, Streptococcus pyogenes
atgcgaggtgaacaggtggaagaacattttaaaaaacaattacaagatgatatttctagacatttttcgtaccaatcgttaatgttatcattgttgctaattggtctttttattattttttcattagcgccacaacaattaggcctctatcgtgatatcaatgccactgcaacccgttatcaccgtttgattagcaaacaagaagccttgctggatgacttagggaaaaatagcttactaccttttttaaataaaaacctcagcactgctgatttaagcaagcactattttcatttgcgccatagcagccaaacgtcaccagaacttttactattttcacctagtcaagaccttttatttgctagtaacccacatttaggaaatgtttttagtaaatctgtttatattcaagaagtcttgagagcaactcattctccaaaaaccttgtttaaagatgctatggatagtgaagatggtcactacttgatgatcattatgccaatgatagatcaaaaccaactaaagggatatgcttttttagtgatgagtggcaaagattttcttcatcctacaaaaacattgacgtcagagttggtcattgctgataagctggacaatacgtttacgttttccaatcgtgagtttatagcatctagtctagataagatcaatagccagtatttacaccattattttgtttttcaagataatcgagcctttatcacaagaaaggttgccttacaaggaggtctttggctttacatgtataggcccttgattccaatggtatcggtgatgttattttcacttatttcatcagctgttatctttgtgattttgcaacgtaaatcaagtggtttagctaaccgaattgcagctaaaaattcaagagcaatcaatcaaatggttagagatatgagtgcgatctctcggcaagaaaaaagacgtattgaccttgagagtcaagatgaatttcaatatttatctgatcaaatcaatcaaatggtagagcgattgcaacagttacatgataaaacgttagatttggaaactcaaaaattattatttgaaaaacggatgttagaagctcaattcaatccgcatttcctctacaatacgctagaaaccattttgattacgagccattatgattctgccctaacagaaaaaattgttatccaattgacaaaattgttgcggtatagtctcacggattctagcaaacctgtcttgctcaaagatgatttaagtgtcatcgagtcttatttagtgattaatcaggtgcggtttgaagaattgcaatatagcattaacctatccccagaccttgatagtcttgaagtgcctaaattgttcttgttacctttgatagaaaatgccatcaaatatggcttgaaagaacgacacgatgtcaagattaacattgcttgttattatcaagatgaccacattattttttctgtgagagataatggttcgggaattgatgctcatcaccaaaaagtgattcgagagcaattggaagctggagagtcacaccatgggttaattaactcttatcgtcggcttaagtatcatttttcagaagtatccttggtttttgatcaaggtgataaacagtttaatgttagttaccatgttaaggag

SEQ ID NO: 1628 - protein, 549 aa, Streptococcus pyogenes
MRGEQVEEHFKKQLQDDISRHFSYQSLMLSLLLIGLFIIFSLAPQQLGLYRDINATATRYHRLISKQEALLDDLGKNSLLPFLNKNLSTADLSKHYFHLRHSSQTSPELLLFSPSQDLLFASNPHLGNVFSKSVYIQEVLRATHSPKTLFKDAMDSEDGHYLMIIMPMIDQNQLKGYAFLVMSGKDFLHPTKTLTSELVIADKLDNTFTFSNREFIASSLDKINSQYLHHYFVFQDNRAFITRKVALQGGLWLYMYRPLIPMVSVMLFSLISSAVIFVILQRKSSGLANRIAAKNSRAINQMVRDMSAISRQEKRRIDLESQDEFQYLSDQINQMVERLQQLHDKTLDLETQKLLFEKRMLEAQFNPHFLYNTLETILITSHYDSALTEKIVIQLTKLLRYSLTDSSKPVLLKDDLSVIESYLVINQVRFEELQYSINLSPDLDSLEVPKLFLLPLIENAIKYGLKERHDVKINIACYYQDDHIIFSVRDNGSGIDAHHQKVIREQLEAGESHHGLINSYRRLKYHFSEVSLVFDQGDKQFNVSYHVKE

SEQ ID NO: 1629 - DNA, 825 bp, Streptococcus agalactiae
atgaaatcacaggataatttgactaaagaagaccgtaaaatgcttcgctcagtcttctggcgctcatggacgatgaatgccagtcgtactggggcaacacaataccacgcagtaggagttatttatactttactaccagtcatcaatcgtttttataagactgataaggataaagcagaggcactggtccgtcatacaacatggtttaatgccaccatgcacattaataattttattatgggtcttgttgcatctatggaaaagaaaaacagtgaagatcctgattttgacgctagtgctatcaccgcagttaaggcttctttgatgggacctatatctggtgttggtgattcattcttttggggaattctaagggttattgcggcaggtatcggtatctccttagcaagtacaggctcagccatgggagctgttgtctttctactcttgtataacattccagcttttctgattcattattatagtctctatggaggttactctgtaggtgcagggtttatcaaaaaattgtatgaatcaggtggtattaaaattgttactaagacttcaagtatgcttggtttaatgatggtaggctcaatgactgcttcaaatgttaaattcaagacaatcttaacggtagcagctaaaggagctaaggaagcagcttccatacaaagttaccttgaccaattatttgttggcgtagtgccactgttggtaacgatattagccttctggcttctacgtaaaaaagtcaatatcaactggatcatgtttggtattatggtgttaggtattgtacttggtctcttaggtatttgc

SEQ ID NO: 1630 - protein, 275 aa, Streptococcus agalactiae
MKSQDNLTKEDRKMLRSVFWRSWTMNASRTGATQYHAVGVIYTLLPVINRFYKTDKDKAEALVRHTTWFNATMHINNFIMGLVASMEKKNSEDPDFDASAITAVKASLMGPISGVGDSFFWGILRVIAAGIGISLASTGSAMGAVVFLLLYNIPAFLIHYYSLYGGYSVGAGFIKKLYESGGIKIVTKTSSMLGLMMVGSMTASNVKFKTILTVAAKGAKEAASIQSYLDQLFVGVVPLLVTILAFWLLRKKVNINWIMFGIMVLGIVLGLLGIC

SEQ ID NO: 1631 - DNA, 825 bp, Streptococcus pyogenes
atgacatcacaagataatttgactaaagaagaccgtaaaatgcttcgctcagtcttttggcgctcatggacgatgaatgctagtcgtactggggcaacacaataccacgcagtaggggttatttacactttactaccagtcatcaatcgtttttataagactgataaggataaagcagaggcactggtccgtcatacaacatggttcaatgccaccatgcacatcaataactttatcatgggtcttgtggcatcgatggaaaagaaaaacagtgaagatcctgattttgatgctagtgctattacggcggtaaaagcatctctaatgggacctatctccggagttggagattccttcttctggggaattttaagggttattgcggcaggtatcgggatttccttggcaagtgcaggctcagccatgggagctgttgtcttcttactcttgtacaatattcctgcttttattattcactactatagcctttatggtggttattctgtaggtgcaggatttatcaaaaaactttacgaatctggtggtataaaaatcgtcactaaaacctcaagtatgcttgggttaatgatggtaggctcaatgacggcttcaaatgtaaaatttaaaacgattcttacagttgctgcgaaaggtgccaaagaagcagcttctattcaagattaccttgaccaattgtttattggtattgtaccattaatggtaacactagcagctttttggcttctacgaaagaaagtgaatatcatctggattatgtttggtatcatgttccttggcattatccttggacttttaggtatttgc

SEQ ID NO: 1632 - protein, 275 aa, Streptococcus pyogenes
MTSQDNLTKEDRKMLRSVFWRSWTMNASRTGATQYHAVGVIYTLLPVINRFYKTDKDKAEALVRHTTWFNATMHINNFIMGLVASMEKKNSEDPDFDASAITAVKASLMGPISGVGDSFFWGILRVIAAGIGISLASAGSAMGAVVFLLLYNIPAFIIHYYSLYGGYSVGAGFIKKLYESGGIKIVTKTSSMLGLMMVGSMTASNVKFKTILTVAAKGAKEAASIQDYLDQLFIGIVPLMVTLAAFWLLRKKVNIIWIMFGIMFLGIILGLLGIC

SEQ ID NO: 1633 - DNA, 807 bp, Streptococcus agalactiae
atgataatgccagcgacgatggcagctttagctgtattgatttgttttgggggaaattacttaacaggtcaaagtatgatggagagaccacttgtagttggtcttgtaacaggaatgctactaggtgatattaaggttggtatcctaatgggagcctccctagaagcgctatttttgggaaacgttaatattgggggtgttattgccgcagagccagtaacagcaacagcgatggcaacaacttttaccattatttcaaacattgatcaaaaagcagcaatgactctagctgttccgattggaatgttggcagcatttgttgttatgtttttgaaaaacgtcttcatgaatatctttgcaccgatggtggataaagctgcagccgcaaaccatcaaggtaaacttgtgatgcttcactatggtacatggattatttactatctcattatcgcttctatttctttcattggtattttagtaggtagtgggcctgttaatagttttgtccatcatattcctcaaaacctgatgaatggtttgagtgcggcgggaggcctccttccagctgttggttttgccatgctgatgaaattattatggacaaataaattagctgttttttacttgcttggttttgttttaacagcttatttaaaattaccagcggttgcagttgctgccctaggagcagttatttgcgtcattagttcacaacgtgatatagaattagacgcaattactagaggtgcgatcagtaaacagacaacctttgactctaaagaatcagaagaggaggacttcttcgca

SEQ ID NO: 1634 - protein, 269 aa, Streptococcus agalactiae
MIMPATMAALAVLICFGGNYLTGQSMMERPLVVGLVTGMLLGDIKVGILMGASLEALFLGNVNIGGVIAAEPVTATAMATTFTIISNIDQKAAMTLAVPIGMLAAFVVMFLKNVFMNIFAPMVDKAAAANHQGKLVMLHYGTWIIYYLIIASISFIGILVGSGPVNSFVHHIPQNLMNGLSAAGGLLPAVGFAMLMKLLWTNKLAVFYLLGFVLTAYLKLPAVAVAALGAVICVISSQRDIELDAITRGAISKQTTFDSKESEEEDFFA

SEQ ID NO: 1635 - DNA, 807 bp, Streptococcus pyogenes
atgttagtaccagcaacaatggcagctttagctgtattgatttgttttgggggaaattatttaaccggtcaaagcatgatggaaagacccctagtagttggactggtcacaggtcttcttttaggagatatgaaggtcggtatcttaatgggggcctctctagaagctcttttcctaggaaatgtgaatattgggggtgttattgcagctgagcctgtaacagcgactgccatggcaacaacctttaccattatttcacatattgaccaaaaagcagccatgaccctagctgttccaattggaatgttggcagcctttgtggttatgtttttgaaaaacgtcttcatgaatatctttgctccaatggttgataaagctgcagcagctaaccatcaaggtaaactagtgatgctccactatggcacttggattatctattacttaatcattgcctctatttctttcattggtatcttagtaggtagtggacctgttaatgcctttgtggaacacattcctcaaaatctcatgaatggcttgagtgctgcgggaggccttcttccagctgtcggttttgccatgctgatgaaattattgtggaccaacaaattagctgttttttacctattgggctttgtcttaacagcttatttgaaattaccagcggttgcagttgctgccctaggagcagttatttgcgtcattagttcccaacgtgatctagaattagacgcaattactagaggtgcaattagtaaacaaacaacctttgactctaaagaatcagaagaggaggacttcttcgca

SEQ ID NO: 1636 - protein, 269 aa, Streptococcus pyogenes
MLVPATMAALAVLICFGGNYLTGQSMMERPLVVGLVTGLLLGDMKVGILMGASLEALFLGNVNIGGVIAAEPVTATAMATTFTIISHIDQKAAMTLAVPIGMLAAFVVMFLKNVFMNIFAPMVDKAAAANHQGKLVMLHYGTWIIYYLIIASISFIGILVGSGPVNAFVEHIPQNLMNGLSAAGGLLPAVGFAMLMKLLWTNKLAVFYLLGFVLTAYLKLPAVAVAALGAVICVISSQRDLELDAITRGAISKQTTFDSKESEEEDFFA

SEQ ID NO: 1637 - DNA, 489 bp, Streptococcus agalactiae
atgattactcaaattcgtgttgacgaccgtttgattcacgggcaagtggcagttgtatggactaaagaattaaatgcaccacttttagtggtggctaatgatgaagctgcaaaaaatgaaatcacacagatgactcttaaaatggctgtgcctaatggcatgaaattattaatccgttcagttgaagaatcaatagctctatttaaagatccacgtgcaactgacaagcgcatttttgtgattgtcaattctgttaaagatgcctgtacaattgctaaaaatataaccgatttagaagcagtaaacgtcgctaatgtaggacgctttgataagtctgatccagctacaaaagtcaaactaacatcaagtctcttattaaatacagaagagttggaagccgcaaaagaattagccagcttaccagatttagacgtctttaaccaagtattgccttcaaatactaaggttaacttgagtcagttagtcaaa

SEQ ID NO: 1638 - protein, 163 aa, Streptococcus agalactiae
MITQIRVDDRLIHGQVAVVWTKELNAPLLVVANDEAAKNEITQMTLKMAVPNGMKLLIRSVEESIALFKDPRATDKRIFVIVNSVKDACTIAKNITDLEAVNVANVGRFDKSDPATKVKLTSSLLLNTEELEAAKELASLPDLDVFNQVLPSNTKVNLSQLVK

SEQ ID NO: 1639 - DNA, 489 bp, Streptococcus pyogenes
atgattacccaaattcgtgttgacgaccgtttgattcacgggcaagtggcagttgtatggaccaaagagttaaatgcgccgcttttagtagtggctaatgatgaagctgcaaaaaatgaaatcacacaaatgacgcttaaaatggctgtgccaaacggcatgaaactgcttattcgttcagttgaagactcgattaagctctttaatgatccacgcgccaaagacaagcgtatctttgtgattgtcaattctgttaaagatgcttgtgccattgctaaagaagttccagacttagaagctgttaatgtggctaatgtggggcgctttgataagtcagacccagcaagcaaagtcaaagtgacaccaagtcttttacttaacccagaagaaatggcagccgcaaaggaattagtcagtttaccagaacttgatgtctttaaccaagtcttaccatcaaataccaaggtccatttgagccaattagtcaac

SEQ ID NO: 1640 - protein, 163 aa, Streptococcus pyogenes
MITQIRVDDRLIHGQVAVVWTKELNAPLLVVANDEAAKNEITQMTLKMAVPNGMKLLIRSVEDSIKLFNDPRAKDKRIFVIVNSVKDACAIAKEVPDLEAVNVANVGRFDKSDPASKVKVTPSLLLNPEEMAAAKELVSLPELDVFNQVLPSNTKVHLSQLVN

SEQ ID NO: 1641 - DNA, 423 bp, Streptococcus agalactiae
atgaagcggaaattcctaatcggcagtcacggaaaacttgcgagtgggttgcagagttctattgatattctgacaggcaagggacaagagattcagacaatagatgcttacattgatgatagtgactatactaagtctattgtagaatttattgatgagattgcaccagatgaacaggggcttatttttacagatttgttaggtggcagcgttaatcagaaaatggcgactgctgtaatgaatagtgggaaaaataatatttttttaataacgaacagcaatttagcgaccttgttgtcattactatttttgaaacctgaagaggaattaactaaagaagaaattgtaaccgttatcaatgaatctcaagtgcagctggtagatcttagctttaaagcgggttcagaagatgactttttcgat

SEQ ID NO: 1642 - protein, 141 aa, Streptococcus agalactiae
MKRKFLIGSHGKLASGLQSSIDILTGKGQEIQTIDAYIDDSDYTKSIVEFIDEIAPDEQGLIFTDLLGGSVNQKMATAVMNSGKNNIFLITNSNLATLLSLLFLKPEEELTKEEIVTVINESQVQLVDLSFKAGSEDDFFD

SEQ ID NO: 1643 - DNA, 423 bp, Streptococcus pyogenes
atgaaacgaaaatttctcattgggagtcacggcagactagccagtggtttgcaaagctctattgacattttagcaggtatgggacaggcacttgaaaccattgatgcttatgttgatgatagtgactacactagccagattgatgactttatcgctggggtagcagcagatgagcagggccttatttttactgatttgttaggcggcagtgtgaatcagaaaatggtaaccgctgtaatgaacagtggcaaagacaatatctttttaatcacaaacagtaacttagccactttattgtcgttggtgtttttaaaaccaggcgaagcgcttactaaagatgaaattgtaaccgttatcaatgaatcgcaagttcagttagtggatttggtccctgagacaaattcagaagatgacttttttgat

SEQ ID NO: 1644 - protein, 141 aa, Streptococcus pyogenes
MKRKFLIGSHGRLASGLQSSIDILAGMGQALETIDAYVDDSDYTSQIDDFIAGVAADEQGLIFTDLLGGSVNQKMVTAVMNSGKDNIFLITNSNLATLLSLVFLKPGEALTKDEIVTVINESQVQLVDLVPETNSEDDFFD

SEQ ID NO: 1645 - DNA, 90 bp, Streptococcus agalactiae
gtgttaatgccaaggtcaccacaaaaatcacttttccttgatggtgtgcaactaaggaagttgattttaaacagtaagacactatgccaa

SEQ ID NO: 1646 - protein, 30 aa, Streptococcus agalactiae
MLMPRSPQKSLFLDGVQLRKLILNSKTLCQ

SEQ ID NO: 1647 - DNA, 1059 bp, Streptococcus agalactiae
atgttaaggatgaagagaagtcagtgcgtggataataagcagcataatacatcaatgattagtttgctacaataccttttttccatactggtcattttagttcatagtgggaggttatttagtcaggatgtcattcattttacctttaaaagtttcctaggtcggatggctgttccttattttttgatttgtactgctttctttttgagaggtcgtatacagcaaggtttgtgtaatcactcctactttcgtaaactgattaaaaagtatagcatgtggactatcatttatttgccttatggttatttcttttttgaatctctaaatatagcgaagatctatttgttgccggggtttattgtggcatttttgtatttaggtatgtcacataccctttggtacatccctgctgttattctaggttgggtcattattcaaggattattgaagtatgtaggaactagggggacatttatcacagttgttgtactctattgtattggagcagtagagacctattctgtctttatacagtcaacaaaattttatcccctgatgtccacttatatgtcaatttttcagacaacacgaaacggattattttacactccagtttatcttctagcaggatatttactctatgattattttaatactgacctatttaccaaatcgcgtggtcttaagtatattctcttccttttacttctagctttagagaatgttcttatttattttaatcaagggttggataaaaatttcttcttattagctcctttatgtgcagtattcttatttaactggagtatacgtacatcactgtttaaggaatatcgtttaagtcctttaaaacagttgagtgtctattatttcttccttccccctctttttattggcatagtgtcttactgtttaaaatcaacttccttagttgcacaccatcaaggaaaagtgatttttgtggtgaccttggcattaacacatgcttgtgctctactcataataaaggttgttaataagataccctatcaaaaaattattccattatctctttcgaaa

SEQ ID NO: 1648 - protein, 353 aa, Streptococcus agalactiae
MLRMKRSQCVDNKQHNTSMISLLQYLFSILVILVHSGRLFSQDVIHFTFKSFLGRMAVPYFLICTAFFLRGRIQQGLCNHSYFRKLIKKYSMWTIIYLPYGYFFFESLNIAKIYLLPGFIVAFLYLGMSHTLWYIPAVILGWVIIQGLLKYVGTRGTFITVVVLYCIGAVETYSVFIQSTKFYPLMSTYMSIFQTTRNGLFYTPVYLLAGYLLYDYFNTDLFTKSRGLKYILFLLLLALENVLIYFNQGLDKNFFLLAPLCAVFLFNWSIRTSLFKEYRLSPLKQLSVYYFFLPPLFIGIVSYCLKSTSLVAHHQGKVIFVVTLALTHACALLIIKVVNKIPYQKIIPLSLSK

SEQ ID NO: 1649 - DNA, 180 bp, Streptococcus agalactiae
atgataccaatctcttcagaagaatatctcaattatcccaaaaagtcattgaaacgccttaaatggtatctgataattattgttaataccttatcaaccatattaggaaataaaaaagctgatttcgcaaaagaaaatcagcttagaataatttcttgttcagataaccagtgggaacta

SEQ ID NO: 1650 - protein, 60 aa, Streptococcus agalactiae
MIPISSEEYLNYPKKSLKRLKWYLIIIVNTLSTILGNKKADFAKENQLRIISCSDNQWEL

SEQ ID NO: 1651 - DNA, 198 bp, Streptococcus agalactiae
gtgtctgtcgttgatactgagaaaatagttaataacttgtttatcacacctttattaaacatagccattaaaaagctaggagcaaaaaaggcaagcgttgaaacagcaaaagatgttaatggcgaatttgtgatacttgatataaagaaattaagactggctataaaaaggagtccaacaaattgtaagacaataata

SEQ ID NO: 1652 - protein, 66 aa, Streptococcus agalactiae
MSVVDTEKIVNNLFITPLLNIAIKKLGAKKASVETAKDVNGEFVILDIKKLRLAIKRSPTNCKTII

SEQ ID NO: 1653 - DNA, 1152 bp, Streptococcus agalactiae
atgatatcaatttttccttttgaattaaaaaaacttctacaacgtaaggcagcatttggggcttttattatcttccttcttgctatttttggtctattttaccagcatttttttgttgggcaaattagtggctattctgcagataaaatacatggtcgagaagcggttgccattaatcgtagaatagctgaaaaatattcaggggatttatctgaagaacgagtaacaaatattattaaaaactatgttaatccgccagcaggacgcccccctatatttgatgtttttagttattatgtggcagacacttttgatcgtgattttttaatttactataaccaattgaaagatgataaaacaattgattttaataaaataaatattaaagatcaaaaacagttgggttctgcgctaccactaaaacaactaaagctaggtaactttgctccttggaatcaacttttcgaagtaagtaatagtacttatattttaattgtcttatttactctattcttatcagctcctcttttttcaggagatagggctaagaagattaatcctatactactgacgactcggtatggacgtggtcagttgacctgggctaagttagctagtacaatgaccatcggtatttccacatttatcctagcatatgccctcattctgacggtatttgcagattattttggttttagtggttgggagacaagcgttcaactgaatttatactggacatcacctttggctaatattatgggatttcctgtacctatgacaatatcaactgcttttgttcatattattgtcttacaatttgttggactcctttttatagccagtcttaatttctttatatcaagtatcacaaattcgccattaacatcttttgctgtttcaacgcttgccttttttgctcctagctttttaatggctatgtttaataaaggtgtgataaacaagttattaactattttctcagtatcaacgacagacacttcagctttacttttaaaattatcacgtaatggtagtcatggctttttctttgatagtttttctgctaatgaaatctgtctgattagtctacgtatgttaattgcagtgttattgatagcctatacctatcgtttaatgcgacgaagaagttta

SEQ ID NO: 1654 - protein, 384 aa, Streptococcus agalactiae
MISIFPFELKKLLQRKAAFGAFIIFLLAIFGLFYQHFFVGQISGYSADKIHGREAVAINRRIAEKYSGDLSEERVTNIIKNYVNPPAGRPPIFDVFSYYVADTFDRDFLIYYNQLKDDKTIDFNKINIKDQKQLGSALPLKQLKLGNFAPWNQLFEVSNSTYILIVLFTLFLSAPLFSGDRAKKINPILLTTRYGRGQLTWAKLASTMTIGISTFILAYALILTVFADYFGFSGWETSVQLNLYWTSPLANIMGFPVPMTISTAFVHIIVLQFVGLLFIASLNFFISSITNSPLTSFAVSTLAFFAPSFLMAMFNKGVINKLLTIFSVSTTDTSALLLKLSRNGSHGFFFDSFSANEICLISLRMLIAVLLIAYTYRLMRRRSL

SEQ ID NO: 1655 - DNA, 864 bp, Streptococcus agalactiae
ttgaaaggagacaatactatgttattacagctagataatatcactaaaagctacgggaaaaaaatagtacttaaccagatttcctaccagtttactcctggtttgtatggactcttaggagcaaatggtactggcaaaacaaccttattaaatttgatgagccactttacattagcagatagtgggaatatttattggaatggacaggagcagtcggaagaattttatcgtcacattggttttttaccgcaacattttcgctattatgatcaatttactggcattgctttcttaaattatatcgctaccttaaaaggtgttgataaaaagaaagctaaacaagaaattcctagattactagagcttgttggtttaggcgatgtaggtaaaaagaagatttcatcatactccggtggtatgaagcaacgtttaggcattgctcaagcacttatcaatgatcctgaaatactcattctggatgaaccaactgttggacttgatcccaaggaacgggttaaatttcgccatattttgagtcagttatccaccaataaaattatcattttatcaacgcatattgtgtcggatgtggaagctgttgccaaagaaattatagtattaaaaaatggtaaatttatcgaacatggcaacaccgcacagctgttgaaaactattgagggaaaagtgtgggaaataacgactgaaccaggtttatctcagatacccaatattgctattgttaatgaaaaagtcttttcagatagtcgggtatttcgtgtagtgagtgatatttgtccgagtgattcggcacagttggttgttccgactctagaagatttctacatctatcattttagaggggag

SEQ ID NO: 1656 - protein, 288 aa, Streptococcus agalactiae
MKGDNTMLLQLDNITKSYGKKIVLNQISYQFTPGLYGLLGANGTGKTTLLNLMSHFTLADSGNIYWNGQEQSEEFYRHIGFLPQHFRYYDQFTGIAFLNYIATLKGVDKKKAKQEIPRLLELVGLGDVGKKKISSYSGGMKQRLGIAQALINDPEILILDEPTVGLDPKERVKFRHILSQLSTNKIIILSTHIVSDVEAVAKEIIVLKNGKFIEHGNTAQLLKTIEGKVWEITTEPGLSQIPNIAIVNEKVFSDSRVFRVVSDICPSDSAQLVVPTLEDFYIYHFRGE

SEQ ID NO: 1657 - DNA, 750 bp, Streptococcus agalactiae
gtgaatatttttatacttgaggatgattttgttcaacaagcccattttgaaaaaatcattaaagagattagagtacagtacaatctgcatttcaaaacagtagaaacgtttgctaaaccagttcaattattggaatcaatttatgaaataggtttacataatttatttttcttagatattgaaataaaaaatgatgagcagatgggcttagaggtagcaaaacaaattagacaagttgatccatatgctcagattgtttttgttacaactcattcagaattaatgcctttaacctttcgttatcaggtatcagctttagactatatcgataaaggactttcacaggaagagtttagccaaaggattgaggaagtattgttgtacgtagatggcatttgcaataagcccttagtggaaaattcattctactttaagtcgcgttacagccaggtacaattaccttttaacgatcttctttatatagaaacatcctcaagatcacatagagttgtcctttatactgaaaaagatagaatggaattcacagccactttgggggatattttaaaacaagaacctaggctctttcaatgtcatcgctcttttttagtaaatcccttaaatatttttaaagtggataggatagatagattagtttacttccaaaatggaacgacttgtctggtttcacgcaataaagtgagagatatagtatctatagtggataaatatcaaaaggatagaaaaaga

SEQ ID NO: 1658 - protein, 250 aa, Streptococcus agalactiae
MNIFILEDDFVQQAHFEKIIKEIRVQYNLHFKTVETFAKPVQLLESIYEIGLHNLFFLDIEIKNDEQMGLEVAKQIRQVDPYAQIVFVTTHSELMPLTFRYQVSALDYIDKGLSQEEFSQRIEEVLLYVDGICNKPLVENSFYFKSRYSQVQLPFNDLLYIETSSRSHRVVLYTEKDRMEFTATLGDILKQEPRLFQCHRSFLVNPLNIFKVDRIDRLVYFQNGTTCLVSRNKVRDIVSIVDKYQKDRKR

SEQ ID NO: 1659 - DNA, 738 bp, Streptococcus pyogenes
atgatgaacatttttattcttgaggatgattttatccagcagacacgcatagaatctatcgtagtaggcatcttaaaagagactagaataccatgtaatcagcttgaagtgttctcgactcctcaaaaattatttgagagtatccaagaaagaggagaccatcagctgtattttttagatattgaaattggtgaatatactcgttgtgggcttgaattagctgcagctattcgacaaaaagatcctaatgccgttattgtgtttgtcaccactcattcagaatttgctcctatttcttttaaatataaggtatccgctctagattttattgataaagcaggtggtcaaaaacagtttaaagaacaaatcgaagaatgtatccgatatacttacgatatgatgtctagtcgtgagtcaaaggacatgtttttatttgagactccacagacaagattaaaattgccctataaggatattttatactttgctacagccacaactcctcacaaagtttgtttatggactcagacagaaagattagagttttatggtaatctatctgagattcaagcagtagcaccgaaactttttttgtgccatagatcctaccttgtgaatctagataaggttgttcgaattgataagagtaagcagctcctttatttcgaaaatggtgattcttgtatggtatcacgattaaaaatgaaatgtctgtttgaacggtgggaggctcttcgc

SEQ ID NO: 1660 - protein, 246 aa, Streptococcus pyogenes
MMNIFILEDDFIQQTRIESIVVGILKETRIPCNQLEVFSTPQKLFESIQERGDHQLYFLDIEIGEYTRCGLELAAAIRQKDPNAVIVFVTTHSEFAPISFKYKVSALDFIDKAGGQKQFKEQIEECIRYTYDMMSSRESKDMFLFETPQTRLKLPYKDILYFATATTPHKVCLWTQTERLEFYGNLSEIQAVAPKLFLCHRSYLVNLDKVVRIDKSKQLLYFENGDSCMVSRLKMKCLFERWEALR

SEQ ID NO: 1661 - DNA, 828 bp, Streptococcus agalactiae
atgaaaggatactctatggcaaaatgcttaacgttaaatactcattcatggatggaagtaaatgctctaaagaaattatttgatttagcagagcatatcttccgtgaaaaatatgatatcatctgcctacaagaggtgaaccagagcatatcttcccctcttgctaagagtagtccaaattatcatccgattgaaggtacaccagctcttcatcaagataactttgccttgcaattagtgcattacctaaatcttcaaggtctacactatcattggacatgggcttataatcatattggttatagtaagtaccatgaaggggtagcgatactttctctgaaaccattaaagccagaggatattttagtttcagctgtagacgatgagactgattatcatactcgtcgtgctctggtagctgagaccactctgaatgacaaagtcgttacagtagttagcctccatttctcatggtttgagaaaggatttgcggaggagtggaaacgactagaaactaccctacttgaggtagaaactccacttttactcatgggtgactttaataatcctactggaaatcagggttatgaacttgttcttaatagtccattagcattaaaggatagccaccaaatagccaatcatgtatttggggaccatactattatggctgatattgatggttgggaagggaataaaaaggctcttaaagttgaccatatttttactagcgaagacctttcaatcagttcaagtcaagtagtttttgaaggtggtgaagcacctgtcgttagtgatcattacggcttggaaattaccatggatttc

SEQ ID NO: 1662 - protein, 276 aa, Streptococcus agalactiae
MKGYSMAKCLTLNTHSWMEVNALKKLFDLAEHIFREKYDIICLQEVNQSISSPLAKSSPNYHPIEGTPALHQDNFALQLVHYLNLQGLHYHWTWAYNHIGYSKYHEGVAILSLKPLKPEDILVSAVDDETDYHTRRALVAETTLNDKVVTVVSLHFSWFEKGFAEEWKRLETTLLEVETPLLLMGDFNNPTGNQGYELVLNSPLALKDSHQIANHVFGDHTIMADIDGWEGNKKALKVDHIFTSEDLSISSSQVVFEGGEAPVVSDHYGLEITMDF

SEQ ID NO: 1663 - DNA, 816 bp, Streptococcus pyogenes
atgaccaaggtattaacactgaatacccattcgtggatgcaagccaacactcttaaaaaattagttgctttggctgagcatattttagctgaaaaatacgatatcatttgcttgcaagaaatcaatcagttaatcgagagcgagctggccacagatttaccaagatatcaagctctttcagggacaccaagcattcataaagaccattttgcccttctcttgatccattatttacaaaaacgagggcagcactattattggtcttgggcttataaccatattggctatgacatttaccaggaaggcgtggcaatcttatcaaaacaacctattcatgtttcagatattctcgtgtcagcgatggatgatgaaacagactaccacaccagacgctcactcatagccaaaaccacgttagatggcaaagaagtcgctgttgtcaatgtgcacctatcttggtttgacaaggggtttttaggggagtgggagaaattagaaaaagaactgctcacactaaactgtcccttgctacttatgggagattttaacaatccaacggatcaagacggttatcaagtgatgatgggtagccccctagacctacaagatagccataagggtgctgaccacgtgtttggtgatcatagcatcgtggctgatattgatggctggcaaggtaacaaagaagccctcaaggtggaccatgtctttaccagtaaggacttcatcatccgatcttctaagattacctttgaaggcggagatgcgccagtcgtcagtgaccactatggtctagaagtgacattaggctggcgt

SEQ ID NO: 1664 - protein, 272 aa, Streptococcus agalactiae
MTKVLTLNTHSWMQANTLKKLVALAEHILAEKYDIICLQEINQLIESELATDLPRYQALSGTPSIHKDHFALLLIHYLQKRGQHYYWSWAYNHIGYDIYQEGVAILSKQPIHVSDILVSAMDDETDYHTRRSLIAKTTLDGKEVAVVNVHLSWFDKGFLGEWEKLEKELLTLNCPLLLMGDFNNPTDQDGYQVMMGSPLDLQDSHKGADHVFGDHSIVADIDGWQGNKEALKVDHVFTSKDFIIRSSKITFEGGDAPVVSDHYGLEVTLGWR

SEQ ID NO: 1665 - DNA, 2202 bp, Streptococcus agalactiae
gtgcataaaaggagattgaagatgaaaaataatgtcaaacagctctttagttttgaattttggcagaagtttgggaaggctttgatggttgttattgctgttatgccagcagcaggattgatggttagtattggtaactccattagtctattggatccatcaaatgttttattagggcgcatagctaatgttattgctcaaattggttggggagttattggtaacttacacatcttatttgcattggctattggtggtagctgggctaaagaacgtgccggtggtgcttttgcggctggcttatcctttattcttattaaccttattacagggaacttttttggtgttaaaacagatatgttagcagacagtaaagcaactgttcaaacggtatttggtgcaaccatcagagtttcagattactttgttaacgttcttgggcaacctgctcttaatatgggtgtatttgtcggtattatttcaggtttcgttggtgcaactgcctttaataaatattataactatcgtaaattaccagatgctttaacttttttcaatggaaaacgttttgttccatttgttgttatttatcgttcagtcattgttgcattaattttatcagtattttggccggttgttcaatcaggtatcaatggctttggtaaatggattgcaagttcacaagacagtgctccaatattagcaccatttgtctacggtacgttagagcgtttattgctcccatttggtttacaccatatgttaactattccaatgaactacacgcaactaggtggcacatacactgtccttacaggtgcaactaaaggagcacaggtgttgggacaagatccactgtggttagcatgggttggtgatttaattaacttaaaaggctcaaattcaagtcaataccatcacttattgacaagtgtcactccagcacgttttaaagtggggcaaatgattggtgcttcaggtattttgatgggattatcttatgctatgtatcgtaacgttgataaagataaaaaattgaaatacaagtcaatgtttatttcagcagcagcggctactttcttgacaggtgttactgagccaattgagtacatgttcatgtttgcagcaatgccactctaccttgtatatgctgtcgttcaaggatgtgcgtttgctatggcagatattgttaacctccgcgttcattcatttggtaatatagaatttttaacacgtgttcctatgggcataaaagcgggccttggtggtgatattttcaactttgtttgggtgacacttctttttgcagtattgatgtactttattgcaaactttatgattaaaaaattcaatttagcaacagcaggacgtaatggtaattatgataacgaagaggttgataatgctccttcaacagcttctggttctgctgatgcaaattctcaagttgtacaagttattaatttacttggtggtcgtgataacattgaagatgtagatgcatgtatgactcgtcttcgtgtcacagttaaagatggaaatagcgtgggttctgaagcagcttggaaaaaagctggtgcaatgggattggtgttaaaaggtaatggcgttcaagctatttacggacctaaagcagatgtccttaaatcagacattcaagatttgctagattcaggtacagttattccaatagttgatttagaaacaggtcaacctgtagcagcagccccagttacaacttataaaggaataacagaagaaattgtttcggtggctaatggtcaagtagaagcattggatgttgttaaagaccctgtcttttctcaaaaaatgatgggtgatggctttgctgtggaaccaactgatggcaatatttatgttccagtttcaggtacagttactagtgtctttccaacaaaacatgcttttggtttattaacagaaagtggcctagaagttttagtacatatcggtctagatacagtagctcttgatggtcaaccatttgaggttaaaatttctagtggtcaaaaagtggtagcaggcgatcttgctgtagtagcagatttggaagctatcaaagcagctggtaaagagacaagtgtgattatcgtctttacaaatgtttcagatataaaaactgttaaacttgaaaaatcaggtccacaaatagctaaaacagttgtggcaaaagtcgaactg

SEQ ID NO: 1666 - protein, 734 aa, Streptococcus agalactiae
MHKRRLKMKNNVKQLFSFEFWQKFGKALMVVIAVMPAAGLMVSIGNSISLLDPSNVLLGRIANVIAQIGWGVIGNLHILFALAIGGSWAKERAGGAFAAGLSFILINLITGNFFGVKTDMLADSKATVQTVFGATIRVSDYFVNVLGQPALNMGVFVGIISGFVGATAFNKYYNYRKLPDALTFFNGKRFVPFVVIYRSVIVALILSVFWPVVQSGINGFGKWIASSQDSAPILAPFVYGTLERLLLPFGLHHMLTIPMNYTQLGGTYTVLTGATKGAQVLGQDPLWLAWVGDLINLKGSNSSQYHHLLTSVTPARFKVGQMIGASGILMGLSYAMYRNVDKDKKLKYKSMFISAAAATFLTGVTEPIEYMFMFAAMPLYLVYAVVQGCAFAMADIVNLRVHSFGNIEFLTRVPMGIKAGLGGDIFNFVWVTLLFAVLMYFIANFMIKKFNLATAGRNGNYDNEEVDNAPSTASGSADANSQVVQVINLLGGRDNIEDVDACMTRLRVTVKDGNSVGSEAAWKKAGAMGLVLKGNGVQAIYGPKADVLKSDIQDLLDSGTVIPIVDLETGQPVAAAPVTTYKGITEEIVSVANGQVEALDVVKDPVFSQKMMGDGFAVEPTDGNIYVPVSGTVTSVFPTKHAFGLLTESGLEVLVHIGLDTVALDGQPFEVKISSGQKVVAGDLAVVADLEAIKAAGKETSVIIVFTNVSDIKTVKLEKSGPQIAKTVVAKVEL

SEQ ID NO: 1667 - DNA, 2184 bp, Streptococcus pyogenes
atgaaaacatcattcaagcaactgtttcgtttcgaattttggcaaaaatttgggaaatgtcttatggtcgttattgctgtcatgccagcggctggtttaatgatcagtatcggaaactctattccaatgattaaccacgactcagcatttttggcatctctaggcaacattatcgctcaaattggttgggctgttattgttaaccttcacttgctatttgccttggccattggtggtagttgggctaaagaaagagctggaggggcctttgcctcagggcttgcttttgtcttgatcaatcggataacaggtgctttttatggcgtgtctagtactatgctagctgatccagaagcaaaaatcacaagcctccttggcactcaaatgatcgttaaagattatttcaccagtgtcttggaatctccagctttaaacacaggggtttttgttgggattattgcagggttcgtaggagcaacggcctataacaaatactataattaccgtaaacttcctgaagttttgaccttctttaatgggaagcgttttgtaccatttgtcgttattttacgttctatttttgtagcccttattttggttgttgtttggccggtgatccagtctgggattaacagttttgggatgtggattgcctcttcacaagattcagctccaatcctagccccattcctatatggtaccttggaacgtctcttgttgccatttggtcttcaccacatgttgacgatcccaatgaactatacagctcttggtggaacttatgaggtcatgacaggtgcagcagcggggacaaaagtatttggtcaagaccctttgtggcttgcttgggtaactgaccttgttcaccttaaaggatcagacgcttcagcctatagtcacttaatggatagtgtgactccagctcgtttcaaagtaggacaaatgattggagctaccggaacattgatgggggttgccttagccatgtaccgtaatgtggatgccgataaaaaacacacatacaaaatgatgttcatctcagcagcggcagcggtctttttgacaggggtaactgagccacttgagtacctatttatgtttgcagcaatgccactttacatcgtctatgcccttgttcaaggagcttcatttgccatggcagaccttgtgaatctccgtgttcactcatttggaaatatagagctactaacccgcacccctatggctcttaaagcaggcctaggcatggatgtgattaactttgtttgggtttctgtcctctttgcagttatcatgtactttattgcagatatgatgatcaagaaaatgcatctcgcaacagctggccgtttaggcaactacgatgccgatatactgggtgaccgtaacactcaaacaagacctacccaagtagcagatagcaactctcaagtcgtgcaaatcgttaatctccttggtggggcaggcaatattgatgatgttgatgcttgtatgacgcgcttacgagtgacggtcaaagaccccgctaaggttggtgctgaggacgattggaaaaaagctggcgctataggcttgatccaaaaaggcaacggcgttcaagcggtctatggccctaaagcagatattttgaaatcagatattcaagatttgctggactcaggtgctcttattccagaagtcaatatgtcacagctcactagcaaaccgactcccgcaaaagattttaaacacgtgacagaagatgtgctatcagtggcagacgggatggttctcccaatcacaggtgtaaaagaccaggtgtttgcggctaagatgatgggagatgggtttgcggttgaaccaacccatggtaatatctatgcacccgtagctggccttgtgaccagtgtctttccgaccaagcatgcctttggtttactgacagataatggtcttgaagtgctggtgcacgtgggacttgataccgtcgccttaaatggtgtgcctttttcagtcaaagtctcagaagggcaacgggttcatgcaggtgacctattagtcgtagcagatcttgctgctattaaatcagcagagcgtgaaacaatcattgttgttgcttttaccaacacaacagagatccaagatgtgaccttgacatctttaggagctcagcctgctaagactaaagtagctaccgtagaactt

SEQ ID NO: 1668 - protein, 728 aa, Streptococcus pyogenes
MKTSFKQLFRFEFWQKFGKCLMVVIAVMPAAGLMISIGNSIPMINHDSAFLASLGNIIAQIGWAVIVNLHLLFALAIGGSWAKERAGGAFASGLAFVLINRITGAFYGVSSTMLADPEAKITSLLGTQMIVKDYFTSVLESPALNTGVFVGIIAGFVGATAYNKYYNYRKLPEVLTFFNGKRFVPFVVILRSIFVALILVVVWPVIQSGINSFGMWIASSQDSAPILAPFLYGTLERLLLPFGLHHMLTIPMNYTALGGTYEVMTGAAAGTKVFGQDPLWLAWVTDLVHLKGSDASAYSHLMDSVTPARFKVGQMIGATGTLMGVALAMYRNVDADKKHTYKMMFISAAAAVFLTGVTEPLEYLFMFAAMPLYIVYALVQGASFAMADLVNLRVHSFGNIELLTRTPMALKAGLGMDVINFVWVSVLFAVIMYFIADMMIKKMHLATAGRLGNYDADILGDRNTQTRPTQVADSNSQVVQIVNLLGGAGNIDDVDACMTRLRVTVKDPAKVGAEDDWKKAGAIGLIQKGNGVQAVYGPKADILKSDIQDLLDSGALIPEVNMSQLTSKPTPAKDFKHVTEDVLSVADGMVLPITGVKDQVFAAKMMGDGFAVEPTHGNIYAPVAGLVTSVFPTKHAFGLLTDNGLEVLVHVGLDTVALNGVPFSVKVSEGQRVHAGDLLVVADLAAIKSAERETIIVVAFTNTTEIQDVTLTSLGAQPAKTKVATVEL

SEQ ID NO: 1669 - DNA, 111 bp, Streptococcus agalactiae
ttgtttaaaggctctgatactttttttgctatatatcgtgcaattaatacagataaaataatagcaagtaagatgataattgctaagggacttatcataccaaggagaaga

SEQ ID NO: 1670 - protein, 37 aa, Streptococcus agalactiae
MFKGSDTFFAIYRAINTDKIIASKMIIAKGLIIPRRR

SEQ ID NO: 1671 - DNA, 1677 bp, Streptococcus agalactiae
ttggataccgtttggaggaaagacatgactaaaaaaattttccgtacaactttatctgctagtttgggaattgttttagttacaattttgatgattatgggatttctctataattacttcaatcacattcagcgagaacagttgagaacacaaacggcactggcgtcacaaggaatttcctttgaaggtaaagattattttgaaaatcttaaaacttcaaatgtgcgtattacttgggtagataataagggacaagtgctttatgatacccaatcagatgcaaaacatatgaaaaatcacgccaatcgtcaagaaattaaagaagctatcaagagtggttatggtgagagcacgaggtggtcagcgacacttactgagaagtctatctatgctgcgcaacgtttaaataatggaacgatagttcgtttatcagttgcgcaacaaactattttttatcttctccttggtatgataagtcccttagcaattatcatcttacttgctattattttatctgtattaattgcacgatatatagcaaaaaaagtatcagagcctttaaacaatattgacttagatcatcctttatcaaatgatagttacgaggagataacaccattattaaggcgtcttgatagccatcaggctaagattcaacatcaaaaactgttattacaaaagcgtcaaaaagaatttgataccattatttctaaaattaaggaaggaatgattcttttagatgatcaagcaagaatcgttagtatcaacgcagaagctttaaagttattccaaattaatgatgattggcatgggcgctttatgatggaagttagccgagatttaactctcaaagacttaatcgatcaaggactaaaagggaaaaagaaagaggctaatattggcattgaaaataatcattaccgcgtcttggtaagaccaactacagataacaaccgagtaacaggattggttgttctactgtttgatgtgactgatcaactccaaatggaacaacttcaacgtgaatttactgccaatgtctctcatgaattgaaaaccccgcttcatgttatttctggttactcagaactgttagctaatcaaatggttccaaacgaagaagtcccacaatttgcagctaaaattcataaagaatctgaacgattagttaaattggttgaggatattatcaacctttctcaccttgatgaacaagaaaaattaccgcaagagacagtaaatctgtatgacttaacacaaaaagttttagaaggtttacaagctaaagcagataagaagcacatacaaatcaattttaatggagaagaagctattttgcgagggaatccagttttattgaattccttggtgtacaacttgtgtgacaatgctatcacctataaccatgagaaaggtcaagtaaatgtgactttgaaaaattcacctgatacaattaccttagaagttagtgatacgggactaggcattgcagagaaggacaaaaaacgtattttcgaacgtttctatcgcgtcgataaaagtcgctcaaaaatagttggggggactggtttaggtttgtctattgtaaagagtgctttagattttcacaatggtagtataaaagtggacagccatttggggcagggaacaacaatgaccgttttacttcacaaacaa

SEQ ID NO: 1672 - protein, 559 aa, Streptococcus agalactiae
MDTVWRKDMTKKIFRTTLSASLGIVLVTILMIMGFLYNYFNHIQREQLRTQTALASQGISFEGKDYFENLKTSNVRITWVDNKGQVLYDTQSDAKHMKNHANRQEIKEAIKSGYGESTRWSATLTEKSIYAAQRLNNGTIVRLSVAQQTIFYLLLGMISPLAIIILLAIILSVLIARYIAKKVSEPLNNIDLDHPLSNDSYEEITPLLRRLDSHQAKIQHQKLLLQKRQKEFDTIISKIKEGMILLDDQARIVSINAEALKLFQINDDWHGRFMMEVSRDLTLKDLIDQGLKGKKKEANIGIENNHYRVLVRPTTDNNRVTGLVVLLFDVTDQLQMEQLQREFTANVSHELKTPLHVISGYSELLANQMVPNEEVPQFAAKIHKESERLVKLVEDIINLSHLDEQEKLPQETVNLYDLTQKVLEGLQAKADKKHIQINFNGEEAILRGNPVLLNSLVYNLCDNAITYNHEKGQVNVTLKNSPDTITLEVSDTGLGIAEKDKKRIFERFYRVDKSRSKIVGGTGLGLSIVKSALDFHNGSIKVDSHLGQGTTMTVLLHKQ

SEQ ID NO: 1673 - DNA, 675 bp, Streptococcus agalactiae
atgatatattgtgttgaagatgatgctgatattcgcgaaatgatgctctatactttgcaaatggcaggttttaaagctcaaggattttcgagttcagagcttttttgggaagctattcaggagaaagttccagacttgattttgcttgatattatgttgccgggagatgatggtttgactattttagagcgtttaaggagaaaacatcaaacggaaatgataccagtaatcatgacaactgctaaaggtagtgagtatgataaagttaaagggttagatcttggagcagatgattatctcgtcaaaccttttgggatgatggaaatgatttcacgaataaaagcagtcttgagacgtagccgccaagtagattcaaaagctcatattatcattggaaatttagagattgatccgactaattattgggtcaaaaggggaacggaaaaaatccacttaaccctaaaggaatttgagttattagtattattcttccgtaatcccaatagagtctttacaaggcaagaacttctggataaggtttggggagaacaatttttaggagaaactagaactgtggatgttcacattgggacactgcgaacaaaacttggtgaggatggctatttgattgctacagtaaggggagttggataccgtttggaggaaagacatgac

SEQ ID NO: 1674 - protein, 225 aa, Streptococcus agalactiae
MIYCVEDDADIREMMLYTLQMAGFKAQGFSSSELFWEAIQEKVPDLILLDIMLPGDDGLTILERLRRKHQTEMIPVIMTTAKGSEYDKVKGLDLGADDYLVKPFGMMEMISRIKAVLRRSRQVDSKAHIIIGNLEIDPTNYWVKRGTEKIHLTLKEFELLVLFFRNPNRVFTRQELLDKVWGEQFLGETRTVDVHIGTLRTKLGEDGYLIATVRGVGYRLEERHD

SEQ ID NO: 1675 - DNA, 654 bp, Streptococcus agalactiae
atgattcgttcacgatttgcaagtcaacttaatgaccttaataaagaaattatttttatgggggcattgtgtgaggacatcattgggaagtccttaggtgctctaacaaatagtaatgacgtttaccttgacgatatttctgaaacttatcacaagattgaacaaatggaacgggatattgaggagagatgtttaaaacttttactccgtcagcaaccagttgccaaggatttacgccgtatttcttctgcattaaaaatggtttatgatatgaaacgtattggtgctcaagcttatgaaattgcggaaattgttagtttaggtcatattatccaaggttcaggttctgaaagggatcaacttaacagcatgtctaataatgtcattagtatgctgactaagagtatagatgcttttatttatgacaatgaagaacaagcgcatcaagtaattgaacaagataggacagttaaccaggaatttgatacaataaagaaacagttagtgttatatttttcggtacaggatgttgatggtgaatatcccatagatgttttaatgatcgccaagtacctagagcgtattggtgatcatacagtaaatattgctaagtgggtgcttttctcaataacaggtaacctagatggagaagcg

SEQ ID NO: 1676 - protein, 218 aa, Streptococcus agalactiae
MIRSRFASQLNDLNKEIIFMGALCEDIIGKSLGALTNSNDVYLDDISETYHKIEQMERDIEERCLKLLLRQQPVAKDLRRISSALKMVYDMKRIGAQAYEIAEIVSLGHIIQGSGSERDQLNSMSNNVISMLTKSIDAFIYDNEEQAHQVIEQDRTVNQEFDTIKKQLVLYFSVQDVDGEYPIDVLMIAKYLERIGDHTVNIAKWVLFSITGNLDGEA

SEQ ID NO: 1677 - DNA, 651 bp, Streptococcus pyogenes
atgttaagaacgaaatttgaagaagaattagataaattgcataaccagttttattcaatgggaatggaagtattggcacaaatcaataaaactgttcgtgcctttgttagtcatgatcgtgaattggccaaagaagttatcgaagaagatgacactattaataattttgagacaaagcttgaaaagaaatcgctggaaattattgccctacaacagccagtttcgaatgatcttagaatggttattactgttttaaaggcatcaagtgatattgaacgtatgggtgaccatgctgcttcgattgccaaggccactattcgtatgaaaggtgaggagcgtattccagtggttgaagaacaaatcaaccttatgggaaaagctgtgaaacagatggtagaagaagcccttaatgcatatatcaatgctgacgatacaaaagcttatgaaatcgcagcttctgatgagattatcgatcaatatttccgtaatatccaaaccttagctgttgaagaaatccgtaagtctccagatgctgtttttgccggaaaagaatattttcaagtattaatgtatttggaacgtattggtgactatgctcgcaacatttgtgaatggattgtttatcttaaaactggaaaaattattgaatta

SEQ ID NO: 1678 - protein, 217 aa, Streptococcus pyogenes
MLRTKFEEELDKLHNQFYSMGMEVLAQINKTVRAFVSHDRELAKEVIEEDDTINNFETKLEKKSLEIIALQQPVSNDLRMVITVLKASSDIERMGDHAASIAKATIRMKGEERIPVVEEQINLMGKAVKQMVEEALNAYINADDTKAYEIAASDEIIDQYFRNIQTLAVEEIRKSPDAVFAGKEYFQVLMYLERIGDYARNICEWIVYLKTGKIIEL

SEQ ID NO: 1679 - DNA, 759 bp, Streptococcus agalactiae
gtgagtcgaacagtgagtaaattagtaattaataatttagatttgtattatggagaatttcacgctctgaaggatgttaatttagacattgaagaaaaagaaatcacagcctttattggaccttctgggtgcggaaagtctactctcttgaaaagtattaaccgtatgaatgatttggtcaaaaattgcaaaatcacaggggatattactttagaaggcgaggatgtctatagacaattggatattaaccaattgcgtaaaaaggttggaatggtgtttcaaaaacctaatccgtttccaatgagcatttatgataatgttgcttttggtccaagaacgcacggtattcattccaaagcagagttagatgatatcgttgaacgttcccttaaacaggcggctctatgggatgaggttaaagatcgtcttcacaaatctgctctgggtatgtctggcggacagcagcaacgtttgtgtattgcgcgtgctcttgctattgagcctgatgttttacttatggatgaacccacaagtgccttggatcctatttcaacagcaaaaattgaagaattggttatccaactgaagaagaactacactattgttatagtgacacataatatgcaacaagctgttcgtatttctgataaaacagcattctttctgatgggagaagtggttgaatataacaaaacgagccaactcttttcattgccacaagatgagcgtacagaaaactacattacagggagattcgga

SEQ ID NO: 1680 - protein, 253 aa, Streptococcus agalactiae
MSRTVSKLVINNLDLYYGEFHALKDVNLDIEEKEITAFIGPSGCGKSTLLKSINRMNDLVKNCKITGDITLEGEDVYRQLDINQLRKKVGMVFQKPNPFPMSIYDNVAFGPRTHGIHSKAELDDIVERSLKQAALWDEVKDRLHKSALGMSGGQQQRLCIARALAIEPDVLLMDEPTSALDPISTAKIEELVIQLKKNYTIVIVTHNMQQAVRISDKTAFFLMGEVVEYNKTSQLFSLPQDERTENYITGRFG

SEQ ID NO: 1681 - DNA, 801 bp, Streptococcus pyogenes
atgacagaatacaattggaatgaacgtcatatcatcacttttcctgaagaaacgcttgctctagctaccaaggatttacatgtttactatggtgcgaaagaagctatcaaagggattgatatgcagtttgaaaaacataaaataacagccttgattggtccatctggttgtggcaaatcaacttatcttcgtagtcttaaccgcatgaacgataccattgatattgctcgggttacaggtgagattctttatcagggcattgatgttaatcgaaaagacatgaatgtttacgagattcgcaagcacttaggaatggtttttcaaagacccaatcctttcgctaaatccatttataaaaacattacctttgcccatgaaagagctggtgtgaaagacaaaaaagttttagatgaaattgttgagacttcactgaaacaagccgcgctttgggatcaagttaaagatgaccttcacaaatcagccttcaccttatcagggggtcagcaacaacgcttgtgtattgctagagccatttctgtcaaacctgatattctattaatggatgaaccagcctctgcccttgacccgattgcaacgatgcagctggaagaaaccatgtttgaattgaagaagaattacacgattattattgtgacccacaatatgcaacaagcagctcgtgccagtgattacactgccttcttctatttaggcaacctcattgaatatgataagacacgtaatattttccaaaatgcgcaatgtcagtcaacaaacgactacgtttcagggcactttggt

SEQ ID NO: 1682 - protein, 267 aa, Streptococcus pyogenes
MTEYNWNERHIITFPEETLALATKDLHVYYGAKEAIKGIDMQFEKHKITALIGPSGCGKSTYLRSLNRMNDTIDIARVTGEILYQGIDVNRKDMNVYEIRKHLGMVFQRPNPFAKSIYKNITFAHERAGVKDKKVLDEIVETSLKQAALWDQVKDDLHKSAFTLSGGQQQRLCIARAISVKPDILLMDEPASALDPIATMQLEETMFELKKNYTIIIVTHNMQQAARASDYTAFFYLGNLIEYDKTRNIFQNAQCQSTNDYVSGHFG

SEQ ID NO: 1683 - DNA, 876 bp, Streptococcus agalactiae
atggaaaatattaaccaaagaacgtcaaaacaatatttagcatctttaaaaaaagatcccctttccttctttctttttgctattgtctatttgggagcaattctaagttttgctacaattgcatttgttgttatttatattttagttaaggggcttcctcatgtgaatactggcttgtttgcatggacttataatactcagaacgtttcactattaccagctttcattaacactatctttatcatcgccttaactttattatttgcagttccacttggtattggtggatcaatttatctaacggaatatgctagacgtgataatccttatctcaaaattatccgtgttgcaaccgagacattggcagggataccttcaattatttatggtttgtttggtgcattattttttgtaaaatacacacacttaggcttatctttgatatcgggttctctgactttgagcatcatgattttacctttgattatgaggacaactgaagaagctttactatctgttccggattcttatcgagaaggagcctttgcgcttggtgctggtaaattgagaaccatatttaaaatcgtattacctagtgctatgtctggtatttttgctggtattattttagcggtaggacgtatcattggtgagtcagcagcacttattttcacagctggaacagttgcaaaagtagcacattcggtatttagttcatctcgtactttagcagtacatatgtatgctatttcgggtgagggcttatatgttgaccaaacttatgcgactgcggtcatcttattgcttttagttattattgtcaattttgtatctggactagtagccaaacgattaggaagtgagtcgaacagtgag

SEQ ID NO: 1684 - protein, 292 aa, Streptococcus agalactiae
MENINQRTSKQYLASLKKDPLSFFLFAIVYLGAILSFATIAFVVIYILVKGLPHVNTGLFAWTYNTQNVSLLPAFINTIFIIALTLLFAVPLGIGGSIYLTEYARRDNPYLKIIRVATETLAGIPSIIYGLFGALFFVKYTHLGLSLISGSLTLSIMILPLIMRTTEEALLSVPDSYREGAFALGAGKLRTIFKIVLPSAMSGIFAGIILAVGRIIGESAALIFTAGTVAKVAHSVFSSSRTLAVHMYAISGEGLYVDQTYATAVILLLLVIIVNFVSGLVAKRLGSESNSE

SEQ ID NO: 1685 - DNA, 885 bp, Streptococcus pyogenes
atgaacgctaaaaaagtcgataaagtagcaactggtactctttataccattgctggaattattgtagctattttagcttccttaattctatatatccttgtccgtggcttgccacacatcagctggtcctttttaacaggaaaatcgtcttcgtacgaagctggtgggggaattggtatccagttgtataattccttcttcctattgattgttactttaattatttccattcctttatcaactggagcggggatttacttggctgaatatgccaaaaaaggacctgttaccaactttattagaacctgtattgagattctgtcttccctaccatctgtggttgtggggctctttggttacttgattttcgttgtgcagtttgaatatggcttttctattatttcaggggctcttgctttgacggtctttaatcttcctcaaatgacccgtaatgttgaagatagtttactgcatgttcatcatacccaaagagaagcaggattagctttaggcctgtcacgctgggaaacggttttttatgtggttatcccagaagctctcccgggaatggtaacaggtattgtcttagcttcaggtcgtatttttggtgaagcggcagcgcttatctatactgctggtcaatcagcaccagctctggattggtcaaattggaatccacttagtgttactagtccaatctctattttccgtcaatctgagacccttgctgttcatatttggaaagtcaatagcgaagggacaattccagatgctactcttgtatccgcaggaagtgcagcagtgctattaatttttatccttattttcaacttttcagctcactttattgggaagaaacttcattctaaaatgacagcagcgaaa

SEQ ID NO: 1686 - protein, 295 aa, Streptococcus pyogenes
MNAKKVDKVATGTLYTIAGIIVAILASLILYILVRGLPHISWSFLTGKSSSYEAGGGIGIQLYNSFFLLIVTLIISIPLSTGAGIYLAEYAKKGPVTNFIRTCIEILSSLPSVVVGLFGYLIFVVQFEYGFSIISGALALTVFNLPQMTRNVEDSLLHVHHTQREAGLALGLSRWETVFYVVIPEALPGMVTGIVLASGRIFGEAAALIYTAGQSAPALDWSNWNPLSVTSPISIFRQSETLAVHIWKVNSEGTIPDATLVSAGSAAVLLIFILIFNFSAHFIGKKLHSKMTAAK

SEQ ID NO: 1687 - DNA, 123 bp, Streptococcus agalactiae
atgctaacaattgttggtaaaatcataattcctagcaaaattgaagctgctaagactcccataccaaagccaccaatatattgccttatcatagggacaataacaacgagtccaaagaaacca

SEQ ID NO: 1688 - protein, 41 aa, Streptococcus agalactiae
MLTIVGKIIIPSKIEAAKTPIPKPPIYCLIIGTITTSPKKP

SEQ ID NO: 1689 - DNA, 843 bp, Streptococcus agalactiae
atgaaacaaacaaaagaaggtcttatgcaagctgtgtttttcatcacggcttgcgtcagtgttatatcagctattttaatttgcctctttctcttctctagtggtcttccagctattacgaaaatcggctggggaaattttatatttggtaaagtctggcatcctagtaataatatttttggcatctttccaatgattgtaggttccttatatgttacagcgggagctttacttttaggaggaccgataggtatccttactgctgtttttatggcttatttctgcccagaaaatatttataagcctttaaagtcagctatcaatttaatggcgggaatcccttcagttgtttatggtttctttggactcgttgttattgtccctatgataaggcaatatattggtggctttggtatgggagtcttagcagcttcaattttgctaggaattatgattttaccaacaattgttagcatttcagaatcttctttaagagctgttccagagagctattatgaaggcggtattgcccttggtgcctctcatgaacgaagtgtcttctttgctgttttaccagctgctaaacgtggcattttagcatcggttgttttgggaattggacgtgctattggtgaaacaatggctgtcatcatggtagcgggtaatcaagctgtcttgcctcaatcgctgacatcaggcgttagaactctaaccactaacattgttatggaaatgggctattcttctggtttgcatcgtcaagccttaattggtacagctgtggtactctttatctttatattaatgattaatatcagtttttcagcattacagaaagaggaa

SEQ ID NO: 1690 - protein, 281 aa, Streptococcus agalactiae
MKQTKEGLMQAVFFITACVSVISAILICLFLFSSGLPAITKIGWGNFIFGKVWHPSNNIFGIFPMIVGSLYVTAGALLLGGPIGILTAVFMAYFCPENIYKPLKSAINLMAGIPSVVYGFFGLVVIVPMIRQYIGGFGMGVLAASILLGIMILPTIVSISESSLRAVPESYYEGGIALGASHERSVFFAVLPAAKRGILASVVLGIGRAIGETMAVIMVAGNQAVLPQSLTSGVRTLTTNIVMEMGYSSGLHRQALIGTAVVLFIFILMINISFSALQKEE

SEQ ID NO: 1691 - DNA, 933 bp, Streptococcus pyogenes
atggaaaatcaggaattggctaaaaaattagcctcaccatcaaagaattcaaggcttgaaacctttggccgcaccattacgtttttgtgtctggctttgattgtttttatcgttgcgatgattctgatcttcgttgctcaaaaagggttgtcaaccttctttgttgacaaggttaatctttttgatttcttgtttggaaaggagtggcaaccaagtgtaaaaaatgcggccggcattccttatcttggtgctctgccaatgattacaggatcctttttggttaccattttatctgctattattgccaccccatttgccattggcgcagccgtttttatgactgaaatctcacctaaatatggcgctaaattattacagcctgcggttgagcttttggttggaattccttcggttgtttatgggtttatcggtttgcaagtgattgttccttttatgcgctctatctttggtggcacaggttttggaatcctatctggggtctgtgtcttgtttgttatgattttaccaacagtgacttttatgacaacagacagtctgcgggcggtgcctcgtcattaccgcgaagcgtctatggctatgggagcaacacgttggcaaaccatttggcgtgttgtccttaatgcagctcgtccaggaatttttaccgctgttatttttggaatggcaagagcttttggagaagccttggctatccaaatggtagtcggtaactctgctgtaatgccaagttcactaacgacaccagccgcaaccttaacgtctgtcttgacaatgggtattggtaacacggttatgggaacggtccaaaataatgtgctttggtcccttgccctagtcttattattaatgagtctggccttcaattcccttgtcaaattaatcacgaaagaaagaaagagaaattatgaacgc

SEQ ID NO: 1692 - protein, 311 aa, Streptococcus pyogenes
MENQELAKKLASPSKNSRLETFGRTITFLCLALIVFIVAMILIFVAQKGLSTFFVDKVNLFDFLFGKEWQPSVKNAAGIPYLGALPMITGSFLVTILSAIIATPFAIGAAVFMTEISPKYGAKLLQPAVELLVGIPSVVYGFIGLQVIVPFMRSIFGGTGFGILSGVCVLFVMILPTVTFMTTDSLRAVPRHYREASMAMGATRWQTIWRVVLNAARPGIFTAVIFGMARAFGEALAIQMVVGNSAVMPSSLTTPAATLTSVLTMGIGNTVMGTVQNNVLWSLALVLLLMSLAFNSLVKLITKERKRNYER

SEQ ID NO: 1693 - DNA, 879 bp, Streptococcus agalactiae
atgaaaaaacacaaaatgctatctcttttggcggtatctggtcttatgggaattggcatcctagcaggatgctcaaatgattcatcatcttcatctaaagggacaattaacattgtttctagagaggaagggtctggaactcgtggagctttcatagagttatttgggatcgagtcaaaaaataaaaagggcgaaaaagtagaccatacttctgatgcagcaactgttaccaattcaacttcagttatgctaaccactgtctctaaagacccgtcagctattggttattcttcactaggttcattaaatagtagcgttaaagtgcttaaaattgatggcaaaaatgcgactgtaaaagatattaaatcaggaagctataagatttctcgtcctttcaatattgtaacaaaagaaggtaaggaaaaagaagcaacaaaagattttattgattatatcttaagcaaagatgggcaagcagtcgttgagaaaaatggctatattccacttgacaatgctaaagcatatcaagcaaaagtgtcatctggtaaagttgttatagcaggttcaagttcagtaacgccggttatggaaaagattaaagaagcctatcataaagtaaatgcaaaagtagatgttgaaattcaacaaagtgattcttcaactgggattacaagcgcaattgatggatcagcagatataggtatggcatcacgtgaattggataagacagagtcatccaaaggggtcaaagctactgttattgcaacagatggtattgcagtagttgttaataagaaaaataaagttaatgatctatcaacaaaacaagtaaaagacatttttactggaaagacaacgtcttggtctgacttatcaaag

SEQ ID NO: 1694 - protein, 293 aa, Streptococcus agalactiae
MKKHKMLSLLAVSGLMGIGILAGCSNDSSSSSKGTINIVSREEGSGTRGAFIELFGIESKNKKGEKVDHTSDAATVTNSTSVMLTTVSKDPSAIGYSSLGSLNSSVKVLKIDGKNATVKDIKSGSYKISRPFNIVTKEGKEKEATKDFIDYILSKDGQAVVEKNGYIPLDNAKAYQAKVSSGKVVIAGSSSVTPVMEKIKEAYHKVNAKVDVEIQQSDSSTGITSAIDGSADIGMASRELDKTESSKGVKATVIATDGIAVVVNKKNKVNDLSTKQVKDIFTGKTTSWSDLSK

SEQ ID NO: 1695 - DNA, 864 bp, Streptococcus pyogenes
atgaaaatgaaaaaaaaattctttttgttaagtcttttggccctatcaactttctttttatccgcatgttctagctggattgataaaggtgagtcaataaccgctgtaggatcaacagcactacaacccttagtagaagcagtagctgatgaatttggaagcagtaatctaggcaagactgtcaatgttcaaggtggtggttcaggtacagggttgtctcaagttcaatcaggagctgtccaaattggaaatagtgatgtctttgcggaagaaaaagatggtattgatgcttctaaattagttgatcatcaagtagctgttgcaggacttgcagttattgccaatcctaaagtcaaggtttccaatctcagtagtcagcagttgcaaaagattttttcaggagaatataccaattggaaacaagttggaggagaagatcttgcgatttcagtgatcaaccgagcagcaagttctggctcacgagcaacctttgacagtgttatcatgaaaggggtcaacgctaaacaaagtcaagagcaagactccaatgggatggttaaatcgattgtttcacaaacaccaggtgccatttcttacctttcctttgcctacgttgattcatctgttaaatctttgcaattaaatgggtttaaggcaaatgctaagaacgtggctacaaatgattggccaatctggtcctacgaacacatgtataccaaagataaaccaacagggttgaccaaggaatttcttgattatatgttttcagatgaagtacaacagaacattgttacacatatgggatatatttcgataaatgatatggaagtggtcaaatctcatgatggaaaagtaacaaaaagg

SEQ ID NO: 1696 - protein, 288 aa, Streptococcus pyogenes
MKMKKKFFLLSLLALSTFFLSACSSWIDKGESITAVGSTALQPLVEAVADEFGSSNLGKTVNVQGGGSGTGLSQVQSGAVQIGNSDVFAEEKDGIDASKLVDHQVAVAGLAVIANPKVKVSNLSSQQLQKIFSGEYTNWKQVGGEDLAISVINRAASSGSRATFDSVIMKGVNAKQSQEQDSNGMVKSIVSQTPGAISYLSFAYVDSSVKSLQLNGFKANAKNVATNDWPIWSYEHMYTKDKPTGLTKEFLDYMFSDEVQQNIVTHMGYISINDMEVVKSHDGKVTKR

SEQ ID NO: 1697 - DNA, 585 bp, Streptococcus agalactiae
atgattattgctattcaaggtggtatggctgtagggaaaaccacagctttgaaaatcattgagaatgtttaccccaaaatcgctattagttttgaggatatttctccagtagttgataagattaataaacatcagcttgataacaataaattagacgattattgtgaaattcaacaactatttattcagcatgagcgagatagatacgaacttgttagagataatgaaatagtgttaatggattatggagctgaggaaattgctttttatacacaatactttccaaaggtggcgggttatagttggactttaccttctaatttgttactagaggtaaataggctaaaggaatgttttgctgattatattatttttctagatgcagatgagacggtcctataccaacgtcaaaaaaatgattttaatagacagcgtcattttttcaaatggtatactcatcacctgctgcctgctaaaaaacattatttagacacattttccaatgttattcatattaatacaaatcatttaaatgctgaggaagtggctgaaaaaatcattgacatcattcgtaagttaactcta

SEQ ID NO: 1698 - protein, 195 aa, Streptococcus agalactiae
MIIAIQGGMAVGKTTALKIIENVYPKIAISFEDISPVVDKINKHQLDNNKLDDYCEIQQLFIQHERDRYELVRDNEIVLMDYGAEEIAFYTQYFPKVAGYSWTLPSNLLLEVNRLKECFADYIIFLDADETVLYQRQKNDFNRQRHFFKWYTHHLLPAKKHYLDTFSNVIHINTNHLNAEEVAEKIIDIIRKLTL

SEQ ID NO: 1699 - DNA, 738 bp, Streptococcus agalactiae
atgcaacagtattttgtaaatggcgaagcaggtgcctatgtgaccatcgaggacaaggataccatcaagcacatgttcaatgtcatgcgattgacagaagatgaccaagtggtcttggtttttgatgatgccatcaagcgtctggcaaaggtggtggacagctctgctcatcgcttccaaattctagaagagctagacaacaatgttgaaatgccagttcaagtgaccattgcctcaggttttcccaagggagacaagttggattttgtgacgcaaaaggcaacagaattgggtgctgcggctatctggggattcccagctgactggtcagtcgtcaagtgggacggcaagaaactagctaaaaaagaagataagctggcaaaaattgctctgggcgcagcggagcagagcaagcgtaatcgtcttcctcaggttcgtttatttgagaagaaggctgattttcaagcggagcttgcaggctttgataagatttttatcgcctatgaagagtctgccaaggagggtgaattgtcagcgctagcccagaacttgcagactgtaaaagcaggtgacaagctcctcttcatctttggaccagaagggggcatttctccaaaagaaatcgcagcttttgaagaggttggagctatcaaggtgggcttggggccacgcatcatgcgcacagaaacagcgccgctctatgctctaagtgttattagttactcagcggagttatta

SEQ ID NO: 1700 - protein, 246 aa, Streptococcus agalactiae
MQQYFVNGEAGAYVTIEDKDTIKHMFNVMRLTEDDQVVLVFDDAIKRLAKVVDSSAHRFQILEELDNNVEMPVQVTIASGFPKGDKLDFVTQKATELGAAAIWGFPADWSVVKWDGKKLAKKEDKLAKIALGAAEQSKRNRLPQVRLFEKKADFQAELAGFDKIFIAYEESAKEGELSALAQNLQTVKAGDKLLFIFGPEGGISPKEIAAFEEVGAIKVGLGPRIMRTETAPLYALSVISYSAELL

SEQ ID NO: 1701 - DNA, 747 bp, Streptococcus pyogenes
atgcaacagtattttattaaaggcaaagcagaaaaaaaggtaacgattaccgataaagataccatcaagcacatgtttcaagtgatgcgcttggctgacgaggctgaagttgtcttggtctttgatgatggggtgaagtatttagctaaggtgaccaatagtatggctcatgagttagagattatagaggctttgccagatcaggtggaattgcctgttaaagtgactattgcttctggatttcctaaaggcgataagttagacacgattgcccagaaagtgactgaattgggagccagtgcgctatggggctacccagcagactggtcagtggtcaaatgggatggcaaaaaattagctaaaaaagaagacaaattggctaagattgtattaggagcggctgagcagagcaaacgaaatagggtgcctgaagttcacctttttgaacataaagcagagtttctaaaaagcctttctagctttgatcatatcttcattgcttatgaggaaacagctaaggcaggtcagctagcgaccttggcgcgtgaagtaaaagaagttaagccaggggcaaaaatcctctttatctttggaccagaagggggaatttccccaactgaaatcactcagtttgaggcagcaagtgccattaaggtgggcttaggccctcgcattatgcgagcagagacagcgccgctatatgccttaagtgctcttagttatgctttggaattgcaggcatcaaaa

SEQ ID NO: 1702 - protein, 249 aa, Streptococcus pyogenes
MQQYFIKGKAEKKVTITDKDTIKHMFQVMRLADEAEVVLVFDDGVKYLAKVTNSMAHELEIIEALPDQVELPVKVTIASGFPKGDKLDTIAQKVTELGASALWGYPADWSVVKWDGKKLAKKEDKLAKIVLGAAEQSKRNRVPEVHLFEHKAEFLKSLSSFDHIFIAYEETAKAGQLATLAREVKEVKPGAKILFIFGPEGGISPTEITQFEAASAIKVGLGPRIMRAETAPLYALSALSYALELQASK

SEQ ID NO: 1703 - DNA, 951 bp, Streptococcus agalactiae
atgaacacatggaatgaactaacggttcacgtgaatcgtgaggcagaggaagctgtctcgaatttattgattgaaactggcagtcagggggttgccattagcgattcggctgactaccttggacaggaggatcgtttcggtgagctttatcctgaggtggagcagtctgatatgattgctattactgcttattatcctgatacgcttgatattgaggcggttaaggctgatttggctgatcgtttagctaattttgaaggctttggtcttgcgacgggtagcgtcaaccttgacagtcaggaattggtcgaagaggactgggctgataactggaagaagtactatgagccagctcgcattacccatgatttgaccatcgtgccgtcatggacggactacgaggctaaggctggtgagaagattatcaagatggatcctggtatggcttttgggactgggactcacccaacgactaagatgagtctttttgccttggagcaagtgcttcgtggtggtgagacggttatcgatgtggggactggttctggcgttttgtctattgctagctctctcttgggtgccaaggacatctatgcctatgatttggatgatgttgcagtgcgcgtggctcaggaaaatatcgatatgaaccctggcactgaaaatattcatgtggctgctggtgatctgctcaaaggtgtccagcaagaggtagatgttattgttgccaatattttggcggatattttgatccatctgacagacgacgcctaccgtttggtcaaggatgagggctatctcatcatgtctggtatcatttctgagaagtgggacatggtgcgtgagagtgctgaaaaagctggtttcttccttgagactcacatggttcaaggtgagtggaatgcctgcgttttcaaaaagacagatgatatttcaggagtgattggcggc

SEQ ID NO: 1704 - protein, 317 aa, Streptococcus agalactiae
MNTWNELTVHVNREAEEAVSNLLIETGSQGVAISDSADYLGQEDRFGELYPEVEQSDMIAITAYYPDTLDIEAVKADLADRLANFEGFGLATGSVNLDSQELVEEDWADNWKKYYEPARITHDLTIVPSWTDYEAKAGEKIIKMDPGMAFGTGTHPTTKMSLFALEQVLRGGETVIDVGTGSGVLSIASSLLGAKDIYAYDLDDVAVRVAQENIDMNPGTENIHVAAGDLLKGVQQEVDVIVANILADILIHLTDDAYRLVKDEGYLIMSGIISEKWDMVRESAEKAGFFLETHMVQGEWNACVFKKTDDISGVIGG

SEQ ID NO: 1705 - DNA, 951 bp, Streptococcus pyogenes
atggaaacgtggcaagaagtgacggttcatgtgcatcgtgatgcgcaagaggctgtttcacatgtgttgattgagacaggcagtcaaggggttgctatcgcagatagcgcagactatattgggcaaaaggaccgctttggggagttatacccagatgtggagcagtctgacatgatagctatcacagcctattacccaagtagtactaatttggcggatattattgcgaccattaatgaacagttagcggagttagctagttttgggttacaggttggtcaggttactgtggacagtcaagaattggctgaggaagactgggcagacaattggaaaaaatactatgaaccagctcgcatcacgcatgatttaaccattgtccctagttggacggattatgacgcttctgctggggaaaaagtgattaaactagatcctggaatggcatttgggacagggacacatcccacaactaagatgagcctttttgccttggaacaaatccttcgtggtggtgagacagttatcgatgtagggaccggttcaggtgtcctctcgattgccagttccttactaggtgctaaaaccatctacgcttatgacttagatgacgtggctgttcgagtggctcaagacaacattgatttaaaccaaggaacagacaacattcatgtggctgctggtgaccttttaaaaggggttagccaagaagcggatgtgattgtagccaatatcttggcggatatcttagtcttattgactgatgatgcttaccgtttggtcaaaaaggaaggttaccttatcttatctggcatcatttctgagaaattggatatggttctggaagctgcctttagcgcaggctttttcttagaaactcacatggttcaaggtgagtggaatgcccttgtctttaaaaaaacagatgatatctcaggagtgattggcggc

SEQ ID NO: 1706 - protein, 317 aa, Streptococcus pyogenes
METWQEVTVHVHRDAQEAVSHVLIETGSQGVAIADSADYIGQKDRFGELYPDVEQSDMIAITAYYPSSTNLADIIATINEQLAELASFGLQVGQVTVDSQELAEEDWADNWKKYYEPARITHDLTIVPSWTDYDASAGEKVIKLDPGMAFGTGTHPTTKMSLFALEQILRGGETVIDVGTGSGVLSIASSLLGAKTIYAYDLDDVAVRVAQDNIDLNQGTDNIHVAAGDLLKGVSQEADVIVANILADILVLLTDDAYRLVKKEGYLILSGIISEKLDMVLEAAFSAGFFLETHMVQGEWNALVFKKTDDISGVIGG

SEQ ID NO: 1707 - DNA, 306 bp, Streptococcus agalactiae
atggggtattttacagtattttggcagaaagatggaaatggtaaaaatattcctttttatgaacaagatgaagtggaagatttgattattgtcattaaagatggtaggtggaaaggtttgttcatcattcccaaagaggttgcagtgagtaagggtattctttcatctgctaactctcaaggaaagatggctatgcgattttaccctccttggtgtagcgatttaaatagaacagctttggtgacacagcgatggcagttgaactattttattgatttaagtagaaataatgaaggagttactaca

SEQ ID NO: 1708 - protein, 102 aa, Streptococcus agalactiae
MGYFTVFWQKDGNGKNIPFYEQDEVEDLIIVIKDGRWKGLFIIPKEVAVSKGILSSANSQGKMAMRFYPPWCSDLNRTALVTQRWQLNYFIDLSRNNEGVTT

SEQ ID NO: 1709 - DNA, 714 bp, Streptococcus agalactiae
atgaaaacagttaaagaagtcagtatcttaagcggtgtaagtgtgcgcaccttgcatcactatgataaaatcggtttattcccacctaccgccctatccgaagcaggctatcgactttatgacgatgaagcattgattcgcctgcaagaaattttgctatttcgtgagttggaattccctctcaaagatatcaaatacctgcttgagcaagcaaaagaggaaaggcaagacttattagcccaacaaatcaaattgcttgaatggaaaagatcgcaccttgagcaggttatcacccatgcgaaacgattacaagaaaaaggagatgattatatgaatttcgatgtttataataaaacagaattagaacaattacaagctgaagcaaaagaaaagtggggacaaacagcagcctacaaagaatttgctcaaaaacatgcttcagatgactttgcacaaattagccaagaaatggcaaaaataatggtacaatttgggcaattaaagacacaaaatgtatctgatgaatctgttcaaatgtgtgtgaaacggctacaagactatatctctcagaatttttacacctgtaccaatgaaatccttgctggactaggacaaatgtatcaatcagatgaccggtttagtcaatcaattgacaaagctggtggagcaggaacaagtgaatttgtcagccaagctattgcttactattgccaa

SEQ ID NO: 1710 - protein, 238 aa, Streptococcus agalactiae
MKTVKEVSILSGVSVRTLHHYDKIGLFPPTALSEAGYRLYDDEALIRLQEILLFRELEFPLKDIKYLLEQAKEERQDLLAQQIKLLEWKRSHLEQVITHAKRLQEKGDDYMNFDVYNKTELEQLQAEAKEKWGQTAAYKEFAQKHASDDFAQISQEMAKIMVQFGQLKTQNVSDESVQMCVKRLQDYISQNFYTCTNEILAGLGQMYQSDDRFSQSIDKAGGAGTSEFVSQAIAYYCQ

SEQ ID NO: 1711 - DNA, 741 bp, Streptococcus pyogenes
gtggaaatgtctcaattctattcgactggagaattggccaacttagctggcgtttctattcgaactgtccaatactatgaccaacgtgggattttgattccgacagcattgacagcaggtggacggcgactctatacggattctgatttagaacaattacgcatgatttgctttctgcgcgatttgggattttccattgagcagattcgcaaagtcttagcagaggaaaatgcagcccaggtgctggaattgcttctagttgatcatattgcgactgccaaggaagacttggctgcaaaagagcaacaagttgacatagctgtcaagatacttgacagacttcgaaaacaagacccccagtcactagattttctgatggacatttcgcttagcatgaaaaatcaaaaagcttggaaaaaattacaatggaagatgggtatcagtatatttttagccattgtttcatatgtaggacttattttactatctagttatctgcaaaaattttggttagtttatgttgctatgggactatttctaccaggtttcagttggttggtaatttattttaggaagcaatttatttatctctgtccccattgtcatcagaaatttgaacctagctttaatgaatttgcccttgcaggccatacaccacgaaccagaaagttaacctgctcccattgccatcaaaaatcgtattgcttggaactggcaaaagaggacactgtctcaagaaga

SEQ ID NO: 1712 - protein, 247 aa, Streptococcus pyogenes
VEMSQFYSTGELANLAGVSIRTVQYYDQRGILIPTALTAGGRRLYTDSDLEQLRMICFLRDLGFSIEQIRKVLAEENAAQVLELLLVDHIATAKEDLAAKEQQVDIAVKILDRLRKQDPQSLDFLMDISLSMKNQKAWKKLQWKMGISIFLAIVSYVGLILLSSYLQKFWLVYVAMGLFLPGFSWLVIYFRKQFIYLCPHCHQKFEPSFNEFALAGHTPRTRKLTCSHCHQKSYCLELAKEDTVSRR

SEQ ID NO: 1713 - DNA, 468 bp, Streptococcus agalactiae
atgattactttacaaaaggcggaagctagtgatttagagaagattattgccattcagagagctagctttaaggcagtctatgagaaataccacgatcaatacgatccctatgtggaagaagttgagcagattcgatggaaactagtggagcgaccagattgtttctatcattttgtccttgttgatgagacaattgttggttttcttagattggttatcaaagacgaggagaagcgtgcttggcttggtacggcggctattcttccccaatatcaagggcagggctacggctcagcagcgatggctttattagagaaaacctatcctaagcttacaaagtgggatttatgtacgattgcgcaagaaaaactaatggtcagtttttatgaaaaatgtggttatcattcaacccataccgaacctgagcaagaaggaatggatatggtctatatgacaaagaagatagaa

SEQ ID NO: 1714 - protein, 156 aa, Streptococcus agalactiae
MITLQKAEASDLEKIIAIQRASFKAVYEKYHDQYDPYVEEVEQIRWKLVERPDCFYHFVLVDETIVGFLRLVIKDEEKRAWLGTAAILPQYQGQGYGSAAMALLEKTYPKLTKWDLCTIAQEKLMVSFYEKCGYHSTHTEPEQEGMDMVYMTKKIE

SEQ ID NO: 1715 - DNA, 456 bp, Streptococcus agalactiae
atggatatttttgatgagttatttgatttctcaggtgcaaagatcgctcttttctgcgagggaaagattttgaccagcctaagagatgattttccagatttgccctatgcaggcttttgggacttaccaggcggtggtcgtgaggacaatgaaacacctttggaatgtctttttcgtgaagttgatgaagaattaagtctgaccttaactcgaaaccatattgattgggtcaagacttataggggtatgttgaagcctgataaattatcagtttttatggttggacatatcagtcagaaagagtacgatagcattgttctaggcgatgaaggacaagactacaaactcatgtccattgacgaatttttaagccataaaaaggtcattcctcagttgcaggagaggttgagagattatttggaggtggaagatgattactttacaaaaggcggaagc

SEQ ID NO: 1716 - protein, 152 aa, Streptococcus agalactiae
MDIFDELFDFSGAKIALFCEGKILTSLRDDFPDLPYAGFWDLPGGGREDNETPLECLFREVDEELSLTLTRNHIDWVKTYRGMLKPDKLSVFMVGHISQKEYDSIVLGDEGQDYKLMSIDEFLSHKKVIPQLQERLRDYLEVEDDYFTKGGS

SEQ ID NO: 1717 - DNA, 468 bp, Streptococcus agalactiae
atggctaaatttggatttttatcggtactagaagaagaattggataagcatttacagtatgactttgccatggattgggataagaaaaatcatactgtagaagtcacttttatattagaagcacaaaacagctctgctattgaaaccgtggacgaccagggggagacgagtagcgaggacatcgtttttgaggactatgtactcttttacaaccctgtcaagtctcgctttgatgctgaggactatctggtgactatcccctatgagcctaagaagggcttgtcgcgtgagtttctggcttattttgcggagactctcaacgaggttgccactgaagggttgagcgacctcatggacttcctcaccgatgacagtatcgaagagttcggtctttcttgggatacggatgcttttgaaaatggcagagcagaactgaaagagacagagttttacccttatccgagatat

SEQ ID NO: 1718 - protein, 156 aa, Streptococcus agalactiae
MAKFGFLSVLEEELDKHLQYDFAMDWDKKNHTVEVTFILEAQNSSAIETVDDQGETSSEDIVFEDYVLFYNPVKSRFDAEDYLVTIPYEPKKGLSREFLAYFAETLNEVATEGLSDLMDFLTDDSIEEFGLSWDTDAFENGRAELKETEFYPYPRY

SEQ ID NO: 1719 - DNA, 468 bp, Streptococcus pyogenes
atggcaacatacggctttttatcagtattagaagaagaaatggataagcattttcagtatgactatgctatggattgggacaagaaaaatcatgcggttgaagtgacttttgtgttagaagctcaaaataaagaggctataaaaaccattgacgatagtggcgaagtgacccaagatgatattgtctttgaggactatgtgctcttttataaccctgccaagtctcaatttgatgcagcagattatttggttactattccttttgacgctaaaaagggcttttctcgtgaattcttagcttactttgcgcaatttctcaacgatgttgctattgaagggcacagcgatttgatggatttcttagcagatgacagcaaggctgatttcttcttggagtggaacgcgcaagcttttgaagaaggtcaacaaggactagaagaagcagcaagttacccttacccaaggtac

SEQ ID NO: 1720 - protein, 156 aa, Streptococcus pyogenes
MATYGFLSVLEEEMDKHFQYDYAMDWDKKNHAVEVTFVLEAQNKEAIKTIDDSGEVTQDDIVFEDYVLFYNPAKSQFDAADYLVTIPFDAKKGFSREFLAYFAQFLNDVAIEGHSDLMDFLADDSKADFFLEWNAQAFEEGQQGLEEAASYPYPRY

SEQ ID NO: 1721 - DNA, 489 bp, Streptococcus agalactiae
atgattatcagacctatgcaggactgcgaccgtgaggcagttctgaccttacaaaatactggctggactgctcttacctctcctgtctatgaccgcaagtggactgagagtgatttggagaagaatctggcaaatggcatgtccttctttgtcgctgaggtcgatgataagatcgctggcgtcttggactttggtccctactatcctttcccagctggcaagcatgttgccactttcggcattctcatcgctgaaccctaccaaggtcagggactgggtaaagctctcttgaaagctctgctaactgaggctaaagctcaaggttacatcaagattgccatgcatgtcatgggcaataacagcagagccatttccctctatcaaaaatacgggtttaccgaagaggctcgaatcactaaagcctttttcattgaaaatcattatgttgatgctttaattttcgcaaaagatttggagaataatcatggc

SEQ ID NO: 1722 - protein, 163 aa, Streptococcus agalactiae
MIIRPMQDCDREAVLTLQNTGWTALTSPVYDRKWTESDLEKNLANGMSFFVAEVDDKIAGVLDFGPYYPFPAGKHVATFGILIAEPYQGQGLGKALLKALLTEAKAQGYIKIAMHVMGNNSRAISLYQKYGFTEEARITKAFFIENHYVDALIFAKDLENNHG

SEQ ID NO: 1723 - DNA, 522 bp, Streptococcus pyogenes
atggttcagcaaagtctcgttattgaagaaggcgtacctcaagatgcaaaagctgtactttccttagtgacggcagctgccaaagaaacagattttataacaggcgtagagactatattagaggctactcctcaagaattgtcagactttttatcaagaagtcaaacctcttttattgatttttgcctgctagctagattagatgaaaaagtagtagggcttttaaatctttctggggaagtattatcccaaggccaagctgaagcagatgtatttatgttagttgctaagacttaccgtggttatggtatcggtcaattattgttagagattgctcttgattgggctgaagaaaacccttatatcgaaagccttaagttggacgttcaagtaagaaatactaaggctatttacctgtataaaaagtatggttttcgtattgaaagtatgcgaaaaaacgacatcaaatcaaaaaatggagatgacttagatgtttatcatatgcgtaaatctgtaagtcag

SEQ ID NO: 1724 - protein, 174 aa, Streptococcus pyogenes
MVQQSLVIEEGVPQDAKAVLSLVTAAAKETDFITGVETILEATPQELSDFLSRSQTSFIDFCLLARLDEKVVGLLNLSGEVLSQGQAEADVFMLVAKTYRGYGIGQLLLEIALDWAEENPYIESLKLDVQVRNTKAIYLYKKYGFRIESMRKNDIKSKNGDDLDVYHMRKSVSQ

SEQ ID NO: 1725 - DNA, 1266 bp, Streptococcus agalactiae
atggctgacaatcttgctctacgtatgcgtcctcgcaatattaatgaagttatcgggcagcaacatctcgttggtaatggcaaaattattgatcgaatggttgcagctaatatgttatcttccatgatcctatatggcccaccaggtattgggaagacttctattgcttctgctattgctggtactactaaatatgcctttcgtacttttaatgccactgttgatagtaaaaaacgtcttcaagaaattgcagaagaagctaaattttctggtggcttagttttattacttgacgagattcatagacttgacaagacaaaacaagattttcttttacctctacttgagaatggcaatattattatgattggagcaacaactgaaaatcctttcttttcagtaactcctgccattagaagtagggtacaaatttttgagttagaacctctttctaacgaggatattaaaaaagccattcagctagcaatttccgataaagaacggggatttccttttttagtgacaattgatgatgaggcgctagattttattgttaccgccacaaatggagacctacgatctgcttataattccttggatctagcagtcatgtctacttctcctaatgaagatggtagccgtcatattagtctagagacaatggaaaatagtctgcagtgtagttatattacaatggataaaaacggagatgggcattatgatatcctatcagccttacaaaaatcaattagaggttctgatgtcaatgccagcctgcactatgccgctcgtttagtagaagccggagatttacctagtttagcaagacgtttgaccattattgcttatgaagatatcggcttagctaaccccgaagcacaaatacatactgtgactgcattggaagctgcccaacgcattggttttccagaagctcgtattcttattgctaacattgttgtggatttagctctatcacctaaatcaaattcagcctatttggctatggatgcagctttagctgatttacgtcgttcaggaaatttacctattccacgtcacctaagagatggacattacagcggtagtaaaaccttgggcaatgcaagggattacaagtaccctcacgcctatcctgaaaaatgggttaaacaacaatacttaccagataaactagtaggacataattactttgaagccaatgaaactggtaaatacgaacgcgcacttggttcaaataaagagcgcattgataagctctcagac

SEQ ID NO: 1726 - protein, 422 aa, Streptococcus agalactiae
MADNLALRMRPRNINEVIGQQHLVGNGKIIDRMVAANMLSSMILYGPPGIGKTSIASAIAGTTKYAFRTFNATVDSKKRLQEIAEEAKFSGGLVLLLDEIHRLDKTKQDFLLPLLENGNIIMIGATTENPFFSVTPAIRSRVQIFELEPLSNEDIKKAIQLAISDKERGFPFLVTIDDEALDFIVTATNGDLRSAYNSLDLAVMSTSPNEDGSRHISLETMENSLQCSYITMDKNGDGHYDILSALQKSIRGSDVNASLHYAARLVEAGDLPSLARRLTIIAYEDIGLANPEAQIHTVTALEAAQRIGFPEARILIANIVVDLALSPKSNSAYLAMDAALADLRRSGNLPIPRHLRDGHYSGSKTLGNARDYKYPHAYPEKWVKQQYLPDKLVGHNYFEANETGKYERALGSNKERIDKLSD

SEQ ID NO: 1727 - DNA, 1266 bp, Streptococcus pyogenes
atgcctgatcatttagcgctcagaatgcgccccaaaaccatttcagaggtcatcggacaaaaacaccttgttggcgaaggcaaaatcatccgtcgcatggtggaagcaaatagactatcgtccatgatcctctatggccctccaggaatcggtaaaacttccattgcttctgctattgctggtactactagatatgcctttcggacctttaatgccaccattgacagcaaaaaacgtctccaagaaattgcggaagaagctaaattttctggtggcttggtattattactagacgagattcatcgccttgacaagacaaaacaagattttcttttacctttacttgagaatggcaccattatcatgattggcgcaaccactgagaaccccttcttttcagtgacacccgctatcagaagcagggtccaaatttttgaattggaaccactttctaacgaggatattaaaacagccattcagctagcaatttccgacaaagaacggggatttccttttttagtgacaattgatgatgaggcgctagatttcattgttaccgccacaaatggagacctacgatctgcttataattccttggatctagcagtcatgtctacttctcctaatgaagatggtagtcgtcatattagtctagagacaatggaaaatagtctgcagcgtagttatattaccatggataaaaacggggacgggcattatgatgttttatctgccttacaaaaatccattagaggttctgatgtcaatgctagcctgcactatgccgctcgtttagtagaagctggagacttgcctagtttagcaagacgattgaccattattgcttacgaagatattggcttagccaaccctgacgcccaagttcataccgtcaccgcactagatgccgcccaacgcattggttttccagaagctcgtattcctatcgctaacgtggtcattgatttggctctatcacctaaatccaattcagcttatttagctatggatgcagctttagctgatttgagaacatcaggcaacctccccattccaagacatcttagagacgggcattatgctggcagcaaggacctaggcaatgccaaagattacctctacccacacgcctaccctgaaaaatgggtcaaacaacaatacctaccagataaattagtaggacatcattattttgaagccaatgaaaccggtaaatacgaacgcgcacttggttcaaataaagagcgtattgataagctctcagac

SEQ ID NO: 1728 - protein, 422 aa, Streptococcus pyogenes
MPDHLALRMRPKTISEVIGQKHLVGEGKIIRRMVEANRLSSMILYGPPGIGKTSIASAIAGTTRYAFRTFNATIDSKKRLQEIAEEAKFSGGLVLLLDEIHRLDKTKQDFLLPLLENGTIIMIGATTENPFFSVTPAIRSRVQIFELEPLSNEDIKTAIQLAISDKERGFPFLVTIDDEALDFIVTATNGDLRSAYNSLDLAVMSTSPNEDGSRHISLETMENSLQRSYITMDKNGDGHYDVLSALQKSIRGSDVNASLHYAARLVEAGDLPSLARRLTIIAYEDIGLANPDAQVHTVTALDAAQRIGFPEARIPIANVVIDLALSPKSNSAYLAMDAALADLRTSGNLPIPRHLRDGHYAGSKDLGNAKDYLYPHAYPEKWVKQQYLPDKLVGHHYFEANETGKYERALGSNKERIDKLSD

SEQ ID NO: 1729 - DNA, 99 bp, Streptococcus agalactiae
ttggctttgtttctgaatcaacaacatgggattccattccttggtaactttgaaaaagccagagatgaaaaaggctacaatggtcatcagacaagctat

SEQ ID NO: 1730 - protein, 33 aa, Streptococcus agalactiae
MALFLNQQHGIPFLGNFEKARDEKGYNGHQTSY

SEQ ID NO: 1731 - DNA, 108 bp, Streptococcus agalactiae
atgggattccattccttggtaactttgaaaaagccagagatgaaaaaggctacaatggtcatcagacaagctattaatacgcctgcagttttacgaaagattacagag

SEQ ID NO: 1732 - protein, 36 aa, Streptococcus agalactiae
MGFHSLVTLKKPEMKKATMVIRQAINTPAVLRKITE

SEQ ID NO: 1733 - DNA, 759 bp, Streptococcus agalactiae
atgaccggattgatccccatgctcaaaaaagagtggctagaaaatagccgtagtcataaagctcttgcccttctccttatttcaatcattttcggaatattaggaccactcacagcattactgatgccagaaatcatggcagggattttgcctaagaaactgcaagaagctattcctgacccaacctaccttgattcttatagtcaatattttaaaaatattaatcagctaggattgattctattagtttttctttttagtggtagtttgactcaagaatttaccagaggtacacttattaatcttattaccaaaggactaagcaaaaaagccattatcttagcaaaatttatcatgatgacacttatttggagcatcagctatatactaggatcacttacccagtatgcttatacactttattattttaataatcatggtcagcataaacttattgtttacggtacatcctggatctttggattattattgctgagtctcattcttttttactctgtaatctttcgtaaaactgcaggcgtattaatagcttgtctgatgaccattgtagcctttttcatctctggctttttcaaagttaccaaggaatggaatcccatgttgttgattcagaaacaaagccaaatcctaagtggtcaatatgacatcaaagatttattacaaccaactctcttagtcatcggtattatcttaatcagtttgatatctgctaaagtcatttttgagaaaagtgaagtt

SEQ ID NO: 1734 - protein, 253 aa, Streptococcus agalactiae
MTGLIPMLKKEWLENSRSHKALALLLISIIFGILGPLTALLMPEIMAGILPKKLQEAIPDPTYLDSYSQYFKNINQLGLILLVFLFSGSLTQEFTRGTLINLITKGLSKKAIILAKFIMMTLIWSISYILGSLTQYAYTLYYFNNHGQHKLIVYGTSWIFGLLLLSLILFYSVIFRKTAGVLIACLMTIVAFFISGFFKVTKEWNPMLLIQKQSQILSGQYDIKDLLQPTLLVIGIILISLISAKVIFEKSEV

SEQ ID NO: 1735 - DNA, 900 bp, Streptococcus agalactiae
atgacagccatttctttacaaaatctgtccaaatcctttggggatcaaatcattttaaatcaggtttccttagagctagaagaaaataagatttatggctttgttggtccaaacggggccggtaaaaccaccaccattaagatgattttaggtttattgaaagtagactctggtaccatttcagtaatgggaaacccagtgacttttgggcagacaaaaagtaatcaagttattggttatttgcctgacgttccggagttttatgactatatgacggcacaagaatacttacaactttgcgctggcttagctcaaaacaaaaccagtttaccaattgctgatctgctagaacaggtcggcttagccgataatcagcaacgcattagcacctattctcgaggtatgaaacaacgcttaggtctagcccaagcactgattcacaatcctaaaattctgatttgtgatgaaccaacatcagccttagaccctcaaggacgacaagaaatcctctccattatttctcaactacgtggtcaaaagacagtcattttctcgacacacatcttatcagatgtggaaaaagtctgtgatcaagttctaattctaacaaaatcaggtatccataatctagaagatctaagagacaaagcgtcagccagtgtgaatcaactgaaccttttaataaaagtctcagacaatgaagcacaaaaattagctctgcgatttcctttaaatcaaaaagatcaatattataaggtacatttggaattgagtgaggcaaacaatcgtgaacaagcattagcaagtttttacaggtatttagttgagcaagaaatcacgccatacttcattgaattactggaagatagcctggaagacttctatttggaggtgattaaa

SEQ ID NO: 1736 - protein, 300 aa, Streptococcus agalactiae
MTAISLQNLSKSFGDQIILNQVSLELEENKIYGFVGPNGAGKTTTIKMILGLLKVDSGTISVMGNPVTFGQTKSNQVIGYLPDVPEFYDYMTAQEYLQLCAGLAQNKTSLPIADLLEQVGLADNQQRISTYSRGMKQRLGLAQALIHNPKILICDEPTSALDPQGRQEILSIISQLRGQKTVIFSTHILSDVEKVCDQVLILTKSGIHNLEDLRDKASASVNQLNLLIKVSDNEAQKLALRFPLNQKDQYYKVHLELSEANNREQALASFYRYLVEQEITPYFIELLEDSLEDFYLEVIK

SEQ ID NO: 1737 - DNA, 1077 bp, Streptococcus agalactiae
atgattggtgatactattttatttgaacgcacacgtcttggtatgactcaagaaaaactgagtgactatttgcatttaaccaaggctacaatttccaaatgggaaaacaatcaggcaaaacctgatatcgattacttgattctaatggcaaaactatttgatatgactttagatgagttggtaggttttcaaaaaacactaactgactctgaaagagggcatctttttgaacaattgcgaggacaaattgaccaacaaaatgggactgaattctttcataacattcaagacttagcaaaacattatatcaatgataacaaaacccttttactcctcgtccaactggttttgagcaatccagctcagattgatagtaacccttggtcattagaactaatcaatcggattatcagcaaaacaactgttgaatctgaacttcagtctgccatcatgttaaaagtagtaatactttttcaacaaaaaaaatacgatgatattatcgcactttatcagaatcgtccttataaacttggtgaggagttatttttggccaatagcttcgctgctaagggggaaacagagcaagcaaaacaagttttacaagttgaaatttaccagcaaattctgctgatttgccaatatctgttaagcctaacggcttttgaatgtcccgaacggcaagaattcattttggaacgactggaaaatcttatggccacatttgacctcaaaaagcttcatcctaatacagccatttcctcttactacagtttggcctgttatttcgctgaaagtcagccccaaaaagcaattagttacttaaatcaattggcagaggctacccgaaacctattaaaacaatttgaactgcatggcgacagcttttttgatgccatcgatccttggctccaacagttaccaacaggaattcagccaccaaccaattctcaaatcttaatccaaagggtaattgccctgtttcatagtccacagtttcaatacttacagcaagaaaagtccttccaagctcagcttgctgctttaaaaaaactcgaaaaggagatttcagatgaacac

SEQ ID NO: 1738 - protein, 359 aa, Streptococcus agalactiae
MIGDTILFERTRLGMTQEKLSDYLHLTKATISKWENNQAKPDIDYLILMAKLFDMTLDELVGFQKTLTDSERGHLFEQLRGQIDQQNGTEFFHNIQDLAKHYINDNKTLLLLVQLVLSNPAQIDSNPWSLELINRIISKTTVESELQSAIMLKVVILFQQKKYDDIIALYQNRPYKLGEELFLANSFAAKGETEQAKQVLQVEIYQQILLICQYLLSLTAFECPERQEFILERLENLMATFDLKKLHPNTAISSYYSLACYFAESQPQKAISYLNQLAEATRNLLKQFELHGDSFFDAIDPWLQQLPTGIQPPTNSQILIQRVIALFHSPQFQYLQQEKSFQAQLAALKKLEKEISDEH

SEQ ID NO: 1739 - DNA, 594 bp, Streptococcus pyogenes
gtgatatttatggaaattggtcagcaaattattcgctaccgtaaacaacaagcgctctcgcaagaaaaattagccgagaaagtctatgtaagccgtcagagcatatctaactgggaaaatgacaaaacttacccagacatccatagcctcttactcctaagtcaaatttttcaagtgagcttagaccaactcattaaaggagacattgagaaaatgaaatataccatcactcaggttgataaaaagaattttaaacgagataccaaagtaatggtaacattgatgatactattaatgatttcaagttatccattagtctatttcttagagtggctaggacttggcatttttgttttattatcgataattactatgacttatgctaatcgtgtggaacgttttaagaaaaaatatgatgtgcaaccttataaggaaatcctagctgtttcaaatggaaaattattagacgaaatcgaaaaacgagaagaaagagcaacacttccttatcagaaaccccttattgtcactgtatttttcctcattactgttgcttttgcttttgcaagtcgttttatgtttacatggttattccat

SEQ ID NO: 1740 - protein, 198 aa, Streptococcus pyogenes
VIFMEIGQQIIRYRKQQALSQEKLAEKVYVSRQSISNWENDKTYPDIHSLLLLSQIFQVSLDQLIKGDIEKMKYTITQVDKKNFKRDTKVMVTLMILLMISSYPLVYFLEWLGLGIFVLLSIITMTYANRVERFKKKYDVQPYKEILAVSNGKLLDEIEKREERATLPYQKPLIVTVFFLITVAFAFASRFMFTWLFH

SEQ ID NO: 1741 - DNA, 315 bp, Streptococcus agalactiae
ttggatataacagcttatcaaaaatgggttagtgaattttacaaaaaaagaaattggtaccagtataattcgtttataagaagtaattttttatgcgaagaggttggggaattagcgcaagctattcgaaaatatgaaattggtcgtgatagaccagatgaaatcgagaaatcaaacaacgaaaatttaaacgatatcaaagaagagcttggggatgtattggataatatttttattctcgcagatcaatataacatttccttagaagaaattattgaggcacataaaaacaaattagaaaagagatttgaagaa

SEQ ID NO: 1742 - protein, 105 aa, Streptococcus agalactiae
MDITAYQKWVSEFYKKRNWYQYNSFIRSNFLCEEVGELAQAIRKYEIGRDRPDEIEKSNNENLNDIKEELGDVLDNIFILADQYNISLEEIIEAHKNKLEKRFEE

SEQ ID NO: 1743 - DNA, 564 bp, Streptococcus agalactiae
atgaaaataactgtcttttgcggtgcaagcaacgggaataacccaatctacagtcagaaaatagtagaacttggtgaatggatgattaaaaataatcatgatttagtttatggtggcggaaaagttggcttaatgggagtaattgctgatactgttattaataatggtggccaagcaattggcgttatacctacatttttaaaagatagagagatcgcccacactaatttatcaaagcttattgttgtcgaaaatatgccacaacgaaaagggaaaatgatgtctcttggagaagcatatattgcattacctggtggaccaggaactttagaggaaatttcagaggtaatctcttggtctcgaattggtcaaaatgatagtccatgcattctttataatatcaatggttatttcaatcacctagaaagtatgtttgatcatatggtctctgaaggcttcctgagtcaaaatgatagaaataacgtactattctcagacgatatcattgaaattgaaaagtttattaaagattatcaatcacctacaattcgtaagtatagcaat

SEQ ID NO: 1744 - protein, 188 aa, Streptococcus agalactiae
MKITVFCGASNGNNPIYSQKIVELGEWMIKNNHDLVYGGGKVGLMGVIADTVINNGGQAIGVIPTFLKDREIAHTNLSKLIVVENMPQRKGKMMSLGEAYIALPGGPGTLEEISEVISWSRIGQNDSPCILYNINGYFNHLESMFDHMVSEGFLSQNDRNNVLFSDDIIEIEKFIKDYQSPTIRKYSN

SEQ ID NO: 1745 - DNA, 153 bp, Streptococcus agalactiae
atgatagatgaagaatttaaaaatttggtagaacaaaaaagtataggtaaaaaactaaatatcaataataaagaagctattgaagaattttttgtagatgaagatatttctgagtatgattctttattttcgaataaaattgaaaagttagaa

SEQ ID NO: 1746 - protein, 51 aa, Streptococcus agalactiae
MIDEEFKNLVEQKSIGKKLNINNKEAIEEFFVDEDISEYDSLFSNKIEKLE

SEQ ID NO: 1747 - DNA, 1125 bp, Streptococcus agalactiae
atggcaaatgcaagatatagaaggagaggaaaccagaatttatgggcttatgaaatccgagaggaaggtaaaacagttgcttataatagtggctttaaaacaaagaaactagcagaggcagaagcagagcctattctccaaaaattgagaactggtagcataatcacaaaaaatatttcattaccagaactttatcaagaatggctagatttaaaaatcatgcctagtaatagaagtgatgtgactaaaaagaaatatcttagtcggaaggtaacgcttgaaaagctatttggtgataaacccatttctcaaatcagacctagtgaatatcaacgaattatgaataactatggacaacgagttagtcgcaatttcttaggccggttaaatactggcgtgaaacagagtttgcaaatggctattgctgataaggttatgatagaagattttactcaaaatgtagaattattctcaacagtaaaaagtcaggatgcagatagtaaataccttcatagtgaaaaagcttatttggatctcattaatgctgtaaaagataaattcaattataagaaatcggtagtaccatatattatctattttttattaaaaacaggtatgagatacggagaattaattgctttaacttgggaagatattgattttgataagggaatctttaaaacatatagaagatttaactctgaaacaagtcagtttgttccacctaaaaataaaacctcaatcagaattgttccagttgataatgagtgtctagaaatcttgaaaaatcttaagattgaacaaaatcaatcaaataaagagcttggattacaaaatacaaacaatatggtatttcaacattttggttatcctaatagtgtaccgagtacaaacggtacaaataaggttttaagaggcatcgttcaagagttgaatatagaacccatcattacaacaaaaggtgctagacacacctatggaagcttcctatggcatagaggatatgatctaggaattattgcgaaaattcttggccataaagatatttctatgctaattgaagtctatggtcatactcttgaagaaaaaattcaagaagagtacaatgagataaaacaactatgg

SEQ ID NO: 1748 - protein, 375 aa, Streptococcus agalactiae
MANARYRRRGNQNLWAYEIREEGKTVAYNSGFKTKKLAEAEAEPILQKLRTGSIITKNISLPELYQEWLDLKIMPSNRSDVTKKKYLSRKVTLEKLFGDKPISQIRPSEYQRIMNNYGQRVSRNFLGRLNTGVKQSLQMAIADKVMIEDFTQNVELFSTVKSQDADSKYLHSEKAYLDLINAVKDKFNYKKSVVPYIIYFLLKTGMRYGELIALTWEDIDFDKGIFKTYRRFNSETSQFVPPKNKTSIRIVPVDNECLEILKNLKIEQNQSNKELGLQNTNNMVFQHFGYPNSVPSTNGTNKVLRGIVQELNIEPIITTKGARHTYGSFLWHRGYDLGIIAKILGHKDISMLIEVYGHTLEEKIQEEYNEIKQLW

SEQ ID NO: 1749 - DNA, 183 bp, Streptococcus agalactiae
atgacaaataatgtaatgactaataaagacttaattgaaatgggctattgtccttcaacagcaaaccatattatccatcaagctagaaatttaatggtggaacgtggttatactttctatgatcgtaaacgtcttatggttgtccctagaagtgcagtttcagaagtgattggacttgaggta

SEQ ID NO: 1750 - protein, 61 aa, Streptococcus agalactiae
MTNNVMTNKDLIEMGYCPSTANHIIHQARNLMVERGYTFYDRKRLMVVPRSAVSEVIGLEV

SEQ ID NO: 1751 - DNA, 1026 bp, Streptococcus agalactiae
ttgtttaacagcgttaagatagattatttcgctgttacagtaaaagatgtcactccagagtatgtaatagagaaacttttattaatacctttaaccaattttactttgaacgaatggggagtcaataagtatcaacgtcactatgcttgttcagagataaaagtttactttaacttagatcctaatagtagcatgggagttcatgttgaactaaaaggacaaggctgtcggcagtatgaggaatttatagaaggtaatgataataattggactagtttagtaaagagactaattgataataattcgaactttaccagattagatattgcgaatgatatttttgatgagtcgttaaatgttcaaaggctttatgagtatagtaaaaaaggcttatgtataacaactgcgagacatgcagagtaccatgaaaaattcgttattgattcaggtgaactcgttggtgaaacagttgtctttggtgcaagaggaaaccaacaatggtgtgtttataataaattaatggagcaaaatggaaaattacagacggatattgacattaattcatgggttcgagctgagctaagatgttggcaagagaaggctaatctaattgctcatcagctaaatgatatgcgccctctcgcctctatatattttgaggctatcaatggacattaccgttttgtttctccaaaagcaagagataaaaataaacgaagaagagaatctgtaagatggtggcaaaactatatcaatacagaggagaaaacacgactgagtattgtgagagaaaaaccaacattaaggcagtctgaagcgtggactgataaacaagtgtcaaagacaattgcaaaggtttatatggcaaaatacgaagcctacggtatcgatcaggcagaggtctttttacaagacttacttcgcaggggagttgaaaagtttactgataatgacgaaaaggagattgaacaatatgtacgtgaacagcaaagctctgaatattggggcataaaaaaagccgacttg

SEQ ID NO: 1752 - protein, 342 aa, Streptococcus agalactiae
MFNSVKIDYFAVTVKDVTPEYVIEKLLLIPLTNFTLNEWGVNKYQRHYACSEIKVYFNLDPNSSMGVHVELKGQGCRQYEEFIEGNDNNWTSLVKRLIDNNSNFTRLDIANDIFDESLNVQRLYEYSKKGLCITTARHAEYHEKFVIDSGELVGETVVFGARGNQQWCVYNKLMEQNGKLQTDIDINSWVRAELRCWQEKANLIAHQLNDMRPLASIYFEAINGHYRFVSPKARDKNKRRRESVRWWQNYINTEEKTRLSIVREKPTLRQSEAWTDKQVSKTIAKVYMAKYEAYGIDQAEVFLQDLLRRGVEKFTDNDEKEIEQYVREQQSSEYWGIKKADL

SEQ ID NO: 1753 - DNA, 417 bp, Streptococcus agalactiae
atggcaacaattaaattaacagatacagtaagtctaggtgacttaaacttggaaaaatctcaatttgaaattcccaaaaaagtaattatcttatccgcacgtattaacaataaatataataatatcaatggtgaatcagttcaaactgatgaaatttcaaaaataacttgccaagtacaagatgcggaaaaagttaaagtcttaaaagaaatgggaatgtctgccgacgacttaaaaacaattccattagaaatcttggataatcttgataagattagtaaaattgcaagcaatgatgggcttattgaaaaaacgattgaattgattaatccccaagttcgtctagcatggaatataaatcgaaaaggttggggtggaataaaactgactacctcagatatcaaaattataggtgaa

SEQ ID NO: 1754 - protein, 139 aa, Streptococcus agalactiae
MATIKLTDTVSLGDLNLEKSQFEIPKKVIILSARINNKYNNINGESVQTDEISKITCQVQDAEKVKVLKEMGMSADDLKTIPLEILDNLDKISKIASNDGLIEKTIELINPQVRLAWNINRKGWGGIKLTTSDIKIIGE

SEQ ID NO: 1755 - DNA, 612 bp, Streptococcus agalactiae
atgacatatataattcaaaatttcggtccaaatttgactagattacgaaaagaacgtggaatcagtcaagttgaactttccaatcaactccaaattggtaagcagtcaatttctgattatgaaaagcaaaaggcgtttcctacatttgctaatctagataaaattgcagaatattttcgtgcaacccccactcaactattcggaaccataaaagaaattgagctagagaatagtgtcttagaaacagatacttatacttcaaaagcagatcatattcttaagtctgttaaagaattttatgaactaactaattatcttaatgattttaatagcccagaattttacaccagcgaaacaattaataatttgtatcatcttattactccaaaaccaatattggatccagaaactgatgaacaacttatgagatttattccaactggaaaactagtacgagcagaagatattagcggaaatcccgaagactatgaattggcatttaaaccaagtccacttactcaaactttaagtagaatagatgaaataaatgaactttatgaaaaagtaaggtttgttgaagcttttaaacataataatgaaactaattctaga

SEQ ID NO: 1756 - protein, 204 aa, Streptococcus agalactiae
MTYIIQNFGPNLTRLRKERGISQVELSNQLQIGKQSISDYEKQKAFPTFANLDKIAEYFRATPTQLFGTIKEIELENSVLETDTYTSKADHILKSVKEFYELTNYLNDFNSPEFYTSETINNLYHLITPKPILDPETDEQLMRFIPTGKLVRAEDISGNPEDYELAFKPSPLTQTLSRIDEINELYEKVRFVEAFKHNNETNSR

SEQ ID NO: 1757 - DNA, 765 bp, Streptococcus pyogenes
atggctaaaaatagtccccaagatttaataaatagagaaattttctcaacaaatctcaacatgcttatggctaaaaagaatatcaaacagatagatattcacaacaaactaggaatacctaagagtacgataactggctatgttaaaggtcgttcactcccaactgctggaaacgttcaaaagctggcggacttcttcggagttctaaaatcagacattgacccccgttttgattctaataatattgaaacaaatagtaatattatcccatcaaccctacaaaaagtaacatctactttatctcagctagaacacaagcgacaattaaacgtccttgattatgctgaaacacaattagaacaacaaaacacagtagaagaaccacaagccacctactacacttacaattactacgaccacgcagcttcagctggtacaggtcagtatctaaatgatgtacaagtagaaacaattgaattaccagtcgattacgacgctgattttgtcataccggtttatggcgattctatggaacccgaataccattctggggactatgtatttatcaaactatctattaacctgtcagatggtgatataggagtttttgagtattacggtgatgcttatatcaaacaacttgttataaacgattctggagcatttctgcatagtctgaacgacaagtatgacgatatactcatagatagagatagtgatttccgtattatcggagaagttattgggagttttacatctaaatca

SEQ ID NO: 1758 - protein, 255 aa, Streptococcus pyogenes
MAKNSPQDLINREIFSTNLNMLMAKKNIKQIDIHNKLGIPKSTITGYVKGRSLPTAGNVQKLADFFGVLKSDIDPRFDSNNIETNSNIIPSTLQKVTSTLSQLEHKRQLNVLDYAETQLEQQNTVEEPQATYYTYNYYDHAASAGTGQYLNDVQVETIELPVDYDADFVIPVYGDSMEPEYHSGDYVFIKLSINLSDGDIGVFEYYGDAYIKQLVINDSGAFLHSLNDKYDDILIDRDSDFRIIGEVIGSFTSKS

SEQ ID NO: 1759 - DNA, 1554 bp, Streptococcus agalactiae
gtgaattttatagaacaaatcagtgaaaacaatcaattcccaattatatttgttggttcaggtattactcaaagatattttgagaatgcaccgacatgggagaaactattaaaagatatatggctagagttgtttgatgaagaatcatattatgcaaaagccttcgaattaagagaaagatttgaaaacaatgattttgatatttatactaatctagcttcattattagaaaaagaagtgtcaaaagcttttataaatggtaatattcaagttgataatttagacttaaagacagcttatgaattaaatatatctccatttaaacagttagtagcaaatagattctcaaacttaaaaattcgggaagagaaaattgaggagataaaacaattttctcaaatgttatctaaagcaagaataataattacaactaattacgataattttattgaagagtgtttaaaaacaataaatgtcagtgtgaagattaatgtaggaaataaggggctatttttaaagtcttctgattatggtgaattgtataagatacatggaactgtagatgatgcttcaacaataactataacaaaggaagactatgaaaagaatgtaacaaagtcagcattaattaatgcaaaaatactttcaaatttggtggagtcaccaatcctatttttgggctattcattaactgatgaaaatattagaaaattattgacagattttgcagaaaatagtccttttgatatatcggaatcagctcaaaaaataggtgtagttgaatatctaccagattctgaatctattgaaacagtggtctcaagcttacctgacttaagcgtttactattcgtgtttaaaaactgataattttaccaatatttatagattaatctctaagataaatcaaggatttttaccttcggaaatagcgaaatatgaaaatgtatttcgaaaaataatagaagttaaaggagagagcaaagatttaaaaactgtcttgactagttatgaagatttagcaaacctaacagaggatgaaattcgttcgaaaaatatagttgttgcctttggggatgaaagatacatatataagtttccagattttaaagagtatgttagatcatattttctagataaagaaacaattcctcaggaaattgttattcgatttattgcaacccaaccagtagcaagtcatcttccaataaaaaaatatatgtttgcaatgtcagaatatatttctaaagattcaaataagtacactgaaaacattaaaaaaagattatcaaaggaagaagagctatcattagatgactttactagtagtattggcgtcccattgctacactcaaaaacgttagaaagacaaacggaaattgttggcatacttgaagctgacgtaccggacaatgttagatataattttatagcaactcatattaaaaattttccaaaagaagaattatttttgctagttgaaaaaataattgatgaaggaatttttgaaacgtctagacgaagatttttgaaagcttttgatttattgcattac

SEQ ID NO: 1760 - protein, 518 aa, Streptococcus agalactiae
MNFIEQISENNQFPIIFVGSGITQRYFENAPTWEKLLKDIWLELFDEESYYAKAFELRERFENNDFDIYTNLASLLEKEVSKAFINGNIQVDNLDLKTAYELNISPFKQLVANRFSNLKIREEKIEEIKQFSQMLSKARIIITTNYDNFIEECLKTINVSVKINVGNKGLFLKSSDYGELYKIHGTVDDASTITITKEDYEKNVTKSALINAKILSNLVESPILFLGYSLTDENIRKLLTDFAENSPFDISESAQKIGVVEYLPDSESIETVVSSLPDLSVYYSCLKTDNFTNIYRLISKINQGFLPSEIAKYENVFRKIIEVKGESKDLKTVLTSYEDLANLTEDEIRSKNIVVAFGDERYIYKFPDFKEYVRSYFLDKETIPQEIVIRFIATQPVASHLPIKKYMFAMSEYISKDSNKYTENIKKRLSKEEELSLDDFTSSIGVPLLHSKTLERQTEIVGILEADVPDNVRYNFIATHIKNFPKEELFLLVEKIIDEGIFETSRRRFLKAFDLLHY

SEQ ID NO: 1761 - DNA, 1119 bp, Streptococcus agalactiae
atggcaacatatagacaaagaggtaaaaagaaattatgggattatagaatattcaatgaaaaaagtgagttagttgcttctggttcaggttttaagacaaagcgtgaagctatgaatgaagctatgaggatagagcaacaaaagttattagtaaattctatatcttctgatataacattgtatgatttgtggtttgaatggtacagtttaattataaagcctagcaatctagcagagactacaaagaacaaatattttacaagaggttctgttattcgtaaactttttggaaatcagaaagtaaataaaataaagcatagtgcgtatcagaggaaattaaatacgtacgctgaaaaatacactaaaaaccatgttagaaggttaaattcagatataaaaaaagctatccaatttgctaaaagagatggtgtcttattatctgattttactgatggagttgtcatagctggtaggaaatttgttaaggatgcagatgataaatatctacatagtatttttgattacaagaaagtgatatcttatttagaaaacaatttggattattcaaatagtatcgtttattatttattactggtgctatttaaaacaggtttacgagtgggtgaagctttagcattaacttgggatgatgttaattttgaagatctagaaattaagacgtatcgaagatttagtggcgataagggaacttttagtccacctaaaacaaaaacttctatccgcactattcctattagtcaatctttagcattaatcttaagagatttgaaggatgatcagcaagttatgttgaaaaacttaaaaattgtaaacatgaataatcaaatattttatgactatagatatggtgtttcgacaaatagtgcgataaataaaagtcttaaaaatgttttaaaaatattaaatattaattcaaaaatgactgcaacaggtgcaaggcatacttatggaagttacttattagcaaaaggtgtagatatttgggtagttgcaagattaatgggtcataaggatattacacagttacttgaaacttatggtcacgtcttgacagaagtaataaataaggaatatgaaacggtcagaagtttagtatct

SEQ ID NO: 1762 - protein, 373 aa, Streptococcus agalactiae
MATYRQRGKKKLWDYRIFNEKSELVASGSGFKTKREAMNEAMRIEQQKLLVNSISSDITLYDLWFEWYSLIIKPSNLAETTKNKYFTRGSVIRKLFGNQKVNKIKHSAYQRKLNTYAEKYTKNHVRRLNSDIKKAIQFAKRDGVLLSDFTDGVVIAGRKFVKDADDKYLHSIFDYKKVISYLENNLDYSNSIVYYLLLVLFKTGLRVGEALALTWDDVNFEDLEIKTYRRFSGDKGTFSPPKTKTSIRTIPISQSLALILRDLKDDQQVMLKNLKIVNMNNQIFYDYRYGVSTNSAINKSLKNVLKILNINSKMTATGARHTYGSYLLAKGVDIWVVARLMGHKDITQLLETYGHVLTEVINKEYETVRSLVS

SEQ ID NO: 1763 - DNA, 330 bp, Streptococcus agalactiae
atgagtatgcaacaggtttttaatgtgagtgttcctgtaccagatgatgttgttattatttcaaaagaagaatatttaaatttattaagtgataatgaacaaggcaagtggtgggatattgataacttgcaagagttattgggaattggaaggtcaaaattgattaatgatattttgttaaatccagatataaaaaaagaagtagatttatcaattaatccaaatggttttattgtttatccgaaaggtaaaggtagtcgatataaaatattagcaacaaaagctagaaaatattttgaagataattttggttctattttattaaatagt

SEQ ID NO: 1764 - protein, 110 aa, Streptococcus agalactiae
MSMQQVFNVSVPVPDDVVIISKEEYLNLLSDNEQGKWWDIDNLQELLGIGRSKLINDILLNPDIKKEVDLSINPNGFIVYPKGKGSRYKILATKARKYFEDNFGSILLNS

SEQ ID NO: 1765 - DNA, 630 bp, Streptococcus agalactiae
atgataggggattattcagtaatggattgggctactttaggtggtgttgtaggaattatttttacaaatgtgggagttttgatttcaaactctagggataataaagctattcaacgagaacttgagcttttagaagaaggtcaagagaaattggtagacgaattttccaaaatttcgacaaatcaatatgataaatatgttctgatacaaagcaatttatcaaacaatattgaaaagaataaacaagaattagttcaaaaaaactcatatgttaaagaagatactaaatatatccgtgatgaaatgcttattgagaaaaagtcaaaggaagaagtttataatcatgtgaaaaatggagataaacttattgaaaaaatggcttttgctaatgaattaattttgaagtttggtgaagtaagcagagaaaatcaaatgttaggcttaaaagttaattctttagaggaaaaaatagtcgatttatcaaatcaacctaaaaatgatgaaatatcaaaattacgtaaatcaatttcaagttttgaaagggaattatctaggtttgaggatgtcggttatagcgaagcagaagaaataaaaagtactttaagaagaatattaaatgatcttgaagga

SEQ ID NO: 1766 - protein, 210 aa, Streptococcus agalactiae
MIGDYSVMDWATLGGVVGIIFTNVGVLISNSRDNKAIQRELELLEEGQEKLVDEFSKISTNQYDKYVLIQSNLSNNIEKNKQELVQKNSYVKEDTKYIRDEMLIEKKSKEEVYNHVKNGDKLIEKMAFANELILKFGEVSRENQMLGLKVNSLEEKIVDLSNQPKNDEISKLRKSISSFERELSRFEDVGYSEAEEIKSTLRRILNDLEG

SEQ ID NO: 1767 - DNA, 789 bp, Streptococcus agalactiae
atgtcaaaagtaaaagttttaagtttaattactgtttcaggactatttttaatggctggtaatttatcagcaagtgcagatgttgtaattagtggaggtgatactataatgctatcaggggtagatgcaggtgtatctgattctataatgccaccaccatcaagtataaatccagtaacagataccacagaaccaagtgcgccaacaccaagtacagatccaataacagataccacagaaccaagtgcgccaacaccaagtacagatccaataacagataccacagaaccaagtgcaccaacaccaagtacagatcaaacaacaggtacgacagattcaagtactccatcatcaagtacaacaaatccagtagatggaattactgataatggtactaaaccaaatgccggtattgacaaaccttctacgaataaacctagtgatcattcagaatcatctataaaaccagtaacaaagccaactattaatcaacctattacaactgtaacaggagatcaagtcattggtactcaagatggtaaagttttagtacagacaccatcaggtacgcaattaaaagatgctgctgaagttggtggaaatgttcaaaaagacggtactgtagcaattaaaaaatcagatggaaaaatagaagtattgccaaaaactggtgagggtaagactatctttacaatagtaggtctcttgttaattgctggagcagtttggattggttttaaagataatataaaaaagtatttaacctttttcaaaaagaaaagtgaaaaa

SEQ ID NO: 1768 - protein, 263 aa, Streptococcus agalactiae
MSKVKVLSLITVSGLFLMAGNLSASADVVISGGDTIMLSGVDAGVSDSIMPPPSSINPVTDTTEPSAPTPSTDPITDTTEPSAPTPSTDPITDTTEPSAPTPSTDQTTGTTDSSTPSSSTTNPVDGITDNGTKPNAGIDKPSTNKPSDHSESSIKPVTKPTINQPITTVTGDQVIGTQDGKVLVQTPSGTQLKDAAEVGGNVQKDGTVAIKKSDGKIEVLPKTGEGKTIFTIVGLLLIAGAVWIGFKDNIKKYLTFFKKKSEK

SEQ ID NO: 1769 - DNA, 546 bp, Streptococcus agalactiae
atgaaacgtagaaaaatagttttatttttaatggtgttagtgatggcttttatagtttataaagttattcaaaaagataatccagtgattaaaacaagtggtaatcatacaaaagttgaacgagttgaaccgaaacataaggttaagtcttatgattcaactaaagaagcaaaatctactttggaagctagtgatcgtcaagtatctgataaggaaaaggagaaggttaaaagatctataactgtacctattgattaccttgtaaaaatcccaacacaatcagatattaagggtgattatcaaaataaattatccattacaaatcctacagttgcccaaactgtaaaaaccatgttgatggctggttatcattttgatttggaaagtttacaagtatatgagtcagatgcgagtaatgtttatcagtttactattaatttagtaacagataaaagagacaaattaagtttagctggtaattatgtattaggtacagaccaatttgagattgcgagtgtacatggtacacctgtaaatgtagtattt

SEQ ID NO: 1770 - protein, 182 aa, Streptococcus agalactiae
MKRRKIVLFLMVLVMAFIVYKVIQKDNPVIKTSGNHTKVERVEPKHKVKSYDSTKEAKSTLEASDRQVSDKEKEKVKRSITVPIDYLVKIPTQSDIKGDYQNKLSITNPTVAQTVKTMLMAGYHFDLESLQVYESDASNVYQFTINLVTDKRDKLSLAGNYVLGTDQFEIASVHGTPVNVVF

SEQ ID NO: 1771 - DNA, 1371 bp, Streptococcus agalactiae
ttgggaatactgattgtatttccttttttattggttttattgttgactgcttcgtcaagttctcaacaagattgtcaaattacaccagatgtatcttcacaagttgaaacctcaagtgagaatgcttccaatagtgattggacaaaaaakggaacagttgcaaatcaaacagcagagaaggtattcaatgcttgggtaagtaaaggcttatctggtgcgagtgcatcagggattgttggttgggttaattcagaaggtggatttgctatgataggtcgagcagaagggcattatggtaatgatttaaaaacaaattcaattgcctttaatgtgagacctactgggttatcttactatacgactgaagctggaggtggtatttatcaaatcacacctttcacaaagtatgccccattaggcgatcccaaatgggaagatgcagatgccatgaatgcctttgttatgaaatccattaaatcaggagactggaataaagcaatggatttatcaggtggaaatcattcttttgaagagatggcacagatgactgatcccaagcaggccactttagtttggaatgcttacgaacgaggaaatactgcatatattaataaagctcaaaagactgcggatgggcaaaaagcctatgaaatatttaatggttcaaaatataaatttgatgcagaaaaattttctaaaagttttggtggtggttcaaaaacgtcctcgtctggtaagagcgatataatttctgattctacagttttatctctttgtgattcagctagtaatgcggtacagggcttatttggtaaagataagtcagggaaagttaaatacacttcttataatgcatggaaaccagatcaattaccaagtgatttgaaaaagtatgcaatagatcctaagtcagttggtttattttatcgaacgtctagtggatggaatgcgatagcttctactggtggtcaatgtacagatctttcagcaagtttgatgtatggtttatggcttaaaggcggaatgcatccaacgcaaagaatgggaaatggtaatatggttgtttctaattgggtatctgcattcggtggacgctctgaaaatactccatcttctggagctgttttttcaagttcaggtacttctagtgctgggcatactggagtggttagtcatgtatttgaaaatggcgatatgttaatagtagagcaaaattattcaacttattctggagataatagaggatttggaccatattcatggaattatcgttatgtttctactttagaattaaaaaaagagcattatagtttttataatccctctaaagctggttataaattgtctgataaagtgaaaacggtaggtagt

SEQ ID NO: 1772 - protein, 457 aa, Streptococcus agalactiae
  MISC_FEATURE (1)..(457): Xaa = Any Amino Acid
MGILIVFPFLLVLLLTASSSSQQDCQITPDVSSQVETSSENASNSDWTKXGTVANQTAEKVFNAWVSKGLSGASASGIVGWVNSEGGFAMIGRAEGHYGNDLKTNSIAFNVRPTGLSYYTTEAGGGIYQITPFTKYAPLGDPKWEDADAMNAFVMKSIKSGDWNKAMDLSGGNHSFEEMAQMTDPKQATLVWNAYERGNTAYINKAQKTADGQKAYEIFNGSKYKFDAEKFSKSFGGGSKTSSSGKSDIISDSTVLSLCDSASNAVQGLFGKDKSGKVKYTSYNAWKPDQLPSDLKKYAIDPKSVGLFYRTSSGWNAIASTGGQCTDLSASLMYGLWLKGGMHPTQRMGNGNMVVSNWVSAFGGRSENTPSSGAVFSSSGTSSAGHTGVVSHVFENGDMLIVEQNYSTYSGDNRGFGPYSWNYRYVSTLELKKEHYSFYNPSKAGYKLSDKVKTVGS

SEQ ID NO: 1773 - DNA, 99 bp, Streptococcus agalactiae
atgataaccacgaacaagtggatcaaacgtttagaaaaatctccttttgaaaaaagatatgaaataaatattgaaaaagctgaaatcgcaaccaataaa

SEQ ID NO: 1774 - protein, 33 aa, Streptococcus agalactiae
MITTNKWIKRLEKSPFEKRYEINIEKAEIATNK

SEQ ID NO: 1775 - DNA, 1998 bp, Streptococcus agalactiae
atggacaaaatagatgatggtttgattgcttcgacctttgcgaaggtaaaagatgtggatatatttgcgttaaaggcttatatggagataactcacggagctgagactggagctcaaagcattttgttagatgtttttgttaattttccctttttcctacttaacttgattgttggtttattttctgttattctacgcttttttgaaaatttcagtttgtatgatacctataaacaaacagtttatcattcgtctcaaaaattatgggaaaatctatcaggtaatgggtcttatacaagctccttgctttatttattggttgcgatttcagctttttcaatatttatttcatatcttttttcaaaaggagatttttctaaacgtttgatccacttgttcgtggttatcattttaggtatgggttactttggtacgattcaatcaacatcaggtggtatttatattttagataccgttcatcaactagctggttcgttttcagatgcggtaactaatttatcactggataatccatcaggtggtaaaacaaagatcacacaaaaatcatcagtagctgataattatgtgatgaaaacttcttatacggcttatttgtttgtcaatactggtcagttaaatggtaagtttcacaataatcaaacaggtaaagaagaaaagtttgataacgaacaagttttaggtaagtacgataaatcaggtaaatttatcactccaaaacaaaaggatatattgaattatactgataatttgggagataaggcaaccgaaggggaggaaaaaaatagatggctttctgcagtaaatgattatctttggataaaatcaggctatgttatcttaaagatttttgaagcggttatactcgcagttccattaatactcattcagttaattgcttttatggcagatgttttagtgattatattaatgtttatttttccattagctttattagtttcatttttgcctagaatgcaagatatcattttcaatgttttgaaagtcatgtttggggctgtttcctttcctgccttagctggttttttaaccttgatagtcttctatactcaaactttaatagccacctttgttaagaaaaaatttacagatggttccctgcttagtggtagtaattttaaaggtcaggcaatactgtttatgttgctaataacagttttcgtccaaggttgtgtgttttggggaatttggaaatataaagaaactttcttaagactgattatagggtctagagcttctcaagtcattaatcagtctgtagataaaattaatgaaaaagcagaaaatctaggaattacgccaaaatccatttatgagagggcacacgatatgtcaagccttgccatgatgggagctggctatggtgttggtacaatgatgaatgcacaagataattggaatgctttcaaagaaagacaacaagctaatttagatgatggtcagtctaaaactaatgatgctgataagtatgatgaagctaatgcggatgatactgttatttctaaagaggctgagctgactaatgaaggtgaatatcaatcagagttacctaaagaagcaagtaaaaggattgaacaattgggaaaggaatcttcttatgagctatcgtttatatcagaaggtaattcaacagaggaaattttaaaaaatgttaagtcggataatcacacgtttcaagaaggagatggagatacttcattaacaaatcaggatatgataacaaatgatatagaaaatcattcaaataactatacttcaccattaaaacagcgaaagcttaataagctagagggtgaattaagtcaatttaatagtgatgtatccatgacaaaaaatcatggtaaaaatgcttttgaaaagggatttaatgccagtaaaactaaggaagttagaaagcaacataatcttgaacgacagtcaaaagttttggaagaactagaaaagctgagagaaggtaag

SEQ ID NO: 1776 - protein, 666 aa, Streptococcus agalactiae
MDKIDDGLIASTFAKVKDVDIFALKAYMEITHGAETGAQSILLDVFVNFPFFLLNLIVGLFSVILRFFENFSLYDTYKQTVYHSSQKLWENLSGNGSYTSSLLYLLVAISAFSIFISYLFSKGDFSKRLIHLFVVIILGMGYFGTIQSTSGGIYILDTVHQLAGSFSDAVTNLSLDNPSGGKTKITQKSSVADNYVMKTSYTAYLFVNTGQLNGKFHNNQTGKEEKFDNEQVLGKYDKSGKFITPKQKDILNYTDNLGDKATEGEEKNRWLSAVNDYLWIKSGYVILKIFEAVILAVPLILIQLIAFMADVLVIILMFIFPLALLVSFLPRMQDIIFNVLKVMFGAVSFPALAGFLTLIVFYTQTLIATFVKKKFTDGSLLSGSNFKGQAILFMLLITVFVQGCVFWGIWKYKETFLRLIIGSRASQVINQSVDKINEKAENLGITPKSIYERAHDMSSLAMMGAGYGVGTMMNAQDNWNAFKERQQANLDDGQSKTNDADKYDEANADDTVISKEAELTNEGEYQSELPKEASKRIEQLGKESSYELSFISEGNSTEEILKNVKSDNHTFQEGDGDTSLTNQDMITNDIENHSNNYTSPLKQRKLNKLEGELSQFNSDVSMTKNHGKNAFEKGFNASKTKEVRKQHNLERQSKVLEELEKLREGK

SEQ ID NO: 1777 - DNA, 2268 bp, Streptococcus agalactiae
atgtcggattttgaagcggatctagcagatgatgttaaagaattagggttagaaacactcgattttacagttgatacgttaacacatgaaatggagataccgtatcagtttgattggttaattggagttgatcttggtaaagggcaatacaatgctaatataaaagaatttatttataatcagtttgaatctatcgcatcaaacttcgcttctttagctggttatgaggtagaagtagatgaagattggtataaagaacattcagaagaagaattacttgtctatagtttattgtctaccctgaaagccaaaagattaacggatgttgatttattttattatcaacggatgcaatttttaagatatgttccccatactaaaagtgaggttatagctaatcggaatatgttaaatgtgacagatacgttgattaaatcactagaaggtggttttttaaaattggagagtgcttatgggagttcatttgtatccgttcttccagtaggtcggttctctaccatatttaatggctttcatcttggtgaactagttcaaagaatgagttttccggttgaattaagatttaaagcggaatttatagataagacaaaattgggtggcactatgggtcgctcaaatacacgctatgatcaaatcatgaaagaagcttataacacaaatacggttcaacaagatgatatcttgatgggagcatattcgcttaaggatcttatgaaaaaagttggaaataaggaagaaatcatagagtatggttgttatttggtagttgctggttctagtttaaatcaactaaaacaacgtagatatgccattttaagttactttgatgatatgaaagtcaatgtttatgaagccagtcatgatacaccatatttatttcaagcgttactttatggtcaagatttacaaaaaacaactcgtaagtggaatcatttagtaactgctcgaggtttttcggagttgatgctttttacaaatacccaatcaggtaacaggattggttggtatattggacgagtagataatcgtttaactgcttgggattctattgacgaagctattatgggatctaaaaatcttgtcttatttaatgcgacagtcgcgaataaagaagatgttgctggtaaggttactaaaaatcctcacgtgattataactggggcgacaggtcaagggaaatcatacttagcacagatgatctttttacatactgctcaacaaaatgttcgtgtcctttatgttgaccctaaacgagaactacggcaacactatttaaaagttgtttctgatccagagtatgcacgtaagtttcctctacgtaagaagcaaattgaggaaacgaattttgtcactcttgatagttctgtcaaagaaaatcatggtgtattagatcctattgttattcttgataaggaaggtgcttcctcaacggctaaaaatatgttgctttatttgttaaaaaacgctacagagattaaattagatcaaacaacagctttaacagaagcaattagtcaagtcattgcaaaacgtgaagctggtgaagtcgttggttttaatcaggttattgaagttcttattgattctgaaagtgatgaagttcagtcagttggtcgttattttaaagctattattcagaattctattttagagttggcattttcagatggtgatgttgctggtctttcttacgaagaacgtgtgacagttttagaagttgcggatttatcattgcctaaggacggttcagatcatatatctgatcatgaaagtaattcgattgctttaatgtttgctttaggtgcgttttgtaagcattttggtgagcgtagtgatgatgaaacagttgaaatttttgatgaagcatgggtacttatgcaatcctcagaaggtaaggctgttatcaagtctatgcgtcgtgttggtcgctctaagtataatgtgttgatgctagtatctcaatcggttcatgatgcagaaaacgatgatgatacgaccggctttgggacaattttttcattttatgaaaaatcggaacgtgaagatattttaagtcatgttggtttagaagtaacacctaagaatctagaatggattgataatatgatttcaggtcaatgtctttattatgatgtttacggtaacttgaatatgatttcgatacataacattcatccagatattgatccattgttaaaacctatgaagaaaacagtatcaagtcaccttgaaaataaatatgcttcg

SEQ ID NO: 1778 - protein, 756 aa, Streptococcus agalactiae
MSDFEADLADDVKELGLETLDFTVDTLTHEMEIPYQFDWLIGVDLGKGQYNANIKEFIYNQFESIASNFASLAGYEVEVDEDWYKEHSEEELLVYSLLSTLKAKRLTDVDLFYYQRMQFLRYVPHTKSEVIANRNMLNVTDTLIKSLEGGFLKLESAYGSSFVSVLPVGRFSTIFNGFHLGELVQRMSFPVELRFKAEFIDKTKLGGTMGRSNTRYDQIMKEAYNTNTVQQDDILMGAYSLKDLMKKVGNKEEIIEYGCYLVVAGSSLNQLKQRRYAILSYFDDMKVNVYEASHDTPYLFQALLYGQDLQKTTRKWNHLVTARGFSELMLFTNTQSGNRIGWYIGRVDNRLTAWDSIDEAIMGSKNLVLFNATVANKEDVAGKVTKNPHVIITGATGQGKSYLAQMIFLHTAQQNVRVLYVDPKRELRQHYLKVVSDPEYARKFPLRKKQIEETNFVTLDSSVKENHGVLDPIVILDKEGASSTAKNMLLYLLKNATEIKLDQTTALTEAISQVIAKREAGEVVGFNQVIEVLIDSESDEVQSVGRYFKAIIQNSILELAFSDGDVAGLSYEERVTVLEVADLSLPKDGSDHISDHESNSIALMFALGAFCKHFGERSDDETVEIFDEAWVLMQSSEGKAVIKSMRRVGRSKYNVLMLVSQSVHDAENDDDTTGFGTIFSFYEKSEREDILSHVGLEVTPKNLEWIDNMISGQCLYYDVYGNLNMISIHNIHPDIDPLLKPMKKTVSSHLENKYAS

SEQ ID NO: 1779 - DNA, 621 bp, Streptococcus agalactiae
atggtaaaaaaattggaatatccgattgatagaatacatcagaatttagctttacgaaaagataaagttgttgtcgcatactatcgtattccaaataccccaatcactattacagatagtgataagaaagatagtcacaaaacgaaagtagcacaggttatcaaaaaattagctaaatataaaaattttgatatttcattaatagacttcctgcgaaacaaaatatggtacaatagttctatgaattatgaagcaagcaaacaattaactgatgtacgatttaagcgccttgttggtgttcagcgcactacttttgaagagatgttagctgtgttaaaaacagcttatcaacgtaaacacgcaaaaggtggccgaacccctaagttaagcttagaagatctcctcatggctactcttcaatacatgcgagaataccgcacttatgaacaaattgcggctgattttggcattcacgaaagcaacttaatccgtcgaagtcaatgggttgaatcaactcttattcaaagtggttttacgatttcaaaaactcatcttagtgctgaggatacggtgattgtggatgcaacagaggtaaaaatcaatcgtcctaaaaaaatcaac

SEQ ID NO: 1780 - protein, 207 aa, Streptococcus agalactiae
MVKKLEYPIDRIHQNLALRKDKVVVAYYRIPNTPITITDSDKKDSHKTKVAQVIKKLAKYKNFDISLIDFLRNKIWYNSSMNYEASKQLTDVRFKRLVGVQRTTFEEMLAVLKTAYQRKHAKGGRTPKLSLEDLLMATLQYMREYRTYEQIAADFGIHESNLIRRSQWVESTLIQSGFTISKTHLSAEDTVIVDATEVKINRPKKIN

SEQ ID NO: 1781 - DNA, 408 bp, Streptococcus agalactiae
atggaagaagaaaaatattttgattacagcaggggcttgaatgctccttactggattcaggaagttaaaacggcaaaaggcaaagtgatttggtatttttctacacctatgcagttatcattttttattgttttctttatcatcttaatgttgatgctgacggtatgttctccattaatgcaggtgttaaatgctttaacgcattccgtttcaatgctcttgtattggtttgttccaagcaagttagcgaaattttatgtagaatatgaaccgcaaggaaaaaagatgcatatctttttgtgggattatctggtttatctcaaagattttgggttaaataaaaaaggtatctatcaaggagaacgtgttgatattgaagaagaaatagtttttgagaaaacgaaaata

SEQ ID NO: 1782 - protein, 136 aa, Streptococcus agalactiae
MEEEKYFDYSRGLNAPYWIQEVKTAKGKVIWYFSTPMQLSFFIVFFIILMLMLTVCSPLMQVLNALTHSVSMLLYWFVPSKLAKFYVEYEPQGKKMHIFLWDYLVYLKDFGLNKKGIYQGERVDIEEEIVFEKTKI

SEQ ID NO: 1783 - DNA, 264 bp, Streptococcus agalactiae
atgaatttagtaaaagtgaatagtgttattttagcaggtggtcccaacgtttcaggactaaagcaattttttcaaggtgatgggatttacctcattagtgtaattgctgtctttataattattaagaattggaaagaagctaattggttaaaagttttctcaaccttagctatttatgcgattattgtatcaatgcttaaaggtcaacagattctatcttttttgggtggaatgcttcgctggtttggtgttgagacggggtta

SEQ ID NO: 1784 - protein, 88 aa, Streptococcus agalactiae
MNLVKVNSVILAGGPNVSGLKQFFQGDGIYLISVIAVFIIIKNWKEANWLKVFSTLAIYAIIVSMLKGQQILSFLGGMLRWFGVETGL

SEQ ID NO: 1785 - DNA, 951 bp, Streptococcus agalactiae
atgattgatatacaaaaaataaaaaagtttctattgagatatacaaagaaagaagagggaggtaaacagcctaagacaaaagaagtaaagcaaaggacagccaattttattgtctatggtatcttaggtttgttatttattgtaggattttttggatcattgagggcaattggcttatctaatcaggtacaacatttaaaagaaacagttattgctgtagaaaaaaagtcaaaacataagaagactgatgattcattagatatatctagaattcagtattacatgaataattttgtctactactatatcaactattcacaagatactgcagatcaaagaaaaacagaattagaaaattattattctttctcaactgccagtatgacagatgatgttagaaagtctaggactttgcagacacaacgtttaataagtgttgaaaaagaaaaagattactatatagctttgatgcgtattggttatgaagttgataaaaaatcatatcagatgaacttggctgttccttttcagatgcaaagaggattgcttgcaatcgttagtcaaccttatactgtggcagaagatttgtatttaggtaaatctaaagcatttgagaagaaaacattagatcaagtcaaggaactatcgaaagaacaagtaagttctattcaaaagtttttaccagttttctttaataaatatgccttaattaacaagacagacttgaaactgttaatgaaaactccagaactgatggggaaaggatttaaagttagtgagctagatcttaataatgcgatttattatcaagaaaaaaagcatcaagtcgtgcaattatcagtaacttttgaagatcttgtaacaggtggcacacgatcagaaaactttacattatatttatttaaagcagacaatggttggtatgttgaagagatgtatcattattttaaa

SEQ ID NO: 1786 - protein, 317 aa, Streptococcus agalactiae
MIDIQKIKKFLLRYTKKEEGGKQPKTKEVKQRTANFIVYGILGLLFIVGFFGSLRAIGLSNQVQHLKETVIAVEKKSKHKKTDDSLDISRIQYYMNNFVYYYINYSQDTADQRKTELENYYSFSTASMTDDVRKSRTLQTQRLISVEKEKDYYIALMRIGYEVDKKSYQMNLAVPFQMQRGLLAIVSQPYTVAEDLYLGKSKAFEKKTLDQVKELSKEQVSSIQKFLPVFFNKYALINKTDLKLLMKTPELMGKGFKVSELDLNNAIYYQEKKHQVVQLSVTFEDLVTGGTRSENFTLYLFKADNGWYVEEMYHYFK

SEQ ID NO: 1787 - DNA, 252 bp, Streptococcus agalactiae
atgtttaattttactgaagaagcatggaaagattatgtttcttggcaacaggaagataaaaaaatcttgaaacgaattaatcgtttgatagaagatattaaaagagacccatttgaaggcattggaaaaccagaacctttaaaataccattattcaggggcttggtctcgaagaattacagaagaacataggttgatttatatgatagaagatggagaaatctattttttatcttttagagatcattataag

SEQ ID NO: 1788 - protein, 84 aa, Streptococcus agalactiae
MFNFTEEAWKDYVSWQQEDKKILKRINRLIEDIKRDPFEGIGKPEPLKYHYSGAWSRRITEEHRLIYMIEDGEIYFLSFRDHYK

SEQ ID NO: 1789 - DNA, 273 bp, Streptococcus agalactiae
gtgattaatatggaggctattgtttattcacattttagaaataatttaaaagattatatgaagaaggtcaatgatgaatttgagcctttgattgtagttaataaaaatcctgatgaaaatatagtggttttatctcaagatagctgggaaagtttacaagaaacgattcgtttgatggaaaatgattatctatcacataaggttattaatggtatatcacaagttaaagagaagcaagtcactaaacatggtttaattgaggtagaagatgtt

SEQ ID NO: 1790 - protein, 91 aa, Streptococcus agalactiae
MINMEAIVYSHFRNNLKDYMKKVNDEFEPLIVVNKNPDENIVVLSQDSWESLQETIRLMENDYLSHKVINGISQVKEKQVTKHGLIEVEDV

SEQ ID NO: 1791 - DNA, 471 bp, Streptococcus agalactiae
atgattgcaattataaggactcgtgaaaaaggtagaagtcaatttttatgtgagttagacatcatgcagtttacggaaaatcaagtaagaaaccgtatgatagaaaaaggcattaaggatgatgccttttttatttgtggtttttctgattggaatgttgataggattatgtcacttacagaagtctatcttttaaaaagatgtattgaaggactttatgatggtgatgactatattgttcaatatcttttgaaaaaaggtttatcagttcattcaatagtgacaaaatattatatatttttgtcaaataatgaaaataaagtaatgaaatatatcttaaggaaagttgaatttgattctttaattgatttttggcaacggtcagtaacttgggtaaatgctttaaatgcttatattgaagaaggaatagtattaaacacctcaaaaggtttttacgtgttaaaaacagaa

SEQ ID NO: 1792 - protein, 157 aa, Streptococcus agalactiae
MIAIIRTREKGRSQFLCELDIMQFTENQVRNRMIEKGIKDDAFFICGFSDWNVDRIMSLTEVYLLKRCIEGLYDGDDYIVQYLLKKGLSVHSIVTKYYIFLSNNENKVMKYILRKVEFDSLIDFWQRSVTWVNALNAYIEEGIVLNTSKGFYVLKTE

SEQ ID NO: 1793 - DNA, 489 bp, Streptococcus agalactiae
gtgtcaaaaatggatgttagtgcaattgttagagatataaaaactggtagagctacgttagtttgttttcctgtggaaatgagtgagcttaagttagctttggggcttcgtgaagaagatgatttagagtatattattgcagattcggattgtcagttactaaaagaacatgattctattgagatgattaatcaatttgttgaactggtagagaatgttgatagtgaacttgttaaagcagtgcatcaggtaataggttatactgcctcagactttgtggattatgattttaattttggtgattgttgtttactgtctgatgtcacaactagacgagaactaggtgaatattatttcgatgaattaggcgtacaaggagttggtaaagaggctctggagatgtattttgatcatgaagcttatggtcgagatattgacttagaaagccaaggtggtttttcagactacggatatgtcgaaatatcaggg

SEQ ID NO: 1794 - protein, 163 aa, Streptococcus agalactiae
MSKMDVSAIVRDIKTGRATLVCFPVEMSELKLALGLREEDDLEYIIADSDCQLLKEHDSIEMINQFVELVENVDSELVKAVHQVIGYTASDFVDYDFNFGDCCLLSDVTTRRELGEYYFDELGVQGVGKEALEMYFDHEAYGRDIDLESQGGFSDYGYVEISG

SEQ ID NO: 1795 - DNA, 270 bp, Streptococcus agalactiae
atgtcaggaacacgttcagaagcagataaaaagttgttagtggttactcaggagctttcagagctgttggtcagccatcagtatgaacagtcatgggaaaaagctggagagttaaatagcttacttaaaaagcgtgaagaattgactttaccaggttatatggtcgacatgattcaacaacatttgaaatcatactactaccaaaataatatgattaataaggctcataagtctatgtcagcgattggtcataaactacaagaatttcat

SEQ ID NO: 1796 - protein, 90 aa, Streptococcus agalactiae
MSGTRSEADKKLLVVTQELSELLVSHQYEQSWEKAGELNSLLKKREELTLPGYMVDMIQQHLKSYYYQNNMINKAHKSMSAIGHKLQEFH

SEQ ID NO: 1797 - DNA, 567 bp, Streptococcus agalactiae
atgagttttcgtaaatacacaaaagccatagtaattgttcacggtaaaagtgaactggattttgttaaacatattaaatcaaaactgaggcttcctcttgaaatatactcgaggtcaaatgggaaaacatctatacaaatatcttcgattaatgatattttaaaaaatagagattttaaaactaaaaaatgttttaaagaaaaatttttcaaggttgagtgcgataaaaaaggaaatcccaaaaacgttaaaatctttattatcatggatattgatgatacatcgcaggaaaagatagattcctataagagttctacattatttgtaaaagattggaaaaaagattttattgttcctatatggaatgatagcaatttcgaggaggtccttaatgatattggttattggtatgctaagaatgataaagaaaagagacactacaaaaagctgtttcctgtagaacgaggggagcaggatgtggagacgataaaagagctaagagataagttaatttcttcaaataagagtaatttagatgaatttttaactttctgtattgaatcctcg

SEQ ID NO: 1798 - protein, 189 aa, Streptococcus agalactiae
MSFRKYTKAIVIVHGKSELDFVKHIKSKLRLPLEIYSRSNGKTSIQISSINDILKNRDFKTKKCFKEKFFKVECDKKGNPKNVKIFIIMDIDDTSQEKIDSYKSSTLFVKDWKKDFIVPIWNDSNFEEVLNDIGYWYAKNDKEKRHYKKLFPVERGEQDVETIKELRDKLISSNKSNLDEFLTFCIESS

SEQ ID NO: 1799 - DNA, 1353 bp, Streptococcus agalactiae
atgcatatgtttagtaaaatagaatttaaaaactttatgtccttttcaaatttgacttttgatttgctgaatagaggaaaatgtaaggatattattgcaatctatggagaaaacggttcaggaaaaacaaatattgttgaagcttttaagttactagttttgtcattacaatcaatggaatccttaaatgaaaatacacgattacaatcattattaaaagaacaaacaaataaagaagaaaatcaaaaaactaactttggtgatatatcagaaatcttagataaaatcagtttcttcaccacttttaagggcatagcgaaaaatactcatagaattgcatctgaaggtaatacgattctaaaatattattttaatatcgaaaaagataatggttattaccttctagaatataatgaaaataatgaactagtaaaagaggagctagtatttaagataaaatccaataagggagttcatttcagtattactaacatagatggtttatctcaatcattaaataagacaatttttaagaatactatttttaaagatttgactgaacaaatagaaaaatattggggtaaacatacattcctatcaatatttaataattattgtctagaagtaaatgaagagtttattaatgaacaagtttctataaattttcaaaaagtagttgatgaatttgataaaatttttatttggagtggtaattttagaggtccttttcattcgacagaattattattgaaagatatttcaaaaggtaaaattgataagtcggaaaaagaaaaactttcctatactgaggaaattatttataaatattttagtgcattatatattgatataaaagatgttaaatataagcaggatgctcaaggtcaagaaataaaatatgaactcatgatccgaaaaaatattggaggtgatcttttagatgtaccaataagtttagaatctcagggaacaaaaaatcttctggatcttctaaaagtttttaacaatgtgttggatgggaaaatatgtatcgttgatgaaattgactcaggtattcatgatcttttaatgaatagtattctgaatgacttgaaaggaagtgtgaatggtcagttaatatttacaacgcatgatacaacgttattgaaggaattatcaccgagctcagcttattttttaaatgtagatattaaaggtaataaagttatcatttctggcaatgaggcagataaaaaaataggagtaaataacaatttagaaaaattatatttgtctggtttctttggtgctgtaccagatccattagatattgatttttcagatttatttcttgatcataatttaagcgaggac

SEQ ID NO: 1800 - protein, 451 aa, Streptococcus agalactiae
MHMFSKIEFKNFMSFSNLTFDLLNRGKCKDIIAIYGENGSGKTNIVEAFKLLVLSLQSMESLNENTRLQSLLKEQTNKEENQKTNFGDISEILDKISFFTTFKGIAKNTHRIASEGNTILKYYFNIEKDNGYYLLEYNENNELVKEELVFKIKSNKGVHFSITNIDGLSQSLNKTIFKNTIFKDLTEQIEKYWGKHTFLSIFNNYCLEVNEEFINEQVSINFQKVVDEFDKIFIWSGNFRGPFHSTELLLKDISKGKIDKSEKEKLSYTEEIIYKYFSALYIDIKDVKYKQDAQGQEIKYELMIRKNIGGDLLDVPISLESQGTKNLLDLLKVFNNVLDGKICIVDEIDSGIHDLLMNSILNDLKGSVNGQLIFTTHDTTLLKELSPSSAYFLNVDIKGNKVIISGNEADKKIGVNNNLEKLYLSGFFGAVPDPLDIDFSDLFLDHNLSED

SEQ ID NO: 1801 - DNA, 297 bp, Streptococcus agalactiae
atgaagaagttgactaattttccacaaaaactaaaagaattgcgtaaagaaaaaaaactaactcaaactgagctagcgtctaaattaaatataagtcaaaagtcatatagtaattgggaaagtggtaaagctgaacctactttagataatataataaagttagcaaatatcctagatgttactgtagattatttacttggtagaagtgataattttagtaatactattgtgctttcaaaaaacaatatgaaaagtttttctaaaagactgaaagagttaaggttagaaaaagaatat

SEQ ID NO: 1802 - protein, 99 aa, Streptococcus agalactiae
MKKLTNFPQKLKELRKEKKLTQTELASKLNISQKSYSNWESGKAEPTLDNIIKLANILDVTVDYLLGRSDNFSNTIVLSKNNMKSFSKRLKELRLEKEY

SEQ ID NO: 1803 - DNA, 375 bp, Streptococcus agalactiae
ttgtatagtaaccgagaatttgcttattgtgttaatagacgaaataatttagataaaatgattgatttactagtttttatgattcctgatcgtgagttttattatcctgagattcaaacaggtgagcttagagattatcagatagacatttatgatttgattaagattggttatgttggtgtttatgaaattcaaaaagactacgaagataagttaagggaacttgctgattttaaacggaaacttttaaagtttggtttgcttatgcaacctttagaaaagcaaaaagagatagttattcgtttagctggtaaatatcgtttggaaaaaagaattctgatgagaagggaaatgtttagagatgaagaagttgac

SEQ ID NO: 1804 - protein, 125 aa, Streptococcus agalactiae
MYSNREFAYCVNRRNNLDKMIDLLVFMIPDREFYYPEIQTGELRDYQIDIYDLIKIGYVGVYEIQKDYEDKLRELADFKRKLLKFGLLMQPLEKQKEIVIRLAGKYRLEKRILMRREMFRDEEVD

SEQ ID NO: 1805 - DNA, 1287 bp, Streptococcus agalactiae
gtgggtcattttagtgaaaaaagtgggtcactaatcctaagaaggagtttgtttattgtggatgctatctatttaaaaaaatttcgaaagaaaacaggtctaaaacaaaaggaatttgctttaagttctggtttgacattgaaatcacttagaaactatgagcaaggaaagcggaagttgacacttgaaaagtatcaagagataaaatcacattttggatatctagtagaaaatgatagttcacgattacaagtgatgattgactatgtcagaattacgttaaaggatgttagggatcttgaatttttctgtcgtaactttttgcactgtgcatttaaagaatttcagccttttgaatcgaagttgatgaattacaatcatctttggaaacgtggagatatttggatatttgattttgcggataaacatgagacaggtaattttcaaataactgttcaattgtctggtcgtggatgccgacaattggaattgttgatggaaactgaaaaatttacatggcatgattggttaagttatctaagaaattcatatcgtgatgatatgaatgtgacacgttttgatattgctattgatgaattgtatctgggtaaggatagagaaaatgaacagtttcatttgtcagatatgatttcaaaatattatcgtcatgagttagattttgaaagtttgagaacttggaattatataggtggcggttctttaaatttttcggatatggaagagattgagcagaatagacaaggaatatcgctttattttggtagtcgtcaatcagaaatgtattttaacttttatgaaaaacgttatgaaattgcaaagcaggaaggaattactgttgaagaagctttagaaatttttgaattgtggaatcgttatgagatacggttatctcaaagtaaagctaatgcggcagttgatgaatttatttctggagtgccgattggtgaaatatccagagggttaattgttagtaagattgacgtgtatgatgggaaaaatgaatatgggtcgtttcaagcagatagaaagtggcaattaatgtttggaggtgttgagcctttaaaatttgttacaaagccagaggcttatagtattgaacgaaccttacgttggttaagtgattctgtttctccgtctttagctatgataagagagtatgacatgattgtggatggtgactatttacaaaccattcttaattctggggaagtcaatgaacgtggggagaagatacttgacagtatcaaagctagcttaggtattttg

SEQ ID NO: 1806 - protein, 429 aa, Streptococcus agalactiae
MGHFSEKSGSLILRRSLFIVDAIYLKKFRKKTGLKQKEFALSSGLTLKSLRNYEQGKRKLTLEKYQEIKSHFGYLVENDSSRLQVMIDYVRITLKDVRDLEFFCRNFLHCAFKEFQPFESKLMNYNHLWKRGDIWIFDFADKHETGNFQITVQLSGRGCRQLELLMETEKFTWHDWLSYLRNSYRDDMNVTRFDIAIDELYLGKDRENEQFHLSDMISKYYRHELDFESLRTWNYIGGGSLNFSDMEEIEQNRQGISLYFGSRQSEMYFNFYEKRYEIAKQEGITVEEALEIFELWNRYEIRLSQSKANAAVDEFISGVPIGEISRGLIVSKIDVYDGKNEYGSFQADRKWQLMFGGVEPLKFVTKPEAYSIERTLRWLSDSVSPSLAMIREYDMIVDGDYLQTILNSGEVNERGEKILDSIKASLGIL

SEQ ID NO: 1807 - DNA, 1716 bp, Streptococcus agalactiae
ttggctcgtttaataccacaatatagagggattaaggtaaaaccatatatgaggtatatgagttattaccttttttcttttctatttattttgtttttgacacctgtaggcgtgtatagttattactatttagatttgttaaaaatgatggataaaatgtctatgatcagtgtaggtacaggtttgtttttagcattttttgtttcttggtatttgacttggtttttgcaagaagctaatccattatttaataaactagatcgattaaaaagaatgtctaagtttttatatgagaatggctatgtttatgaaaaacgtaaaaaatcaaataagaaaacgaagacaaaatatcgttttccaaaagtttatgtgaaacaaggtaagtatgatttaagtgtttcatttgaaatggctggaggaaaatttcaaaagaaatttaaggatattggtggagaattagaagatacttttttcatggattttatggaaaaaactgatgatccacgctttaaaatttacaaattagcttattcggctttcttatcacgtattacggttaaagatgtgatatggaataaagataagggaattaagttaatggatggctattattgggatttcatcaatgatcctcatttattagttgctggtggtactggtggaggtaaaacagtattactaaggtcaatccttcgttgtcttgcggaaattggagtttgtgatatatgtgaccctaaaagagccgattttgttactatgtcagatttatcagcttttgaaggtagaattgcctttgaaaaggctgatattattgagaagtttgaaaatgctgttacgataatgtttgcacgttatgattttgttcgaaatgaaatgaagcgtttaggtcataaagacatgaaaaagttttatgattatggattggaaccttatttttttgtatgtgatgaatataatgctttaatgagttctttgtcttatcaggaacgtgagattgtagataatgcatttactcaatatatattgttaggacgtcaggttggatgtaatgcgattatagcaatgcaaaagccgtctgcagatgatcttcccactaaaattagatctaatatgatgcaccatatctcggttggtcgtctcgatgatggtggttatgtgatgatgtttggtgatgaaaatagaaataaggaatttaggtttattaaatatcttgcaggtcgtcgtgtttatggtcgaggttattcagctgtttttggtgaagtagcaagagaattttattctcctttattacctaaaaatttctctttttatgatgcttttgaaaaaataaataggcatgagaatccttttgatcctacagaaaatcaggaagtttctaaggcgattcttaaagacgaatctttgagagagtttgtggaaaaaacgtctgaaaatgagttacttaagggttcagtagggtttgattttgatgatgaaatggaggaaatggaaaatatgagtattggtgatttagctaagaaaacaggtttttcatttggtaagattaagaatttaatagatatgattgaaaaagataattatatgacttttagtcgtgaagatgaaaaggttgtattaaatgattctgatgcagtcgtcttagaaagtttactgacacaaaaagatgaatttgagggtagctggaaagagttactattgaattattttaagggtgaa

SEQ ID NO: 1808 - protein, 572 aa, Streptococcus agalactiae
MARLIPQYRGIKVKPYMRYMSYYLFSFLFILFLTPVGVYSYYYLDLLKMMDKMSMISVGTGLFLAFFVSWYLTWFLQEANPLFNKLDRLKRMSKFLYENGYVYEKRKKSNKKTKTKYRFPKVYVKQGKYDLSVSFEMAGGKFQKKFKDIGGELEDTFFMDFMEKTDDPRFKIYKLAYSAFLSRITVKDVIWNKDKGIKLMDGYYWDFINDPHLLVAGGTGGGKTVLLRSILRCLAEIGVCDICDPKRADFVTMSDLSAFEGRIAFEKADIIEKFENAVTIMFARYDFVRNEMKRLGHKDMKKFYDYGLEPYFFVCDEYNALMSSLSYQEREIVDNAFTQYILLGRQVGCNAIIAMQKPSADDLPTKIRSNMMHHISVGRLDDGGYVMMFGDENRNKEFRFIKYLAGRRVYGRGYSAVFGEVAREFYSPLLPKNFSFYDAFEKINRHENPFDPTENQEVSKAILKDESLREFVEKTSENELLKGSVGFDFDDEMEEMENMSIGDLAKKTGFSFGKIKNLIDMIEKDNYMTFSREDEKVVLNDSDAVVLESLLTQKDEFEGSWKELLLNYFKGE

SEQ ID NO: 1809 - DNA, 459 bp, Streptococcus agalactiae
atggcaaaaattggtttaaactttggagaaaaattacaaattgcagataaggaatatcgtacctttaatgatggattggatgtaaatgttttgttaggagatttaacttggagacgatatgaagaaccagttcaatttacggaagatgatacgacacaaccaccagatcgatttggtcgttatccacaaaaaccaacaggtgaagtgaagtggaatgatattgcagtatttagtactgctcaaaatgaaacaatttttgtttcaattactgatatgccttcttatgcaatcgaggatttaggtcttaaattgggtgaccctattgaattaagtgatgttgttgtgacatggtctaacgtttcaggtggtatgtttaaaatttttgcatcatcacttaagaaaaaggatgttgcaaataatggaaacgcatcaaaaaatgaagcatctaaagttaataaa

SEQ ID NO: 1810 - protein, 153 aa, Streptococcus agalactiae
MAKIGLNFGEKLQIADKEYRTFNDGLDVNVLLGDLTWRRYEEPVQFTEDDTTQPPDRFGRYPQKPTGEVKWNDIAVFSTAQNETIFVSITDMPSYAIEDLGLKLGDPIELSDVVVTWSNVSGGMFKIFASSLKKKDVANNGNASKNEASKVNK

SEQ ID NO: 1811 - DNA, 324 bp, Streptococcus agalactiae
gtgcttcttatttttagaaaagaggaaattatgaaacaagaaacattagtgttacttccaaattttattggagatgcaatttatgaaggatttgaagctggacctgctcaattaaatggtaaaaaagggtcttatacaagacacattttgtttaatgaaaaacatggtaagttttatgtttatacaccagcatcttcacgtgtgattggaaatggaaaaatggtaactgttgaaaaaccgttattgtttattgacaatacaattaatggtagaaatattgaacctgcaaaaaatgtatgggctgaaaagcttattgaagtgaaa

SEQ ID NO: 1812 - protein, 108 aa, Streptococcus agalactiae
MLLIFRKEEIMKQETLVLLPNFIGDAIYEGFEAGPAQLNGKKGSYTRHILFNEKHGKFYVYTPASSRVIGNGKMVTVEKPLLFIDNTINGRNIEPAKNVWAEKLIEVK

SEQ ID NO: 1813 - DNA, 2505 bp, Streptococcus agalactiae
atgatcacgacattacagactagtcaagtgtctgctgatcaagttacaactcaagcaacaactcaaacagtaacgcaaaatcaagcagaaacagtaacatcaactcaacttgataaagcagtagctacagctaaaaaagcagctgtagctgttacaaccacagctgcagttaatcatgcgacaactactgatgcacaagctgatttagctaatcaaacacaaacagttaaagatgttactgcaaaagcacaagctaatacacaagctattaaagatgctactgctgaaaatgcaaaaattgacgcagaaaacaaagcagagtctcaacgtgtaagtcagttaaatgcacaaactaaagcaaaaattgatgctgaaaacaaagatgcacaagctaaagcagatgcgactaatgcacaattacaaaaagattatcaagctaaattagcgaaaatcaaatcagttgaagcttataatgcaggtgtacgtcaacgtaataaagatgcacaagctaaagcagatgcgactaacgcacagttacaaaaagactatcaagctaaattagcactttataatcaagctctaaaagctaaagcagaagcagataaacagtctattaataatgttgcttttgatatcaaagctcaagctaaaggtgttgataacgctgaatatggaaactcaatcatgactgcaaaaactaaacctgacggaagtttcgagtttaaccatgatatgatcgatggtgtgaagacaatcggctatgggaaattgacaggtaaagttaatcatcattatgttgctaacaaagatggctctgtgacagcatttgttgactctatcactctttacaagtacgagtatcgtaatgttgctcaaaatgctgctgttaatcaaaatattgctttcagagtcttaactaaagacggacaaatcatttttgagaagaaacataatggtaacaaaacttttgcagaaactttaaacaaaactttacaactcaatcttaaatatgagcttaaaccacatggttctagtggaagcgttgaagtctttaagattcatgatgactgggtacatgacacacatgggtctgctttagtgtcttatgttaataataatgatgttgttcctaacgttgttataccaaaacagccaacaccaccgtcaacagaaaaagtgactcctgaagcagaaaaaccagtacctgaaaaaccagttgagcctaaatttgtaacacctacattaaaaacttacactccagctcaaccaaaagtgaaaccacatgtgtctattcctgaaaagattaactactcagttagtgttcatcctgttttagttccagctgctaatccttcaaaagctgtcattgatgaagcaggtcaatctgttaatggtaaaaccgtattaccaaatgctgaattaaattacgttgctaaacaagactttagccaatataaaggaatgactgcatcacaaggtaaaatagctaaaaactttgtctttattgatgattataaagatgacgcactagatggtaagtctatgaaagtgaactcaatcaaagcatctgatggcacagatgtgtcacaactcttagaaatgcgacatgtgctttctacggatactttagatgagaaacttcaaacgcttattaaagaagcaggaatcagtcctgttggtgagttttacatgtggactgcaaaagatccacaagctttttataaagcttatgttcaaaaaggtctagatgttacttataacttatcatttaaagttaaaaaagagtttactaaaggtcaaattcaaaatggtgttgcacaaatcgactttggcaatggatatacaggtaatattgtagtcaatgatttgacaactccagaaatacataaagatgtgttagacaaagaagatggcaagtctatcaacaatggtactgtcaaattaggtgatgaagttacttacaaattagagggttgggtagttccaacaggtcgttcttatgatctatttgaatacaaatttgtggatcaattacaacgcacacctgatctttacttacgtgataaagtggtcgctaaagttgatgtgacattaaaagatggtacagtcattaaaaaagggactaatttaggagagtacacagaaacagtttacaacaaaaagacaggtctctatgaattagtcttcaagaaagacttccttgaaaaagttgcacgttctagtgaatttggggcagatgattttgtggtggttaaacgtatcaaagcaggtgatgtttacaataccgcagacttttttatcaatgggaataaggttaaaactgaaactgtggtaacacatactcctgagaaaccaaaaccagttgaaccacaaaaagcaactccaaaagctcctgctaaaggattacctcaaactggtgaagcaagcgttgcccctcttacagcacttggagcaatcatcttgtcagctatcggtttagcaggatttaaaaaacgcaaagaaaat

SEQ ID NO: 1814 - protein, 835 aa, Streptococcus agalactiae
MITTLQTSQVSADQVTTQATTQTVTQNQAETVTSTQLDKAVATAKKAAVAVTTTAAVNHATTTDAQADLANQTQTVKDVTAKAQANTQAIKDATAENAKIDAENKAESQRVSQLNAQTKAKIDAENKDAQAKADATNAQLQKDYQAKLAKIKSVEAYNAGVRQRNKDAQAKADATNAQLQKDYQAKLALYNQALKAKAEADKQSINNVAFDIKAQAKGVDNAEYGNSIMTAKTKPDGSFEFNHDMIDGVKTIGYGKLTGKVNHHYVANKDGSVTAFVDSITLYKYEYRNVAQNAAVNQNIAFRVLTKDGQIIFEKKHNGNKTFAETLNKTLQLNLKYELKPHGSSGSVEVFKIHDDWVHDTHGSALVSYVNNNDVVPNVVIPKQPTPPSTEKVTPEAEKPVPEKPVEPKFVTPTLKTYTPAQPKVKPHVSIPEKINYSVSVHPVLVPAANPSKAVIDEAGQSVNGKTVLPNAELNYVAKQDFSQYKGMTASQGKIAKNFVFIDDYKDDALDGKSMKVNSIKASDGTDVSQLLEMRHVLSTDTLDEKLQTLIKEAGISPVGEFYMWTAKDPQAFYKAYVQKGLDVTYNLSFKVKKEFTKGQIQNGVAQIDFGNGYTGNIVVNDLTTPEIHKDVLDKEDGKSINNGTVKLGDEVTYKLEGWVVPTGRSYDLFEYKFVDQLQRTPDLYLRDKVVAKVDVTLKDGTVIKKGTNLGEYTETVYNKKTGLYELVFKKDFLEKVARSSEFGADDFVVVKRIKAGDVYNTADFFINGNKVKTETVVTHTPEKPKPVEPQKATPKAPAKGLPQTGEASVAPLTALGAIILSAIGLAGFKKRKEN

SEQ ID NO: 1815 - DNA, 1260 bp, Streptococcus agalactiae
atgaataatatgtcagacttattatccctaccagacattaaaacaatagaaccgccacaagaaaatgaaaccgatatgatgtttaaagttgaagcagtcggaccacctgaacgttgtcctgaatgtggttttgacaagttgtacaaacacagttcaagaaatcaactaattatggatttgcccattcgtttaaagcgagtgggcttacatttgaaccgtagacgatacaagtgtcgtgaatgcggatctaccatatctgtagatgaaaagcgtagtatgaccaaaaggcttttaaagtccattcaagagcaatccatgtctaagacctttgtagaagtcgcagaaagcgttggtgttgacgagaaaaccattaggaacgtttttaaggactatgtggcactcaaagaacgtgaataccagtttgaaactcctaagtggcttgggatagacgagatacatattatccgtagacctcggcttgtattgactaatattgaacgcaggactatttatgacatcaagcctaaccgtaacaaggaaacagtcatccaacgtctttcagaaatcagtgacaggacttacattgagtacgtcacaatggatatgtggaagccctacaaagacgcagtgaacactatccttccacaagctaaagttgtcgtagataagtttcatgtagttagaatggctaatcaagccttagataacgtcagaaagtctttgaaagcccatatgagccaaaaagaaagacgtacccttatgcgtgaaaggtttatccttctaaagcgtaaacacgatctaaatgaacgtgaatcattcctcttagatacttggttaggtaatcttcctgctttaaaagaagcctatgaactcaaagaagagttttactggatatgggatactcctgatccagatgaaggtcatcttcgttatagtcaatggagacaccgttgtatgtccagcaactctaaagacgcatataaagacctcgtgagagccgtagacaactggcatgttgaaatattcaactactttgataaaaggctcactaatgcttatacggagtcaattaacagcattattaggcaggtagagcgaatgggtagaggttactcgtttgatgccttacgagccaaaatccttttcaatgagaagctccataaaaagcgtaagccacgatttaattcaagtgctttcaataaagctatgttatacgatactttcaattggtatgaagtgaatgatcacgacattacagac

SEQ ID NO: 1816 - protein, 420 aa, Streptococcus agalactiae
MNNMSDLLSLPDIKTIEPPQENETDMMFKVEAVGPPERCPECGFDKLYKHSSRNQLIMDLPIRLKRVGLHLNRRRYKCRECGSTISVDEKRSMTKRLLKSIQEQSMSKTFVEVAESVGVDEKTIRNVFKDYVALKEREYQFETPKWLGIDEIHIIRRPRLVLTNIERRTIYDIKPNRNKETVIQRLSEISDRTYIEYVTMDMWKPYKDAVNTILPQAKVVVDKFHVVRMANQALDNVRKSLKAHMSQKERRTLMRERFILLKRKHDLNERESFLLDTWLGNLPALKEAYELKEEFYWIWDTPDPDEGHLRYSQWRHRCMSSNSKDAYKDLVRAVDNWHVEIFNYFDKRLTNAYTESINSIIRQVERMGRGYSFDALRAKILFNEKLHKKRKPRFNSSAFNKAMLYDTFNWYEVNDHDITD

SEQ ID NO: 1817 - DNA, 1638 bp, Streptococcus agalactiae
atgaataaatttaaggtaaacatttcaggaatgacttgtacgggttgtgaaaaacacgtagaatcagcacttgaaaagataggtgctaaaaatattgagtctagttatcgtcgtggtgaagcagtatttgaactgcccgatgatattgaggttgaaagtgcaataaaggcgattgatgaagcaaattaccaagccggagaaattgaagaagtatcatcactagaaaacgtggcgttaattaatgaagacaattatgaccttcttattattggttctggtgctgctgccttttcttcggcaattaaagctatagaatacggtgcaaaagttggaatgattgagcgtggaacggttgggggaacctgtgtgaatattggctgtgttccgtcaaaaactcttcttagggcaggggaaatcaatcatttatcaaaagacaatccgtttataggtttacaaacatccgctggagaagtggatttagctagtttaatcacgcaaaaggataaattggtgagcgaacttcggaatcaaaaatatatggatttaattgatgaatataattttgatttaattaaaggtgaagcaaaattcgttgatgctagtacggttgaggtcaatgggacaaagttatctgcaaaacgctttttaattgcaacaggtgcatcgccttcgttgccccaaatttcaggacttgaaaaaatggactatttaactagtacaacacttcttgagttaaagaaaataccaaaacgattaactgtaattggttcaggatacattggaatggagcttggacaactatttcatcatttaggttcagaaataacgcttatgcaaagaagtgagcgacttttaaaggagtatgatcctgagatttcagagtcagttgaaaaagcgttaattgaacagggtataaaccttgtcaaaggggcaacttttgagcgtgttgaacaaagtggagagataaaaagggtttacgtaacagtaaatggcagtagagaagtcattgaatcagatcagttacttgttgccactggaagaaaaccaaatacggattctttaaatttaagtgcagcaggtgttgaaactggaaaaaataatgaaatcctgatcaatgattttggtcaaacaagtaatgaaaagatttatgcagcaggagatgtgactttaggaccacaatttgtatatgtagcagcctatgaaggtggaattattactgataatgctattggtggattaaacaaaaaaatagatttatcggtagttcctgctgttacgtttacgaatccgacggttgcaacggttggtttaacagaagaacaagcaaaagagaaagggtatgatgtgaagacatctgtattacctttaggtgctgttccaagagcaattgtaaaccgtgaaacaaccggtgtatttaaactagtagcagatgcagaaacactaaaagtattaggggttcatattgtatctgaaaatgcaggagatgtcatctatgcagcatcattagctgttaaatttggcttaacgatagaagatttaacagaaaccctagcaccatatttaacaatggctgaagggctaaaattagttgcacttacgttcgataaagatatttcgaaattatcttgttgtgcaggc

SEQ ID NO: 1818 - protein, 546 aa, Streptococcus agalactiae
MNKFKVNISGMTCTGCEKHVESALEKIGAKNIESSYRRGEAVFELPDDIEVESAIKAIDEANYQAGEIEEVSSLENVALINEDNYDLLIIGSGAAAFSSAIKAIEYGAKVGMIERGTVGGTCVNIGCVPSKTLLRAGEINHLSKDNPFIGLQTSAGEVDLASLITQKDKLVSELRNQKYMDLIDEYNFDLIKGEAKFVDASTVEVNGTKLSAKRFLIATGASPSLPQISGLEKMDYLTSTTLLELKKIPKRLTVIGSGYIGMELGQLFHHLGSEITLMQRSERLLKEYDPEISESVEKALIEQGINLVKGATFERVEQSGEIKRVYVTVNGSREVIESDQLLVATGRKPNTDSLNLSAAGVETGKNNEILINDFGQTSNEKIYAAGDVTLGPQFVYVAAYEGGIITDNAIGGLNKKIDLSVVPAVTFTNPTVATVGLTEEQAKEKGYDVKTSVLPLGAVPRAIVNRETTGVFKLVADAETLKVLGVHIVSENAGDVIYAASLAVKFGLTIEDLTETLAPYLTMAEGLKLVALTFDKDISKLSCCAG

SEQ ID NO: 1819 - DNA, 1761 bp, Streptococcus pyogenes
atggctgttgaaattattatgccaaaactcggtgttgacatgcaagaaggtgaaatcatcgagtggaaaaaacaagaaggtgatactgtcaatgaaggcgatattcttcttgaaatcatgtcagataaaaccaatatggaacttgaggcagaagactcaggtgttcttcttaaaattacacgtcaagcaggtgaaacagtacctgtaacagaagttatcggatatatcggtgctgaaggtgaatctgttgaggtttctagcccagctgcttcagatgtgaatgttgctcgtacaacagaagatttagaagctgctggacttgaagtgccaaaagcaccagctcaagctgcttcagctgcaccaaaagctgcacttgctgatgatgagtatgacatcatcgttgttggtggtggccctgcaggttattatgcagctattcgtggtgctcaacttggtggtaaaattgccatcgttgagaaatctgaatttggtggaacttgcttgaacgtagggtgtatcccaaccaaaacttaccttaaaaatgctgaaatccttgatggtattaagattgcagcaggacgtgggattaaccttgcctcaactaactatactattgacatggacaaaacagttgactttaaaaacaccgttgttaaaaccttaacaggcggcgttcaaggtcttctaaaagctaataaagtcactatctttaatgggcttggtcaagtcaaccctgacaagactgtaaccattgggtcacaaaccattaagggtcgcaacgttatccttgctacaggttctaaagtatcacgtatcaatatcccaggtattgactctaaacttgtcttaacgtcagatgatatccttgacctccgtgaaatgccaaaatcactagcagttatgggcggtggtgttgttggtatcgagcttggacttgtttgggcatcttacggtgtggatgttaccgttattgaaatggctgaccgtattatcccagctatggataaagaagtctctcttgaacttcaaaaaatcctttctaagaaaggcatgaagatcaaaacatctgttggtgtctctgaaattgttgaagcaaataaccaattgactttgaaacttaacaatggtgaagaagttgttgctgaaaaagctcttctttctatcggacgtgtatcacaaatgaacggtctggaaaatcttaaccttgaaatggatcgtaaccgtatcaaagttaatgactaccaagagacatcaattccaggtatctatgcgccaggtgacgttaacggaacgaaaatgcttgctcacgctgcttaccgtatgggtgaagtggctgcagaaaatgcgatgcatggcaacacaactcgtaaagctaaccttaaatacactccagcagctgtttacacacaccctgaagtggcaatggttggtttaactgaagaacaagcgcgtgaacaatatggtgatgtgcttattggtaaaaacagctttactggtaatggacgcgcgattgcttcaaatgaagcacatggttttgttaaagttattgctgatgccaaataccacgaaatcttaggtgttcatattattggtccagctgcagctgagatgattaacgaagcagctactattatggaatctgaattaaccgttgatgaattgttattatcaattcatggacacccaaccttctctgaagtgatgtacgaagcctttgcagatgtgcttggcgaagctatccataacccaccaaaacgtaag

SEQ ID NO: 1820 - protein, 587 aa, Streptococcus pyogenes
MAVEIIMPKLGVDMQEGEIIEWKKQEGDTVNEGDILLEIMSDKTNMELEAEDSGVLLKITRQAGETVPVTEVIGYIGAEGESVEVSSPAASDVNVARTTEDLEAAGLEVPKAPAQAASAAPKAALADDEYDIIVVGGGPAGYYAAIRGAQLGGKIAIVEKSEFGGTCLNVGCIPTKTYLKNAEILDGIKIAAGRGINLASTNYTIDMDKTVDFKNTVVKTLTGGVQGLLKANKVTIFNGLGQVNPDKTVTIGSQTIKGRNVILATGSKVSRINIPGIDSKLVLTSDDILDLREMPKSLAVMGGGVVGIELGLVWASYGVDVTVIEMADRIIPAMDKEVSLELQKILSKKGMKIKTSVGVSEIVEANNQLTLKLNNGEEVVAEKALLSIGRVSQMNGLENLNLEMDRNRIKVNDYQETSIPGIYAPGDVNGTKMLAHAAYRMGEVAAENAMHGNTTRKANLKYTPAAVYTHPEVAMVGLTEEQAREQYGDVLIGKNSFTGNGRAIASNEAHGFVKVIADAKYHEILGVHIIGPAAAEMINEAATIMESELTVDELLLSIHGHPTFSEVMYEAFADVLGEAIHNPPKRK

SEQ ID NO: 1821 - DNA, 390 bp, Streptococcus agalactiae
atgatttatcgcattagtgagtttgcagataaatgtggagttaataaagaaacgatcagatattacgagcgaaaaaatttattacaagaacctcaccgaacggaagctggttatcggatatattcatatgatgacgttaagcgtgttgggtttattaaacgaatacaggaacttggtttctctttaagcgagatttataaattacttggtgttgtagataaagatgaagttcgttgtcaagatatgttcgaatttgtttctaaaaaacaaaaggaagtgcaaaaacaaatagaggatttaaaacgaattgaaactatgttagacgacttaaaacaacgatgtccagatgaaaagaaattacattcgtgtccaataatagaaacattaaca

SEQ ID NO: 1822 - protein, 130 aa, Streptococcus agalactiae
MIYRISEFADKCGVNKETIRYYERKNLLQEPHRTEAGYRIYSYDDVKRVGFIKRIQELGFSLSEIYKLLGVVDKDEVRCQDMFEFVSKKQKEVQKQIEDLKRIETMLDDLKQRCPDEKKLHSCPIIETLT

SEQ ID NO: 1823 - DNA, 1566 bp, Streptococcus agalactiae
atgaatctacaaaaaaatgataaaacaaatagttttatccattatgcaaacggtccttccctagaagaaataaatgggacaattgaagttcctaaagatttgagcttttttaaaactttactagcttattctggaccgggtgcacttgttgctgttggttatatggatcctggaaattggtccacttccataactggcggtcaaaattttcaatatttactaatttcaattatcttaatgtctagtttaattgctatgctacttcaatacatgtcagctaagctaggtattgttactcagatggatcttgctcaagctatccgagcaaggaccagtaaacagttgggaattgtcttatggattctcactgagcttgctataatggcaacagatattgctgaagttattggtggggctattgcactttatttactgtttcatattccacttgcgattgctgttttcattacagtatttgatgtattactcttattattgttgacaaaaataggatttcgaaaaattgaagctctagtagttgctttaatattggttattttcttagtttttgcatatcaagtggctctttctcatcctatatggacggatatttttaaaggtttagtacctacatctgaagctttctcaacctctcatacagtaaatggacaaacaccactttcaggtgccttaggcattattggggcaactgttatgccacataatctttatctacattcttcagttgttcaaagtcgaaaactagatcataataacaaaaaagatatcgctagagcaattaggttttcaacttttgattcaaatattcaattaacagtagccttttttgttaattcactattactcattatgggcgttgctgttttcaaaacaggaagtgttactgatccatcattctttggtctatttaaagcactatctaattctactattatgagtaattctattttagctcatatagcaagttcaggtattttatcacttttatttgcaatagctttattagcatctggacagaattcaactattactggaacattaacaggtcaaattattatggaaggatttattcatatgaaagttccaatttggttccgtcgtatcattactcgcctaatttctgttattcctgtaatgatttgtgtcttagtaactagtggtagaagtactgttgaagaacatatagctattaataacttaatgaataactctcaagtcttcttagcatttgcattaccattctcaatgttacctctactaatatttactaatagtaaagttgaaatggatgatgattttaaaaatacttggataattaagattcttggttggctttcagttataggattaatttatctcaatatgaagggattgccaaatcaaattgaaggtttttggggagataacccaactcatcaacaaattattcttgcgcatcaaatagctcatatcatcattattagtgtaatactaactttaatatggactattgttgaattgtataaaggaaataaaaaatacagtacgatgcaacaaagtgcaact

SEQ ID NO: 1824 - protein, 522 aa, Streptococcus agalactiae
MNLQKNDKTNSFIHYANGPSLEEINGTIEVPKDLSFFKTLLAYSGPGALVAVGYMDPGNWSTSITGGQNFQYLLISIILMSSLIAMLLQYMSAKLGIVTQMDLAQAIRARTSKQLGIVLWILTELAIMATDIAEVIGGAIALYLLFHIPLAIAVFITVFDVLLLLLLTKIGFRKIEALVVALILVIFLVFAYQVALSHPIWTDIFKGLVPTSEAFSTSHTVNGQTPLSGALGIIGATVMPHNLYLHSSVVQSRKLDHNNKKDIARAIRFSTFDSNIQLTVAFFVNSLLLIMGVAVFKTGSVTDPSFFGLFKALSNSTIMSNSILAHIASSGILSLLFAIALLASGQNSTITGTLTGQIIMEGFIHMKVPIWFRRIITRLISVIPVMICVLVTSGRSTVEEHIAINNLMNNSQVFLAFALPFSMLPLLIFTNSKVEMDDDFKNTWIIKILGWLSVIGLIYLNMKGLPNQIEGFWGDNPTHQQIILAHQIAHIIIISVILTLIWTIVELYKGNKKYSTMQQSAT

SEQ ID NO: 1825 - DNA, 90 bp, Streptococcus agalactiae
ttgaggttatcaaaaatttcatttaaaatcgcaacgaatccacttcaaggaacactaaaagccccatccctagggctttttttgttgagt

SEQ ID NO: 1826 - protein, 30 aa, Streptococcus agalactiae
MRLSKISFKIATNPLQGTLKAPSLGLFLLS

SEQ ID NO: 1827 - DNA, 720 bp, Streptococcus agalactiae
atgttaggattggagtttagaaagtctataagaggtagaacattattttatattatatctactgtagctttgacctatgtattaggatatattttaccagtagggatagataaaataagacatttaactttgggagaattttactttagtacctacacagtatttacccaatttggatttttaatattcggctttgtcattgtatatttctttaataaagattactctgacaaatgtattttatatcactatttttcagggtatcatctaactaaatacttttatactaaactgttagtattattttcagaattttttattgctataatagtttgcaatatattagcttcattgctttggggatattcactattttattttttaacaactacaatcttattttcactcgttgttctacagtatctactagtcgtctcaactattagtatcctgttttctaatatgctagtttctattggagttactattttttattggattacatccattattttagtggcaattggaggaatttttaaagtatctgctatttttgatgcttcaaattctctctataaaataatagggaaacttttctcacatccgatgactattgatttaaccgacttttttataattgttccttatatgatatgccttagtgtaattagttttttgatagtgtgcttatcaaatagaagatggttattaaatggaatg

SEQ ID NO: 1828 - protein, 240 aa, Streptococcus agalactiae
MLGLEFRKSIRGRTLFYIISTVALTYVLGYILPVGIDKIRHLTLGEFYFSTYTVFTQFGFLIFGFVIVYFFNKDYSDKCILYHYFSGYHLTKYFYTKLLVLFSEFFIAIIVCNILASLLWGYSLFYFLTTTILFSLVVLQYLLVVSTISILFSNMLVSIGVTIFYWITSIILVAIGGIFKVSAIFDASNSLYKIIGKLFSHPMTIDLTDFFIIVPYMICLSVISFLIVCLSNRRWLLNGM

SEQ ID NO: 1829 - DNA, 615 bp, Streptococcus agalactiae
atgtttattaataattacaccttaaaaataggaaatagaatacttttagagaatactaacttagactttgaagaaggggaaataaatcatcttttaggtaggaatggatcaggtaaatctcaactagctaaagattttatcataaatagagggaattatttttcaaatgatatttatgaagacacgctgattatttcgagttattctaatcttcctagtgatgttaccattaacgatttagaaaggacaattccgtggaagctttctaaagaaatttatcagttattgaatattaatcaaataagtaaaacggttaagttaaagcaattaagtgatgggcagaaacaaaaggtgaaattattagttttgttgtctttagacaagcatattattatacttgatgaaattactaatgctttagataaaaagtctgttgatgagataaacgtatttttgcaaaactatattcagtattatcccgaaaaaattattattaatatttcacatgatatcaataatatcaggtctttaaagggaaactattttctaattgataatcaaaaaatttgtaaagtagacacattagatgatgctattagttggtatttaggagaa

SEQ ID NO: 1830 - protein, 205 aa, Streptococcus agalactiae
MFINNYTLKIGNRILLENTNLDFEEGEINHLLGRNGSGKSQLAKDFIINRGNYFSNDIYEDTLIISSYSNLPSDVTINDLERTIPWKLSKEIYQLLNINQISKTVKLKQLSDGQKQKVKLLVLLSLDKHIIILDEITNALDKKSVDEINVFLQNYIQYYPEKIIINISHDINNIRSLKGNYFLIDNQKICKVDTLDDAISWYLGE

SEQ ID NO: 1831 - DNA, 744 bp, Streptococcus pyogenes
ttgttttgcttactatacactaaacgctcagcaatatatagaatgggagtaactaatatgttgaaaatacaaaatctaaaaaaatcttatggtaagagaaccatattgaataatgtcaatatgaatattcctaagggaaaagtgtatgctttaatcggtccaaatggtgctggaaaatcaactattatgaaaattttgacaggcttagttagtaagacaagtggttctattatttttgaaggtagagaatggtcacgtcgggatctgcgaaaaatcgggagtattattgaagaaccaccactttataaaaatttgagtgcttacgataatatgaaggtagttacaacaatgcttggtgtttcagaaagcactatacttccattattaaataaagttggtctaggaaatattgacaagagaccagtaaaacaattttctcttggaatgaagcaacggttaggtatagctatctctttaataaattcacctaaactacttatattagacgaacctactaatggcttggacccaattggaattcaagaattaagggaaattatagagtcatttaaatcagaaggaatgacaattatgatttcaagccatatactgtcagaagttgaacatctagctgattttattggatttatctatgaaggaaagattattctggaaaaagaatatgacggctctgagaatcttgaagagttattcaataatcaaattttatttgaaaagaggagg

SEQ ID NO: 1832 - protein, 248 aa, Streptococcus pyogenes
LFCLLYTKRSAIYRMGVTNMLKIQNLKKSYGKRTILNNVNMNIPKGKVYALIGPNGAGKSTIMKILTGLVSKTSGSIIFEGREWSRRDLRKIGSIIEEPPLYKNLSAYDNMKVVTTMLGVSESTILPLLNKVGLGNIDKRPVKQFSLGMKQRLGIAISLINSPKLLILDEPTNGLDPIGIQELREIIESFKSEGMTIMISSHILSEVEHLADFIGFIYEGKIILEKEYDGSENLEELFNNQILFEKRR

SEQ ID NO: 1833 - DNA, 852 bp, Streptococcus agalactiae
atgagagatgagcaagaaatatataatttggtgttaaacatagcaaaccaagataagagaatcgaagctgtactattgaatggatctcgggctaacccaaatgtaccgaaagatgattttcaagattatgatattgtttttgttactaattttatagaagatattatttctgacactaattatcataaaaaattcggtgatattcttataatgcagaaaccaaatgagtttagaaataagacggaatacaattgctttgcttacttaatgcagtttcaagatctgacgaggattgatttaagacttattaaaccagaattcttggaggattatttagatgatgctttttcaaaagtacttttagataaaaagaataaatatcttgattataattttgaaagaagttctctgtacgaaacaaagcaattgtcagaagatgaaatcaacaaaattcttaatgaaatatattgggttagtacttatgtagtcaaggggatagcaagaaatgatattatttattcagagtttatgatatctaatcctattaaaaatgcttttattaaacttctaaaacaaaaaatattaatagaaaaagagcttgattcattatcttttggaaagctcgacaaggatatcttgcaatatattacagataaagatcaactattgaaaattttttcaaataaatctttaaaagacattgaggctaatttgcgatttttattggatgaaacaaatcaaatggcgaaatatatttctattaataggaaacttaatctgaaccaaggagaataccaatcagcaatgaaatttatgaatatctttttgtcaaattcatatcaaaatttcaac

SEQ ID NO: 1834 - protein, 284 aa, Streptococcus agalactiae
MRDEQEIYNLVLNIANQDKRIEAVLLNGSRANPNVPKDDFQDYDIVFVTNFIEDIISDTNYHKKFGDILIMQKPNEFRNKTEYNCFAYLMQFQDLTRIDLRLIKPEFLEDYLDDAFSKVLLDKKNKYLDYNFERSSLYETKQLSEDEINKILNEIYWVSTYVVKGIARNDIIYSEFMISNPIKNAFIKLLKQKILIEKELDSLSFGKLDKDILQYITDKDQLLKIFSNKSLKDIEANLRFLLDETNQMAKYISINRKLNLNQGEYQSAMKFMNIFLSNSYQNFN

SEQ ID NO: 1835 - DNA, 390 bp, Streptococcus agalactiae
atgcaaagccagaaattaaatgtccttcagagagttttaagggataaatttcttttacaaggattaggagtacccaacagtaatactgtgttaaacagatcttttactgctctattactagctttattattggaggactcaaataataaaagttggatatctgaagaagatcagataaaaattatgaatcaggcattctcctggcttatagatgaacctgattttagaggctttgacgaggagcttggatggatacatgcctttgctcatggagctgatttattaacagaaatagtcaagatgaaatgtttttcaaaagatgatagtttaaaaatcttaactatcataaaaagagtgatgataactgatgacatactaacattaaacggt

SEQ ID NO: 1836 - protein, 130 aa, Streptococcus agalactiae
MQSQKLNVLQRVLRDKFLLQGLGVPNSNTVLNRSFTALLLALLLEDSNNKSWISEEDQIKIMNQAFSWLIDEPDFRGFDEELGWIHAFAHGADLLTEIVKMKCFSKDDSLKILTIIKRVMITDDILTLNG

SEQ ID NO: 1837 - DNA, 621 bp, Streptococcus agalactiae
ttgggggagatagttatgataaagtttaaattattttttaaatccacagaaaaagaggaagaatggatcgataaggttcaaaaaagtggctatgcttttacaggcattaactcatttcttccagccttctattattttaagagagataaagaaaaagacaagatgtcaataaaaatggattttaaaaaatacatgtcgaaagatgactatgctaactatatcactttatttgaggacagtggatggaagcatattagcggtagtcgttggggagggctgcattattttcaaaaaataaagcctgaaaccagttcagagattttttctgatcaagaatcaaaatcagcgatggctatgagttattataaatatacttgtgagcatgcgtttttctctttattttatttctttctcttgataagaacaacttctatcaccatatttgatccaaaaagttggtatctgacgcaaggtctatgggaaatgcaagggaaaatattttggttagcattcttatttgaaacaccatttgccttattaagaatattacctatgttttactttttaatttctggaatatactatattacacgagctgtaaaacccaaggaaattataaat

SEQ ID NO: 1838 - protein, 207 aa, Streptococcus agalactiae
MGEIVMIKFKLFFKSTEKEEEWIDKVQKSGYAFTGINSFLPAFYYFKRDKEKDKMSIKMDFKKYMSKDDYANYITLFEDSGWKHISGSRWGGLHYFQKIKPETSSEIFSDQESKSAMAMSYYKYTCEHAFFSLFYFFLLIRTTSITIFDPKSWYLTQGLWEMQGKIFWLAFLFETPFALLRILPMFYFLISGIYYITRAVKPKEIIN

SEQ ID NO: 1839 - DNA, 336 bp, Streptococcus agalactiae
ttgatgaaaaggaataaacatttaccgttaacagaaactacctattatatcttattagctttgtttgaggaagcacatggctatgctattatgcaaaaagttgaagaaatgagtggcggtgatgttagaatagccgcagggacaatgtacggtgccattgaaaatttacttaaacaaaaatggataaagtctatcccaagtgacgatagaagaagaaaagtttatattattactgagacaggaaaagaaatagtagaacttgaaacgaatcgattaagaaagttacttaatactgctaatcagttgggttttgggggagatagttatgataaagtt

SEQ ID NO: 1840 - protein, 112 aa, Streptococcus agalactiae
MMKRNKHLPLTETTYYILLALFEEAHGYAIMQKVEEMSGGDVRIAAGTMYGAIENLLKQKWIKSIPSDDRRRKVYIITETGKEIVELETNRLRKLLNTANQLGFGGDSYDKV

SEQ ID NO: 1841 - DNA, 591 bp, Streptococcus agalactiae
ttgctgctatttgacttatctagatcaatatttccaactaatatgatatcctatgcatacctcattgcagaaatatactttaaagtcaaaataaggaaatatattatggaaattaaagaatacgagaataatccgtaccatttagcacagctagtagatttaattaattattgtcagaatatagaagctaaacttgatataaagatggctgaacaagacgatatttttcaaatagaaaattattatcaaaacagaaaaggtcaattttggattgccttagaaaatgaaaaagtagttggttcgattgcgttactgcgtattgatgataaaacagctgttctaaaaaaattttttacatatccaaaatatagaggaaatcctgttcgacttggtcgaaaattatttgaaagatttatgctttttgctcgagctagtaaattcacaagaattgtcttggatactccagaaaaagagaaaagatctcacttcttttatgaaaatcaaggatttaagcaaataacaagagatgaactagatgtagactacatttttccagatagagattcaaggatatatgtaaaacttcttgat

SEQ ID NO: 1842 - protein, 197 aa, Streptococcus agalactiae
MLLFDLSRSIFPTNMISYAYLIAEIYFKVKIRKYIMEIKEYENNPYHLAQLVDLINYCQNIEAKLDIKMAEQDDIFQIENYYQNRKGQFWIALENEKVVGSIALLRIDDKTAVLKKFFTYPKYRGNPVRLGRKLFERFMLFARASKFTRIVLDTPEKEKRSHFFYENQGFKQITRDELDVDYIFPDRDSRIYVKLLD

SEQ ID NO: 1843 - DNA, 759 bp, Streptococcus agalactiae
atgaaatctttagcagtaatgttaaaaaaagaatggatggagaatgttaggacatacaaagttatatctattctgattacttgttcaatatttggtatattaggtcccttaactgcacttatgatgcctgatattatggcaggaattttacctaaaaaactacagggagcgataccagagcctacctatattgattcttatattcagtattttaaaaatatgaatcagcttggtttagttattttagtatttttatttagtagtacactgacgcaagaattttcaaaaggaaccttaattaatctagttacgaagggattagccaaaaaagttataatccttgctaaatttatagtaattacccttctatggacagtgtcatacttattaagtgttgtcatccattttagttatacgttatattactttagtaacgaaggaagtcataaattaatggtttacggtgcaacatggtttatcggtattcttttcataagcttaatactctttttttcagttctttttcgtaaaactttagggggtttgttaggttgtctttttatggtggtgttatgtgtagtatctggattttttaaaatcagtaaaagctataatcctatgcttcttatccaaaaacaaggagaaatattaagtggaaagtttaaagttcaagacttaatggaaccgagcatattagtgtttttgcttattataatgacgttattacttagcatgtacatttttgaaaaaagtgaagtt

SEQ ID NO: 1844 - protein, 253 aa, Streptococcus agalactiae
MKSLAVMLKKEWMENVRTYKVISILITCSIFGILGPLTALMMPDIMAGILPKKLQGAIPEPTYIDSYIQYFKNMNQLGLVILVFLFSSTLTQEFSKGTLINLVTKGLAKKVIILAKFIVITLLWTVSYLLSVVIHFSYTLYYFSNEGSHKLMVYGATWFIGILFISLILFFSVLFRKTLGGLLGCLFMVVLCVVSGFFKISKSYNPMLLIQKQGEILSGKFKVQDLMEPSILVFLLIIMTLLLSMYIFEKSEV

SEQ ID NO: 1845 - DNA, 900 bp, Streptococcus agalactiae
atgaaagctatctcatttcaaaacgttacaaaatcttttggtcctaaaaaaatattaaataatgtttcttttgatttagaagaaaatatgatttatggattcgtaggaccaaatggagcaggtaaaacaacgacaataaaaatgattttaggattgttaaaatttgatacgggtttcataacaatttttggtaaaaaagttaattttggaagaacagataccaatcaactgattggctatctcccagatgttcccgagtactacgattatatgacagctctagaatatcttgatttatgttctggtttagcgagatcaaagcataagctttctaacaaagaactacttaggtcagttggacttgacgataatcaccaaaagattgctacttattctcgaggaatgaaacagcgtcttggattagcccaagcactggttcatgatcctaaaattattatttgcgatgaaccaacctctgcattagacccgaaaggtcgccaagatattttagatattatttcaaatcttagaggagaaaaaactgtgattttttctacccatattctctctgatgtcgaaaaaatatgtgatcatgttctggtgttaactaagtgtgggatttattctcttgaagagttaaaaggaaaaaaatcagaggaaaattattcggttcgtattttaataaaagtgacaaagtctgaagctaaggtactatctcataactatcagatagaaaagaaagataatgagtatgcactgactctcaaaggctctaaaatggataacaaagcagatttactagctggtttttaccaagatttagtttctttaaagattagcccatcagctattgaagtcattgacaatagtttagaggagctttatttggaggttaccaaa

SEQ ID NO: 1846 - protein, 300 aa, Streptococcus agalactiae
MKAISFQNVTKSFGPKKILNNVSFDLEENMIYGFVGPNGAGKTTTIKMILGLLKFDTGFITIFGKKVNFGRTDTNQLIGYLPDVPEYYDYMTALEYLDLCSGLARSKHKLSNKELLRSVGLDDNHQKIATYSRGMKQRLGLAQALVHDPKIIICDEPTSALDPKGRQDILDIISNLRGEKTVIFSTHILSDVEKICDHVLVLTKCGIYSLEELKGKKSEENYSVRILIKVTKSEAKVLSHNYQIEKKDNEYALTLKGSKMDNKADLLAGFYQDLVSLKISPSAIEVIDNSLEELYLEVTK

SEQ ID NO: 1847 - DNA, 1074 bp, Streptococcus agalactiae
atgcttggagagaatatctatttacaacgtactcagattggtatgacgcaagagaatttgagtgattatctgcatttaacaaaaactacaatttcaaagtgggaaaataatcaagctaaaccggatattgactatcttattttgatggctaatctttttgatattagcttggatgacttagtcggttatcaaaaaacattgtcagatgatcaaagaaatcagctcattaaggatctaaaaataaaagcaaatgtattgtctgagagagatttctttcaggaagttaaggaattatcaaaacagttccctaacgattttaagactctgttgataatgattaatatggtcttgagcaacctaaccaaccttaatgattcagaaatgaaagagtggtcactaagtacactaaataaaattattagtaaaacagtagttgagtctgacctccagacggcgataatgttcaaaacggtcgttctttttcacaaccttgaatatgatgaagtgataaacctttaccagaatagtccctataaattaggtgaagaattacttttagctaatagcttttttgcaaaagtcgatgtttaccgagctaagcaagtattacaggttgaaatttatcagcagattctacttgtatgcgagtatctattgagtttatcaacttttgaagttgaagaaaacaaaggcgatatttttgaaaggcttgaacatatgatagaagcgtttcaattaaactctttgcatcccaacacagtcatcaagtgttattatagtttagcttgtcattatagtaaaagtgatgatgataaggcattaggatacttaaaacaatgttttaaatctttaaaacaattgctccaaagatttgaattacacggtgatactttcttttataccatcgatgattggttagagacaatacctactggtattgcaccaccgacgagtcaattacaggtaatagaacgagttgaggacttatttcaaaattcacaatttaaagaactatcagggcataaagaatttcaacaaatgattcaaaaacttaacgatttaaaaaaggattac

SEQ ID NO: 1848 - protein, 358 aa, Streptococcus agalactiae
MLGENIYLQRTQIGMTQENLSDYLHLTKTTISKWENNQAKPDIDYLILMANLFDISLDDLVGYQKTLSDDQRNQLIKDLKIKANVLSERDFFQEVKELSKQFPNDFKTLLIMINMVLSNLTNLNDSEMKEWSLSTLNKIISKTVVESDLQTAIMFKTVVLFHNLEYDEVINLYQNSPYKLGEELLLANSFFAKVDVYRAKQVLQVEIYQQILLVCEYLLSLSTFEVEENKGDIFERLEHMIEAFQLNSLHPNTVIKCYYSLACHYSKSDDDKALGYLKQCFKSLKQLLQRFELHGDTFFYTIDDWLETIPTGIAPPTSQLQVIERVEDLFQNSQFKELSGHKEFQQMIQKLNDLKKDY

SEQ ID NO: 1849 - DNA, 612 bp, Streptococcus agalactiae
gtgaacaagaaatcctttttccagtgtgttatactacttgtttcttttttagtgttaacattagcagttaaatctcaaagtgatatgataagttatttggataatatcacttcagctttttttcaaagcatacgaaatcccgatttaactaacttaatgacgataatatcaacagttgtcagccctttgacaacgtcattaatagcacttgttatccttgggtatcaatattttttaaaccaaagaatagctgtgtggctatttatgttattttttggtaccaatgctttggcattgcttttaaaagatatcatcgcacgtcatagacctatgaatcaacttgtttttgattcgggttatagttttcccagtggacatacgatatcagcgtttttattaatgattcttgttttagtggttgcgagacagagattgagaagagtattgtcacaagtagttttcgtaatatttgcattagtgatccttgcatcagttattttttcaagactctatttagaaaatcattttttaacggatattttagggtcgttgttactaggagcatcgtcatattatggtttgtctgctattgtatctttgaaagagttacaa

SEQ ID NO: 1850 - protein, 204 aa, Streptococcus agalactiae
MNKKSFFQCVILLVSFLVLTLAVKSQSDMISYLDNITSAFFQSIRNPDLTNLMTIISTVVSPLTTSLIALVILGYQYFLNQRIAVWLFMLFFGTNALALLLKDIIARHRPMNQLVFDSGYSFPSGHTISAFLLMILVLVVARQRLRRVLSQVVFVIFALVILASVIFSRLYLENHFLTDILGSLLLGASSYYGLSAIVSLKELQ

SEQ ID NO: 1851 - DNA, 651 bp, Streptococcus pyogenes
atgatgacaaacaaacaaactcactttttaatagcttcttttgcattgctaatctttgttataataggctatacggtcaaattttttcctgaacgtttggcacttctagataatactattcaagcagagattagaggcaaccttcctatagtgctgacgcaattctttaggggtgttactgtatttggaaatgtcatgacacaagttttgttagttattgtgtcggtcctagttttattctttatgaagtggaaaattgaagccttgtttatcttgtcaaatggtgccattgcagcatttttgattacgactctcaagctcttttaccaaagaccaagacctgctattgagcatttggtttatgctggtggctattcgtttcccagtggccatgcgatgggtagcatgctgatttttggtagcctattgattatttgttatcagaggctacattcaaaactattacaatttgtgactagcatgatctttataatactaattttattaattgggttatctcgtatttatctaggagtacactacccaagtgatattttagcaggctttgtattaggatttggtattttgcactttatttatcctttttataagcaaaaacgatttgaatggcgatttcttttgaaacaagac

SEQ ID NO: 1852 - protein, 217 aa, Streptococcus pyogenes
MMTNKQTHFLIASFALLIFVIIGYTVKFFPERLALLDNTIQAEIRGNLPIVLTQFFRGVTVFGNVMTQVLLVIVSVLVLFFMKWKIEALFILSNGAIAAFLITTLKLFYQRPRPAIEHLVYAGGYSFPSGHAMGSMLIFGSLLIICYQRLHSKLLQFVTSMIFIILILLIGLSRIYLGVHYPSDILAGFVLGFGILHFIYPFYKQKRFEWRFLLKQD

SEQ ID NO: 1853 - DNA, 294 bp, Streptococcus agalactiae
atggatattacagattatcaaaaatgggtgagtgaattctataaaaaaagaaactggtatcaatacaattcttttattagaagtaactttctttcagaagaagtcggcgaattggctcaagccattcgcaaatatgaaattggacgtgacagacctgacgaaaccgaacaaactgatttggaaaacttaaatgatataaaagaagaactaggagatgtcttagataatatcttcatacttgctgatcagtataatatctcactagaagagattatcagcgcacatcgcactaat

SEQ ID NO: 1854 - protein, 98 aa, Streptococcus agalactiae
MDITDYQKWVSEFYKKRNWYQYNSFIRSNFLSEEVGELAQAIRKYEIGRDRPDETEQTDLENLNDIKEELGDVLDNIFILADQYNISLEEIISAHRTN

SEQ ID NO: 1855 - DNA, 558 bp, Streptococcus agalactiae
atgagaataactattttttgtggagcaagtactggggaaaatcctgtttatagtgaaaaaacagttgccttagcacaatggatggcacaaaacaaacattctctggtgtatggtggaggaaaagttggcttaatgggagtcatggctgatactgtgattgcaaatggtggctacactactggtgttattccgacatttttaagagatcgtgaaattgcacatgaaaatttatcagagcttatcatagtaaataatatgcctgaacgtaaggcaaaaatgatgctacttggagatgcctttatcgctctacctggtggacctggtacccttgaagaaatttccgaagttatctcttggtctcgcatcggtcaaaatgataatccttgcattttatataatgttaatggctactttaatgatttaaaaaatatgtttgatcatatggttggtgagggttttcttagtctggaagatagagaaaatgtcctattctcagatgatattactgaaatcgaagattttataacgaattataaagtccctagcacgcgccaatac

SEQ ID NO: 1856 - protein, 186 aa, Streptococcus agalactiae
MRITIFCGASTGENPVYSEKTVALAQWMAQNKHSLVYGGGKVGLMGVMADTVIANGGYTTGVIPTFLRDREIAHENLSELIIVNNMPERKAKMMLLGDAFIALPGGPGTLEEISEVISWSRIGQNDNPCILYNVNGYFNDLKNMFDHMVGEGFLSLEDRENVLFSDDITEIEDFITNYKVPSTRQY

SEQ ID NO: 1857 - DNA, 861 bp, Streptococcus agalactiae
ttgaatcaagaaaaaaagagacttaacctaatcgggctgatacttttagctcaggctattgttttaagtttggcgactacactatttgctgaaatcttacaaaatgatgtctggataggtatagcaagtactttaatcgccttactcattccttgtttttttatgggttttaaaaatttaaaaaaacatctaacggcaacccatcatacaatcactttcaccactattttattcttgttaagcattatatatactactaataatatagtctccacaatatgggatgttgtgctaaatcatctcaatattatggaatcggaaagtcaaaattatgatgccacattcaatatacttatgattagttattctgttgttgtaggtcctttttttgaagaagttttataccgaggaatagtattgaatttattatccaagtatggtaaatggtttgccattatcacttctggcatcctatttggtttaatgcaccaagacatttctcagctattgactacatctattgcgggtatcataatgggttttatcgcttaccattattcctttaaggtagccctactccttcatatctgcaataactttatcgtagaaattttcacccagctatcaacagtaaacgagttatacgggacttattttgaaaatatattgctaattttagcaatcttatttatattatattacctttttactcataggaatactgctcgccgtcgtataagtctgcactctaacgttcgagaggctgactcaataaactctaaacaacatacaaaattattacttactagttggccttttattctccttgtcatttacgacattgtcctaacaactattaat

SEQ ID NO: 1858 - protein, 287 aa, Streptococcus agalactiae
MNQEKKRLNLIGLILLAQAIVLSLATTLFAEILQNDVWIGIASTLIALLIPCFFMGFKNLKKHLTATHHTITFTTILFLLSIIYTTNNIVSTIWDVVLNHLNIMESESQNYDATFNILMISYSVVVGPFFEEVLYRGIVLNLLSKYGKWFAIITSGILFGLMHQDISQLLTTSIAGIIMGFIAYHYSFKVALLLHICNNFIVEIFTQLSTVNELYGTYFENILLILAILFILYYLFTHRNTARRRISLHSNVREADSINSKQHTKLLLTSWPFILLVIYDIVLTTIN

SEQ ID NO: 1859 - DNA, 1065 bp, Streptococcus agalactiae
  misc_feature (1)..(1065): n = a, c, g, or t
ttgcgctatcataaggttataaaaaatgctataatacgaataaaggaggcaagtatggcaagaatcccttatcagaaaacacttattttttgtgtagccgttattattgctatttttattttggggttatctaaggatttagcacaatctaaagggcaaaaggttgcaaataataatactgtaaaaacagcacgtgtggttgcaaacggagatattttgctgcacgatgtactatatgccagtgcgcgccaacccgacggcacttataattttactccttattttaaagaggtaaaatcttggattgagagcgctgatttagcgattggtgattatgaagggacgattagttcagaatatcctttagcgggctatcctttatttaatgctcctaatgagattgcaactactatgaaagaaactggatatgatgtcgttgacttagcacataatcatattctggattcacaactggcaggtgctatcaatactgtcaagacttttaatcgtctgggattggatactattggggtttatttaaaggatagaaataaagaagatatcttaattaagcatgtaaatggtattaaaattgctattttaggttattcgtatggctacaatggtatggaagctaatgtttcaaagagtgactatgaaaaacatatgtctgatttagatactaaaaagattaagcaagatattaaaaaggctgaaaaagaagcagatatcaccattgtcatgccacagatggggatagaatatcaaaaaaaacctactacagaacaagtaatgctttatcatagtatgattaaatggggggcagatattatattcggaggacaccctcacgttgttgaaccgtctgaagtgataaaaaaagatggccagaaaaaatttattatttactctatgggaaattttatttcaaatcagcgtttagaaacggttgatgatatctggacagaaagaggattattaatggatgtaaccatagagaaaaaaggtcaaaaaacagtaattaaaaaagttaaggcgcatccaacactagtagaagcannnnnt

SEQ ID NO: 1860 - protein, 355 aa, Streptococcus agalactiae
  MISC_FEATURE (1)..(355): Xaa = Any Amino Acid
MRYHKVIKNAIIRIKEASMARIPYQKTLIFCVAVIIAIFILGLSKDLAQSKGQKVANNNTVKTARVVANGDILLHDVLYASARQPDGTYNFTPYFKEVKSWIESADLAIGDYEGTISSEYPLAGYPLFNAPNEIATTMKETGYDVVDLAHNHILDSQLAGAINTVKTFNRLGLDTIGVYLKDRNKEDILIKHVNGIKIAILGYSYGYNGMEANVSKSDYEKHMSDLDTKKIKQDIKKAEKEADITIVMPQMGIEYQKKPTTEQVMLYHSMIKWGADIIFGGHPHVVEPSEVIKKDGQKKFIIYSMGNFISNQRLETVDDIWTERGLLMDVTIEKKGQKTVIKKVKAHPTLVEAXX

SEQ ID NO: 1861 - DNA, 1290 bp, Streptococcus pyogenes
atgatactattgaaaagcctctataagggcttttttgctgcaatgaaggaggaaaattttgaggcaagatgttataatagagaaaaaggagggtgtgtcttgattaaaactatgcaatacaaaaaaacgatggcaacagttgttgctcttatcgtcgcacttttgctatttggcttgatttatgatttacttggggttcaaaaaaatgagctagcagctcaaaaatctgctcagccaaaggtcaaaacagcgcgtgttgtagctaatggcgacattttaattcatgatattctctacatgagtgctagaaaagctgacgatacctatgatttcactccttattttgaatatgttaaggactggattagcggtgctgacttagctattggagattatgaagggaccattagcccagattatcccttagcaggctatcccttattcaatgctccagaagagattgcaggtgctctgaaaaatactggctatgatgtagtcgatttagcccataatcatatcttagattcccaattagacggtgcccttaacactaaaaaggtttttcatcaattaggtatagacagtattggcatctatgacaaggatcgttcaaaagaatccttcttaattaaaaatgtcaatggtatcaaaattgcaattttaggttattcttatggttataacggcatggaggccacacttagccaagaagactatgagaaacacatgtctgatttagatgaagctaagataaaaaaagaacttcagctagctgaaaaaaaggctgacgtgaccattgttatgccacaaatgggaacagaatatgccttagaaccgacagcagaacaaaaagaactttaccacaaaatgattgattggggagctgacgtcgtcctaggaggccatccgcatgttattgaaccttcagagacagttataaaaggtaggcaaaagaaattcattatttactctatgggaaattttatttcaaatcagcggcttgaaaccgtagatgatatctggactgagcgtggcctattgatggaccttacttttgagaaaaaagataacaaaacaaaaattaaaacagttgaggcccatccaaccatggttttagccaaaggtaaaggcattgtgggtaaagaaggttttgaactatacaattatcgaacaatggttttagaagattttatcaaaggtggaaaataccacgacaagattgatgaggaaaccaaagcaaaagtagcacttgcctatcaggaaattaatgatttagttaacctgaaatgg

SEQ ID NO: 1862 - protein, 430 aa, Streptococcus pyogenes
MILLKSLYKGFFAAMKEENFEARCYNREKGGCVLIKTMQYKKTMATVVALIVALLLFGLIYDLLGVQKNELAAQKSAQPKVKTARVVANGDILIHDILYMSARKADDTYDFTPYFEYVKDWISGADLAIGDYEGTISPDYPLAGYPLFNAPEEIAGALKNTGYDVVDLAHNHILDSQLDGALNTKKVFHQLGIDSIGIYDKDRSKESFLIKNVNGIKIAILGYSYGYNGMEATLSQEDYEKHMSDLDEAKIKKELQLAEKKADVTIVMPQMGTEYALEPTAEQKELYHKMIDWGADVVLGGHPHVIEPSETVIKGRQKKFIIYSMGNFISNQRLETVDDIWTERGLLMDLTFEKKDNKTKIKTVEAHPTMVLAKGKGIVGKEGFELYNYRTMVLEDFIKGGKYHDKIDEETKAKVALAYQEINDLVNLKW

SEQ ID NO: 1863 - DNA, 1242 bp, Streptococcus agalactiae
atgaaaaaactaagaaagttagaggataagatgcagtattcagaaattatgattcgttatggagaactctctactaagaagaaaaaccgtatgcgcttcatcaataagttaaaaaataatatggagcatgtactctccatttatccagatgtttcagtaaaaacagatcgtgatagaggacatgtatatctcaatggtacagattatcatgaagttgcagagtccttaaaagagatttttggtatccaagctttttctccatcttttaaagtagaaaaaaatgttgatacattggtaaaagctgtccaggaaattatgacttccgtttataaagatgggatgacttttaaaattaccgcaaaacgtagtgaccactcatttgaattggatagccgtgctctaaatcatactttaggagatgctgttttttcagtcttgccaaatattaaggctcagatgaagcaaccagatatcaatcttaaagtcgagatacgagatgaggctgcttatatttcatatgaggatattaggggtgcaggaggattaccagtaggaacatctggaaaagggatgctgatgttgtctggtgggattgattctccggtagcaggttacctagcgttaaaacgtggtgtagatatagaagcagtccattttgcaagtcctccttatactagcccaggtgcattgaaaaaagcacatgatttaacacgtaaattgacaaaatttggtggtaatattcaatttattgaagttccattcacagaaattcaagaggaaattaaggcaaaagctcccgaagcctacttgatgacgttaacacgtaggtttatgatgcgtattacagatcgtattcgtgaggaccgaaatggtcttgttattattaacggtgaaagtttaggacaggtggcaagccaaacgttagaaagtatgcaagctattaatgctgtcactgcaacaccgattattcgtcctgtggtcacgatggataagctagaaattattgatattgctcaaaaaatagatacttttgatatttcaattcaaccatttgaggattgctgtacgatttttgcaccagatcgcccaaaaactaaccctaaaattaagaatacagaacagtatgagaaacgtatggatgtagaaggtcttgtagagagggcagttgcagggattatggtaactactattcaacctcaagcagatagtgatgatgttgatgacttgattgacgatttatta

SEQ ID NO: 1864 - protein, 414 aa, Streptococcus agalactiae
MKKLRKLEDKMQYSEIMIRYGELSTKKKNRMRFINKLKNNMEHVLSIYPDVSVKTDRDRGHVYLNGTDYHEVAESLKEIFGIQAFSPSFKVEKNVDTLVKAVQEIMTSVYKDGMTFKITAKRSDHSFELDSRALNHTLGDAVFSVLPNIKAQMKQPDINLKVEIRDEAAYISYEDIRGAGGLPVGTSGKGMLMLSGGIDSPVAGYLALKRGVDIEAVHFASPPYTSPGALKKAHDLTRKLTKFGGNIQFIEVPFTEIQEEIKAKAPEAYLMTLTRRFMMRITDRIREDRNGLVIINGESLGQVASQTLESMQAINAVTATPIIRPVVTMDKLEIIDIAQKIDTFDISIQPFEDCCTIFAPDRPKTNPKIKNTEQYEKRMDVEGLVERAVAGIMVTTIQPQADSDDVDDLIDDLL

SEQ ID NO: 1865 - DNA, 1212 bp, Streptococcus pyogenes
atggactattcagaaattatggttcgccatggtgaactatcaactaaagggaagaatcgcatgcgattcattaacaaacttaaaaacaatattcaagacgtactggctcctttcccagccattactgtccgttcagatcgtgataggacccatgtgtctctaaatggcacagattatcagcctattgtagaagctttaaagctggtgtttggtgttcaagctctatctcctgtttataaacttgaaaaaagtgtccctcttttggtaacagctgttcaagatatcatgacttctctttatcgtgatggactgacgtttaagattgccactaagcgtagtgatcacgcgtttgaattggatagtcgtgagcttaacagtcttcttggtggagctgtttttgaggttttaccaaatatccaagcccagatgaaacatcccgatgtgactctcaaagtcgaaattcgtgatgaagcagcttacatttcttatgaagagattaagggagcaggcgggttaccggtaggaacgtcagggaaagggatgctgatgttatcgggcggtattgattcaccagtagctgggtatttagcccttaaacgtggccttgatattgaagttgttcattttgctagccctccgtacaccagtccaggtgccttggctaaagcccaagaccttactcgtcgattaactcgttttggtggaaatatccaatttatcgaggttccttttacagaaattcaagaagaaattaaaaataaggcaccagaggcttaccttatgacattaacccgccgctttatgatgcgcatcacagatgccattcgtgagcaacgtaagggtcttgttattgttaacggtgagagcctaggtcaggttgctagtcaaacccttgaaagcatgcaggccattaatgcggtaacatcaactccaattattagaccagtcgtgacaatggataaacttgaaattatcgagatggctcaggcgattgatacttttgacatttctattcaaccgttcgaagattgctgtactatttttgcaccagaccgtcctaaaaccaaccctaaactaggtaatgctgaaaaatatgaagaatgctttgatattgatggtcttgtccagcgtgctgtgtcaggaattgttgtcacagaaatcacacctgaaatcgtcaatgatgaggttgaaaatctcattgatgctttactt

SEQ ID NO: 1866 - protein, 404 aa, Streptococcus pyogenes
MDYSEIMVRHGELSTKGKNRMRFINKLKNNIQDVLAPFPAITVRSDRDRTHVSLNGTDYQPIVEALKLVFGVQALSPVYKLEKSVPLLVTAVQDIMTSLYRDGLTFKIATKRSDHAFELDSRELNSLLGGAVFEVLPNIQAQMKHPDVTLKVEIRDEAAYISYEEIKGAGGLPVGTSGKGMLMLSGGIDSPVAGYLALKRGLDIEVVHFASPPYTSPGALAKAQDLTRRLTRFGGNIQFIEVPFTEIQEEIKNKAPEAYLMTLTRRFMMRITDAIREQRKGLVIVNGESLGQVASQTLESMQAINAVTSTPIIRPVVTMDKLEIIEMAQAIDTFDISIQPFEDCCTIFAPDRPKTNPKLGNAEKYEECFDIDGLVQRAVSGIVVTEITPEIVNDEVENLIDALL

SEQ ID NO: 1867 - DNA, 1143 bp, Streptococcus agalactiae
atgatttattttgataattcggcaactactattccctatccagaagttttaaggacttatcaagaagtagctagtaaaatctatggaaacccctcaagtttacatgagctaggaacaacatcttctcggattttagaggctagccgtaaacaaattgctagtttacttgagcttaaagcaaatgaaattttctttacctctggtggtacagaggccgataattgggttattaagggtcttgcgtttgagaaacaacattttggaaatcatattattgtttctgatatcgaacacccagctgttaaagagtctgctaaatggcttggagagtatgggtttgagattgattatgcgccagtagatgataaaggatttgtagacgtagaagcactggtcaaattaattaaaccagaaacgattcttatttcaattatggcaataaacaatgaaattggttctattcagccaataaaagctatttcagacttgttgtcagataaacctactatatcgtttcatgttgatgctgttcaagcaataggtaagataccgactaaagattatttgactgagcgagttgattttgcatctttttctagtcataaatttcacggcgttcgtggggttggctttctatatattaaagaaggaaaacgtatttcaccattactaacaggtggtggacaagaaactgatttacgttcaactactgagaatgtcgcagggattgcagctactgctaaagctttacgaatggttatggacaaggaagtagtagctattcctaaaataagtaaaatgaaaaccattattcatgatgaattagccaaatatgaggatattacgttattttcgggtaaggaagatttttcacctaacattatcacgtttggtatcaagggtgtccgaggagaagttcttgtccatgcctttgagggacatgatatttttatctcgacaactagcgcttgctcttctaaagcaggtaaaccagcaggaactcttatagcaatgggaatttcaactaagttagcccaaactgctgtacgtatcagcttagatgatgataatgatatgggacaagtagagcaatttttaactatttttaaacaagtttatgaaaaaactaagaaagttagagga

SEQ ID NO: 1868 - protein, 381 aa, Streptococcus agalactiae
MIYFDNSATTIPYPEVLRTYQEVASKIYGNPSSLHELGTTSSRILEASRKQIASLLELKANEIFFTSGGTEADNWVIKGLAFEKQHFGNHIIVSDIEHPAVKESAKWLGEYGFEIDYAPVDDKGFVDVEALVKLIKPETILISIMAINNEIGSIQPIKAISDLLSDKPTISFHVDAVQAIGKIPTKDYLTERVDFASFSSHKFHGVRGVGFLYIKEGKRISPLLTGGGQETDLRSTTENVAGIAATAKALRMVMDKEVVAIPKISKMKTIIHDELAKYEDITLFSGKEDFSPNIITFGIKGVRGEVLVHAFEGHDIFISTTSACSSKAGKPAGTLIAMGISTKLAQTAVRISLDDDNDMGQVEQFLTIFKQVYEKTKKVRG

SEQ ID NO: 1869 - DNA, 1119 bp, Streptococcus pyogenes
atgatttattttgataatgcagccacaaccataccttatggagaggctcttaaaacttaccaagaagtagcaacaaaaatatatggcaatccctcaagtctgcaccaattagggacaaatgcgtctcgcattttagaagcttcccgtaaacagattgctggtttgttgggtgttaagtcagaagaaatcttttttacgtctggtgggactgaaagtgctaattgggctattaagggaattgcttttgaaaaaaacgcttttggcaaacatattattatctcagccattgaacaccctgccgtgagtgaaagtgtcaaatggcttctcacacaaggattcgaagtttcttatgctccagtgacaacacagggagttgttgatgtgaatgctttagctgagctgattagaccagacaccatcttaatctcgattatggctgttaataatgaaatgggagctatccaaccgattagagccatttcaaacctattggctaaccaaccaacgatcacctttcacgttgatgctgttcaagccattggtaaaataccactctgtgattatatgactaatcgtgtggatttggcttctttttcagggcacaaatttcatagtgttcgtggtgttggcttcctttataaaaaagcaggcaagcgactcaatcctctcttgtcaggcggcggccaagagcaggagttacgttcaaccactgaaaatgttgcaggaattgctagcatggccaaagcattaagaatagtcactgaaaaacaagtgagcgtcttacctaaactaacagcgatgcgagatgtgatttacaaatctttgtccgcttacccagatgtgacagtattttcagctcaagaaggctttgcgcccaatattttgacctttgggattagaggggttcgaggagaagttattgtccacgcctttgaaaaatatgagatttatatttcgaccacaagtgcatgttcgtccaaagcaggtgagccagcaggaagcctagtggctatggggattcctgtaaaaactgcccagacagccgttcgtattagtctagacgatgacaacgatatgggacaagtagagcagtttttgaccatattccaaacagattta

SEQ ID NO: 1870 - protein, 373 aa, Streptococcus pyogenes
MIYFDNAATTIPYGEALKTYQEVATKIYGNPSSLHQLGTNASRILEASRKQIAGLLGVKSEEIFFTSGGTESANWAIKGIAFEKNAFGKHIIISAIEHPAVSESVKWLLTQGFEVSYAPVTTQGVVDVNALAELIRPDTILISIMAVNNEMGAIQPIRAISNLLANQPTITFHVDAVQAIGKIPLCDYMTNRVDLASFSGHKFHSVRGVGFLYKKAGKRLNPLLSGGGQEQELRSTTENVAGIASMAKALRIVTEKQVSVLPKLTAMRDVIYKSLSAYPDVTVFSAQEGFAPNILTFGIRGVRGEVIVHAFEKYEIYISTTSACSSKAGEPAGSLVAMGIPVKTAQTAVRISLDDDNDMGQVEQFLTIFQTDL

SEQ ID NO: 1871 - DNA, 96 bp, Streptococcus agalactiae
atgatcaaacaaataatactactaccgatacctcaactattgaaaatacaacaacaccttaaaaaagctaggttccctagctttttttgtattctt

SEQ ID NO: 1872 - protein, 32 aa, Streptococcus agalactiae
MIKQIILLPIPQLLKIQQHLKKARFPSFFCIL

SEQ ID NO: 1873 - DNA, 1347 bp, Streptococcus agalactiae
atgtcaaaacaatatgattatatcgttattggtggaggtagtgcaggcagtggtaccgctaatagggcagccatgtatggagcaaaagtcctgttaattgaaggtggacaagtaggtggaacttgtgttaacttaggttgtgtaccgaagaaaatcatgtggtatggtgcacaagtttctgagacactccataagtatagttcaggttatggttttgaagtcaataatcttaattttgattttactactctaaaagctaatcgcgatgcttacgtgcagcggtctagacagtcgtatgccgctaattttgagcgtaatggagtcgaaaagattgatggatttgctcgttttattgataaccatactattgaagtgaatggtcagcaatataaagctcctcacattactattgcaacaggtggacaccctctttaccctgatattattggaagtgaacttggtgagacttctgatgatttttttggatgggagaccttaccagattctatattgattgttggggcgggctatatcgcggcggaacttgctggagtggttaatgaattaggcgttgaaacccatcttgcatttagaaaagaccatattctacgcggatttgatgacatggtaacaagtgaggttatggctgaaatggagaaatcaggtatctctttacatgctaaccatgtacctaaatctcttaaacgcgatgaaggtggcaagttgatttttgaagctgaaaatgggaaaacgcttgtcgttgatcgtgtaatatgggctatcggccgtggaccaaatgtagacatgggacttgaaaataccgatattgttttaaatgataaaggttatatcaaagcagatgaatttgagaatacttctgtagatggcgtgtatgctattggagatgttaatgggaaaattgccttgacaccggtagcaattgcagcaggtcgtcgcttatcagaaagactttttaatcataaagataacgaaaaattagattaccataatgtaccttcagttatttttactcaccctgtaattgggacggtaggactttcagaagcagcagctatcgagcaatttggagaagataatatcaaagtctatacatcaacttttacctctatgtatacggctgttaccactaatcgccaagcagttaagatgaagctcataaccctaggaaaagaggaaaaagttattgggcttcatggtgttggttatggtattgatgaaatgattcaaggtttttcagttgctatcaaaatgggggctactaaagcagactttgatgatactgttgctattcacccaactggatctgaggaatttgttacaatgcgc

SEQ ID NO: 1874 - protein, 449 aa, Streptococcus agalactiae
MSKQYDYIVIGGGSAGSGTANRAAMYGAKVLLIEGGQVGGTCVNLGCVPKKIMWYGAQVSETLHKYSSGYGFEVNNLNFDFTTLKANRDAYVQRSRQSYAANFERNGVEKIDGFARFIDNHTIEVNGQQYKAPHITIATGGHPLYPDIIGSELGETSDDFFGWETLPDSILIVGAGYIAAELAGVVNELGVETHLAFRKDHILRGFDDMVTSEVMAEMEKSGISLHANHVPKSLKRDEGGKLIFEAENGKTLVVDRVIWAIGRGPNVDMGLENTDIVLNDKGYIKADEFENTSVDGVYAIGDVNGKIALTPVAIAAGRRLSERLFNHKDNEKLDYHNVPSVIFTHPVIGTVGLSEAAAIEQFGEDNIKVYTSTFTSMYTAVTTNRQAVKMKLITLGKEEKVIGLHGVGYGIDEMIQGFSVAIKMGATKADFDDTVAIHPTGSEEFVTMR

SEQ ID NO: 1875 - DNA, 1359 bp, Streptococcus pyogenes
gtgataaaaatggttattccttatgattatattgttattggtggagggagtgcaggtattgcttctgcgaacagggcagccatgcatggggccaaagtattgttagctgaaggtaaagagattgggggaacctgtgttaacctaggctgcgttcctaaaaaagtcatgtggtatggcgctcaagtagcagatattttagggacttacgctaaggattatggatttgactttaaagagaaagcatttgattttaaacaattgaaagcaaatcgtcaagcttatattgatcggattcatgcttcttatgagcgaggctttgagcagaatggtgttgaccgtatttatgattatgctgttttcaaagatgctcatacggtagaaattgcagggcagctttataccgcaccgcatattttgattgctacaggaggacatcctgtttttccagatattgagggggcacaatacggtatcagctcggacggcttttttgccttagatgaggtaccaaaacgtacggctgtggttggggcaggctatattgctgtggaacttgctggtgttttgcatgctttgggatcgaagacggatttgtttatccgtcacgatcgacctttaagaagttttgacaaaaccattgttgatgtcttagttgatgaaatggcagttaatgggccgcgtttacacactcatgcagaagtggcaaaggttgtcaaaaatactgatgagtccttgaccctttacctcaaagatggccaagaagttgaggttgaccagctcatttgggctatcggtcgcaagcctaatctagaaggttttagtcttgacaaaactggagtgacgttaaatgataaaggttatattgagacagatgcctatgaaaacacgtctgtcaaaggtatttatgccgtgggagatgttaatgggaaactggctttaactccagttgctgtggcagctggacgtcgcctatcagagcgtcttttcaatggcaaaacagacgagaaattggactaccaaaacgttgctactgtgatttttagtcaccctgttattggctctgttggcttgtcagaagaagcagcagtcaaacagtatgggcaagaagcagttaaaacatatcaatcacgttttacgtctatgtttactgctatcactaaccatcgccaaccttgtctgatgaagttggtaacagtcggagataccgaaaaaatagttggtcttcacggaatcggatacggggttgacgaaatgattcagggctttgcagtagccatcaaaatgggagcaaccaaggcggattttgataacaccgttgctattcacccaactggctcagaagaatttgtcaccatgcgc

SEQ ID NO: 1876 - protein, 453 aa, Streptococcus pyogenes
VIKMVIPYDYIVIGGGSAGIASANRAAMHGAKVLLAEGKEIGGTCVNLGCVPKKVMWYGAQVADILGTYAKDYGFDFKEKAFDFKQLKANRQAYIDRIHASYERGFEQNGVDRIYDYAVFKDAHTVEIAGQLYTAPHILIATGGHPVFPDIEGAQYGISSDGFFALDEVPKRTAVVGAGYIAVELAGVLHALGSKTDLFIRHDRPLRSFDKTIVDVLVDEMAVNGPRLHTHAEVAKVVKNTDESLTLYLKDGQEVEVDQLIWAIGRKPNLEGFSLDKTGVTLNDKGYIETDAYENTSVKGIYAVGDVNGKLALTPVAVAAGRRLSERLFNGKTDEKLDYQNVATVIFSHPVIGSVGLSEEAAVKQYGQEAVKTYQSRFTSMFTAITNHRQPCLMKLVTVGDTEKIVGLHGIGYGVDEMIQGFAVAIKMGATKADFDNTVAIHPTGSEEFVTMR

SEQ ID NO: 1877 - DNA, 333 bp, Streptococcus agalactiae
atggctaatgtatatgatttagcaaatgaattagaacgtgctgttcgtgctttaccagaataccaagcagttttaactgcaaaatcagctattgaaagtgatgcggatgcacaagtgctttggcaagactttttggctacccaatcaaaagttcaagaaatgatgcaatctggccaaatgccaagtcaagaagaacaagatgaaatgtctaaacttggggaaaaaattgaatccaatgaccttttaaaagtttattttgaccaacaacaacggttgtctgtctatatgtctgatatcgaaaaaattgtctttgcacccatgcaggacttgatg

SEQ ID NO: 1878 - protein, 111 aa, Streptococcus agalactiae
MANVYDLANELERAVRALPEYQAVLTAKSAIESDADAQVLWQDFLATQSKVQEMMQSGQMPSQEEQDEMSKLGEKIESNDLLKVYFDQQQRLSVYMSDIEKIVFAPMQDLM

SEQ ID NO: 1879 - DNA, 339 bp, Streptococcus pyogenes
atgtcacaagaaatttatgactatgctaatcaacttgaaagagcagttcgtgctctgccagaataccaaaaagtgttagaagtaaaagaggccattcaagcagacgttagtgctagcgaactgtttgatgagtttgtcgctatgcaagaaaaaatccaagggatgatgcaatcaggccaaatgccaacggctgaagaacaaacaagcattcaagaacttagccaaaagattgaagctaatgaccagctaaaagcttattttgaagcgcagcaggccttatctgtttacatgagtgatattgagcgtattgtatttgctccgttgaaagatttagtcaag

SEQ ID NO: 1880 - protein, 113 aa, Streptococcus pyogenes
MSQEIYDYANQLERAVRALPEYQKVLEVKEAIQADVSASELFDEFVAMQEKIQGMMQSGQMPTAEEQTSIQELSQKIEANDQLKAYFEAQQALSVYMSDIERIVFAPLKDLVK

SEQ ID NO: 1881 - DNA, 1164 bp, Streptococcus agalactiae
atgagatatttaactgctggtgagtcacatggacctagtttaacagctattatcgaagggattcctgcgggactgaaattatctgctaaagatattaatgaagatttaaaacgccgccaaggtggttatggtcgtgggaatcgaatgaaaattgaaactgatcaagtgatcattagttctggtgtgcgccatggaaaaaccttgggttcacctattacactgacagtaactaataaggatcatagcaaatggctggacatcatgtcagtcgaagacattgaagagcgcctaaagcaaaaacgtcgtattaagcatcctagacctgggcacgcagatttagtaggtggaattaaataccgtttcgatgatttgagaaatgctttagagcgttcttcggctcgtgagaccacaatgcgagtagctattggtgcgattgctaaacgtatcttgaaagaaattggtatcgaaattgccaaccatattgtagtttttggtggcaaggagattactgtccctgataagctaacagttcaacaaatcaaagtgttatctagtcaatcgcaagtagctatcgtcaatccatccttcgaacaagaaatcaaggattatattgacagtgtgaaaaaggctggagatactatcggaggagtggttgaaactatcgttggaggagttcccgttggtttaggctcttatgtacactgggatagaaagttagatgctaagatagcgcaagcagttgtatctatcaatgcttttaaaggtgttgaatttggtctaggttttaagtcagggtttttaaaaggaagtcaagtaatggactccatatcatggacaaaggaccaaggttatatacgtcagtcaaataatttaggcggttttgaaggcggtatgactaatggagagcctattatcgttaggggagtaatgaaaccaattcctacgctttacaagccactaatgtcagttgatattgatactcacgagccttatagagctacagtggaacgttctgatcccacggcacttccggctgcaggtgtcgttatggaagctgtagtagccaccgtcctggtgacagaagtgctagaaaaattttcttcagacaacatgtatgaactaaaagaagctgtaaaactatatcgcaattatgttgatcatttt

SEQ ID NO: 1882 - protein, 388 aa, Streptococcus agalactiae
MRYLTAGESHGPSLTAIIEGIPAGLKLSAKDINEDLKRRQGGYGRGNRMKIETDQVIISSGVRHGKTLGSPITLTVTNKDHSKWLDIMSVEDIEERLKQKRRIKHPRPGHADLVGGIKYRFDDLRNALERSSARETTMRVAIGAIAKRILKEIGIEIANHIVVFGGKEITVPDKLTVQQIKVLSSQSQVAIVNPSFEQEIKDYIDSVKKAGDTIGGVVETIVGGVPVGLGSYVHWDRKLDAKIAQAVVSINAFKGVEFGLGFKSGFLKGSQVMDSISWTKDQGYIRQSNNLGGFEGGMTNGEPIIVRGVMKPIPTLYKPLMSVDIDTHEPYRATVERSDPTALPAAGVVMEAVVATVLVTEVLEKFSSDNMYELKEAVKLYRNYVDHF

SEQ ID NO: 1883 - DNA, 1164 bp, Streptococcus pyogenes
ttgcgttatttaacagcaggagaatctcatgggccatccttaacagctattattgaaggtataccagcaggattaactcttcatccagcggatattgatcacgaattacagcgacgtcaaggaggttatggccgtggtgccagaatgtctattgagactgatcgggttcaaatatcctcaggagttcgtcatggtaaaacaacaggggcccccattaccttaacggtaattaataaggaccaccaaaaatggctagatgtcatggctgtaggagacattgaagagactctcaagttaaagcgtcgtgttaagcatcctagaccaggacatgcggatttggtaggaggtattaaatatcattttaacgatttaagagatgctttagagcgttcctcggctagagaaacaacgatgagagtggctgtaggcgctgttgctaaacgtatcttagctgaacttggaattgatatgttacatcatatcttaatatttggtggtataacgatcacaataccttctaagctctcttttagagagctgcaagaaagggctctccattcagaattatctattgttaatccaaagcaagaagaagaaattaaaacgtatattgataagataaaaaaagaaggggataccattggtggtattatcgaaacgatagttcaaggggtgccagcaggtcttggatcttatgtccaatgggataaaaaattagatgccaagctggctcaagcagttctttccattaatgcttttaaaggggtggaatttggagctgggtttgatatgggattccaaaagggctctcaggtaatggatgaaatcacctggacacctacccagggctatggtcgtcaaacaaaccacttaggtggctttgaaggtggcatgaccacaggacaacctcttgttgttaaaggggttatgaagcccattcctactttgtataaaccactcatgtcggtagatattgatagtcatgaaccttataaagcaacggtggaacgctctgatccgacggccttaccagctgcaggggttatcatggaaaatgtggtggcgacggtgcttgccaaagagattttagagactttttcttctactaccatgtctgaattgcaaaaagctttttcggactatcgtgcctacgtcaagcaattt

SEQ ID NO: 1884 - protein, 388 aa, Streptococcus pyogenes
LRYLTAGESHGPSLTAIIEGIPAGLTLHPADIDHELQRRQGGYGRGARMSIETDRVQISSGVRHGKTTGAPITLTVINKDHQKWLDVMAVGDIEETLKLKRRVKHPRPGHADLVGGIKYHFNDLRDALERSSARETTMRVAVGAVAKRILAELGIDMLHHILIFGGITITIPSKLSFRELQERALHSELSIVNPKQEEEIKTYIDKIKKEGDTIGGIIETIVQGVPAGLGSYVQWDKKLDAKLAQAVLSINAFKGVEFGAGFDMGFQKGSQVMDEITWTPTQGYGRQTNHLGGFEGGMTTGQPLVVKGVMKPIPTLYKPLMSVDIDSHEPYKATVERSDPTALPAAGVIMENVVATVLAKEILETFSSTTMSELQKAFSDYRAYVKQF

SEQ ID NO: 1885 - DNA, 1065 bp, Streptococcus agalactiae
atgcaggttgaagttgacttaccgaatcacccttatcatattaaaattgaagaaggatgtttttctgaggctggtgactgggtatcacatttatggcagaaacaaatgataactattatcacagatagtaacgtagaaatattatacggggagtcgcttgtcaaccagttaaaaaaacaaggttttacagtacatgtttttagttttgctgcgggtgaagctagtaaaactttggaagttgctaatcgtatttatgcttttttagcaaagcatcatatgaccagaagcgatgggatcattgcacttggtggaggcgtcgtcggagatttagcagcgtttgttgcttctacttatatgcggggaatccattttcttcaaattccaactagtttaacagcacaggttgattcttccattggcggaaaaacaggagtcaacacttcattcgctaaaaatatggtaggtacttttgcacaacctgatggtgtactgatagatcctgttactctaaaaacattgggcaatcgtgaattagttgaaggtatgggagaagtcatcaaatatggcttgattgatgatataaaactctggcatattttagaagagatggatgggactattgatagtatccttgataatgcattagctattatttatcactcttgtcaagttaaacgaaagcatgttttagctgatcaatatgataaagggttaaggatgcatttgaattttggccacactatcggtcatgctatcgaagtacatgctggctatggagaaataatgcatggagaagctgttgcaattggaatgatccagctttctcgtgtggctgagcgtaaaaatcttatgccaagaggtatcagtcaagatatttataatatgtgtttaaaatttggccttccggtccactatgcggaatgggataaggacgtcttatttgacatattgagtcatgataaaaaagcaagtggacaatttattaaaattgttatactgcctcaattaggtagtgcaacagtccaccaaatacctttagaagaaatgagagattatttggagaaa

SEQ ID NO: 1886 - protein, 355 aa, Streptococcus agalactiae
MQVEVDLPNHPYHIKIEEGCFSEAGDWVSHLWQKQMITIITDSNVEILYGESLVNQLKKQGFTVHVFSFAAGEASKTLEVANRIYAFLAKHHMTRSDGIIALGGGVVGDLAAFVASTYMRGIHFLQIPTSLTAQVDSSIGGKTGVNTSFAKNMVGTFAQPDGVLIDPVTLKTLGNRELVEGMGEVIKYGLIDDIKLWHILEEMDGTIDSILDNALAIIYHSCQVKRKHVLADQYDKGLRMHLNFGHTIGHAIEVHAGYGEIMHGEAVAIGMIQLSRVAERKNLMPRGISQDIYNMCLKFGLPVHYAEWDKDVLFDILSHDKKASGQFIKIVILPQLGSATVHQIPLEEMRDYLEK

SEQ ID NO: 1887 - DNA, 1071 bp, Streptococcus pyogenes
atgccacaaacacttcatgtccattctcgggtcaaggattatgatatcctgtttaccgaccatgttttaaaaaccttagcagattgccttggtgagcgcaagcagcgtaaactcttgtttatcaccgatcaaacggtctaccacttgtatcagactctctttgaagaatttgctcagcaatacaacgcttttgtccatgtctgccctccgggaggtcaatccaaatccttggaacgtgtcagtgctatctacgaccagctcatcgctgaaaatttttccaaaaaagatatgattgttactattggtggtggtgttgttggggatctgggtggttttgtcgctgcaacctattaccgtggtattccctacattcaaatcccaacgactttacttagtcaggtggatagcagtatcgggggcaaagttggagtccattttaaaggtctaaccaatatgattggcagcatttaccctccagaagctatcattatttcaaccacctttttggagaccttaccgcaacgggaattctcctgcggcatcagtgagatgctcaaaatcggcttcattcatgatagaccgctttttcagcagttacgtgattttcaaaaagaaaccgataagcagggacttgaacgtctgatttaccaatccatttccaataaaaaacggattgttgaacaagatgaatttgaaaatggtttgcgcatgtctttaaattttgggcataccttgggccacgcgattgaatcgctctgccaccatgatttttaccatcacggtgaagccattgctatcggtatggtggttgatgctaaactggctgtttccaaaggactcttgccaaaagaggacttggatagcctccttcaagtttttgaacgttaccagttaccaacaacacttgaaagagctgatgtctctgcgacatccctctttgacgtctttaaaacagataagaagaattctgagcaacatattatctttatattacccacagaaaccggttttaccaccctagccattaacaaagacgatcaccaatttgtcgagaagctcgacagtttatta

SEQ ID NO: 1888 - protein, 357 aa, Streptococcus pyogenes
MPQTLHVHSRVKDYDILFTDHVLKTLADCLGERKQRKLLFITDQTVYHLYQTLFEEFAQQYNAFVHVCPPGGQSKSLERVSAIYDQLIAENFSKKDMIVTIGGGVVGDLGGFVAATYYRGIPYIQIPTTLLSQVDSSIGGKVGVHFKGLTNMIGSIYPPEAIIISTTFLETLPQREFSCGISEMLKIGFIHDRPLFQQLRDFQKETDKQGLERLIYQSISNKKRIVEQDEFENGLRMSLNFGHTLGHAIESLCHHDFYHHGEAIAIGMVVDAKLAVSKGLLPKEDLDSLLQVFERYQLPTTLERADVSATSLFDVFKTDKKNSEQHIIFILPTETGFTTLAINKDDHQFVEKLDSLL

SEQ ID NO: 1889 - DNA, 675 bp, Streptococcus agalactiae
atgaaaatagtagtaccagtaatgcctcgcagtcttgaagaggctcaagaaatagatttatcaaaatttgatagtgttgatattattgaatggcgagctgatgccttaccaaaggatgacattattaatgtagctccagctatttttgagaaattcgcaggtcatgaaattatttttactcttcgtacaacgcgtgaaggtggtaatattgtcttatctgatgctgagtatgttgagttaatccagaaaattaattctatctacaatccagattatattgattttgagtatttttcacataaagaagtttttcaagaaatgctagaatttccaaatttagtcctgtcttatcacaattttcaagagacaccggagaatattatggagatattttcagaattaacagccctagcaccacgagttgtgaaaatcgcagtaatgccaaagaatgaacaagatgtcttagacgttatgaattacactcgcggtttcaagactattaatcctgatcaagtttatgcgacggtatctatgagtaaaattggacgtatttctcgttttgctggtgatgtaactggatctagttggacatttgcatatttagattcatctatcgcacccggacaaattactatttcagagatgaagcgtgtcaaagcattgcttgacgctgac

SEQ ID NO: 1890 - protein, 225 aa, Streptococcus agalactiae
MKIVVPVMPRSLEEAQEIDLSKFDSVDIIEWRADALPKDDIINVAPAIFEKFAGHEIIFTLRTTREGGNIVLSDAEYVELIQKINSIYNPDYIDFEYFSHKEVFQEMLEFPNLVLSYHNFQETPENIMEIFSELTALAPRVVKIAVMPKNEQDVLDVMNYTRGFKTINPDQVYATVSMSKIGRISRFAGDVTGSSWTFAYLDSSIAPGQITISEMKRVKALLDAD

SEQ ID NO: 1891 - DNA, 684 bp, Streptococcus pyogenes
atgagaattgtagcaccagtcatgccaagacattttgacgaggctcaagccattgatatttctaaatatgaagatgttaatttaattgaatggcgagcagactttcttcccaaggatgagattgtcgcagtagcaccagctatttttgaaaaatttgccggaaaagaaattatctttacccttcggaccgttcaagaaggggggaatattaccctttcaagtcaggagtatgttgatattatcaaagaaatcaatgctatttataatccagactatattgactttgagtattttacgcacaagtcagtatttcaagaaatgcttgattttccaaatcttattttgtcttatcacaactttgaagagactcctgaaaatttaatggaagctttttcagaaatgaccaagttggcaccgcgtgtggttaaaattgctgtgatgccccagagtgaacaagatgttctagatttgatgaactataccagaggctttaagacgctcaatcctgagcaagaatttgcaactatatctatggggaaattaggaagattgtctcgttttgcgggagatgtcattggctcttcctggacatacgtttcattagatcatgttagcggtccaggtcaagtgactctcaatgatatgaaacgtattattgaggtcttagaaatggatatctctaac

SEQ ID NO: 1892 - protein, 228 aa, Streptococcus pyogenes
MRIVAPVMPRHFDEAQAIDISKYEDVNLIEWRADFLPKDEIVAVAPAIFEKFAGKEIIFTLRTVQEGGNITLSSQEYVDIIKEINAIYNPDYIDFEYFTHKSVFQEMLDFPNLILSYHNFEETPENLMEAFSEMTKLAPRVVKIAVMPQSEQDVLDLMNYTRGFKTLNPEQEFATISMGKLGRLSRFAGDVIGSSWTYVSLDHVSGPGQVTLNDMKRIIEVLEMDISN

SEQ ID NO: 1893 - DNA, 165 bp, Streptococcus agalactiae
gtgtatgaaaacatatttagaacttttttaccttctgatagattagttgctaaggcttttctgacatcatgttggtcaaggaaaatacctgtcattaatccatcattcaaaaagacactatatttgatattattttctaaaatcaaaaatgattcaggagcctct

SEQ ID NO: 1894 - protein, 55 aa, Streptococcus agalactiae
MYENIFRTFLPSDRLVAKAFLTSCWSRKIPVINPSFKKTLYLILFSKIKNDSGAS

SEQ ID NO: 1895 - DNA, 1155 bp, Streptococcus agalactiae
atgaataaacttaaagtgaattctgtcgttgaaagaaaaatcaaatcaggtgctcagttactggaaaaaaaagattttgataccagtttagttaaccagttggttcaacttttttcacagtcaaatcaattcttagggatggcctatctttcaccacaaaataaaggtattggttggttactatcaagacaagtttttgattttaaccatgattactttgtatcgctattcgaaaaatctagagagaagcgtcaaaaatttgaaaaatctagccaaacaacagcctaccgcttgtttaatcaggatggagataactttggtggcctaactatagatttttatagtgactatgctcttttttcgtggtacaatgaatttgtttatactaatcgacaaatgattgttgcagcctttaagcaggtctatcctaatattaaaggggcatatgaaaaaattcgtttcaaaggtttagactttgaaagtgctcatttgtacggtcaagaggctcctgaatcatttttgattttagaaaataatatcaaatatagtgtctttttgaatgatggattaatgacaggtattttccttgaccaacatgatgtcagaaaagccttagcaactaatctatcagaaggtaaaaaagttctaaatatgttttcatacactgcggctttttctgtagctgcagctgttggaggagcattagagacaacttctgttgatttagcaaaacgctcgcgtgaactttcaaaagcacactttgatgctaatcagattgtcacagataaccatcgatttatcgttatggatgtttttgaatattataagtatgccaaaagaaaacatctatcatatgatgtgattgttattgatccaccaagttttgctcgaaataaaaaacaaactttttcggttactaaagattactataaattaattgaacaagctttagatattttaacccctggtggaactatcattgcatcaactaacgcagctaatctaaccgtatcacaatttaagaaacaattggaaaaggggtttggtaaagcttcacataattacattagcttacagcagttgcctgaagatttcactataaatgataaggaccaacaaagtaattatttaaaagtatttacaataaaggtaaaa

SEQ ID NO: 1896 - protein, 385 aa, Streptococcus agalactiae
MNKLKVNSVVERKIKSGAQLLEKKDFDTSLVNQLVQLFSQSNQFLGMAYLSPQNKGIGWLLSRQVFDFNHDYFVSLFEKSREKRQKFEKSSQTTAYRLFNQDGDNFGGLTIDFYSDYALFSWYNEFVYTNRQMIVAAFKQVYPNIKGAYEKIRFKGLDFESAHLYGQEAPESFLILENNIKYSVFLNDGLMTGIFLDQHDVRKALATNLSEGKKVLNMFSYTAAFSVAAAVGGALETTSVDLAKRSRELSKAHFDANQIVTDNHRFIVMDVFEYYKYAKRKHLSYDVIVIDPPSFARNKKQTFSVTKDYYKLIEQALDILTPGGTIIASTNAANLTVSQFKKQLEKGFGKASHNYISLQQLPEDFTINDKDQQSNYLKVFTIKVK

SEQ ID NO: 1897 - DNA, 1161 bp, Streptococcus pyogenes
atgaataaactctatattgattcttttgtcgaaaagaagctgacagcaggggtacaattattagatgaaaaagatttttctaatataaaggaaaaaaatcagttggttcaactggtgaccaagtccaatcgtcccattggaacagcatatatctctaagcaaaataaaggaattggttggtatctaggaccagaaaaaatcgacttgtctatctcttattttgttagtctattttcagttgctaaggccaaaagacaagattttgctcaatcggacgagaccaatgcttatcgcctttttaatcaagaaggagacggttttggtggagtaacaattgatctttataaagattttgcagtcttttcatggtacaatgcctttgtctatgacaaaaaagaaatgattatggaggcttttcaacaggtttttcctgaagtcaaaggagcttatgaaaagtgtcgctttaaaggtccagatactgaaactgctcatctgtatggtgagctggcacaagaaaccttttcgattttagaaaatggcatagcctatcaagtcttcttgaatgagggcttaatgacaggtatttttctagaccagcatgatgttagaagagcactagtagatggtttagctatgggcaagtcccttcttaacctattttcctatacagctgccttttctgtagcagctgctatgggtggtgctatcgagaccacttctgtggacttggctaaacgatcgagagaattatcactagctcattttgagcataaccagttaaacttagcctcacatcattttgtggtgatggatgtttttgaatacttcaaatatgccaaacggaaaaaattaatctttgatgtgattgtgattgacccaccaagctttgctagaaataaaaaacaaactttctctgtgagcagggactaccacaaattaatcacagaggccttggacatattgagtcctaagggaactattatagcttcaacaaatgctgctaatatgactgttagccagttcaaaaagcaaattatcaaaggatttggaagtcgtcgtcctgagtctatgactctccagcagcttccgagtgactttactatcaataaagcagatgaaagaagtaactatttaaaggtatttactataaaggtacgagaa

SEQ ID NO: 1898 - protein, 387 aa, Streptococcus pyogenes
MNKLYIDSFVEKKLTAGVQLLDEKDFSNIKEKNQLVQLVTKSNRPIGTAYISKQNKGIGWYLGPEKIDLSISYFVSLFSVAKAKRQDFAQSDETNAYRLFNQEGDGFGGVTIDLYKDFAVFSWYNAFVYDKKEMIMEAFQQVFPEVKGAYEKCRFKGPDTETAHLYGELAQETFSILENGIAYQVFLNEGLMTGIFLDQHDVRRALVDGLAMGKSLLNLFSYTAAFSVAAAMGGAIETTSVDLAKRSRELSLAHFEHNQLNLASHHFVVMDVFEYFKYAKRKKLIFDVIVIDPPSFARNKKQTFSVSRDYHKLITEALDILSPKGTIIASTNAANMTVSQFKKQIIKGFGSRRPESMTLQQLPSDFTINKADERSNYLKVFTIKVRE

SEQ ID NO: 1899 - DNA, 2142 bp, Streptococcus agalactiae
gtgaaaaaaattaaagattttgctagccgtgcgatcaatacacgactcggctttattttattgttagtagttatatattggttaaagacaatttgggcttaccatactgattttaatttaggtttagaaaattcctatcagttgtttttgaccattataaaccccatccccttaggactcttaatcataggtttggccttatatgttaagcgaaccaaagctttttatattaccgcttttatcacctatgctatcgtaaatatccttctaattgcaaacgcaatctactatagagagttttccgatttcattacagttagcgccgtcttggctagtagtaaaacttcggctggccttggagactctgctcttaatctattgagaatttgggatcttgtctacgttttcgatttcattatccttattttcttatttgcaaccaagaaaatccacttagatgatcgtccatttaataaacgtgctagtttttctatcacagctttgtctggtttactcttttcaattaacttattcttagctgaaattgatcgtccagaactactaagtcgtggtttttcaaacacctatattgttaaagctcttggcttgccatcattttcgatttatagtggtaatcaaacttatcaagcacagaaagaaagaaatggtgccactgcacaagaattagcgactgccaaaaaatatgtagcagagcattatgccaaacccaatccagaatattatggtatcggaaaagggcgaaacgttatcatgattcatttggagagttttcaacaattcttgattgactataaattaaatattgatggtaaagaacatgtggttactccatttattaacagcctttatcattcgaaagagactgtctccttctctaacttcttccatcaagtcaaagctggtaagacatccgatgctgagacactcatggaaaactcactttttggtctaagtagtggttcattcatggttaattatggtggtgaaaatacacaatttgctgctccacatatcttagctcaaaatggaggttacagtagtgcggtcttccacggaaacgtcggaacattttggaatagaaataatgcttacaaacagtggggttatgactacttctttgactctagctacttctcaaaacaaaccaaagataattcattccaatacggtttgaatgataaatatatgtttgctgactctatcaaatatctagagcacatgcaacaaccattttatactaaatttattacagtaagtaaccattacccttacacaagtttgaagggagagtctgacgaagagggattcccacttgcaaagactaacgatgaaacgattaacggttattttgccacagcaaactaccttgatacagctcttaaatcattttttgaatatctaaaagctgctggtgtgtatgataattctattattgtaatgtatggggatcactacggtatttctaatacacgcaatcctagcttagctgaattattaggtaaagaccctgaaacatggtctgaatacgacaacgctatgttacaacgtgttccatatatgattcacattcctggctattcaaaaggttttatcagtaatacatacggtggtgaggtagataatttaccaactttacttcatattctaggaatagatacgtctaaatatactcagttaggacaagacttattatctaaagataataaacaaatggtcgctatgagaacaactggtcagtatattactcctaaatacactaactatagtggacatctctattacactgattcaggacaagaaatcacaaatcctgatgaaacaactaaagctgaaataaaagctattcgagatgctactaataaacaattatctacaagtgattcgattcaaactggagatttactacgatttgatgaaaacaatggtttgaaaactgtagaagttgaaaaattcaattacacacattctcttaaagcactcaaagctaaagaacgtaaattgaaagatcgttcaacaagcatatacagcaaacataacaacaaatcaacagttgatctcttccatgctccaagttacttggaattgcaagatcctaataagacacataaaacatctaaaaaa

SEQ ID NO: 1900 - protein, 714 aa, Streptococcus agalactiae
MKKIKDFASRAINTRLGFILLLVVIYWLKTIWAYHTDFNLGLENSYQLFLTIINPIPLGLLIIGLALYVKRTKAFYITAFITYAIVNILLIANAIYYREFSDFITVSAVLASSKTSAGLGDSALNLLRIWDLVYVFDFIILIFLFATKKIHLDDRPFNKRASFSITALSGLLFSINLFLAEIDRPELLSRGFSNTYIVKALGLPSFSIYSGNQTYQAQKERNGATAQELATAKKYVAEHYAKPNPEYYGIGKGRNVIMIHLESFQQFLIDYKLNIDGKEHVVTPFINSLYHSKETVSFSNFFHQVKAGKTSDAETLMENSLFGLSSGSFMVNYGGENTQFAAPHILAQNGGYSSAVFHGNVGTFWNRNNAYKQWGYDYFFDSSYFSKQTKDNSFQYGLNDKYMFADSIKYLEHMQQPFYTKFITVSNHYPYTSLKGESDEEGFPLAKTNDETINGYFATANYLDTALKSFFEYLKAAGVYDNSIIVMYGDHYGISNTRNPSLAELLGKDPETWSEYDNAMLQRVPYMIHIPGYSKGFISNTYGGEVDNLPTLLHILGIDTSKYTQLGQDLLSKDNKQMVAMRTTGQYITPKYTNYSGHLYYTDSGQEITNPDETTKAEIKAIRDATNKQLSTSDSIQTGDLLRFDENNGLKTVEVEKFNYTHSLKALKAKERKLKDRSTSIYSKHNNKSTVDLFHAPSYLELQDPNKTHKTSKK

SEQ ID NO: 1901 - DNA, 2214 bp, Streptococcus pyogenes
ttggagatgacatctttaggaaaaaacgataaggaagttgctactgtgaagaaatttaaaacacttatcacaggttttatcaacacaagattgggttttataattactctactcttttgttactggataaagaccctgtgggcatatcatacagacttttcactagatttgggaaatatataccaagtctttctaactattatcaatccaatcccactagcttttttacttttgggggttgctctttacgttaagaatacccgagccttttatatctgttcttgggtggtttatattatccttaacattctcttgatatcaaattctatatattaccgagaattttcagactttattacagtgagtgccatgctagctagtagtaaagtctccgctggattaggggactctgctttaaaccttttacgcatctgggatattatctatattcttgattttattattctaattagtttatctatcgctaaaaaaatcaaaaatgatcaacgtccttttaacaagcgcgcagcatttgccatcaccgctttatctagtctattgctttctattaatctttttttagcagaaattgatcgtccggaactattaacacgtggcttttcaaatacttatattgtgagagctttaggactaccagcgtttaccctctatagcggcaatcaaacctatcaagctcaaaaagaacgaaatggagctactgcagaagaattaattgatgttaaaacttatgtcaaaggacattatgcagcacctgatcctcagtattttggaattggaaaaggcaaaaatattattgttcttcatttagaaagctttcaacaattcttaatagattataaactaaaagaaggagataaagaatatgaggtaacgccttttatcaactcactttatcactcaaatgctaccttagcattccctaacttttttcatcaggttaaagcaggtaaaacttctgatgctgaaaccatgatggagaattccttatttggtttaaatagtggttcttttatggtgaactacggtggtgaaaatacacaatttgctactccaagtattttagcccaaaaaggtggctataccagcgctgtctttcatggtaacgttggaactttctggaatcgcaataatgcttataaacaatggggctataattatttttttgattctagctacttctctaaacaaaatagtaagaactcttttcaatatgggttaaatgataagtacatgtttaaggattccataaaatatcttgaacagatgcaacaacctttttataccaagtttatcactgtgagtaatcactatccttatactagtctaaaaggcgaaagtagtgaagaaggttttcctttagccaaaacagacgatgaaacgatcaatggttactttgctactgccaattatttagacgctgcccttaaatctttttttgattacttgaaagccactggtttgtacgacaattctatttttgttttatatggtgatcattatggtatttcaaattctcgtaattctagtcttgctccacttcttggtaaagattctgaaacttggtctgaatatgataatgctatgctacaacgagtcccgtatatgatccatattccaggttatacgaatggtagtatcaaagaaacctttggcggtgaaatcgatgctcttcctactttactccacatacttggtattgacactagtcagtttgttcaattaggacaagatttattatcacctcaaaatagccagattgtggcacaacgaacatctgggacttatatgactcctgaatacactaactatagtggacgtctgtacaacacgcaaacaggtttagaaatcactaatcccgatgaaatgactatagccaaaactaaggaaattcgctctgctgttgctcaacaactagcagctagcgacgctattcaaacgggtgatctcctgcgctttgatactcaaaatggtctaaaagctattgatcctaaccagtttatctacactaagcagttaaaacaactgaaagatatttcagcaaaactcggatcagagtcaacaagtttatacagtaaaaatggtcataaatcaactcagaaactttttaaagcaccatcttacttagaactaaatcccgtagaagctgacgcggcaacttctgaactaaaagaggataaccccaaaaataaagaa

SEQ ID NO: 1902 - protein, 738 aa, Streptococcus pyogenes
LEMTSLGKNDKEVATVKKFKTLITGFINTRLGFIITLLFCYWIKTLWAYHTDFSLDLGNIYQVFLTIINPIPLAFLLLGVALYVKNTRAFYICSWVVYIILNILLISNSIYYREFSDFITVSAMLASSKVSAGLGDSALNLLRIWDIIYILDFIILISLSIAKKIKNDQRPFNKRAAFAITALSSLLLSINLFLAEIDRPELLTRGFSNTYIVRALGLPAFTLYSGNQTYQAQKERNGATAEELIDVKTYVKGHYAAPDPQYFGIGKGKNIIVLHLESFQQFLIDYKLKEGDKEYEVTPFINSLYHSNATLAFPNFFHQVKAGKTSDAETMMENSLFGLNSGSFMVNYGGENTQFATPSILAQKGGYTSAVFHGNVGTFWNRNNAYKQWGYNYFFDSSYFSKQNSKNSFQYGLNDKYMFKDSIKYLEQMQQPFYTKFITVSNHYPYTSLKGESSEEGFPLAKTDDETINGYFATANYLDAALKSFFDYLKATGLYDNSIFVLYGDHYGISNSRNSSLAPLLGKDSETWSEYDNAMLQRVPYMIHIPGYTNGSIKETFGGEIDALPTLLHILGIDTSQFVQLGQDLLSPQNSQIVAQRTSGTYMTPEYTNYSGRLYNTQTGLEITNPDEMTIAKTKEIRSAVAQQLAASDAIQTGDLLRFDTQNGLKAIDPNQFIYTKQLKQLKDISAKLGSESTSLYSKNGHKSTQKLFKAPSYLELNPVEADAATSELKEDNPKNKE

SEQ ID NO: 1903 - DNA, 267 bp, Streptococcus agalactiae
ttgttccgtactgcaaaagaacaagtaatgaattcttactactatgcataccgtgaccgtcgtcagaaaaaacgtgacttccgtaaattatggatcactcgtatcaatgcggctgctcgtatgaatggtttatcatattcacaattgatgcacggtttgaaattagctgaaatcgaagttaaccgtaaaatgcttgctgatttagcagttaacgatgcagcagctttcacagctcttgcagatgcagctaaagctaaacttggtaaa

SEQ ID NO: 1904 - protein, 89 aa, Streptococcus agalactiae
MFRTAKEQVMNSYYYAYRDRRQKKRDFRKLWITRINAAARMNGLSYSQLMHGLKLAEIEVNRKMLADLAVNDAAAFTALADAAKAKLGK

SEQ ID NO: 1905 - DNA, 357 bp, Streptococcus pyogenes
atggcacgtgttaaaggtggcgttgtttcacgcaaacgtcgtaaacgtattttaaaattagctaaaggttactatggagcaaaacacatcttgttccgtactgcaaaagagcaagtgatgaactcttactactatgcataccgtgatcgccgtcagaaaaaacgtgatttccgtaaactatggatcactcgtatcaatgcggctgctcgtatgaacggtttgtcatactcacaattgatgcacggtttgaaacttgctgaaatcgaagtaaaccgtaaaatgcttgctgatttagcagtagctgatgcagcagctttcacagctcttgctgatgcagccaaagcaaaacttggcaaa

SEQ ID NO: 1906 - protein, 119 aa, Streptococcus pyogenes
MARVKGGVVSRKRRKRILKLAKGYYGAKHILFRTAKEQVMNSYYYAYRDRRQKKRDFRKLWITRINAAARMNGLSYSQLMHGLKLAEIEVNRKMLADLAVADAAAFTALADAAKAKLGK

SEQ ID NO: 1907 - DNA, 171 bp, Streptococcus agalactiae
atgcctgcgttggttctttcttcctcgacgaacctagtcattgttgttaaggttactaatgctgcgactaaatataaaataatggggaaaagattactgattttagaagtgctatttgtactggagtcaaaagtgttatatccttgtcctccaggaaaggtagtacggttg

SEQ ID NO: 1908 - protein, 57 aa, Streptococcus agalactiae
MPALVLSSSTNLVIVVKVTNAATKYKIMGKRLLILEVLFVLESKVLYPCPPGKVVRL

SEQ ID NO: 1909 - DNA, 2571 bp, Streptococcus agalactiae
  misc_feature (1)..(2571): n = a, c, g, or t
atgggaaagacattttggaaagatatctatcgatcaattacgacttcaaaaggtagattttcatcaatcctcttacttatgatgttaggctcatttgcttttataggactgaaggtctcagcacctaatatgcaaagaacagcacaaaattaccttgctcatcatcatgttatggatattaccgttttcaattcttggggacttgacaaacatgatcaaactgttttagaaagcttaaaaggatcacaagttgaattttcttactttgtagatacaacccctcaacagaatagtaaatcttatcgattgtattccaataccaaaacgatatcaacctttgatcttgttaagggacgtctccctttaaataaatcagaaattgctctctcatttcaggaacgaaaaaaatatgcaataggtgataaaattaattttaaacaagataaaaacaaactgttttcaaatacaggtcctctaactattgtaggttttgttaattctaccgagatttggtctaagacaaaccttggtagttctcaaacaggggacggcgacttagatagttatggcgtattagataagacagcatttcactctccagtatatacaatggcaagggtaacttttaaagatcttaggttgattaaccctttctcaataagttacaaagaaaaagtagcgaaataccaagaaaaggtatcgcgaaaattaaatattcacaataaaataagatataccaaaacaaaaaaagagagcctacgtaaaatcgatgaggaggaaaaaagcctactaaaagctcaaaaacaaatcaatcggttagataatgatagcctagcgatgccactatctcaaagacaagctattcaaatgaaaattaaacaagaccgactatctcttttgaaacgaacaaaagagcttctaaaattgagacataacacccaaataatggaatcgcctcaaattattgtctacaaccgtactacctttcctggaggacaaggatataacacttttgactccagtacaaatagcacttctaaaatcagtaatcttttccccattattttatatttagtcgcagcattagtaaccttaacaacaatgactaggttcgtcgaggaagaaagaaccaacgcaggcatattaaaagcactaggctatagtgaccgccaagttatctttaaatttattatttatggttttatagcaggaacattagggactactttgggtatcattggagggcattatcttttacctcgtattatttctgatatcatttccaaagacctgactattccaaacacacagtatcatcttttcttaaattacagtttactagcctttgttttttcattattaagcattgttcttccagtttttgttatcactcgacgtgagttgaaagaaaaagcagcatttttattattaccaaaaccaccagctaaaggatctaaaatagctttagagtatatcaattggatttggaaaaaactgtccttcacacaaaaagtaactgctagaaatatttttcgttacaaacaaaggatgattatgaccatatttggagttgctggatcagtagcgctcttattttcaggtctaggaatacaatcctccttaaagcaaaccgtcaatgaacatttcggtcgtattatgccctatgatatattgctaacatataacacaaatgcttctcccccaaaaatacttgaactactttcaaaagattcaaaaatagacaaataccaaccaatacaccttgaaaatcttgacgaatccattcctggacaaattaataaacagtcaatttccctattcataacagacaaaaaacaattactaccttttatttatttacaagaagcaacaactaataagtcattgcacttgaataataaagggattattatttctaaaaaattagctcaattttatcatgttaataccggtgattttatccatttatctcattcacaaacacttccttctagaaaattaaaaataacaggagttgtcaatgcgaatgttggtcactatatttttatgacaaaacaatactatcgaactatttttaagaaagaagctaaagataacgcttttttggttaagttaaccaaacataaaatcgcaaataacttagcagaaaaacttttagaaattaatggagttgagtctcttacgcaaaatgctcttcagctggctagtgtagaagccgttgtgcgttctttagatggctctatgactattttagttgtcgtatctttattgttagccattgtaattctctataatctcactaatattaatttagcagaacgtaagcgggagctatcaactataaaggtattaggtttttataatgaagaagtaactttatacatttaccgcgaaaccattattttatcaaccatcggtgtgattctaggcaccattagcggtacttatttacaccgtcaaatgatgttgctaattggttcagatcaaatactttttggtgaaaaagtatcaccaactacatttataataccaataagcgtagtagtcatcattctaannnnnttaattaat

SEQ ID NO: 1910 - protein, 857 aa, Streptococcus agalactiae
  MISC_FEATURE (1)..(857): Xaa = Any Amino Acid
MGKTFWKDIYRSITTSKGRFSSILLLMMLGSFAFIGLKVSAPNMQRTAQNYLAHHHVMDITVFNSWGLDKHDQTVLESLKGSQVEFSYFVDTTPQQNSKSYRLYSNTKTISTFDLVKGRLPLNKSEIALSFQERKKYAIGDKINFKQDKNKLFSNTGPLTIVGFVNSTEIWSKTNLGSSQTGDGDLDSYGVLDKTAFHSPVYTMARVTFKDLRLINPFSISYKEKVAKYQEKVSRKLNIHNKIRYTKTKKESLRKIDEEEKSLLKAQKQINRLDNDSLAMPLSQRQAIQMKIKQDRLSLLKRTKELLKLRHNTQIMESPQIIVYNRTTFPGGQGYNTFDSSTNSTSKISNLFPIILYLVAALVTLTTMTRFVEEERTNAGILKALGYSDRQVIFKFIIYGFIAGTLGTTLGIIGGHYLLPRIISDIISKDLTIPNTQYHLFLNYSLLAFVFSLLSIVLPVFVITRRELKEKAAFLLLPKPPAKGSKIALEYINWIWKKLSFTQKVTARNIFRYKQRMIMTIFGVAGSVALLFSGLGIQSSLKQTVNEHFGRIMPYDILLTYNTNASPPKILELLSKDSKIDKYQPIHLENLDESIPGQINKQSISLFITDKKQLLPFIYLQEATTNKSLHLNNKGIIISKKLAQFYHVNTGDFIHLSHSQTLPSRKLKITGVVNANVGHYIFMTKQYYRTIFKKEAKDNAFLVKLTKHKIANNLAEKLLEINGVESLTQNALQLASVEAVVRSLDGSMTILVVVSLLLAIVILYNLTNINLAERKRELSTIKVLGFYNEEVTLYIYRETIILSTIGVILGTISGTYLHRQMMLLIGSDQILFGEKVSPTTFIIPISVVVIILXXLIN

SEQ ID NO: 1911 - DNA, 2634 bp, Streptococcus pyogenes
atgataaagaaaaccttatggaaggatattttgagagctatcaagaatagtaaagggcgattcatttccttatttttcctaatggccttaggctcctttgctttagttggacttaaagtcaccggtccagatatggaacgaacagccagccgttacctcgaaagacaccaggtgatggacctaacggtactggcttctcatcaattttcccaagccgataaacaagagttagatacgttaaaaggggctcatttagaatatggtcatttacttgatgtcagtctaactagcaaccagaaatctcttaggctctatagcgtgccaaagaaagtgtctaagccagtcttggttaaagggagttggccaaagcgagagacagatttggttttatcctcctcacttgctaaaaactatcagattggagatgaactagcagtcacctcacctatggaaggtttgctgacgacaacccattttcaagtggttggttttgcgaattcttcagaagtttggtccaagtccaatttaggaagttcctcaaccggagatggaagtctctacgcttatgcttttgttaatccaaacgtttttaaaagtgcctttaacctgctgcgcatccgttttagtcatcttcgtctgacaaacgctttttccaaagactatcaaaaaagggtaacccaaaaccaagctcatttggataatctacttaaagataatggccagaagcgttatgatgacctccaaaatcagtatgaccttgccttaaaaaatggcagagcagcacttgcaaaggaaacagtgaaactagctgcgagtgaggagaacttaacttttttagaaggctctgctttacaagaagctaagcatcagattgaacaaggcaaacaagcattagccaaggaggaaaagcagttagagcaggtgcaggctacaaaagataagctagaaaaacccagttacctgacttataatcgctcgaccctaccaggaggagaaggatatcatacttatgcaacttcaacgacctccatttcaaatgttggaaatatttttcctgttgttctttatctcgtagctgctctagtagcctttaccaccatgacacgttatgttgatgaagaaagaacaagctctggtctattaaaagccattggttattctaacaaggatatcagtttaaagtttcttatctatgggcttttagccagttttttagggacaactttaggtattattgggggaacttacctcttatctaccttgatttcagagatcttaacaggagctttgactattggaaagactcacctttatagttattggttttataatggcatagcttacttgctggctatgttatctgctgttttaccagcctacttaattgtcaaaaaggaattattcctcaatgcagctcagttattgctgcccaaacctcctagtaagggggcaaaaatctggttggaacaccttacttttgtctggaaagccctgtcctttactcacaaggtgaccatacgtaatatttttcgctataaacaaagaatgctgatgaccattgtaggcgttgcaggctcagtagcccttttatttgcaggcttagggattcagtcgtcattagccaaagtagttgagcatcaatttggtgatttaacgacttatgatattttggctgtcggttcggccaaagcgacagcgacagagcaaactgacttagctagctatcttaaacaagaacctattacagggtaccaaaaggtatcttatgccagcttaacccttcctgtaaagggattacctgataagcaaagtatttccattttatcaagttcagctacttctcttagtccctattttaatctgctggatagtcaggagcaaaagaaggttcccattccaacctctggtgttttgatttctgagaaattagcctcctattacaaggtaaaaccaggtgatcagttggtattgactgatcggaaaggacagtcttataaagtgacgattaaacaggttattgacatgacagttggccattacctgataatgtctgatacctattttaagaatcattttaaaggattggaggctgctcctgcctatctgattaaggtaaaagacaaagatagcaagcacataaaggagacagccagtgacttgttaaccttaaaagcgattagagcagtttcacaaaacgtcaatcatattaaatctgttcagctagtagtcacctctcttaatcaggtcatgaccctccttgtcttcttgtctattttattagcaatcgttatcctttataacttaacgactattaatattgctgagcgtattcgagaattatccactattaaagttctgggattttacgatcaggaggtcaccttatatatttatcgagaaactatttcgctatccctagtaggcattcttttaggtatctatttaggaaaaggcctgcatacttatatcatgacaatgatttcaactggggatattcaatttggtgtaaaggttgatgcttatgtttatctagtgccaattctagtaatccttagcttgttagcggtattaggtatctgggttaatcgccatttaaaaaaggttgatatgttagaagctttgaaatccatagat

SEQ ID NO: 1912 - protein, 878 aa, Streptococcus pyogenes
MIKKTLWKDILRAIKNSKGRFISLFFLMALGSFALVGLKVTGPDMERTASRYLERHQVMDLTVLASHQFSQADKQELDTLKGAHLEYGHLLDVSLTSNQKSLRLYSVPKKVSKPVLVKGSWPKRETDLVLSSSLAKNYQIGDELAVTSPMEGLLTTTHFQVVGFANSSEVWSKSNLGSSSTGDGSLYAYAFVNPNVFKSAFNLLRIRFSHLRLTNAFSKDYQKRVTQNQAHLDNLLKDNGQKRYDDLQNQYDLALKNGRAALAKETVKLAASEENLTFLEGSALQEAKHQIEQGKQALAKEEKQLEQVQATKDKLEKPSYLTYNRSTLPGGEGYHTYATSTTSISNVGNIFPVVLYLVAALVAFTTMTRYVDEERTSSGLLKAIGYSNKDISLKFLIYGLLASFLGTTLGIIGGTYLLSTLISEILTGALTIGKTHLYSYWFYNGIAYLLAMLSAVLPAYLIVKKELFLNAAQLLLPKPPSKGAKIWLEHLTFVWKALSFTHKVTIRNIFRYKQRMLMTIVGVAGSVALLFAGLGIQSSLAKVVEHQFGDLTTYDILAVGSAKATATEQTDLASYLKQEPITGYQKVSYASLTLPVKGLPDKQSISILSSSATSLSPYFNLLDSQEQKKVPIPTSGVLISEKLASYYKVKPGDQLVLTDRKGQSYKVTIKQVIDMTVGHYLIMSDTYFKNHFKGLEAAPAYLIKVKDKDSKHIKETASDLLTLKAIRAVSQNVNHIKSVQLVVTSLNQVMTLLVFLSILLAIVILYNLTTINIAERIRELSTIKVLGFYDQEVTLYIYRETISLSLVGILLGIYLGKGLHTYIMTMISTGDIQFGVKVDAYVYLVPILVILSLLAVLGIWVNRHLKKVDMLEALKSID

SEQ ID NO: 1913 - DNA, 699 bp, Streptococcus agalactiae
atgtcctatattgaaatgaagcattcctataagcgttatcaaacaggtgaaaccgaaattgttgctaacaatgatattagtttcagtattgaaagaggtgagttggtggttattcttggtgcatccggcgctggcaaatctactgttctcaatatactaggagggatggatagtaatagtgaaggtgaagttttaattgatggtaagaatattgctaattataccatcagggaattgactcgttaccgtagatatgatgtcgggtttgtttttcaattctataacttagtccctaatctaacagcactagagaatgtagaattggcttcagaaattgttccaaaggcattagatgcccaacaggcattagaaaacgtaggtttgggacaccgtatcaatcattttccagcacagctttccggtggcgaacagcaacgcgttgcaatagcacgagctattgccaaaaaacctaaactgttactttgtgatgaacctactggtgctttagattaccaaactggaaaacaagtactagccatcctgcaaaagatggcgcaatcaaaagaaacaactgtgatcattgttactcataatactgccttagcgccaattgcaaatcgcgtgatccatatgcatgattcaaaaatcagtgatattgtaataaacgagaatccaagtgatattcagaacatagaatat

SEQ ID NO: 1914 - protein, 233 aa, Streptococcus agalactiae
MSYIEMKHSYKRYQTGETEIVANNDISFSIERGELVVILGASGAGKSTVLNILGGMDSNSEGEVLIDGKNIANYTIRELTRYRRYDVGFVFQFYNLVPNLTALENVELASEIVPKALDAQQALENVGLGHRINHFPAQLSGGEQQRVAIARAIAKKPKLLLCDEPTGALDYQTGKQVLAILQKMAQSKETTVIIVTHNTALAPIANRVIHMHDSKISDIVINENPSDIQNIEY

SEQ ID NO: 1915 - DNA, 2127 bp, Streptococcus agalactiae
gtgatacctatggcaactacgacaaaaacgtcgaccaaaaaaacaagtaaaaaaaaatcagctactgctaaaaaaaatctagttattgtggagtctcctgcaaaagcaaagactatcgaaaaatacttaggacgtaactataaagttgtagcctcagtaggtcatatccgtgatttaaaaaagtcaagtatgtccattgattttgagaataattacgaaccacaatatattaatattcgtggtaaaggacctctcattaatgatttaaaaaaagaagctaaaaaggctaaaaaagtttacctcgcgagtgacccggaccgtgaaggagaagctatttcctggcatttagcgcatattttagatttagacaaagaagacagaaaccgtgttgttttcaatgaaatcacaaaagatgctgttaaaaatgcttttgtggaacctcgtcagattaacatggatctcgttgatgctcagcaagcacgacgtgttttagatcgcattgttggttattctatctcacctattttatggaaaaaagtaaaaaaaggcctatcagctggacgtgtacaatcagttgctcttaaactaatcattgatcgtgaaaatgagattaaggctttccaaccggaggagtattggactattgacggttcctttaaaaaaggaacacgtaaattcaatgccactttctacggtttagacggaaagaaattcaaattatcgaataatgaagacgtcaaaacagttctaaaacgtattaaaactgatgaattcttagttgaaaaagttgaaaaaaaagagcgtcgtcgtaatgcaccattaccgtatacaacttcttcattgcaacaagatgcagctaataaaatcaattttcgaactcgtaaaaccatgatgattgcgcaacagctgtacgaaggacttagcttaggcacagcaggtcatcaaggtctgattacctatatgcgtactgattctacacgtattagtccgttagcacaaaatgaagcaacagaatttattactaaccgttttggtgcaaattattctaaacatgggaataaagttaaaaatgcttctggagcacaagacgctcacgaagctattcgcccatctagtgttaatcatacacccgaaagtattgctaagtatttagacaaagatcaactaaaactttacactcttatctggaaccgttttattgcaagccaaatgacagcagcagtctttgacacaatgaaagttaatttaacgcaaaatggtgttacttttattgctaatggtagccaagtcaagtttgatggttacatggctgtttataacgatactgacaaaaataaaatgttaccagatatggaggaaggagaaagtgttaaaaaggttaatacgaatcctgaacaacacttcactcaacctcctgcaaggttttcagaagcaagtctcattaaaacacttgaagaaaacggtgtaggtcgtccttcaacttatgccccaacgcttgagactattcaaaaacgttattatgttaagcttgcagctaaacgcttcgaaccaactgaacttggtgaaattgttaatagccttattgtagaatttttcccagatattgttgatgttaccttcactgccgaaatggaagggaaactagacgaagttgagattggtaaagagcagtggcaaaagattatcgatgaattttataaaccatttgaaaaagaacttgcaaaagcagaaactgaaatggagaaaattcaaataaaggatgaacctgctggatttgattgcgagctatgtggatcaccaatggtaataaaactaggacgttatggaaagttttatgcgtgtagcaatttccctgaatgtcataacacaaaagctatcactaaggaaataggtgttatttgtcctatctgtcaaaaaggacaagttattgagcgaaaaacaaaacgcaatcgtatcttttatggctgtgaccgctacccagaatgtgagtttacatcttgggacaaacctattggacgaacttgccccaaatcaaatgatttcttagtggagaaaaaagtacgcggtggtggtaaacaagttgtttgctcaaatgaaaaatgcgactaccaagaagagaaaattaaa

SEQ ID NO: 1916 - protein, 709 aa, Streptococcus agalactiae
MIPMATTTKTSTKKTSKKKSATAKKNLVIVESPAKAKTIEKYLGRNYKVVASVGHIRDLKKSSMSIDFENNYEPQYINIRGKGPLINDLKKEAKKAKKVYLASDPDREGEAISWHLAHILDLDKEDRNRVVFNEITKDAVKNAFVEPRQINMDLVDAQQARRVLDRIVGYSISPILWKKVKKGLSAGRVQSVALKLIIDRENEIKAFQPEEYWTIDGSFKKGTRKFNATFYGLDGKKFKLSNNEDVKTVLKRIKTDEFLVEKVEKKERRRNAPLPYTTSSLQQDAANKINFRTRKTMMIAQQLYEGLSLGTAGHQGLITYMRTDSTRISPLAQNEATEFITNRFGANYSKHGNKVKNASGAQDAHEAIRPSSVNHTPESIAKYLDKDQLKLYTLIWNRFIASQMTAAVFDTMKVNLTQNGVTFIANGSQVKFDGYMAVYNDTDKNKMLPDMEEGESVKKVNTNPEQHFTQPPARFSEASLIKTLEENGVGRPSTYAPTLETIQKRYYVKLAAKRFEPTELGEIVNSLIVEFFPDIVDVTFTAEMEGKLDEVEIGKEQWQKIIDEFYKPFEKELAKAETEMEKIQIKDEPAGFDCELCGSPMVIKLGRYGKFYACSNFPECHNTKAITKEIGVICPICQKGQVIERKTKRNRIFYGCDRYPECEFTSWDKPIGRTCPKSNDFLVEKKVRGGGKQVVCSNEKCDYQEEKIK

SEQ ID NO: 1917 - DNA, 2127 bp, Streptococcus pyogenes
ttgggaacaaaaactacaactaagccaaaaacgggtactaaaaagtccaccactaaaaagaaatcaacagcgaaaaaaaatctcgttattgttgaatcacctgccaaagctaagactattgaaaaatatcttggacgcagttataaagttgttgcttcggtaggacatattcgtgacttaaaaaaatcgtctatgtctattgattttgataataattatgagccacaatacattaatatccgtggtaagggaccccttatcaattctttaaaaaaagaagccaaagctgctaaaaaagtttatttagctagtgacccggatcgtgagggagaggctatttcttggcatttgtcacatatcttaggacttgatcctcaagataataaccgagtggtttttaatgaaattacgaaagatgcagttaaacatgcctttgtggagcctcgtcagattgatatggacttggtagattctcaacaagcacgtcgtgttttggaccgtattgtgggatattccatttcaccaattctttggaaaaaggtcaaaaaaggactttcagcaggacgtgtccagtcggttgctttaaaactcatcattgaccgtgaaaatgacatcaaagcatttgttccaaaggaatactggtctattgatggtctttttaaaaaaggaactaaaaagtttcaagcgactttttacggtattaatggcaaaaaaacaaagcttgacaataacaacgatgtcaaagaggtattagcaaagctaacaaatgaagattttcttgtcagcaaggttgacaagaaagagcgacgtcgtaatgctcccttaccttacacaacatcatctcttcaacaagatgctgctaataaaatcaatttcagaacgcgtaaaaccatgatggtagcccaacaactgtatgaggggattcatttaggagaaaatggaactcaaggtttaattacctatatgcgtacggattctactcgtatcagtccagtagcacaaaacgatgctgctcaatttattatcaatcgctttggagctaattattcaaaacatggtaatcgtgtcaaaaataccagtggtgtccaagatgctcacgaggcgattcgtccatctagtgttaatcatacgccagactctattgccaaataccttaacaaggatcagttaaaactttatacgcttatttggaatcgttttgtggctagccaaatgacagcagctgtttttgataccgtaaaggtgaacttggagcaaaatggcgtgatttttgttgccaatggtagccaaatgaagtttgatggttacatggctgtttacaatgattccgataaaaacaaaatgttacctgagatggcagaaggagaaacggttaaaaaaatatcgacctctccagaacagcactttacgcagccaccagctcgttattctgaagcaactctaattaaaacgctagaagaaaatggtgttggacgtccatcaacttacgctccaaccttagaagtcattcaacgcagatactatgttaaattgtctgctaagcgctttgagccaactgagcttggggaaattgtcaacaagcttattgtcgaatttttcccagatattgtcgatgttgcctttactgccgagatggaaggtaagctagatcaagttgaaatcggagaagaacaatggcaacatgttatcgatcaattctatcaaccctttgtcaaagaattgaataaggctgagtctgaaattgaaaagattcaaatcaaagatgaaccagctggcttcgactgtgatgtttgtggtcacccaatggtcattaagttaggacgttttgggaaattttacgcgtgtagcaacttcccagagtgccgtaatacaaaagccatcactaaagaaattggtgttacttgtccggtttgtcataaaggacaagttatcgagcgtaaaaccaaaaaaaataggatattttatggttgtgatcagtatccagattgtgagtttatctcgtgggatttacctattggacgtgcttgccctaagtcaggtgactatcttattgagaaaaaagttcgtggtggcaaacaagtaatgtgtagcaatgagacctgtgattacaaggaagaaaaaattaaa

SEQ ID NO: 1918 - protein, 709 aa, Streptococcus pyogenes
LGTKTTTKPKTGTKKSTTKKKSTAKKNLVIVESPAKAKTIEKYLGRSYKVVASVGHIRDLKKSSMSIDFDNNYEPQYINIRGKGPLINSLKKEAKAAKKVYLASDPDREGEAISWHLSHILGLDPQDNNRVVFNEITKDAVKHAFVEPRQIDMDLVDSQQARRVLDRIVGYSISPILWKKVKKGLSAGRVQSVALKLIIDRENDIKAFVPKEYWSIDGLFKKGTKKFQATFYGINGKKTKLDNNNDVKEVLAKLTNEDFLVSKVDKKERRRNAPLPYTTSSLQQDAANKINFRTRKTMMVAQQLYEGIHLGENGTQGLITYMRTDSTRISPVAQNDAAQFIINRFGANYSKHGNRVKNTSGVQDAHEAIRPSSVNHTPDSIAKYLNKDQLKLYTLIWNRFVASQMTAAVFDTVKVNLEQNGVIFVANGSQMKFDGYMAVYNDSDKNKMLPEMAEGETVKKISTSPEQHFTQPPARYSEATLIKTLEENGVGRPSTYAPTLEVIQRRYYVKLSAKRFEPTELGEIVNKLIVEFFPDIVDVAFTAEMEGKLDQVEIGEEQWQHVIDQFYQPFVKELNKAESEIEKIQIKDEPAGFDCDVCGHPMVIKLGRFGKFYACSNFPECRNTKAITKEIGVTCPVCHKGQVIERKTKKNRIFYGCDQYPDCEFISWDLPIGRACPKSGDYLIEKKVRGGKQVMCSNETCDYKEEKIK

SEQ ID NO: 1919 - DNA, 840 bp, Streptococcus agalactiae
atgaatcattttgaactatttaagcttaaaaaagctggattaacaaatcttaatatccacaatattatcaactatctcaaaaagaatagtttaacttctctatctgttcgcaatatggccgtagtatcaaaatgtaaaaatcctactttctttatagaaaattataaacagctagaccttaaaaaacttcgacaagaattcaaaaaatttccagttctatcgattttggattctaactatcctttagagttaaaagaaatatataatccaccagttctacttttttatcagggtaatattgaacttctatctaaacctaaattagctgtagtgggggcaagacaggcatctcagataggttgtcagtctgttaaaaagattatcaaggagactaacaatcaatttgttatcgtaagtggtttagcgcgtggcattgatacagcagcacatgttagtgctttaaaaaatggcggcagtagtatagctgttatcgggagtggtttagatgtttattatccaacggagaataagaaacttcaagaatatatgtcatataatcatctcgtattatcagaatattttaccggagaacaacccttgaaatttcatttccccgaacgtaaccgtattattgcagggctgtgtcaaggtattgtggttgccgaagctaagatgagatctggaagtttaattacctgtgaaagagcattagaagagggacgagaagtttttgccattcccggaaatattatcgatggcaaatcagatggatgccaccatcttatccaagaaggagctaaatgcattatttcaggaaaagatatcctttctgaatatcag

SEQ ID NO: 1920 - protein, 280 aa, Streptococcus agalactiae
MNHFELFKLKKAGLTNLNIHNIINYLKKNSLTSLSVRNMAVVSKCKNPTFFIENYKQLDLKKLRQEFKKFPVLSILDSNYPLELKEIYNPPVLLFYQGNIELLSKPKLAVVGARQASQIGCQSVKKIIKETNNQFVIVSGLARGIDTAAHVSALKNGGSSIAVIGSGLDVYYPTENKKLQEYMSYNHLVLSEYFTGEQPLKFHFPERNRIIAGLCQGIVVAEAKMRSGSLITCERALEEGREVFAIPGNIIDGKSDGCHHLIQEGAKCIISGKDILSEYQ

SEQ ID NO: 1921 - DNA, 834 bp, Streptococcus pyogenes
gtgaatcattttgaactttataagctaaagaaagctggactgactaataaaaacattctcaatattcttgactaccaaaaacaccaggaaaaatcgttgtcacttcgagatatggccgttgtttctggttgtaagcatccgtctcactttatagaagcctataagcagttagatattcaaaatttaaaaatggaatttaaacaatttcctagtatttctatcttagataagcattacccaatggcattgaaagaaatatacaatccacctgtcctcttgttttttcagggaaatttagaccttcttgagaaacctaaattagccattgtcggctccagacgctcaagcgataccggagtaaagtctgtccgtaaaattcttaaagaactcgggaaccgttttgtgattgttagcggacttgctcgaggtatcgacactagtgctcatttagcctgccttaaaaatgggggacaaactatcgctattattggaacaggattggatcgcttttaccctaaagaaaatagggagttgcaaactttcttagggaaaaatcatcttgtgctaacagaatacggtccaggagaagaagctttatcttatcactttccagaacggaatcgtattatcgcaggccttagccgaggtattcttgtcgttgaagcaaaaaatcgttcaggttccttgattacttgtcaaattgggatagaagaaggccgagacatttttgctgtcccaggaaacattttggacgggaaatccgaaggttgccttcagttaattaaagagggagcaacatgcgtcacatcgggcatggatatcctttcagagtac

SEQ ID NO: 1922 - protein, 278 aa, Streptococcus pyogenes
VNHFELYKLKKAGLTNKNILNILDYQKHQEKSLSLRDMAVVSGCKHPSHFIEAYKQLDIQNLKMEFKQFPSISILDKHYPMALKEIYNPPVLLFFQGNLDLLEKPKLAIVGSRRSSDTGVKSVRKILKELGNRFVIVSGLARGIDTSAHLACLKNGGQTIAIIGTGLDRFYPKENRELQTFLGKNHLVLTEYGPGEEALSYHFPERNRIIAGLSRGILVVEAKNRSGSLITCQIGIEEGRDIFAVPGNILDGKSEGCLQLIKEGATCVTSGMDILSEY

SEQ ID NO: 1923 - DNA, 1026 bp, Streptococcus agalactiae
atgacaaaaaaacttattattgctatattagcactatgcactatcttaaccacttctcaagctgttttagctaaagaaaaatcacaaactgttaccataaaaaacaactattcggtctatattaaaaaagaaaaaagagacaagccggataataaaaagcaaatcagcgagacacttaaagttcctttaaaacccaaaaaagtagttgtttttgatatgggagctttggatactatcacagctttaggagctgaaaaatctgttattggtatcccgaaggctaaaaatgctctaagtttattgcccaataacgtcaaatctgtttataaagctaagagataccaagacgtaggaagtctcttcgaaccaaactttgaagctattgctcgtatgcaacctgatgtggttttcctaggagcacgtatggcttctgttgataatattgaaaaattaaaggaggctgcacctaaagcagcattagtatatgctggagtcgactcaaaaaaagtatttgacaaaggagttgctgagcgtgtcacaatgttagggaaaatcttcgaccaaaataaaaaggcaaaaacctttaataaagatatcgcacaagctgttcttaaattgcagaaaactattgagaaaaaaggtaaacctacagctctatttgtaatggcaaacagcggtgaacttttaactcaatcaccttctggtcgttttggttggattttctctgtaggtggatttaaagcagtcaatgaaaatgaaaaactaagttcacatggtactcccgtatcttatgaatacatcgctgaaaaaaatcctaactatctctttgttttagatcgtggagcgactattggacaaggagcttcatcaaaagaactttttaataacgatgttattaaagcaactgatgctgtcaaaaacaaacgtgttcatgaggtagatggaaaagattggtatatcaattcaggcggaagccgagtaacactccgtatgattaaagatgtacagaactttgttgataatcgt

SEQ ID NO: 1924 - protein, 342 aa, Streptococcus agalactiae
MTKKLIIAILALCTILTTSQAVLAKEKSQTVTIKNNYSVYIKKEKRDKPDNKKQISETLKVPLKPKKVVVFDMGALDTITALGAEKSVIGIPKAKNALSLLPNNVKSVYKAKRYQDVGSLFEPNFEAIARMQPDVVFLGARMASVDNIEKLKEAAPKAALVYAGVDSKKVFDKGVAERVTMLGKIFDQNKKAKTFNKDIAQAVLKLQKTIEKKGKPTALFVMANSGELLTQSPSGRFGWIFSVGGFKAVNENEKLSSHGTPVSYEYIAEKNPNYLFVLDRGATIGQGASSKELFNNDVIKATDAVKNKRVHEVDGKDWYINSGGSRVTLRMIKDVQNFVDNR

SEQ ID NO: 1925 - DNA, 915 bp, Streptococcus pyogenes
ttgctgtatgggtttggaaaaagaggaaaaaaaatgataaaacgatgtaaaggaattggtctagccttaatggccttctttttggtagcttgtgtgaatcagcaccctaaaacggctaaagagactgaacagcagagaattgtagccacttcggttgctgtggttgatatctgtgaccgtttaaatttagacctcgttggggtttgtgatagtaaattatatacccttcctaaacgctatgatgctgttaagcgtgtgggtttacccatgaatcctgatatagagttgattgcttctttgaaaccaacttggattttgagtcccaattctttacaagaagatttggaacccaagtatcaaaaattggatactgagtatggttttttgaacttacgaagtgttgagggcatgtaccagtccattgatgatttagggaaccttttccaacgtcaacaagaagcaaaagaattgcgccagcaataccaggactattatcgtgctttccaagctaaacgtaaggggaagaaaaagcctaaagtgcttattcttatgggcttgccaggtagttatttggtggcgacgaaccaatcttatgtagggaatcttttggacttggcaggtggtgagaatgtttatcagtcagatgagaaagaatttctatcagctaatcctgaagacatgctggctaaggagcctgacttgattttacgaacagctcatgccattccagacaaggtaaaagtgatgtttgacaaagaatttgctgaaaatgatatttggaaacattttacggcagtcaaggaagggaaagtctatgatttggacaataccctgtttggcatgagtgctaaattgaactacccagaagccttggacaccttaacacagctttttgaccacgtgggagatcatccg

SEQ ID NO: 1926 - protein, 305 aa, Streptococcus pyogenes
LLYGFGKRGKKMIKRCKGIGLALMAFFLVACVNQHPKTAKETEQQRIVATSVAVVDICDRLNLDLVGVCDSKLYTLPKRYDAVKRVGLPMNPDIELIASLKPTWILSPNSLQEDLEPKYQKLDTEYGFLNLRSVEGMYQSIDDLGNLFQRQQEAKELRQQYQDYYRAFQAKRKGKKKPKVLILMGLPGSYLVATNQSYVGNLLDLAGGENVYQSDEKEFLSANPEDMLAKEPDLILRTAHAIPDKVKVMFDKEFAENDIWKHFTAVKEGKVYDLDNTLFGMSAKLNYPEALDTLTQLFDHVGDHP

SEQ ID NO: 1927 - DNA, 759 bp, Streptococcus agalactiae
atgattcaaataaacaatttacataagttctatggccaaaaggaaatattaaaagacattaatatttcgattcctaaaggaaaagtaacagctattttaggtccaaatggatctggaaagagtacattgctgagttgtatcagtcgacttgaaccttatgataatggtgaaattttccttgataaagtaccattagcccactacagttcaaatgacttagccaaaacattagccatattaagacaatctaatcacttaacactcaagataaaggtgagagacttgataggattcggtagatttccttatagtaaaggacggttaagtcaaaaagataaagctgtcatagaatcagttatatcttatatggatttaaacgatatagctgacgagttcattaataacctcagcggaggtcaaattcaaagagcttttatcgcaatgacaatggcacaagatactcaatatatttgcttagatgagccactcaacaatttagatatgaaatatgctgttcaaatgatggatcttatcaaacgatatgcgtatgagtttaataaaactatagtgattattattcacgacatcaattttgcaactcactacgctgacaatgttgtcgctttaaaagaaggacaagtggtgacttgtgggactgtcgaagatgttatgcaagaaaaaatcctttctcatttatttgatatgcctatccgtatcgaaactgttgatggtaaaccaattatccttttttgtacaacg

SEQ ID NO: 1928 - protein, 253 aa, Streptococcus agalactiae
MIQINNLHKFYGQKEILKDINISIPKGKVTAILGPNGSGKSTLLSCISRLEPYDNGEIFLDKVPLAHYSSNDLAKTLAILRQSNHLTLKIKVRDLIGFGRFPYSKGRLSQKDKAVIESVISYMDLNDIADEFINNLSGGQIQRAFIAMTMAQDTQYICLDEPLNNLDMKYAVQMMDLIKRYAYEFNKTIVIIIHDINFATHYADNVVALKEGQVVTCGTVEDVMQEKILSHLFDMPIRIETVDGKPIILFCTT

SEQ ID NO: 1929 - DNA, 780 bp, Streptococcus pyogenes
atgacaacaattagtgctgaagacctcacaattgcctatgaacagcgtaccatcatcgataaattatcgttttatattcctgaaggtaaaattacgaccattattggcgccaatggctgtgggaagtctagtttattaaaagcactgacaagattattaccaccaaaacagggagttgtatatttaaatgggcaaaacattgccacattagaaactaaagaggttgctaaaaaactagctcttttacctcaagttcaagaagcaactaacggcataactgtttacgaattggtttcttacggacgttttccccatcaatcttactttggaaatcttagtccagctgacaaaaaagccattcattgggctatgcaagccaccaatgtcatggcctatgctgatcaacctgttgatgctctttctggggggcaacgtcaaagggtttggcttgcaatggcattagcccaaggcactgatactatttttttagatgagccaactacttatttagatttaaatcatcaactagaaatcctagagctcgttaaatccctaaataaggatgccggcaagactattgttatggttcttcacgacctcaatctttcagcccgctattcggatcatctgattgctatgaaacatggcaagatccattatactggtactatagcagatgttatgacttcacctatcattcaagacatcttccaaatcaaaccggtactggttgatgatcctatccacaactgtcctatagtgctgacttatcagcttcaa

SEQ ID NO: 1930 - protein, 260 aa, Streptococcus pyogenes
MTTISAEDLTIAYEQRTIIDKLSFYIPEGKITTIIGANGCGKSSLLKALTRLLPPKQGVVYLNGQNIATLETKEVAKKLALLPQVQEATNGITVYELVSYGRFPHQSYFGNLSPADKKAIHWAMQATNVMAYADQPVDALSGGQRQRVWLAMALAQGTDTIFLDEPTTYLDLNHQLEILELVKSLNKDAGKTIVMVLHDLNLSARYSDHLIAMKHGKIHYTGTIADVMTSPIIQDIFQIKPVLVDDPIHNCPIVLTYQLQ

SEQ ID NO: 1931 - DNA, 972 bp, Streptococcus agalactiae
atgattaaggatttagagataccaaaattacttattttactgatactactaattgctgctattattttgtttttaatttatggtattccaactgacgcaaatgaatttttgattatctatatcctaaaaacacgttatcaaaaactgattgcattaattttggttggtatctgcattggtagttctagtcttatttttcaaactctaaccaataaccgacttttaactccgtccattattggtttagatagcttatatatccttatccaaacaggattaatgtatttaatcggagctcagcgtgtcataaaattttcatcttttagtagcttcctcctttcattattattaatggttggatttgcttacttattatttacgatactttttcgaaataaaaaacagtctttgtattttgttctattagctggactcatatttaatacattattttcttctatctcatcctttattcaagccattatggaccccaacgattttatgattttacaaaatcagctctttgctagtttcaatgctattaacaccaagatcctttggatttctttcattatcattgtcgttagctttgtcattaattggccttttataaaggaattggatgtcttactattgggtaaagaaaatgcgatatcactcggcatctcatatcaaaagcttactactagattttttttatggttagcattgatggtagctatagcaacagcattagttgggccgattacttttttaggcttacttgtagcacatattacctatcacagttttcatacctttagacatcaaatattagttcctatagccattgttatctgtatctttacacttgtcttagggcagcatctcgttcaaaatctattacacctcactgttcaactaagtgttctcctcaaccttatcgggggaagttattttatattcaccttaatcaaaggaaggaaaaactta

SEQ ID NO: 1932 - protein, 324 aa, Streptococcus agalactiae
MIKDLEIPKLLILLILLIAAIILFLIYGIPTDANEFLIIYILKTRYQKLIALILVGICIGSSSLIFQTLTNNRLLTPSIIGLDSLYILIQTGLMYLIGAQRVIKFSSFSSFLLSLLLMVGFAYLLFTILFRNKKQSLYFVLLAGLIFNTLFSSISSFIQAIMDPNDFMILQNQLFASFNAINTKILWISFIIIVVSFVINWPFIKELDVLLLGKENAISLGISYQKLTTRFFLWLALMVAIATALVGPITFLGLLVAHITYHSFHTFRHQILVPIAIVICIFTLVLGQHLVQNLLHLTVQLSVLLNLIGGSYFIFTLIKGRKNL

SEQ ID NO: 1933 - DNA, 1047 bp, Streptococcus pyogenes
ttgaccacgtgggagatcatccgtaacatgacagcatcagatttacaaagggatcaatccctactggctaaaaaacgtttcagaagtggtctttatctagttcttttaattctcagcctcctatttttggcggttattgccttatcccttggtggtttggcggtttcttatggggcaattgtcaagggactgtttgtggcttatgacccccaagtggctttgatttatgatttgcgttttccaagaattgtcattgctttattagcaggagcagggatagctgtttcgggagttctttttcaagcagtgttgaaaaatcctatttcagaccctgctattatagggatttgtagtggtgctagttttatggttttagtctctagtttacttctgccgcagttgctgctgtatggtccaatcgtatcctttttaggaggcggagtgtctttcctgctgatttatggtttagcatggaagaaagggcttaatcctattcggcttattctaacagggattgctattaatgctttatttatggggttatcaactgctttaaccagctttttcacctcagctagtcccatggtcaatgctcttttagcaggtcatattagtcaaaaaacatgggctgatgtaggggttttattcccttatacattcattggcttgttactagctttgttattgtcaaaaacttgtaaccttcttcttttagatgatcaggtgattcgtcatttaggaatcgatgctacagcgttacggttgggaatttccttggttgctgttttattggcttcggtagccacttcgatcgttggagtggtttctttcctaggcttgattgtccctcatatgagccgcttgctggttggaagtaagcaccaaatcttaattcctttttcagctttgcttggagcctttgtctttttgctagccgatactttaggaagaagtcttgcttacccattggaaattagccctgcgattataatgagtattgtaggcgggccttactttatttacctgctaaggaggtctgatattata

SEQ ID NO: 1934 - protein, 349 aa, Streptococcus pyogenes
LTTWEIIRNMTASDLQRDQSLLAKKRFRSGLYLVLLILSLLFLAVIALSLGGLAVSYGAIVKGLFVAYDPQVALIYDLRFPRIVIALLAGAGIAVSGVLFQAVLKNPISDPAIIGICSGASFMVLVSSLLLPQLLLYGPIVSFLGGGVSFLLIYGLAWKKGLNPIRLILTGIAINALFMGLSTALTSFFTSASPMVNALLAGHISQKTWADVGVLFPYTFIGLLLALLLSKTCNLLLLDDQVIRHLGIDATALRLGISLVAVLLASVATSIVGVVSFLGLIVPHMSRLLVGSKHQILIPFSALLGAFVFLLADTLGRSLAYPLEISPAIIMSIVGGPYFIYLLRRSDII

SEQ ID NO: 1935 - DNA, 99 bp, Streptococcus agalactiae
atgctaattagattaggtacgattaaacctaagaaaggtaaagctcctacgataataatgactagggatgtcataattgaaaccaaaactaaaccaaag

SEQ ID NO: 1936 - protein, 33 aa, Streptococcus agalactiae
MLIRLGTIKPKKGKAPTIIMTRDVIIETKTKPK

SEQ ID NO: 1937 - DNA, 1005 bp, Streptococcus agalactiae
ttgtgctcatttttgaacactttatctttcattttaaggagttttatgaaaaagctattaaccactcctgtaatgggttgtactttggttatactttctctaacgtccctatttgttggtgtgaaatctatcccactggagcaaataacacaccttgatcaatcacaggtagatatttttttaacgagtcgcttaccaagaaccattagtatcctaatatctggtgcaagtttgtcagtctgtggcctgctgatgcaacaactaacccaaaacaagttcgtttcaccgacaacttcagggactatggattgggcgaaattaggagtagttgttacgctgattttctttaaaaatacctctatttttattcaactatgtatagcttcaggttttgccattttaggatcgcttctttttgtaaccattttaaaaatgattacttttaaggataatatttttatacctcttatcggactgatgcttggacaaattgtagcagcagcaacagtatttttaggaacacattttcaagtactacaatctgtcaacagttggcttcaaggtaatttttccatcatgactagccatcgctacgaaattctttacttagcattgccatgtttgtttttagtatatttttttgctcatcagtttaccattgttgggcttggagaaagcttcgctaagaatttaggggttgcttatgaaaagatgatttactttggtttagttttggtttcaattatgacatccctagtcattattatcgtaggagctttacctttcttaggtttaatcgtacctaatctaattagcataactaaaggagatcatatgtcctcaactatcttagagacatcgcttttaggggcttgtatcgtcatgatatgtgatctttttggtcgcttagttatttttccttatgaagtctcaataggagttacgctaggagtattaggtagtgcctttttcctgatttcaattataagaaatgagggaaaatca

SEQ ID NO: 1938 - protein, 335 aa, Streptococcus agalactiae
MCSFLNTLSFILRSFMKKLLTTPVMGCTLVILSLTSLFVGVKSIPLEQITHLDQSQVDIFLTSRLPRTISILISGASLSVCGLLMQQLTQNKFVSPTTSGTMDWAKLGVVVTLIFFKNTSIFIQLCIASGFAILGSLLFVTILKMITFKDNIFIPLIGLMLGQIVAAATVFLGTHFQVLQSVNSWLQGNFSIMTSHRYEILYLALPCLFLVYFFAHQFTIVGLGESFAKNLGVAYEKMIYFGLVLVSIMTSLVIIIVGALPFLGLIVPNLISITKGDHMSSTILETSLLGACIVMICDLFGRLVIFPYEVSIGVTLGVLGSAFFLISIIRNEGKS

SEQ ID NO: 1939 - DNA, 1035 bp, Streptococcus pyogenes
atgctttttatgggtaataagaagaggaggccgctattgaaatctcaaagacaccttttaaggttatatactagcctgatcctgctacttgtaagtcttatgggattagctttgtcccttggagaatctcatctatcttttttggaccttgtccatgtgtttttgggaaaatctagccatgccatatctttcatcgttattaacattcgtctgccaagaattctagctgcttgtctaggaggcggttctcttgctttatcagggctattattacaacgtttaacacgaaatcccttagctgactctggtgtattaggtattactataggagcaggtatctctttggctattgtggtctccttttctttctttgagcaagctcatatcagccattacttgcctttatttgccatgcttggtgctattgtaacaacctttagcgtttattggctatctttgacaaaacaaggacaaattgatcctacacggttaattcttactggtgtagctgttactaccatgctttcaagtctaatggttgctcttgttggtcatattaatcgctacaaagtcgatttggtcatcaattggcttagcggccaattaataggagacgactggcctactctgagtgtcatcgctcctttgttattgtgtttttggctattgacttatagtcaagcccatttccttaatattatgggattagctgataatactgctattgggctaggactccctttaaaccgtaagcgtcgtttgatacttgtcttagcagctggcttaggtgctttgagtgttcttttggttggtaatattagttttatcggcttaatagctggacactttagtacatacttggtagggagtaatcataaaataacaatacccattagtattttaatcggaatgatcctacttcttgttgcagatacagtaggacgagtctatctggttggcagtaatatccagacagggattttagtgtcgcttatcggagccccttattttctttacttaatggcaaaaacaaaa

SEQ ID NO: 1940 - protein, 345 aa, Streptococcus pyogenes
MLFMGNKKRRPLLKSQRHLLRLYTSLILLLVSLMGLALSLGESHLSFLDLVHVFLGKSSHAISFIVINIRLPRILAACLGGGSLALSGLLLQRLTRNPLADSGVLGITIGAGISLAIVVSFSFFEQAHISHYLPLFAMLGAIVTTFSVYWLSLTKQGQIDPTRLILTGVAVTTMLSSLMVALVGHINRYKVDLVINWLSGQLIGDDWPTLSVIAPLLLCFWLLTYSQAHFLNIMGLADNTAIGLGLPLNRKRRLILVLAAGLGALSVLLVGNISFIGLIAGHFSTYLVGSNHKITIPISILIGMILLLVADTVGRVYLVGSNIQTGILVSLIGAPYFLYLMAKTK

SEQ ID NO: 1941 - DNA, 546 bp, Streptococcus agalactiae
atgaccgaaaaagaaaaaatgttagcaggacaatattatcgtccatcagcacctgaactacgcaaggatagagaagttgcactaaaaaatatgcaagcctttaacaatgaagataatagtagcaaacgtaacgtcattttacaaaaatggtttggtgctactgggaagagtatccatatggaacaacgttttgtctgcgattatggttgtaatatttatgttggtgaaaacttctacgccaattttaaccaaactttcttagatgtttgtgaaattcgtattggcgataactgtatgtttggcccaaactgtcaactcctcaccccactccatcctctagatccaatagaaagaaattcaggattagaatacggtgccccaatccaaatcgggaataatgtctggctaggtggaggagtgactattttaccaggtgttgtattaggagataatgtcgtcgttggcgctggaagtgtcgttacgaaatcatttgaaaataacgttgttatagcaggaaaccctgctaagataatcaaaaaattagct

SEQ ID NO: 1942 - protein, 182 aa, Streptococcus agalactiae
MTEKEKMLAGQYYRPSAPELRKDREVALKNMQAFNNEDNSSKRNVILQKWFGATGKSIHMEQRFVCDYGCNIYVGENFYANFNQTFLDVCEIRIGDNCMFGPNCQLLTPLHPLDPIERNSGLEYGAPIQIGNNVWLGGGVTILPGVVLGDNVVVGAGSVVTKSFENNVVIAGNPAKIIKKLA

SEQ ID NO: 1943 - DNA, 564 bp, Streptococcus pyogenes
atgaccacagaatttgacaaaatgactagaggcgaatggtatgatgctaattttgattcggaactgattcaaaaacgcatgatggcacaagacctctgtttcgatttaaaccaattaaagcctagtcgagaagaagaacgctctgccgttttaaaccaactttttggacaatcttttgagggcttggtcctgctcagccctttcatctgtgactatggtaagaacattacttttgggaagaattgctttattaacagcaattgttatttcatggatggggcgaagattgccttgggcgataatgtctttgtaggtccttcgacaggtttttacacggcaaatcaccctctagattataaacgccgcaatgaggggcttgaaaaagctttaccaattaccataggagataatgtctggtttggtgccaatgtcaatgttatgcccggcgttactattggcagtggttgtgtgattgcgtcaggatcagttgttacccatgatattccagtcaattcccttgcggcaggtgttccttgccaagttgtacggaaaattgagcaggag

SEQ ID NO: 1944 - protein, 188 aa, Streptococcus pyogenes
MTTEFDKMTRGEWYDANFDSELIQKRMMAQDLCFDLNQLKPSREEERSAVLNQLFGQSFEGLVLLSPFICDYGKNITFGKNCFINSNCYFMDGAKIALGDNVFVGPSTGFYTANHPLDYKRRNEGLEKALPITIGDNVWFGANVNVMPGVTIGSGCVIASGSVVTHDIPVNSLAAGVPCQVVRKIEQE

SEQ ID NO: 1945 - DNA, 762 bp, Streptococcus agalactiae
atgatggcaacaattaaagaaatcaaagcaattttagagactattgttgatttaaaagacaaacgttggcaagaatatcaaacagattcacgcgcaggtgttcaaaaagcaatccttcaacgaaaaaaaaatattcagtcagatttagacgaagaagcgcgcttagaacaaatgttggtctacgaaaaaaaactttacattgaacatataaaccttattgcaggaatcgatgaagtaggtagaggtcctttagcgggaccagtagtagctgctgctgttattcttccaccaaactgtaaaataaaacatctcaatgactccaaaaaaattccaaagaaaaagcatcaagaaatctatcaaaatattttagatcaagcgttagcagttggtattggtattcaagacagccaatgtattgatgatatcaacatttatgaagctacaaaacatgctatgattgatgcagtttctcatttatctgtggctcctgaacatcttttaattgatgctatggttttagatctatcaattccacaaactaaaattatcaaaggtgatgctaattcactctctattgcagcagcttcaatcgtagctaaagtgaccagagataaaataatgtctgattatgatagcacatatcctggatatgcattttctaaaaatgctggctatggtactaaagagcatttagaaggtttgcaaaaatacggtattactccgatacatcgtaaaagttttgaacctataaaatcaatgttg

SEQ ID NO: 1946 - protein, 254 aa, Streptococcus agalactiae
MMATIKEIKAILETIVDLKDKRWQEYQTDSRAGVQKAILQRKKNIQSDLDEEARLEQMLVYEKKLYIEHINLIAGIDEVGRGPLAGPVVAAAVILPPNCKIKHLNDSKKIPKKKHQEIYQNILDQALAVGIGIQDSQCIDDINIYEATKHAMIDAVSHLSVAPEHLLIDAMVLDLSIPQTKIIKGDANSLSIAAASIVAKVTRDKIMSDYDSTYPGYAFSKNAGYGTKEHLEGLQKYGITPIHRKSFEPIKSML

SEQ ID NO: 1947 - DNA, 789 bp, Streptococcus pyogenes
atgccgactagtattaaagctattaaagaaagcttagaggccgttactagcctcttggaccccctctttcaagaattggcaaccgacactaggtcaggcgtccaaaaagctctaaaaagccgacaaaaggttattcaggccgagttagcagaagaagaacgattagaagccatgctttcttatgaaaaagctctttataaaaaaggttataaagccattgcaggtattgatgaggtgggacgtggtcccttagcaggtcccgttgtggcagcttgtgtgattttacctaagtattgtaaaattaaaggccttaatgattctaaaaaaatccctaaagctaagcatgagaccatttatcaggcagtgaaagaaaaggctttggctatcggtatcggtattattgacaatcagcttattgatgaggtcaatatttatgaagcaaccaaactggccatgctagaagccattaaacagttggagggccaactcacacaaccagattatctcttgattgatgccatgacattggatattgctatttcgcagcagtctattcttaaaggcgatgccaattccttgtctattgcagcagcatcaattgtagctaaggtcaccagagatcagatgatggctaactatgatcgcatttttcctggttatgactttgctaaaaatgcaggctatggcaccaaagaacatttacagggattaaaagcttacggcataacgcctatccatcgtaaaagttttgaacctgttaaatccatgtgctgcgattcaactaatcct

SEQ ID NO: 1948 - protein, 263 aa, Streptococcus pyogenes
MPTSIKAIKESLEAVTSLLDPLFQELATDTRSGVQKALKSRQKVIQAELAEEERLEAMLSYEKALYKKGYKAIAGIDEVGRGPLAGPVVAACVILPKYCKIKGLNDSKKIPKAKHETIYQAVKEKALAIGIGIIDNQLIDEVNIYEATKLAMLEAIKQLEGQLTQPDYLLIDAMTLDIAISQQSILKGDANSLSIAAASIVAKVTRDQMMANYDRIFPGYDFAKNAGYGTKEHLQGLKAYGITPIHRKSFEPVKSMCCDSTNP

SEQ ID NO: 1949 - DNA, 114 bp, Streptococcus agalactiae
ttgattgcccctgttaatgctagctttaatccaactaattcatcttcaaatttgggccacaagataccaggagtgtccaaaatttccagttccttattagatttgagccattgc

SEQ ID NO: 1950 - protein, 38 aa, Streptococcus agalactiae
MIAPVNASFNPTNSSSNLGHKIPGVSKISSSLLDLSHC

SEQ ID NO: 1951 - DNA, 849 bp, Streptococcus agalactiae
atggctactattcaatggttcccaggacacatgtccaaagctcgccgtcaagttcaagaaaatattaagcatgttgattttgttacaattttagtggatgcaaggttacctctttctagtcaaaatccaatgctaaccaaaatcgtcggagacaaacccaaactaatgatcctcaataaagctgatctagcagatcctattcgaactaaagaatggagagatttttatgaatctcaaggtttaaagacattagctattaattctaaagaacaatcaacagttaaaaaagtaaccgacatcgctaaaatattaatgtccgataaaattgctaatctacggggacgtggtattcaaaaagagacacttcgtacgatgattattggaattccgaatgcaggtaaatcgactctaatgaatcgcctagcaggtaaaaaaattgcagtggttggtaataaaccaggtgtcacaaaaggtcagcaatggctcaaatctaataaggaactggaaattttggacactcctggtatcttgtggcccaaatttgaagatgaattagttggattaaagctagcattaacaggggcaatcaaagatcaattattgcctatggatgaggtaacaatatttggattgaattactttaaaacctattatcctgatcgtctcaaagagcgttttaaaagcattaatttagaggatgaagctcctgaaatcatcatggccttaacacaaaaattaggttatcgtgacgattacgatcgcttttataatttatttgtcaaagaagttcgcgatggtaaattaggacgctatacgttagatatcgtcggagaacatgatggcaacaat

SEQ ID NO: 1952 - protein, 283 aa, Streptococcus agalactiae
MATIQWFPGHMSKARRQVQENIKHVDFVTILVDARLPLSSQNPMLTKIVGDKPKLMILNKADLADPIRTKEWRDFYESQGLKTLAINSKEQSTVKKVTDIAKILMSDKIANLRGRGIQKETLRTMIIGIPNAGKSTLMNRLAGKKIAVVGNKPGVTKGQQWLKSNKELEILDTPGILWPKFEDELVGLKLALTGAIKDQLLPMDEVTIFGLNYFKTYYPDRLKERFKSINLEDEAPEIIMALTQKLGYRDDYDRFYNLFVKEVRDGKLGRYTLDIVGEHDGNN

SEQ ID NO: 1953 - DNA, 846 bp, Streptococcus pyogenes
atggcaatgattcaatggtttcctgggcacatgtccaaagccagaagacaggttcaggaaaatgtaaagcatgttgactttgtaactattttagtggatgcacgcttaccactttctagtcaaaatcccatgcttacaaaaattgttggtgataaacctaaattaatgattttaaataaagctgacttggccgatgccactcgtacgaaagagtggaaggcttattatgaaagtcaaggtattaaaacattagccatcaattccaaagaacaatcaacggttaaaaaagtaacagaagcagccaaggaactcatggctgataaaattcaacgcttgcgagagcgcggcattcaaaaagaaaccttgcgaaccatgattattggcattccaaatgctggtaaatctaccttgatgaatcgcttggctggtaagaaaattgctgtagttggcaataaacctggtgtgactaaaggacaacaatggttgaagtccaataaggaattggaaattctagacactcctggtattttatggccaaaatttgaggacgaattggtgggcttaaaattagctttaacaggtgctatcaaggaccaattactaccaatggatgaagtgactatctttggcttgaattactttagggaatactaccctaatcgtttaaccaaacgttttaagaatattcctcttgaggaagaagctcctgaaatcattatgaccttgacacgccaacttggatttaaagacgattatgaccgtttttacactttattcgttaaggaagttcgtgatggtaaattaggtcaatacaccttagatcaggtgggagatatggatgccgac

SEQ ID NO: 1954 - protein, 282 aa, Streptococcus pyogenes
MAMIQWFPGHMSKARRQVQENVKHVDFVTILVDARLPLSSQNPMLTKIVGDKPKLMILNKADLADATRTKEWKAYYESQGIKTLAINSKEQSTVKKVTEAAKELMADKIQRLRERGIQKETLRTMIIGIPNAGKSTLMNRLAGKKIAVVGNKPGVTKGQQWLKSNKELEILDTPGILWPKFEDELVGLKLALTGAIKDQLLPMDEVTIFGLNYFREYYPNRLTKRFKNIPLEEEAPEIIMTLTRQLGFKDDYDRFYTLFVKEVRDGKLGQYTLDQVGDMDAD

SEQ ID NO: 1955 - DNA, 570 bp, Streptococcus agalactiae
atgagaaaacgttcaattttgccaatattagctgtcttatttgttttcatgagtatctttagcgtatattctatttttcgtggtgataaagccaaagaaaaagcaagtgtcataaaacaagcatctcaaacaagtcaaacttcaaaaaaagargtcttacaaaagaagacttatccaaatctaaataaatattcaaatctagaaattcatgtttcatctacgaggcaaacaatgacaataacctcgaatgacaaggtcatctttaaaacgattgtttcaacaggagcaaaagagagccctaccccaaaaggaacttttgtcatagaaccggaacgaggagattttttctataacgcctcatcaaaagaaggagcctattattgggtctcctttaaagaacatggtatttatctctttcatagcgttccgactgatcaacaaggaaatgagattccagaagaagcaaagcaattaggaaaagccgcctcacatggctgtgtgcgtatgtcaagggcggatgcaaaatggttctatgaaaatattcctcaaggaacgactgttaccatcaaa

SEQ ID NO: 1956 - protein, 190 aa, Streptococcus agalactiae
MRKRSILPILAVLFVFMSIFSVYSIFRGDKAKEKASVIKQASQTSQTSKKEVLQKKTYPNLNKYSNLEIHVSSTRQTMTITSNDKVIFKTIVSTGAKESPTPKGTFVIEPERGDFFYNASSKEGAYYWVSFKEHGIYLFHSVPTDQQGNEIPEEAKQLGKAASHGCVRMSRADAKWFYENIPQGTTVTIK

SEQ ID NO: 1957 - DNA, 1482 bp, Streptococcus agalactiae
atggtaacatttttaggaggggtagcccttttaattgttggttatttcacgtacggtagatacattgaaaagaattttcaaattgatgaaaatcgccaaacacctgcagaagcattaagggatggatatgattttgttcctatgccaaaatggaagaatgggatgattgagttattgaacatcgcaggaaccggacctatctttggccctattttaggagcactctatggtccagttgcttatatctggatagtcttaggatgtatttttgcaggggctgttcatgattatatgattggaatgatttctcttagaaataatggtgcatatcttcctgaattagctagtcgctatcttggaaagtcaatgaagcatgtgatcaacattttttcaatgctattacttattttagttgcaaccgtatttgtggtaactccagctaatcttatcctaagtattttaccagctgggacactatctttaccttggataatcggtcttattttcgtttattaccttatttctacagtcttacctattgataaagcacttggtaaagtttatcctgtattctgcgtcatcttaatggttagtacggcagcagttggcttccgtttattaactggtggctttgatatgccaaacttaacttttgaaacctttaaaaatatgcatccagctgggcttgggatattccctgctttattctttaccatttcatgtggagccatctctggtttccatgctacccaagcacctatggtctcaagaacaactgttaatgagagagaagggcgtttcactttctacggcatgatgattgcagaaggagtaattgcgatgatttgggcaggtgcttcaatgagcttgttcaaaggtcaaaatctctatgaaatgattgctgctgggacaccttctgcagttgtcaatcaagtaatgttaatgttactcggtagtgtaattggaactatcgctatcattggtgttattgttctccctgtttcatctggtttatcagctttccgtagcttacgtactatcgttgctgattatatccatgtcaaacaagatactcttccaaaaatctttgctgtaactatcccattatatgttatttcatttgtccttacacacgttgattttaatctcctatggcgttactttaactgggcaaatcaagtaactgctgttattggtttattagttgctacaagatatctcatcctaaaaagacgaaattattgggtaacatttgtaccagctatgttcatgttgtatgcagtagttgtttatattttatctcaaccaattggatttaatatgggcttaggcatcttaacttattcacttgctttagtgttaacaggtattcttgttggacttttctggaaatctggtcaaaaacaattaaaaactgttcatcctgaagcattcctgtttaacgatcatagaccaattaattattacagtagtttagattct

SEQ ID NO: 1958 - protein, 494 aa, Streptococcus agalactiae
MVTFLGGVALLIVGYFTYGRYIEKNFQIDENRQTPAEALRDGYDFVPMPKWKNGMIELLNIAGTGPIFGPILGALYGPVAYIWIVLGCIFAGAVHDYMIGMISLRNNGAYLPELASRYLGKSMKHVINIFSMLLLILVATVFVVTPANLILSILPAGTLSLPWIIGLIFVYYLISTVLPIDKALGKVYPVFCVILMVSTAAVGFRLLTGGFDMPNLTFETFKNMHPAGLGIFPALFFTISCGAISGFHATQAPMVSRTTVNEREGRFTFYGMMIAEGVIAMIWAGASMSLFKGQNLYEMIAAGTPSAVVNQVMLMLLGSVIGTIAIIGVIVLPVSSGLSAFRSLRTIVADYIHVKQDTLPKIFAVTIPLYVISFVLTHVDFNLLWRYFNWANQVTAVIGLLVATRYLILKRRNYWVTFVPAMFMLYAVVVYILSQPIGFNMGLGILTYSLALVLTGILVGLFWKSGQKQLKTVHPEAFLFNDHRPINYYSSLDS

SEQ ID NO: 1959 - DNA, 732 bp, Streptococcus agalactiae
atgaaagttttagtagttgatgatgaaccagttgcacgtaacgaattaatttaccttcttaataagtatgattctaacctcgttatagcagaggcgcatgatatggctactgcattagctattttacttagagaaacttttgatgtagcactgttagatatccatctcagagatgattctgggttgcaattagcagagtatatcaataaaatgcccaaaccaccattattgatatttgcgactgcttatgatcaatatgctattcaggcttttgagcatgatgcgcgtgattatttgttaaaaccctatgattttgataggctaaagcaagctatggatagagtaaaaggagcgctaagtacatctacaattatagagagcgtaacttccggtcctctcttcaagcaacagtatccattgacagtagaagatcgaatctatctggtgtcggcggatgatatccttttgattgaagctatgcaaggaaaactgattatacaaacacctgataaaaattatgaaattgatggctctctacaacaatggcaagataaactaccatcatctcaatttgtacgggtacatcgctcttacattgtgaacattaatgctattaaaacgattgaaccttggtttaaccaaacacttcagttacacctttgtaataaaataacagttcctgttagcagagcaaatgtaaaacccctaaaacaaatgttaggcatatctacc

SEQ ID NO: 1960 - protein, 244 aa, Streptococcus agalactiae
MKVLVVDDEPVARNELIYLLNKYDSNLVIAEAHDMATALAILLRETFDVALLDIHLRDDSGLQLAEYINKMPKPPLLIFATAYDQYAIQAFEHDARDYLLKPYDFDRLKQAMDRVKGALSTSTIIESVTSGPLFKQQYPLTVEDRIYLVSADDILLIEAMQGKLIIQTPDKNYEIDGSLQQWQDKLPSSQFVRVHRSYIVNINAIKTIEPWFNQTLQLHLCNKITVPVSRANVKPLKQMLGIST

SEQ ID NO: 1961 - DNA, 1737 bp, Streptococcus agalactiae
atgacactctttttaattatgatggagcgagcggggttaatcatattattagcctatgcctttgtgcatatcccctttataaaacaaactttgaagcaacccgaattaaaaaaacaccagtatattctgcttatcttatttagcttatttgctattatttctaattttacaggggtagaaattcagtcagatttatctatcattccacaaactcttaatcatatagcagatcaatcatcggttgccaatacacgtgttttaaccattggtgtatcaggtctaatcggtggccccatagtcggtattatagttggtctcttatctgtattcgttaggtatttgcaaggaggattagcccctcatatttatgtcatttcttccttactaattggtttatgctctggattatcaggcaattatcttcgtaaaaattataataaaattcgtgttttagatgcaatggttgttggtttcggtatggaaattctacaaatgatctgtatcctcatttttagtgttgactttaatcaggcgcttcgcttagtatcttttatcagcatgccaatgattttaagtaatactttaggtttaggtatatttatatccattatttcatctactcaaaaattagaagaacatgctaaagcatttcaaacccatcaagtacttgaattagcaaatttaacccttccttaccttagaaagggactgacaacagaatcttgtcaaccagtagctgaaattattcataaacatatggatgtgagtgctgttagcctgactagtcaatcagccattttagcctatgtaggagatggagctgaccatcatcttcctaatactcaaatattaacaaagcttgctaaaagagcaatagatactggtaaagttagtgtcgcaactgataaaagtgaaatcgaatgcgaccataagaattgcccacttagttcagcaattgttattccattacacatccacgatgttatagtgggtactttgaaattatatttttcagacgcacaacatatgacttacgttgaccgtcaattagctgaaggattaggcaatatcttttccactcagttagctttgggacaagctgaggaagcaacaaggttactacaggatgcggaaatgaagtctctccaagcgcaggttaatccgcattttctttttaatgcacttaatactatttatggtttaattcgcatggatagcgaaaaagcaagaaagctcgtccaagattttagcaaggttattcgtgctaatcttcaacgggcaaagcaaaatttaattcctcttcatgatgaattggaacaggttaacgcctatttagcccttgaagaagcaagatttcccaacatggtggcctttaatttagacaaccaaacaaattcagatgacaacttaatgattcctccctttacattgcaggtcttgattgaaaactcttataaacacgcttttaagcatgttaataaaaataaccagctaaaggttactattgcaagaaataatgataggcttcatatcattgtccaagacaatggtattgggattccaaaagaaaaattaataacgcttggaaaaaaaactcaaatttcaaaacaaggttctggtacagctattgagaatctcgttcgtcgcttgaatattatttatgatggacaagcaagtttaaaatttgaatcaaatgattcaggaacttgtgctattgttaatatccccattaaaaat

SEQ ID NO: 1962 - protein, 579 aa, Streptococcus agalactiae
MTLFLIMMERAGLIILLAYAFVHIPFIKQTLKQPELKKHQYILLILFSLFAIISNFTGVEIQSDLSIIPQTLNHIADQSSVANTRVLTIGVSGLIGGPIVGIIVGLLSVFVRYLQGGLAPHIYVISSLLIGLCSGLSGNYLRKNYNKIRVLDAMVVGFGMEILQMICILIFSVDFNQALRLVSFISMPMILSNTLGLGIFISIISSTQKLEEHAKAFQTHQVLELANLTLPYLRKGLTTESCQPVAEIIHKHMDVSAVSLTSQSAILAYVGDGADHHLPNTQILTKLAKRAIDTGKVSVATDKSEIECDHKNCPLSSAIVIPLHIHDVIVGTLKLYFSDAQHMTYVDRQLAEGLGNIFSTQLALGQAEEATRLLQDAEMKSLQAQVNPHFLFNALNTIYGLIRMDSEKARKLVQDFSKVIRANLQRAKQNLIPLHDELEQVNAYLALEEARFPNMVAFNLDNQTNSDDNLMIPPFTLQVLIENSYKHAFKHVNKNNQLKVTIARNNDRLHIIVQDNGIGIPKEKLITLGKKTQISKQGSGTAIENLVRRLNIIYDGQASLKFESNDSGTCAIVNIPIKN

SEQ ID NO: 1963 - DNA, 1725 bp, Streptococcus pyogenes
ttgatgagtgttaaaacattgggaaggtatgtgactaaccactttaagcagggttttttgattaatcgactgatgaaattatatagcctgctaattgtaagttttttcactttagcagctattggcttgagcagttattctattagtagtacttataaaagggtggatgctgaggcgcagatgcgattggaggagactctaggtagattgcagtcacaaaacgatattaccctacgggttttagaccagttggttggccgttcagaagattaccataatctctatcaatacatgacgttaaccccaaaccaatatttttcaaacgtttttgaagactgggaaaaaggaaaagacacggtcctattttctgaagaggtgaggcgtctttttgacttgtaccctgatgtgacttctatgaccctactgctagaggacagtagtgcttatctgtacgccgataaggtcattaagacgggtcgtttgctttatagcaagcctgaaaaagtaaccggaaatgttttagttcgctctattcgaaatccagaatcaggagatgtgacaggtcgtctttacctgacctttgacaaaccaccgactttggtagagacacagcaggatcactatttagctacttttgcttttgattactatggccgcaaactcttccatcaaggaggtcggagatttcctcatttagaggctgaggttaaaaaggctatcaaggcagatcgggcagctgatcttagtaatcttagcaaggcttatcggatgcagtacaatcgctcgggagacctcttggcttatgtggctgtcagaaaatcctatttattagcggaagctgtcaggacagtttttgtgtatggccttgtttctctacttttagcttggctgttattgcagttgctctttagggttttccgaaattatatccagcaggtttctgaaattacggatactgttgaaatggttgcagcaggcgatttgtctttaaccatcgacaacagccacatggaattggaactgtatcatatctcagaagccattaatcagatgttggccagcattaaagcttatattgacgaagtttatgtgttagaggtagagcaacgagatgcccaaatgagagctctgcagtctcaaatcaaccctcattttttatacaacacgttagagtatattcggatgtacgcccttagttgtcaacaagaagaattagcagatgtcatttatgcctttgcgagtctgcttcgcaacaatattagccaagataagatgaccaccttaaaagaagaactggctttttgtgaaaagtacatttacctttatcaaatgcggtatccagatagcttcgcttatcatgtaaaaattgatgagagtgttgctgacttagccattcctaaatttgtcattcaacctctcgttgaaaattattttgtgcatgggattgattatagtcgccatgacaatgcactaagcatcaaggctttagatgagacggatcatctcttgattcaggtgcttgataatggacgtggtattagtcaagagcgcttagcagatatggaaaaaaggcttcaagagcaccaaacaacaggcaatagctctattggtttgcaaaatgtttacctccgtctctttcatcattttcgagacagggtttcttggtccatggctaaggagccaaatggtggctttatcattcaaattaggattagaaaggatgct

SEQ ID NO: 1964 - protein, 575 aa, Streptococcus pyogenes
LMSVKTLGRYVTNHFKQGFLINRLMKLYSLLIVSFFTLAAIGLSSYSISSTYKRVDAEAQMRLEETLGRLQSQNDITLRVLDQLVGRSEDYHNLYQYMTLTPNQYFSNVFEDWEKGKDTVLFSEEVRRLFDLYPDVTSMTLLLEDSSAYLYADKVIKTGRLLYSKPEKVTGNVLVRSIRNPESGDVTGRLYLTFDKPPTLVETQQDHYLATFAFDYYGRKLFHQGGRRFPHLEAEVKKAIKADRAADLSNLSKAYRMQYNRSGDLLAYVAVRKSYLLAEAVRTVFVYGLVSLLLAWLLLQLLFRVFRNYIQQVSEITDTVEMVAAGDLSLTIDNSHMELELYHISEAINQMLASIKAYIDEVYVLEVEQRDAQMRALQSQINPHFLYNTLEYIRMYALSCQQEELADVIYAFASLLRNNISQDKMTTLKEELAFCEKYIYLYQMRYPDSFAYHVKIDESVADLAIPKFVIQPLVENYFVHGIDYSRHDNALSIKALDETDHLLIQVLDNGRGISQERLADMEKRLQEHQTTGNSSIGLQNVYLRLFHHFRDRVSWSMAKEPNGGFIIQIRIRKDA

SEQ ID NO: 1965 - DNA, 123 bp, Streptococcus agalactiae
gtgatgtttaaaggatttaaaaaattgattattattatgggagggataagcttaatgatgattttaacagcatgtgacttagtaaaaaaaatcaccaatgggttcaagaacattgaaaatact

SEQ ID NO: 1966 - protein, 41 aa, Streptococcus agalactiae
MMFKGFKKLIIIMGGISLMMILTACDLVKKITNGFKNIENT

SEQ ID NO: 1967 - DNA, 681 bp, Streptococcus agalactiae
ttgaaacagagcaaccatagatatcatggaccgttaattgagtttgaaatagaatattcatatattaaaatttttccatggattggactatttatatcttgcatagggttatatgcaagtaattttggtgatcctttaggttttataaaattcatattttctgtatgcatttttgttaatttggtctcaataattatttcgcttttttttaaaaaaatatctaattttttaaaaaaaatttcttatattttattatcattagtattcctaacacttattataggttttgattttataggcttggcaatgtttttaaataatagaaattttggacatgttcaatcaatttattatactgagatggcaaaaatgtatattatgataatgttaattatttttattgtattttctggaatatattatttctattatttaccaaaaaatcaggggaaaaaatggaaatttaatcagtggaaattacaaaaaggaaaaaaggaacaattaaaaattaattatggaattatttttggtttagtgatgctttctccagtctttcttgtaggtagtattgaaaatatttttggtttgattggaggtgtattatttacggcaacttttccagctctgattgtcgattccctttatgcagcatattatattcataagcatcccgaatatgag

SEQ ID NO: 1968 - protein, 227 aa, Streptococcus agalactiae
MKQSNHRYHGPLIEFEIEYSYIKIFPWIGLFISCIGLYASNFGDPLGFIKFIFSVCIFVNLVSIIISLFFKKISNFLKKISYILLSLVFLTLIIGFDFIGLAMFLNNRNFGHVQSIYYTEMAKMYIMIMLIIFIVFSGIYYFYYLPKNQGKKWKFNQWKLQKGKKEQLKINYGIIFGLVMLSPVFLVGSIENIFGLIGGVLFTATFPALIVDSLYAAYYIHKHPEYE

SEQ ID NO: 1969 - DNA, 321 bp, Streptococcus agalactiae
ttgaataatgcagcaataaaatcccttaaaaatgaagtccttgaattaaatcccaaaaatgcttttaaaggatggggaaaattaggaagaattgctaaagctggtaaagtattaggttggactgggaaaatagtcaatatagaaactaatgccaaaaaagacttttttgatgataagacttctacactagatcaaaaaatcaaaaactttgctatagattcaggtgtagatgcattgtccggtgcagcaataggaactttggtaggaggacctgtgggaaccgttgttggagcagtgcagggctggcatttgattttgctt

SEQ ID NO: 1970 - protein, 107 aa, Streptococcus agalactiae
MNNAAIKSLKNEVLELNPKNAFKGWGKLGRIAKAGKVLGWTGKIVNIETNAKKDFFDDKTSTLDQKIKNFAIDSGVDALSGAAIGTLVGGPVGTVVGAVQGWHLILL

SEQ ID NO: 1971 - DNA, 102 bp, Streptococcus agalactiae
atggaattcaatgcggaatcctcaacagtcttttgtggactaacagaagttcaggatgtcgtttcggcaggccttaactattctcagaaggttttggaaatt

SEQ ID NO: 1972 - protein, 34 aa, Streptococcus agalactiae
MEFNAESSTVFCGLTEVQDVVSAGLNYSQKVLEI

SEQ ID NO: 1973 - DNA, 531 bp, Streptococcus agalactiae
atgggaaatgataatgtaactataaaactagaacatcgggttaaaacatcagcagatttatcagattatgtatacaaatatgagagggcttatacagatgctttaaataatggtgatgacataaaagaagcaagtgaaagtactaaaaaagagttaaatcaactaattgatagaactgatttaacttatagtgacggtatgtatgacaaagagactggtattgcagctattgctgtaaaagataaaaatactggtgagacttatatagcttatgcgggtactaataaggatgctgatggggcaaccgactttatttcagatgcaaatatcggtgctaataactctgcttatttaaaacgattaggagacaaagctactagcttttatgatcgtgttcaaagtaatggcgataatattactgtcacaacaggtcattcttatggtgactttctcgcttctagagtggcaattgagctaattccattctttattaactttagaaaagttaatgattcatttcacttttgttat

SEQ ID NO: 1974 - protein, 177 aa, Streptococcus agalactiae
MGNDNVTIKLEHRVKTSADLSDYVYKYERAYTDALNNGDDIKEASESTKKELNQLIDRTDLTYSDGMYDKETGIAAIAVKDKNTGETYIAYAGTNKDADGATDFISDANIGANNSAYLKRLGDKATSFYDRVQSNGDNITVTTGHSYGDFLASRVAIELIPFFINFRKVNDSFHFCY

SEQ ID NO: 1975 - DNA, 144 bp, Streptococcus agalactiae
atgagagataaatttaaaatatctgatattaaggaagcagatattacttttacaaaaagtggaaaaaataattttgactatacactaaggataaaaactaaaaacaagagatactatttgggtgagacctatagttttagaaaa

SEQ ID NO: 1976 - protein, 48 aa, Streptococcus agalactiae
MRDKFKISDIKEADITFTKSGKNNFDYTLRIKTKNKRYYLGETYSFRK

SEQ ID NO: 1977 - DNA, 549 bp, Streptococcus agalactiae
atgaaaaaacaaaaactattactgcttattggaggcttattaataatgataatgatgacagcatgtaaggattcaaaaatcccagaaaaccgcacaaaggaagagtaccaagctgaacaaaattttaaaccgttttttgagtttttagcacaaaaagataaagatttgagcaaaatacaaaaatacttactattagtatcggattcaggtgatgcattagatttagaatatttctatagtattcaagatttaaaaaaaaataaggatttagggaagtttgaaacaagaaaaagtcaaatagaaaagccgggtggctataatgagttagaaaataaagaggtcccatttgaatattttaaaaataatatagtttatccaaaaggaaaaccgaatattacatttgatgactttattatcggagcaatggatactaaagaattaaaagaattaaaaaaattaaaagtaaaaagttatttattaaaacatccggaaactgagttgaaagatataacatatgaattgccgacacagtcgaagcttattaaaaaa

SEQ ID NO: 1978 - protein, 183 aa, Streptococcus agalactiae
MKKQKLLLLIGGLLIMIMMTACKDSKIPENRTKEEYQAEQNFKPFFEFLAQKDKDLSKIQKYLLLVSDSGDALDLEYFYSIQDLKKNKDLGKFETRKSQIEKPGGYNELENKEVPFEYFKNNIVYPKGKPNITFDDFIIGAMDTKELKELKKLKVKSYLLKHPETELKDITYELPTQSKLIKK

SEQ ID NO: 1979 - DNA, 447 bp, Streptococcus agalactiae
ttgacagaacaacaaattgaatatatcaataatcgaagtgaaatagcagggcatttagaagctattgtttcagaaatctatttaatagaagaatctggtaaaatagaatcatggtttgttactattcctgatatgaatagttttgtggcagaaacaaatatggatagagaacagattttattcttacttgactcggctcacaaatatcatatttatttcttatttggtggtttagcatcataccttatgactaatatctcagatgttccaaaagctattagaacacaggcacagtatgttctcttaggaatgagagttatggatcagtcagtattaccgaaatcatataattcaaaagaaccttatttgaaaccagatatgatttatattcatgatagaagacaagaaagaatgcttaaaatcactcaagaaatagaaatggagcat

SEQ ID NO: 1980 - protein, 149 aa, Streptococcus agalactiae
MTEQQIEYINNRSEIAGHLEAIVSEIYLIEESGKIESWFVTIPDMNSFVAETNMDREQILFLLDSAHKYHIYFLFGGLASYLMTNISDVPKAIRTQAQYVLLGMRVMDQSVLPKSYNSKEPYLKPDMIYIHDRRQERMLKITQEIEMEH

SEQ ID NO: 1981 - DNA, 258 bp, Streptococcus agalactiae
atgggtaatggtggcgattggaaaaataagccgggctatcaaaccacacacgaggcaaaaacaggctacgccatctcatttagccccggccaagctggtgctgatagaacttacggccacgtggccatcgtcgaagacgttaaggaagacggatctatcccgatctccgaatcaaatgtcctaggacttggcaccatctcctaccgcaccttcagtgcagcagaagcagcacaattgacttatgtagttggggagaag

SEQ ID NO: 1982 - protein, 86 aa, Streptococcus agalactiae
MGNGGDWKNKPGYQTTHEAKTGYAISFSPGQAGADRTYGHVAIVEDVKEDGSIPISESNVLGLGTISYRTFSAAEAAQLTYVVGEK

SEQ ID NO: 1983 - DNA, 1623 bp, Streptococcus pyogenes
atgaagaaaaggaaattgttagcagtaacactattaagtaccatactcttaaacagtgcagtgccattagttgttgctgatacctccttgcgtaatagcacatcatccactgatcagcctactacagcagatactgatacggatgacgagagtgaaacaccaaaaaaagacaaaaaaagcaaggaaacagcgtcgcagcacgacacccaaaaagaccataagccatcacacactcacccaacccccccttcaaatgatactaagcagaccgatcaggcatcatctgaagctactgacaaaccaaataaagacaaaaacgacaccaagcaaccagacagcagtgatcaatccaccccatctcccaaagaccagtcgtctcaaaaagagtcacaaaacaaagacggccgacctaccccatcacctgatcagcaaaaagatcagacacctgataaaacaccagaaaaatcagctgataaaacccctgaaaaaggaccagaaaaagcaactgataaaacaccagagccaaatcgtgacgctccaaaacccatccaacctcctttagcagctgctcctgtctttataccttggagagaaagtgacaaagacctgagcaagctaaaaccaagcagtcgctcatcagcggcttacgtgagacactggacaggtgactctgcctacactcacaacctgttgtcacgccgttatgggattactgctgaacagctagatggttttttgaacagtctaggtattcactatgataaagaacgcttaaacggaaagcgtttattagaatgggaaaaactaacaggactagacgttcgagctatcgtagctattgcaatggcagaaagctcactaggtactcagggagttgctaaagaaaaaggagccaatatgtttggttatggcgcctttgacttcaacccaaacaatgccaaaaaatacagcgatgaggttgctattcgtcacatggtagaagacaccatcattgccaacaaaaaccaaacctttgaaagacaagacctcaaagcaaaaaaatggtcactaggccagttggataccttgattgatggtggggtttactttacagatacaagtggcagtgggcaaagacgagcagatatcatgaccaaactagaccaatggatagatgatcatggaagcacacctgagattccagaacatctcaagataacttccgggacacaatttagcgaagtgcccgtaggttataaaagaagtcagccacaaaacgttttgacctacaagtcagagacctacagctttggccaatgcacttggtacgcctataatcgtgtcaaagagctaggttatcaagtcgacaggtacatgggtaacggtggcgactggcagcgcaagccaggttttgtgaccacccataaacctaaagtgggctatgtcgtctcatttgcaccaggccaagcaggagcagatgcaacctatggtcacgttgctgttgtagagcaaatcaaagaagatggttctatcttaatttcagagtcaaatgttatgggactaggcaccatttcctatcggacgttcacagctgagcaggctagtttgttgacctatgtcgtaggggacaaactcccaagacca

SEQ ID NO: 1984 - protein, 541 aa, Streptococcus pyogenes
MKKRKLLAVTLLSTILLNSAVPLVVADTSLRNSTSSTDQPTTADTDTDDESETPKKDKKSKETASQHDTQKDHKPSHTHPTPPSNDTKQTDQASSEATDKPNKDKNDTKQPDSSDQSTPSPKDQSSQKESQNKDGRPTPSPDQQKDQTPDKTPEKSADKTPEKGPEKATDKTPEPNRDAPKPIQPPLAAAPVFIPWRESDKDLSKLKPSSRSSAAYVRHWTGDSAYTHNLLSRRYGITAEQLDGFLNSLGIHYDKERLNGKRLLEWEKLTGLDVRAIVAIAMAESSLGTQGVAKEKGANMFGYGAFDFNPNNAKKYSDEVAIRHMVEDTIIANKNQTFERQDLKAKKWSLGQLDTLIDGGVYFTDTSGSGQRRADIMTKLDQWIDDHGSTPEIPEHLKITSGTQFSEVPVGYKRSQPQNVLTYKSETYSFGQCTWYAYNRVKELGYQVDRYMGNGGDWQRKPGFVTTHKPKVGYVVSFAPGQAGADATYGHVAVVEQIKEDGSILISESNVMGLGTISYRTFTAEQASLLTYVVGDKLPRP

SEQ ID NO: 1985 - DNA, 807 bp, Streptococcus agalactiae
gtggtgccaagccaacctcaagtgacagcaacacctcagaaatctgaagttgtgacaccagccattacgagtggcattgatttgccagatgttgccatacctacggcaatggctagcgcagcttatgtcaaacactggataggcaatgatgcttatacacacaatctattgtctcaccgttacggcattactgccgcacagcttgatggattcttacagtcgacaggtatcacatacgatagcagtcgcatcgacggtcaaaaaatcttagaccgagagaaatcatctggtctggatgcgcgtgcaatcattgccattgctatcgcagaaagttcgcttggtacacaaggcgttgccacagcaccaggtgctaatatgtttggttttggggcagttgacaacaatacaactaacgctcaaaactttagtgatgacaaggctgtcattaaaatgacgcaggaaaccatcatccaaaaccaaaacaccagctttgccattcaagaccaaaaagcacaattcttgtcaactggcaacttgaatgtagcggctcgaggtggggtttacttcacggatgctagcggttctggtaaacgtcgtgcggccattatggagagcattgacaagtggattgacgcgcatggcggaatttctgagatttcaaaggaactgctcaacacgtcgtccgtcgctatgatggcagtcccaacgagttactctgtttcaagagctaatcaagcgggcaactatgtggcaggcacttacccttggggccaaagaacttggctaccagtttggaccatttatggg

SEQ ID NO: 1986 - protein, 269 aa, Streptococcus agalactiae
MVPSQPQVTATPQKSEVVTPAITSGIDLPDVAIPTAMASAAYVKHWIGNDAYTHNLLSHRYGITAAQLDGFLQSTGITYDSSRIDGQKILDREKSSGLDARAIIAIAIAESSLGTQGVATAPGANMFGFGAVDNNTTNAQNFSDDKAVIKMTQETIIQNQNTSFAIQDQKAQFLSTGNLNVAARGGVYFTDASGSGKRRAAIMESIDKWIDAHGGISEISKELLNTSSVAMMAVPTSYSVSRANQAGNYVAGTYPWGQRTWLPVWTIYG

SEQ ID NO: 1987 - DNA, 1509 bp, Streptococcus pyogenes
atgaataaaaacaaactattaagagttgccatgctactaagtctcttagccccgacagcagaaagcatgacagtgctggctcaagatgtaatgcttgagacgcataaagcaactacaaatgaaaccagtgattcttcttcaaaagaggaaaataataaaaatgcagcacctacaacatcagataaaactgaccaaggtccccttgatgcttctgcagaaacaaactctaatagtcttgttaacgcggatgataaaaaaagaagcgattctagtcagtctgctataggctcttcggacaacaaggcagaagcagaaaaccaggtagatgataaatcaactgatcattcgaaatcaactgatcattcgaaaccaactgaccagcccaaaccatcaccatctaaagttgatacggcacctgcttcttcattgtcgaaacaactgccagaggcaagaactcctattcagtcgttgtccccttacgtatcagatttagatttgagtgagatagatatcccttctgtcaacacatacgcggcatatgtagagcattggagtggtaaaaatgcctatacccaccatcttttatctcgccgttatggtattaaagctgaccagattgatagttacttaaaatcaacaggcattgcctatgacagcacacgtattaatggtgagaagctattgcaatgggaaaagaaaagtgggctggatgttcgagctatcgtagctattgcgatgtctgagagttctttaggaactcaagggattgcaactttgcttggagctaatatgtttggctatgcagcttttgatctagatccgactcaagcaagtaagtttaatgatgatagtgctattgtcaaaatgacacaagacaccattattaaaaacaaaaatagcaattttgcacttcaagatttaaaagcggctaagttttcacgaggtcaattaaactttgcaagtgacgggggtgtttattttactgatactactggtagtggtaaacgtcgcgcacaaattatggaagacctggataagtggattgatgaccatggtggcacaccagccattccagccgaattgaaagtgcagtcatcagctagttttgcatctgtgccagcaggttataagctctctaagagttatgatgtcttgggttatcaagcttcgagttatgcttggggacaatgcacttggtatgtgtataatcgcgccaaagaattgggttaccaatttgatccttttatgggaaatggtggagattggaagtataaagtagggtatgccctttcaaagactccaaaagtaggttatgctatttcatttgcaccagggcaagcgggcgctgatggcacttatggccacgtatcaattgtagaagatgttagaaaagatgggtctattcttatttcagagtctaactgtatcggcttaggtaagatttcttatcgtacctttacagctcagcaggctgaacagctaacatatgttattggcaagagtaaaaac

SEQ ID NO: 1988 - protein, 503 aa, Streptococcus pyogenes
MNKNKLLRVAMLLSLLAPTAESMTVLAQDVMLETHKATTNETSDSSSKEENNKNAAPTTSDKTDQGPLDASAETNSNSLVNADDKKRSDSSQSAIGSSDNKAEAENQVDDKSTDHSKSTDHSKPTDQPKPSPSKVDTAPASSLSKQLPEARTPIQSLSPYVSDLDLSEIDIPSVNTYAAYVEHWSGKNAYTHHLLSRRYGIKADQIDSYLKSTGIAYDSTRINGEKLLQWEKKSGLDVRAIVAIAMSESSLGTQGIATLLGANMFGYAAFDLDPTQASKFNDDSAIVKMTQDTIIKNKNSNFALQDLKAAKFSRGQLNFASDGGVYFTDTTGSGKRRAQIMEDLDKWIDDHGGTPAIPAELKVQSSASFASVPAGYKLSKSYDVLGYQASSYAWGQCTWYVYNRAKELGYQFDPFMGNGGDWKYKVGYALSKTPKVGYAISFAPGQAGADGTYGHVSIVEDVRKDGSILISESNCIGLGKISYRTFTAQQAEQLTYVIGKSKN

SEQ ID NO: 1989 - DNA, 426 bp, Streptococcus agalactiae
ttgaaaaaagataaatatattgcattgtgtttgttgtgtgcaattgccacgtcaaacttatcggctgttacggtttttgctcaggatgcacaaactattttgacgcaagctacgactgtaactgatcaaacaattgaaaaagctggagaaaattcatcagctgaggcgacaagcgcttctgagtcagtttcatcagaagcgacgacagtggtacctgaggcaagtctgccttcaactgatctccatgcccaaccagcagatagcaaaacagctcctactgagactgtaattgagggacaaacagaaactaatccgacgactagtccagataaacagttccttcaacaagtgattccaaaggagaaacacaggctgggacgcaaacagatacaagcaaacccgaaactccagctcctagtcagtctg

SEQ ID NO: 1990 - protein, 142 aa, Streptococcus agalactiae
MKKDKYIALCLLCAIATSNLSAVTVFAQDAQTILTQATTVTDQTIEKAGENSSAEATSASESVSSEATTVVPEASLPSTDLHAQPADSKTAPTETVIEGQTETNPTTSPDKQFLQQVIPKEKHRLGRKQIQANPKLQLLVSL

SEQ ID NO: 1991 - DNA, 252 bp, Streptococcus agalactiae
atggataaaatacatactctaggaagtgtcattgaattaaaaaatgatagtcagaaagtcatgattacatcaagatttccgttatatgacaatgaaggtcaattgggatattttgattattctggatgtattttcccaattagtatagttggaaatgaaacttattttttcaatttggaagatatagataaagtcttgtttgaaggttactatgatgaaaatgaagaggagatgcaaaaaatatttttgaaa

SEQ ID NO: 1992 - protein, 84 aa, Streptococcus agalactiae
MDKIHTLGSVIELKNDSQKVMITSRFPLYDNEGQLGYFDYSGCIFPISIVGNETYFFNLEDIDKVLFEGYYDENEEEMQKIFLK

SEQ ID NO: 1993 - DNA, 588 bp, Streptococcus agalactiae
ttgatacatagagagaaatcatatgcagaaatatatcatgacggaaatcaaggttattattataattttgatacaaaaattttttacattaaaagttttgaaacgcctaattatcaaaaagaaaatttagaaaatattaaaaaatattctagtattattacgtttcttgttctcatactcattcctattaataattggtatagaacaatagctaatttaaagttgaatttaattcttgcaataatgtttatcgtaattgcactagtagtagttaacaaattaaacaatatagtttcgaaacaaaagagaaatatcgataatattagttacgagaaaatggaatttgacaaagaaaaaatagcaaatataattgtttctgctgaagaattgtcgaataaactgttatttttattagtaatttcattatttatatccctactcctaataatgttatattttaaatactcagtattgatattttttcctatagcacttatgttactaatattatcaagattgttattagaaaatattgatttttttgaaagaaaaaatgcaataaatgaaataaaaaagcaatataatttt

SEQ ID NO: 1994 - protein, 196 aa, Streptococcus agalactiae
MIHREKSYAEIYHDGNQGYYYNFDTKIFYIKSFETPNYQKENLENIKKYSSIITFLVLILIPINNWYRTIANLKLNLILAIMFIVIALVVVNKLNNIVSKQKRNIDNISYEKMEFDKEKIANIIVSAEELSNKLLFLLVISLFISLLLIMLYFKYSVLIFFPIALMLLILSRLLLENIDFFERKNAINEIKKQYNF

SEQ ID NO: 1995 - DNA, 303 bp, Streptococcus agalactiae
atgaagacaggagcacccgtaataattggtagtgctgcaaaagttgtaggaacggctgcgggtaccgcaacagctggactattaatttcaacaggtgtacttgcaccgcctgctcctgttgttggttctgctgtggactttggtgctacagcagtaataggtgtaggtggatcgatggtgttcgattatgtttatgataataaagatgaaataaatcatattataaaaagagcatcgaaggatacaattaacaatgttagtgatttttttgaattaatgtatgattcaacaggtagtataaat

SEQ ID NO: 1996 - protein, 101 aa, Streptococcus agalactiae
MKTGAPVIIGSAAKVVGTAAGTATAGLLISTGVLAPPAPVVGSAVDFGATAVIGVGGSMVFDYVYDNKDEINHIIKRASKDTINNVSDFFELMYDSTGSIN

SEQ ID NO: 1997 - DNA, 912 bp, Streptococcus agalactiae
atggtaaaagttagtgtaagttctgtaggaactcaagcatcaacagtagctatttctatgtttagtcgtgtatcggctttaaatgatgcaataacaaaactatcatcttttgcagaggctgcaactcttcaagggactgcttattcaaatgcaaaaagctatgctactggaacgttaactccgatgcttcaaggaatgattcttttctctgaaacattgagtgagaaatgtacagaattacaaaccttatatgtctcaatttgtggtgatgaggatttagactctgtcgttttagaatcaaaattagcaagtgatagggcatcattaaagattgctgaagcacttttagagcatcttaacgatgatccagaaccttccaaatctgccataagttctacaaaaagtaatattaaaaaattaaaaaaacgtataaaatctaatcaaaagaaattagacaaccttaatgaatttaacgcccattcagcaacagtatttgcggacatttctaatgcacagtcaactgttaaccaagcactagcggctgtttcaacaggattttctggatataatagtaaaaccggagcttttggaaaaccaacatccggacagatggaatggacaaagacagttaagaagaattggaaagagcgagaagacgccaaagctgaagaactgaaaagtaaaaaggctgaagaaagtaagaaagcttcaaaaattgaaaatactactaaaaaaagtaatgtttcagttgataaaaagaaattaataaaagcggctaatgaagcgtataaattaggagaaattaaaaaagatacctatgaatcaattatcagtggtttaagtaatgcatcggctgccttacttaaagaggtagctaaatcaaaattgactgacacagctcggctattgatg

SEQ ID NO: 1998 - protein, 304 aa, Streptococcus agalactiae
MVKVSVSSVGTQASTVAISMFSRVSALNDAITKLSSFAEAATLQGTAYSNAKSYATGTLTPMLQGMILFSETLSEKCTELQTLYVSICGDEDLDSVVLESKLASDRASLKIAEALLEHLNDDPEPSKSAISSTKSNIKKLKKRIKSNQKKLDNLNEFNAHSATVFADISNAQSTVNQALAAVSTGFSGYNSKTGAFGKPTSGQMEWTKTVKKNWKEREDAKAEELKSKKAEESKKASKIENTTKKSNVSVDKKKLIKAANEAYKLGEIKKDTYESIISGLSNASAALLKEVAKSKLTDTARLLM

SEQ ID NO: 1999 - DNA, 360 bp, Streptococcus agalactiae
atgactgaacgaacattcgaagatattgaacttgacttaaagttattccaaataaagcttgataatgctgagaatagtaaaaggctcttacaaaaattgaaaaacgacgtcatggagttacaaatagagttactagaatcattaaaactcggtgatgcctatttaacagaatcagaagaattagaagagaataatgactttattctaacggtaaatagtgaaacactaagtttagaagaatcctatgacaataggataaacttagtttctaaagagattatggattatgaaaatgcattagataagttgtattatgaaaaacagagtttgatgcaaaaaagtaatgaaagaaaaggaggt

SEQ ID NO: 2000 - protein, 120 aa, Streptococcus agalactiae
MTERTFEDIELDLKLFQIKLDNAENSKRLLQKLKNDVMELQIELLESLKLGDAYLTESEELEENNDFILTVNSETLSLEESYDNRINLVSKEIMDYENALDKLYYEKQSLMQKSNERKGG

SEQ ID NO: 2001 - DNA, 255 bp, Streptococcus agalactiae
atggcaaaaatacaaagtgatgcctccgtcgcatccacctgtgcaactgcaatacaatcaggagccagtggaatcacagcagtaggagctccaactaaggattcaaacagtgattatagtggtaatagcgatgcttcaacttacatcgatggagaggcaagtagtagtagccaaattgctgaaaaaataaatgagttcatagctctcattcattctacggtgaatgagtttgaagctattgaccaaaaaattagc

SEQ ID NO: 2002 - protein, 85 aa, Streptococcus agalactiae
MAKIQSDASVASTCATAIQSGASGITAVGAPTKDSNSDYSGNSDASTYIDGEASSSSQIAEKINEFIALIHSTVNEFEAIDQKIS

SEQ ID NO: 2003 - DNA, 3927 bp, Streptococcus agalactiae
atgaaattcaaatctgggggggctgattatgaaacatcattaactaagaaagttatgtcagcttatcaattttacgaaggctatcctgattttcaccgctcacctcgtattatttatcgttccagtgaagataaaattacagttaatgcgcctggtaatgaacctaataagtctaaagatgaactgttaaaattaattgttcctcctctagtgatgattggagtcagcattcttatttctatttttcgtcctcgtggtatctatatcattgcaacaatgtcaatggctctagtgacgatgattttctctatcactggttactttaaaaatcgtaaacagtataagcaggacttacaagaacgcattgattcctatcatgactatttatctgataagtcaattgaacttcagaagttagctaaagagcaaaagcgtgggcaacactatcattacccaacgattgaaggtttacaggaaatggctgatacttatcaccatcgtatttatgaaaagacaccacttcattttgacttcttgtattatcgcctaggtttgggagaagtaccaacgagctataatattcattattctcaaccagaacgttctgggaaaaaagatcctttagagaacgaaggctataacctctactttaacaatcgttatattaaaaatatgccgattgttgcgaatttatcacatggaccagttggctatataggaccacgaggtttagtattggagcaactccaattgatggttaatcaattagcttttttccattcttaccatgatgttcaatttattactattgttccagaggaagagatggataagtggtcttggatgcgttggttgccacatgaaaccttacaagatgtcaatgttcgtggctttgtttataatcaaagaagccgtgatcaagtgctcaacagtcttaaccaaattttaaaattacgtcgcacacaacgcgaagataaatctgccaaagaagggactttattttctccgcattatgtcgttattgtaactgatgaaaagttaattttagatcacgtcatcatggaattctttacggaagatcctacagaattgggatgttctctcatctttgttcaagatgttatgagttcactttcagaaaatatcaaaaccattattaatattaaagaccgtaatactggtcagttagttatagaagaaggagagcttaaagaaacagattttgaattagatcatttcttagaggattatgacaaggaaaatatttcacgtcgcctagctccgttaaatcacctacaaaatcttaaatcttcaataccagaagcagttacttttatggaaatgtatcaagcagaagaatttgaagatttgcatgttcaagagcgttggataagccatgctccgtataaaagctcagctgttccacttggcttacgtggtcaggatgatattgtttatctaaacctacatgaaaaagctcatggtcctcatggattagttgcaggaacaacgggatcagggaagtcagaaattatacagtcctatatcctttctttagctgttaatttccatccacacgatgtagctttccttctcatagactacaaaggtggggggatggcaaacctctttaaggacctgccacacttacttggcaccatcaccaacttagatggtgcccaatcgatgcgtgctttggtttctattaatgctgaattgaaacgtcgtcaacgtttatttgctaaagctgatgttaatcatattaaccagtatcagaagaaatacaaacttggagaagtttcagaaccaatgcctcatctcttcttaatctccgatgagtttgccgaattgaaatccaaccaacctgagtttatgaaagagcttgtctcaacagcgcgaattgggcgttccctagggattcacttaatcctagcgacccaaaaaccatctggtgtggtagatgaccaaatctggtcaaactcacgcttcaaactagctcttaaagtagcagaccgcggcgactccatggaaatgctccatactccagatgccgccgagattacacaagcaggacgtgcctacctccaagttggtaataatgaagtctatgaactcttccaatcagcatggtcaggagcagattaccaacctgaaaaagacgaccaagggattgaagaccataccatttattccatcaacgaccttggccaatacgaaatcctaaatgatgatctttcaggcttagaccaagccgaaaatattaaagaagtacctacggaattagatgctatcgttgaaaacattcaagctttaaccaaagaaatgggcatctcagacttacctcaaccgtggctaccgcctctaagcaatcagattgcagtaaccgatctccgtaaggagggatcagtagacctctggagcaaggccccatcttacaaagctgttcttggctttatggatataccaagccaacaagcacaagaagtggcttaccacgattttgaagacgatgggcatttgtcaatttttgcaggaccaagtatggggaaatccacagcccttcaaactgtaacaatggacttagcacgtcataatagtccagaatttttaaacctttacctctttgattttggtaccaatggcctcttacctctaagacgtttgccacatgtagcagatttctttaccattgatgatgacgaaaaaatagccaagtttattgcccgtatcaaagttgaaatgtctgatcgtaaaaaagccctcagtcgctacaatgtcgcgacagcaaaactttaccgtcaggtatctggggaaaccatgcctcaaatcctgattgttattgacagttatgaagggctacgggaagctcaaacaccgactaacttagaagcttgtttccaaaatatttcgcgtgatgggtcgtcacttggcatttccttagttatctcagctggtcgtacggcagctttgaggtcgtccttaatggcaaaccttaaagaacgtatcgctcttaaattaacagatgactctgaatcacggacacttgtcggtcgtcaccaacacatcatggaagatattccaggacgtggattaatcaaacgtgatgacattgaagtgttacaagtggctctctcaacagaaggcactgaaacctttgacatcatcaataacatccaaaacgaatctgacgccatgaacagcaaatggactggaccaagaccaaaagcaataccaattgttcccgaagaattaacctttgacgactttatggctacagatagtgttcaagctgacctatcagctaatcgtttaccacttgggcttgaaatggttgacgttgaaagttatagtttagcacttaatcgctttaagcatatgctttacatgtctgattctgacgagtcactcgaagcagttggttcccatatcatcaaggtcttgcttaacgtcccaaattaccataacatgatcatcgattcgcttggcgaatatgaaagctatcaaggtcaggtacgtacttatgtgggttctgatatgattgaagatatggcggatcagttgatctatgagttgcagcaacgtgaaagccaatctgagatagctgaatggtttatcatgattccagattttgaaagctttgtggctaagagcaatatgaagcttgaacaggttcaggcattgcttgacaatggaccacgctatggtttacatctgattcttggatcaagctataactatgttgggactaagatcgatgctgtgcctaaatacgttcgcacaacgacccagtatgtgctggctggcatgaggctcatggatcaaaccttccttgaaaaagtgtataatagtaaggaaatccgtccaaacaaagacgaagcctacattcacgatagaaaaacctatcaaaaattaaaactcaccatagac

SEQ ID NO: 2004 - protein, 1309 aa, Streptococcus agalactiae
MKFKSGGADYETSLTKKVMSAYQFYEGYPDFHRSPRIIYRSSEDKITVNAPGNEPNKSKDELLKLIVPPLVMIGVSILISIFRPRGIYIIATMSMALVTMIFSITGYFKNRKQYKQDLQERIDSYHDYLSDKSIELQKLAKEQKRGQHYHYPTIEGLQEMADTYHHRIYEKTPLHFDFLYYRLGLGEVPTSYNIHYSQPERSGKKDPLENEGYNLYFNNRYIKNMPIVANLSHGPVGYIGPRGLVLEQLQLMVNQLAFFHSYHDVQFITIVPEEEMDKWSWMRWLPHETLQDVNVRGFVYNQRSRDQVLNSLNQILKLRRTQREDKSAKEGTLFSPHYVVIVTDEKLILDHVIMEFFTEDPTELGCSLIFVQDVMSSLSENIKTIINIKDRNTGQLVIEEGELKETDFELDHFLEDYDKENISRRLAPLNHLQNLKSSIPEAVTFMEMYQAEEFEDLHVQERWISHAPYKSSAVPLGLRGQDDIVYLNLHEKAHGPHGLVAGTTGSGKSEIIQSYILSLAVNFHPHDVAFLLIDYKGGGMANLFKDLPHLLGTITNLDGAQSMRALVSINAELKRRQRLFAKADVNHINQYQKKYKLGEVSEPMPHLFLISDEFAELKSNQPEFMKELVSTARIGRSLGIHLILATQKPSGVVDDQIWSNSRFKLALKVADRGDSMEMLHTPDAAEITQAGRAYLQVGNNEVYELFQSAWSGADYQPEKDDQGIEDHTIYSINDLGQYEILNDDLSGLDQAENIKEVPTELDAIVENIQALTKEMGISDLPQPWLPPLSNQIAVTDLRKEGSVDLWSKAPSYKAVLGFMDIPSQQAQEVAYHDFEDDGHLSIFAGPSMGKSTALQTVTMDLARHNSPEFLNLYLFDFGTNGLLPLRRLPHVADFFTIDDDEKIAKFIARIKVEMSDRKKALSRYNVATAKLYRQVSGETMPQILIVIDSYEGLREAQTPTNLEACFQNISRDGSSLGISLVISAGRTAALRSSLMANLKERIALKLTDDSESRTLVGRHQHIMEDIPGRGLIKRDDIEVLQVALSTEGTETFDIINNIQNESDAMNSKWTGPRPKAIPIVPEELTFDDFMATDSVQADLSANRLPLGLEMVDVESYSLALNRFKHMLYMSDSDESLEAVGSHIIKVLLNVPNYHNMIIDSLGEYESYQGQVRTYVGSDMIEDMADQLIYELQQRESQSEIAEWFIMIPDFESFVAKSNMKLEQVQALLDNGPRYGLHLILGSSYNYVGTKIDAVPKYVRTTTQYVLAGMRLMDQTFLEKVYNSKEIRPNKDEAYIHDRKTYQKLKLTID

SEQ ID NO: 2005 - DNA, 93 bp, Streptococcus agalactiae
gtgcagcagttacctttaagtttaggtgatgagattagcttccaaggaacaattgttaagcttttcccagatgaaattcaaatctgggggggc

SEQ ID NO: 2006 - protein, 31 aa, Streptococcus agalactiae
MQQLPLSLGDEISFQGTIVKLFPDEIQIWGG

SEQ ID NO: 2007 - DNA, 126 bp, Streptococcus agalactiae
atgaaatttactgacaaagacaaagccttatctaaatccaagacattcaaggctaatcgtaatttttcagataaagtttcttttttaaagctttcaaaaaatagagcgtgcgcttctgtctggaat

SEQ ID NO: 2008 - protein, 42 aa, Streptococcus agalactiae
MKFTDKDKALSKSKTFKANRNFSDKVSFLKLSKNRACASVWN

SEQ ID NO: 2009 - DNA, 1272 bp, Streptococcus agalactiae
atggaaacagattcgtttgtatttgaagaacaagactttcaatttgaaaaaggaccagatttttggcagttatctcttaagcgttcaaaagtaggaactcaaaatctgcaacaactgcaattgttagaaattcaccattctttgttgatgcctatgacaactgcaattgatgcagataccattcaatttcaattccagacagaagcgcacgctctattttttgaaagctttaaaaaagaaactttatctgaaaaattacgattagccttgaatgtcttggatttagataaggctttgtctttgtcagtaaatttcattttgcatccctctaatctatttttaacaaaaaatgcaactgctaaaatagcttatcgtagccttcctgggattatgagacctgagaaatttggtccagaagagtttttatatcaattcaaatgttttgtctttgcattattgacgcaacatgactatatagagttgtataatggtgctatttctgttattgaagtatcagatttcctaaaaagcatttatcatgcagaaactattcaggctgttagagacatcattactattgattatgagcagcaagtagaagtagaaactcatacgttagcaaaagtatcaagggcaaaatataagctttataaatacataagtgtttggctaggagctttatctacaatactcttgattccgctagtatatctggtttttattcacaatccattcaaagaaaaaatgttggcagcggatacttcatttattaaagttgattataatcaagtgattaatcgactagaacatgtaaaagtaagtaagttaccttatacacagaagtacgagttggcctattcctatattaatggaatgtcattttctgaagaacagcgtgaagttattttaaacaatgttacgctcaagactgatgagctctatcttgattattggattaatattggccgtggtttagatgatgatgctattgatgctgccaaacgtttagacgattctgaccttgttatttatgctattgttcagaaaatggatcaggttagaaaagacaatagtttatctggtaaagatcgtgaacaaaaactttctgagctacaaacagactatgataaatattggaaagaccgtaagacagccttaacagatgaggaatccaaatcgaaaaatagcaataatcattcgacaaattccaacaaagagtcatctgaatcatcaagtactacagcaagtacatcttctaaaactaaaagtagg

SEQ ID NO: 2010 - protein, 424 aa, Streptococcus agalactiae
METDSFVFEEQDFQFEKGPDFWQLSLKRSKVGTQNLQQLQLLEIHHSLLMPMTTAIDADTIQFQFQTEAHALFFESFKKETLSEKLRLALNVLDLDKALSLSVNFILHPSNLFLTKNATAKIAYRSLPGIMRPEKFGPEEFLYQFKCFVFALLTQHDYIELYNGAISVIEVSDFLKSIYHAETIQAVRDIITIDYEQQVEVETHTLAKVSRAKYKLYKYISVWLGALSTILLIPLVYLVFIHNPFKEKMLAADTSFIKVDYNQVINRLEHVKVSKLPYTQKYELAYSYINGMSFSEEQREVILNNVTLKTDELYLDYWINIGRGLDDDAIDAAKRLDDSDLVIYAIVQKMDQVRKDNSLSGKDREQKLSELQTDYDKYWKDRKTALTDEESKSKNSNNHSTNSNKESSESSSTTASTSSKTKSR

SEQ ID NO: 2011 - DNA, 483 bp, Streptococcus agalactiae
gtgaggttgttgatgaagttgaaacgatttttagcctgtctactaatattatcctgtatgagtcaaacatcagtattttctgatgggttaaagaataatgatattcattttgatacaaaacgtttagaatcagattcacaaaaaaattctggttttcaaactgaattaactaaagatttatttaaaaaagaagaccttaaaaaattggataaaaaccgtcaatctaaagtctcactccagaaaaagcagtctaagcaactgtttcaatattcaaataaaggacaatctgataggaaaaaacgtatcaaacaattattttctgaagaaagtaatcaatttaaatttgttacaagaacagaagaaccgactgtttcggctgatattggtcatataattatatacctggttctcattagtttggtactaatattagcttctataatgacttttaaaataaaggacaaaaaggatgaatacacatat

SEQ ID NO: 2012 - protein, 161 aa, Streptococcus agalactiae
MRLLMKLKRFLACLLILSCMSQTSVFSDGLKNNDIHFDTKRLESDSQKNSGFQTELTKDLFKKEDLKKLDKNRQSKVSLQKKQSKQLFQYSNKGQSDRKKRIKQLFSEESNQFKFVTRTEEPTVSADIGHIIIYLVLISLVLILASIMTFKIKDKKDEYTY

SEQ ID NO: 2013 - DNA, 126 bp, Streptococcus agalactiae
atgttatcagaagcttctaaagattttttcagtgattcgttagcagtaatggaactactagactggttaacgagggctggaaagatattttggaaattagttgcagaatctaaaagatttttttgg

SEQ ID NO: 2014 - protein, 42 aa, Streptococcus agalactiae
MLSEASKDFFSDSLAVMELLDWLTRAGKIFWKLVAESKRFFW

SEQ ID NO: 2015 - DNA, 3042 bp, Streptococcus agalactiae
ttgttgaaaataaaatatattttaggaagaattatgaaaagaaataactttagaatactttggtatattatagctgttgctctctttttagtagctattgctggccttaatcttaagcttcaaggcgatcatgcaaaagagaataaaacaacacagtcagctactaacactaaactaaatatagcattagtcaacgaagatcaaaatgtatctaatggtaaagaaagttataatttaggagctagttatattaagtctatcgaacgtgataatagtcaaaattggtcagttgttagtcgaggtactgctcaaaatggattagacaaaggtgattatcaattaatggttatcatccctaataacttttctcaaaaacttcttgatgtcaataaagcaaatgcagagcaaacaactatctcttataaggttaatgccaaggggaatttagcattagagaaaaaggcaactgaaaaagagaaagatattgtttcagagttaaatagccacttagtaaatatgtacatggcaagtattttaagtaacttatatacagctcaagaaaatgtacaggccatggtaaatgttcagtcaggtaatatctcaaattaccaaaaaaatcttttagattctgcaactaatttccaaaatatctttccagccctcgttaaccagtctagtagttccattactgctaacgaatcactgaaaaaatctttagaagcttctgataacatgtttaatgatttggtgacaacccagacaaatactggaaaagatttatcaagcttaatagaacagcgccatcaagatagcatttcgtatgaagcgttttcgacctcattactagaaatgaataacgagttattagagaagcaattatctgatattatcacacaagcacaaaaagaccaagaaacattatcatcacaactcaatagtattatgggtgatgataacaatcataatcataaagaaaactcatcagcttatctaaatgttgcaaggcaaaaaatccaagaactatctgaagcactcaagtcacaagataacattgctaaagatcaaagtgaacaactagataaaattgttagagagggactagcaagttactttgctaagaataataaagataatattactttattagaattattgaagagtcattctactaatgagaagactttgaaagattttaaagctaaggtagcagatttcacaaattctctcatttcaagcattccttcactaaacctttcggagttgcacttaacccaagaagaagaaaaagccattcagtttacatcttctgattcggaaatcattaaaaaagtaagcaacgaaagaactctgtatttaaatactaatttattgaatcgtctttttgaagctaggaaaaatagagatgaagctaaaaataaagttaatcaattaaaattgtcatctagttctactcgaactggtgagcagatagtttctgttgaatcaaataatccagattacagggtagatacctggacggttaatggtaagcaaacaagaaccttggaccccagccaaaacaataatattattatcaatagcagttatcaaagggaatcatctaactctagtattacgaaaccaagctatacaatcactatcgggaatcagaaacaaattgtacaaaatgatgacggtaaaatccaacggtcttactttgaggcagaggcaacgtatcaacgaactctacaagaagtaaatgatgcatataacaccactcacggattagtagctaaatactacattatttctgatggcgaagaaccgcaaaatttatttgatcaatttttaaatcaaagtgttaacgatacgatggttgatctggtcaaaaatggtataactaagtatttgatggatgaaaacactgctgatgcgcaacagaaagttaaagatgtcatggaggaagttgaaaatagtcaagatgaattggcggatcaaatggcaaaagtaactgagacaaatgtacgactaacagatgcaatcaaaaaacagcttgaaacccttcaatcaattaacatgaaggtccaaaacatcacacaggatcaatctaaagtaaacgactcacagaaaacaactgatcaacaattatctgatttgaagaaccagctagatgggctaatgacctctgcagcgggcgtaaaagatatgtccaaatctaatagtcaagaggcggaccaagttaatcaaatattcacatcattcaataaagatgttcaagatgctaaaaattcgggcaacaaactttcgacggatgcaaccgatttaatggctaacttccaaaaagaattggccaataatggtgatttcgtagcttctttctctaaagtttttaatactgcttataaaaatggagtgccaaatgatattctccttaatttcttatcacgacctgtcgctgaatcagcgtctgcagttagggcaactgaaaatacttatcgcccattcacttggatactattattagaagttgttagcctatttacagcatatatctttgcgactcaaaaccttattaagaaattgacagataggtataatgtcaaccgctggcttcaaacagactttttaaatgtcattgtcatttcaggcctctctcttgttattggtttagcactgggagttatctcaagcagaagtcttcatgtcatgcctgaatatgtaccatcttggttcctagttatgactctgtttagttttttattaattcatagtcagtatttctttattaaaaattttaaagcagttggtatgggtttagctttgtttatgattattagttttgtgtatctatcaaatgccgtaggcacagtagcgactgttagtggacttccaaaattactaaaagctattaatccactatctatccttgaaaatcaattatcatcttattttgataatgtgacaactggatttattttccttatcttagtacttcttgtggatgttgcttttattatcatgaatatttttatcaccttaaattttgaagctaaagtaaaagag

SEQ ID NO: 2016 - protein, 1014 aa, Streptococcus agalactiae
MLKIKYILGRIMKRNNFRILWYIIAVALFLVAIAGLNLKLQGDHAKENKTTQSATNTKLNIALVNEDQNVSNGKESYNLGASYIKSIERDNSQNWSVVSRGTAQNGLDKGDYQLMVIIPNNFSQKLLDVNKANAEQTTISYKVNAKGNLALEKKATEKEKDIVSELNSHLVNMYMASILSNLYTAQENVQAMVNVQSGNISNYQKNLLDSATNFQNIFPALVNQSSSSITANESLKKSLEASDNMFNDLVTTQTNTGKDLSSLIEQRHQDSISYEAFSTSLLEMNNELLEKQLSDIITQAQKDQETLSSQLNSIMGDDNNHNHKENSSAYLNVARQKIQELSEALKSQDNIAKDQSEQLDKIVREGLASYFAKNNKDNITLLELLKSHSTNEKTLKDFKAKVADFTNSLISSIPSLNLSELHLTQEEEKAIQFTSSDSEIIKKVSNERTLYLNTNLLNRLFEARKNRDEAKNKVNQLKLSSSSTRTGEQIVSVESNNPDYRVDTWTVNGKQTRTLDPSQNNNIIINSSYQRESSNSSITKPSYTITIGNQKQIVQNDDGKIQRSYFEAEATYQRTLQEVNDAYNTTHGLVAKYYIISDGEEPQNLFDQFLNQSVNDTMVDLVKNGITKYLMDENTADAQQKVKDVMEEVENSQDELADQMAKVTETNVRLTDAIKKQLETLQSINMKVQNITQDQSKVNDSQKTTDQQLSDLKNQLDGLMTSAAGVKDMSKSNSQEADQVNQIFTSFNKDVQDAKNSGNKLSTDATDLMANFQKELANNGDFVASFSKVFNTAYKNGVPNDILLNFLSRPVAESASAVRATENTYRPFTWILLLEVVSLFTAYIFATQNLIKKLTDRYNVNRWLQTDFLNVIVISGLSLVIGLALGVISSRSLHVMPEYVPSWFLVMTLFSFLLIHSQYFFIKNFKAVGMGLALFMIISFVYLSNAVGTVATVSGLPKLLKAINPLSILENQLSSYFDNVTTGFIFLILVLLVDVAFIIMNIFITLNFEAKVKE

SEQ ID NO: 2017 - DNA, 2271 bp, Streptococcus pyogenes
atgttagaagaattgaaaacacttattaaaaatccaaaattaatgattacaatgattggtgtggccctagtgcctgccttatataatttatcctttctaggctcaatgtgggatccttatggtcgggtcaatgaccttcccattgctgttgttaatcatgataagcctgcaaagagagctgataagtcattgacaattgggaatgatatggtggacaagatgtctaaaagtaaagatttagagtatcattttgtctcagctaagcaagctcaagagggacttaaagaaggtgattattatatggttattactttacccgaagatctttctcaacgggcagcaaccttattaaatcccgaaccccaaaaattaactatccgttaccaaacgagtaaaggacatggaatggtcgctgctaagatgggggaaacagcgatggctaagctgaaagagtctgtttcgcaaaacattacgaagacttatacctcagcagtttttagcagtatgacagacctccaatcaggattaaaagaagcctcagctggaagtcaagcacttgcttcaggagcgaagactgctcaggcggggagtcaaacactttcgacgaacttagcagccttaacgggtgctagccaacagtttcaacaaggtactggtcgattgacatcaggtttgactacctatacagatggtgtcaaccaagtcaagaatgggttaggaacattatcaacggacatccccaattatctgaatggggtttctaggttatcccagggagcttctcagcttaatcagggtctttcacagttgacacaagcaacaacactttctgacgagaaagctaagggaattcaatccttaattgtaggactaccagtcctaaatcaaggcattcagcaactaaatacagagctatcaacattgcaaccccctaaccttaatgctgatgagttaggtaatagcttaggagctatcgctcaagctgccaaacaagtcattgctgaagagactgccgctcagaatgaagaattatcggctctccaagctactagcgtttaccaatcattaactgctgaacaacaaggagagttagctgcggccctcagtcaatctgataaaagtcagaccgtatctgcagcccaaactattttaagttctgttcaaactttgtcaacaagtttacagtctctctctcaagaagatcagtcaaaacagttggagcaacttaaggaagctgttgcacagattgctaatcaatccaatcaagctttgccgggagcaagttctgctttaactgaattatcaacgggattagcaaaggtaaatggtagcttaaatcaacaagttctaccaggaagtaatcaattgacaacaggattagcacaattaaacaggtataatactgccattggttctggggtaataaaactctcagaaggtgccaatgccttgtcatccaagtccggagaattactagatggtagccatcaattatcagaaggtgctactaaactagctgatggtagttctcaattgagtcagggtggtcatcaattaacgagcggattgactgaattatcaacaggattgtcaaccttaaatggttccttagccaaagcctctcagcagttatcgcttgtttctgtgactgataaaaatgctaaagctgtcgcaaaacctcttgtgttaaatgagaaagacaaagatggtgttaagacgaatgggatcgggatggcaccttatatgattgctgtttctctaatggttgtggccctttcaaccaacgtcatttttgctaattctttatctggtcgtccggtcaaagataaatgggattgggctaaacaaaaatttgttattaatggttttatttcgactatgggatccattgttctctacttagctattcaattattagggtttgaagcccgttatggtatggaaaccttaggatttattatgctaagtggttggacgtttatggctcttgtcacagctttggtcggttgggatgatcgatatggctcttttgcttctttggtcatgttattgcttcaggttggctcttcaggtggctcttaccccattgagttaagtggagcattcttccaaaagttacatcctttcttaccaatgacttatgtggtatctggtttacgacaaaccatttcattatcaggtcatattggagtagaagtgaaagtcttaactggtttcttactggcatttatggtattagcactactcatttatcgtcccaagaaaacagtc

SEQ ID NO: 2018 - protein, 757 aa, Streptococcus pyogenes
MLEELKTLIKNPKLMITMIGVALVPALYNLSFLGSMWDPYGRVNDLPIAVVNHDKPAKRADKSLTIGNDMVDKMSKSKDLEYHFVSAKQAQEGLKEGDYYMVITLPEDLSQRAATLLNPEPQKLTIRYQTSKGHGMVAAKMGETAMAKLKESVSQNITKTYTSAVFSSMTDLQSGLKEASAGSQALASGAKTAQAGSQTLSTNLAALTGASQQFQQGTGRLTSGLTTYTDGVNQVKNGLGTLSTDIPNYLNGVSRLSQGASQLNQGLSQLTQATTLSDEKAKGIQSLIVGLPVLNQGIQQLNTELSTLQPPNLNADELGNSLGAIAQAAKQVIAEETAAQNEELSALQATSVYQSLTAEQQGELAAALSQSDKSQTVSAAQTILSSVQTLSTSLQSLSQEDQSKQLEQLKEAVAQIANQSNQALPGASSALTELSTGLAKVNGSLNQQVLPGSNQLTTGLAQLNRYNTAIGSGVIKLSEGANALSSKSGELLDGSHQLSEGATKLADGSSQLSQGGHQLTSGLTELSTGLSTLNGSLAKASQQLSLVSVTDKNAKAVAKPLVLNEKDKDGVKTNGIGMAPYMIAVSLMVVALSTNVIFANSLSGRPVKDKWDWAKQKFVINGFISTMGSIVLYLAIQLLGFEARYGMETLGFIMLSGWTFMALVTALVGWDDRYGSFASLVMLLLQVGSSGGSYPIELSGAFFQKLHPFLPMTYVVSGLRQTISLSGHIGVEVKVLTGFLLAFMVLALLIYRPKKTV

SEQ ID NO: 2019 - DNA, 288 bp, Streptococcus agalactiae
atggcacaaattaaattaacaccagaagaacttcgctcatcagcacaaaagtacacagctggttctcaacaagtaacagaagttcttaatttgcttactcaagagcaagcagttattgacgaaaattgggatggatctacttttgattcttttgaagcacaattcaatgaattatctccaaaaattacagaatttgctcaattactcgaagatattaaccagcaattattaaaagttgcagatatcattgagcagacggatgcagatattgcttctcaaattagtgga

SEQ ID NO: 2020 - protein, 96 aa, Streptococcus agalactiae
MAQIKLTPEELRSSAQKYTAGSQQVTEVLNLLTQEQAVIDENWDGSTFDSFEAQFNELSPKITEFAQLLEDINQQLLKVADIIEQTDADIASQISG

SEQ ID NO: 2021 - DNA, 780 bp, Streptococcus agalactiae
atgattccagatagtagttttaaagtgctatcagatatggcatataatattgaaaaatccaaagcagaaagtaatggacaccttcaaattatagaaggtagtcaaattattgatttccatcaaaaacgctcttttatggtattagaggttaatgatgatatcaataatggtatgcaggctatggcatgtcagtctttggatgaaagtaatcatattgttatagcatattcaggaacgaacgcttttaataagaaagatatcttaacagatatcgattcagttgtattggggaagaacaataaattgctaacttgtccttcaagtattaccctgagagaggatggcatttctctgccttgtaaaaatccaagtcaaattacaacatctaaactatttgcacaaaaaattaagatgaactatcctgatgcaaccctctggttaacaggccattctctaggtggttatttggccatgattgtggcttcagaaatgagattatcagcgcgtgtttttaattcccctagtcccattaacaatatgtctgaagcagccacatcctatgtaatttcacatccagagaagtatcatagttaccgtattaataaagattacattggtaattttggtattaatagttcagatgataaattaggtatttctaaaagagtcaatgctaagaagcaacatggtttttataaaaagattttctttcacgaattgacacgatttcgattaaatcaacaaggacagattgttgatatagatgaaaataaacaggat

SEQ ID NO: 2022 - protein, 260 aa, Streptococcus agalactiae
MIPDSSFKVLSDMAYNIEKSKAESNGHLQIIEGSQIIDFHQKRSFMVLEVNDDINNGMQAMACQSLDESNHIVIAYSGTNAFNKKDILTDIDSVVLGKNNKLLTCPSSITLREDGISLPCKNPSQITTSKLFAQKIKMNYPDATLWLTGHSLGGYLAMIVASEMRLSARVFNSPSPINNMSEAATSYVISHPEKYHSYRINKDYIGNFGINSSDDKLGISKRVNAKKQHGFYKKIFFHELTRFRLNQQGQIVDIDENKQD

SEQ ID NO: 2023 - DNA, 3180 bp, Streptococcus agalactiae
atgccaaagcgcacagacatacgtaaaattatggttatcggttctggcccgattgtgattggacaagcagcagagtttgactattctggtacacaagcctgtctctctttaaaagaggagggataccaagttgttttggtcaattcgaatccagctactatcatgacagataaagatattgctgataaagtttatattgaacctattaccttggagtttgtcacaagaattctcaggaaggaaagacctgatgctctccttccaactcttggaggtcaaactggattgaatatggctatggctctatcaaaaaatggtatcctagaagaattgaatgttgaactattagggaccaaattatcagccattgataaagctgaagatcgtgatttatttaaacagttgatggaagaactcaatcaacctattccagaatctgagattgttaattcggtagaagaagctattcaatttgcagagcaaatcgggtatccattaattgttcgtcctgcctttactttaggaggtacaggtggaggcatgtgcgataatcaagaacaattggttgacatcacgacgaaggggttaaagttatcgcctgtgacacagtgccttattgaacgttcaattgctggctttaaagagattgaatacgaagttatgcgtgatgcagcagataacgctcttgttgtttgtaatatggagaattttgatcctgttggtatccatacaggggactctatagtttttgcacccgcacaaacgttatctgatgtggaaaatcagttattacgagatgcgagtttagatattataagagctttgaaaattgaaggaggatgcaatgttcaactagcccttgatccgaatagttttaaatactatgtcattgaagttaatccaagagtatcaagatcttctgctttagcttcaaaagctactggatatccaattgctaaattagcagctaagatagctgttggtttgacactagatgaggtaattaatcctattacaaaaacgacttacgctatgtttgaacctgctttagattacgtagtcgcaaaaatgccgagatttccttttgataaatttgaaagtggcgatagaaaattgggaacacagatgaaagctacaggcgaagtcatggcaataggacggaatatagaagaatctttgttgaaagcttgtcgttcactagaaataggtgtcgatcacattaaaatagcagatttagataatgtatcagatgatgttttattagaaaaaataagaaaggcagaagatgatcgcttattttatctagcagaagctttacgtagacattatagtattgaaaaattagcaagtttgactagcattgattctttcttccttgataagttaagagtgattgtagagttagaagatctattatctaaaaacagactggatatcaatattctcaaaaaggttaaaaataaaggtttttcagataaagctatagcgagtttatggcaaataaacgaagatcaagttcgtaacatgcgaaaagaagcaggaattcttccagtttataagatggttgatacatgtgcgtctgagtttgattcagcaacgccctacttttattcgacttatgccgtagaaaacgagtcattgatatcagataaagcctctattttggttttaggatcgggcccaatccgaattggacagggagttgaatttgattatgcaacggttcattctgttaaagccatcagagagtctggttttgaagcgattatcatgaactctaatccagagacggtctcaacggatttctctatttcagataagctttactttgaacctttgacttttgaagatgttatgaatgttattgacttagaaaaacctgaaggggtcatcttacaattcggtggtcagactgctattaatctagcaaaagatttaaacaaggcaggggttaaaatactaggcacacaattagaagatttggatcgtgctgaaaatagaaaacaatttgaagccactttacaagctctaaatatccctcaaccaccaggttttaccgccactacggaggaagaggcagttaatgcagcgcaaaagattggttatcccgtgttggttagaccatcatatgttcttggtggacgagctatgaagatagttgaaaacgaagaagatttacgtcattatatgacaaccgcggtaaaggcaagcccagatcatccagtgcttatagatgcataccttataggtaaagagtgtgaggttgatgctatatccgatggtcagaatatactgattcctggaataatggaacatatagagcgatctggtgttcattcaggagattccatggctgtatatcctcctcaaacattgtctgagaccattatcgaaactattgtagattatacaaaacgcttagcaattggattaaactgtatcggtatgatgaatattcagtttgtaatcaaggatcagaaagtatatgttattgaagttaatcctcgtgctagtagaacacttccattcttatcaaaagtaactcacattcctatggcccaagtagcaacaaaagttatcttaggagataaactctgcaattttacatatggttatgatctctatccagcttcagatatggtccacattaaagcccctgtctttagttttaccaaacttgctaaagtagatagtttattaggtcctgaaatgaaatcaacaggcgaagtgatgggatcagatattaatcttcagaaagccttgtataaagcctttgaagcagcatatctccatatgccagactatggtaacattgtttttacagtagatgatacagataaagaagaagctttagaacttgcaaaagtctatcaaagtattggttatcgtatttatgctacccaagggactgcaatttattttgatgctaatggtttagagacagttttagtaggtaagttaggagagaacgatcgaaatcatattcctgatttaattaaaaatggtaagattcaagcagttatcaacacagttggacaaaataacattgataaccatgatgctctcatcatcagacgttctgcaattgaacaaggagttcctctatttacatctttagatactgcacatgcaatgttcaaagttcttgaaagcagagcatttacattaaaagtactagat

SEQ ID NO: 2024 - protein, 1060 aa, Streptococcus agalactiae
MPKRTDIRKIMVIGSGPIVIGQAAEFDYSGTQACLSLKEEGYQVVLVNSNPATIMTDKDIADKVYIEPITLEFVTRILRKERPDALLPTLGGQTGLNMAMALSKNGILEELNVELLGTKLSAIDKAEDRDLFKQLMEELNQPIPESEIVNSVEEAIQFAEQIGYPLIVRPAFTLGGTGGGMCDNQEQLVDITTKGLKLSPVTQCLIERSIAGFKEIEYEVMRDAADNALVVCNMENFDPVGIHTGDSIVFAPAQTLSDVENQLLRDASLDIIRALKIEGGCNVQLALDPNSFKYYVIEVNPRVSRSSALASKATGYPIAKLAAKIAVGLTLDEVINPITKTTYAMFEPALDYVVAKMPRFPFDKFESGDRKLGTQMKATGEVMAIGRNIEESLLKACRSLEIGVDHIKIADLDNVSDDVLLEKIRKAEDDRLFYLAEALRRHYSIEKLASLTSIDSFFLDKLRVIVELEDLLSKNRLDINILKKVKNKGFSDKAIASLWQINEDQVRNMRKEAGILPVYKMVDTCASEFDSATPYFYSTYAVENESLISDKASILVLGSGPIRIGQGVEFDYATVHSVKAIRESGFEAIIMNSNPETVSTDFSISDKLYFEPLTFEDVMNVIDLEKPEGVILQFGGQTAINLAKDLNKAGVKILGTQLEDLDRAENRKQFEATLQALNIPQPPGFTATTEEEAVNAAQKIGYPVLVRPSYVLGGRAMKIVENEEDLRHYMTTAVKASPDHPVLIDAYLIGKECEVDAISDGQNILIPGIMEHIERSGVHSGDSMAVYPPQTLSETIIETIVDYTKRLAIGLNCIGMMNIQFVIKDQKVYVIEVNPRASRTLPFLSKVTHIPMAQVATKVILGDKLCNFTYGYDLYPASDMVHIKAPVFSFTKLAKVDSLLGPEMKSTGEVMGSDINLQKALYKAFEAAYLHMPDYGNIVFTVDDTDKEEALELAKVYQSIGYRIYATQGTAIYFDANGLETVLVGKLGENDRNHIPDLIKNGKIQAVINTVGQNNIDNHDALIIRRSAIEQGVPLFTSLDTAHAMFKVLESRAFTLKVLD

SEQ ID NO: 2025 - DNA, 3072 bp, Streptococcus pyogenes
ttggctctaaaagaagaaggctacaaagtcatacttgttaattcaaatcctgcaacgattatgacagataaagaaatcgctgataaggtatatattgagcctttgactcttgaatttgttaatcgtatcattcgaaaagaaaggccagatgccatactgccaaccttaggtggccaaacgggcctcaatatggcaatggcgttatctaaagctggtattcttgatgatttagagattgaattgttaggtactaagttatctgcgattgatcaggcagaagacagagaccttttcaaacaattaatgcaagaactagaccaacccattccagaatctacaattgttaaaacagttgatgaagctgttacatttgctagagatatcggttatccagtcattgtgcgcccagcttttactcttggtggaactggtggaggaatatgtagtagtgaagaagaactttgtgaaattactgaaaacggcctaaagttatcaccagtcacacagtgtttgattgaacgctcaattgctggcttcaaagaaattgaatacgaagtaatgcgagatagtgctgataacgcgctggttgtttgtaatatggaaaactttgatcccgtagggattcacacaggagattctattgtatttgcaccaacacagaccctttctgatattgaaaatcaaatgttacgtgatgctagtttaaaaataattcgagctctgaaaattgaaggtggctgtaacgtccagttagcactagatccttatagtttcaaatattatgttattgaagtaaatcctagagtgtctcgttcctctgcccttgcttcaaaagcaacaggttatcccattgccaaattggctgcaaagattgctgttggcctaacacttgatgaaatgattaaccctatcacaggcactacttacgctatgtttgaacctgcccttgattacgttgttgctaaaattccgcgttttccgtttgataaatttgaacatggtgaacgccaactgggaactcaaatgaaagcaacaggtgaagtcatggctattggccgtaatttggaagagtccttactaaaagcctgtcgttctttagaaattggtgtttgccataatgagatgacaagtttaagtaacattagtgatgaagagttagtgactaaagtgattaaagctcaagatgatcgacttttttacttgtcagaagcaatacgacgaggttatagtatcgaagaacttgagagcttgaccaagattgatttatttttcttggataaattacttcatattgttgaaatagagcaagaattacaaatgcatgttgaccatttggaaagcctcaaaaaagcaaagcgttatggattttcagatcaaaaaattgcagaaatttggcaaaaggatgaaagtgatatcagagcgatgagacattctcatagcctgtatcctgtctataaaatggtagatacttgtgcagctgaatttgatgctaaaaccccttatttttattcaacatatgagttggaaaatgaatctgttcagtcgaataaagaatcaattttagttttaggttcaggccctattcgtattggtcaaggggttgaatttgactacgcaacggttcattctgttaaagccatccaaaaagctggctatgaagccattatcatgaattcaaatccggagactgtatctacagatttttcggtatcagataaattatattttgaaccgttaacctttgaagacgtcatgaatgtgatagatttagagcagcctaagggagtaatagttcagtttggaggacaaactgctattaacttagcacaagcactttctgaggcgggtgttacaatattaggaacacaagtagaggatttggatagggctgaagacagagatttatttgaaaaggcgttgaaagagcttggaatcccacaaccacaaggtcaaacggcaactaatgaagaagaagctttagaggcagctaaaaaaattggttttccagtcttagttagaccttcttacgtacttggtggccgggctatggaaattgttgaaaacaaagaagatcttagagaatatataagaacagcggttaaagcaagtcctgaacatcctatcttagtggactcttatattttcggtaaggagtgtgaagtggatgccatttcagatggaaaatcagtcttaattcctggtattatggagcacatcgaaagagcaggtgttcattcaggagattcaatggcagtttatccgccacagcaattatctaagcaaattcaagaaacaatagctgagtatactaaacgtttagccattgggttaaattgtattggtatgatgaatgttcaatttgttattaaaaatgaacaagtttatgttattgaagtgaatccacgcgctagtcgtaccgtacctttcttatcaaaagtaacaggtattccgatggctcagattgctactaagttgattttaggtcaaacattaaaggatctaggatatgaagatggtctttatccccaaagtccactggtgcatatcaaagcgcctgtgttttcatttacaaagttggcacaggttgatagtcttttaggtcctgaaatgaaatcaactggagaagtaatgggttcggatactagtcttgaaaaagcactttataaagcgtttgaagccaataattctcatttatcagaatttggtcaaattgtctttactatagcagatgatagtaaggcagaagctctaagtctagcaagacgatttaaggcgattggctatcaaattatggctactcaaggtacagcagcttactttgctgagcaaggcttaagcgcgtgtttagttggaaaaattggtgatgctgccaatgacatcccgacactcgtgcgacatggtcacgttcaggcaattgttaatacagttggaattaaacgcacagctgataaagacggacagatgattagaagttcagctattgaacaaggagttcctttatttacagctttagataccgcaaaagctatgttaacggttttagaaagcagatgctttaacatcgaagcgata

SEQ ID NO: 2026 - protein, 1024 aa, Streptococcus pyogenes
LALKEEGYKVILVNSNPATIMTDKEIADKVYIEPLTLEFVNRIIRKERPDAILPTLGGQTGLNMAMALSKAGILDDLEIELLGTKLSAIDQAEDRDLFKQLMQELDQPIPESTIVKTVDEAVTFARDIGYPVIVRPAFTLGGTGGGICSSEEELCEITENGLKLSPVTQCLIERSIAGFKEIEYEVMRDSADNALVVCNMENFDPVGIHTGDSIVFAPTQTLSDIENQMLRDASLKIIRALKIEGGCNVQLALDPYSFKYYVIEVNPRVSRSSALASKATGYPIAKLAAKIAVGLTLDEMINPITGTTYAMFEPALDYVVAKIPRFPFDKFEHGERQLGTQMKATGEVMAIGRNLEESLLKACRSLEIGVCHNEMTSLSNISDEELVTKVIKAQDDRLFYLSEAIRRGYSIEELESLTKIDLFFLDKLLHIVEIEQELQMHVDHLESLKKAKRYGFSDQKIAEIWQKDESDIRAMRHSHSLYPVYKMVDTCAAEFDAKTPYFYSTYELENESVQSNKESILVLGSGPIRIGQGVEFDYATVHSVKAIQKAGYEAIIMNSNPETVSTDFSVSDKLYFEPLTFEDVMNVIDLEQPKGVIVQFGGQTAINLAQALSEAGVTILGTQVEDLDRAEDRDLFEKALKELGIPQPQGQTATNEEEALEAAKKIGFPVLVRPSYVLGGRAMEIVENKEDLREYIRTAVKASPEHPILVDSYIFGKECEVDAISDGKSVLIPGIMEHIERAGVHSGDSMAVYPPQQLSKQIQETIAEYTKRLAIGLNCIGMMNVQFVIKNEQVYVIEVNPRASRTVPFLSKVTGIPMAQIATKLILGQTLKDLGYEDGLYPQSPLVHIKAPVFSFTKLAQVDSLLGPEMKSTGEVMGSDTSLEKALYKAFEANNSHLSEFGQIVFTIADDSKAEALSLARRFKAIGYQIMATQGTAAYFAEQGLSACLVGKIGDAANDIPTLVRHGHVQAIVNTVGIKRTADKDGQMIRSSAIEQGVPLFTALDTAKAMLTVLESRCFNIEAI

SEQ ID NO: 2027 - DNA, 1074 bp, Streptococcus agalactiae
atgaagcgtctattattactggaagatggtagtgtgtttgagggtgaggctttcggagcggatgtagaaacaagtggtgaaatcgtttttagtacaggaatgacagggtatcaagaatctataacagatcaatcttacaacggtcaaattattacttttacttatcctcttattggaaattatgggataaatcgagacgattacgaatctattagaccaacatgtaagggagtagttatttatgaatgggcagagtatccaagtaactggcgtcaacagatgacacttgatgaatttttaaaattaaaaggaatacctggaatttcaggtatagatactcgagcattaacaaaaattattcgaaaacatggaacaatgaaagcttgtttaataaacgagggaaattctattcatgaagcactagaaaaccttcaaaaaagtgttcttttaaatgatcaaattgaacaagtatcaaccaaattagcttatgcttcgcctggagttggcaaaaatattgtattagttgactttggtttaaaacattctattctaagagaactgtcacaacgtcaatgtcatattacagtcgttcctcatactacgacagcgcaagaaatcttaaatctcaatccagatggagtactcttatctaacggccctgggaacccagaacaattaccgaatgctttacaaatgatccaagaaattcaaggtaaaattccaatttttggtatttgtatgggacatcaactatttgctaaagctaatggtgcaaagacttataaaatgacttttggtcatcgaggttttaatcatgctgttcgtcatttgcaaacaggacaggttgattttacaagtcaaaatcatggttatgctgtctcgagagaagatttccctgaggctctcttcattacacatgaagagattaatgataaaactgtcgaaggtgttcgacataaatactatcctgccttttcagtgcagtttcacccagatgcagcaccagggccgcatgatacatcttatctttttgatgaatttattaatatgattgatgatttccagcaaaaaagc

SEQ ID NO: 2028 - protein, 358 aa, Streptococcus agalactiae
MKRLLLLEDGSVFEGEAFGADVETSGEIVFSTGMTGYQESITDQSYNGQIITFTYPLIGNYGINRDDYESIRPTCKGVVIYEWAEYPSNWRQQMTLDEFLKLKGIPGISGIDTRALTKIIRKHGTMKACLINEGNSIHEALENLQKSVLLNDQIEQVSTKLAYASPGVGKNIVLVDFGLKHSILRELSQRQCHITVVPHTTTAQEILNLNPDGVLLSNGPGNPEQLPNALQMIQEIQGKIPIFGICMGHQLFAKANGAKTYKMTFGHRGFNHAVRHLQTGQVDFTSQNHGYAVSREDFPEALFITHEEINDKTVEGVRHKYYPAFSVQFHPDAAPGPHDTSYLFDEFINMIDDFQQKS

SEQ ID NO: 2029 - DNA, 1080 bp, Streptococcus pyogenes
atgacaaaacgattacttattttagaagacggcactatttttgaaggagaaccctttggtgctgatattgatgtgactggtgaaattgtctttaatacaggaatgacaggctaccaagaatccatcactgaccaatcctacaatgggcaaattttaacctttacctatcctttgattggaaattatgggattaatcgagatgactatgagtccatttcacccacctgtaaaggggttgttgtgtctgaagtcagtcggttggcaagtaattggcgcaagcaaatgacgctagatgcgttcttgaaaataaaagggattccagggatttcgggaattgatacgagagctttgaccaaaattattcggcaacacggtaccatgaaagctacgatggcagatgatggagatagtatccagcatttaaaagatcaactgcgtgcaacagtcttaccgactaacaccattgaacaagtgtcaactaaaacagcttatcctgcaccagggatcgggaaaaatattgtattggttgattttggtttaaaacattctattttaagagaattttctaaaagacaatgtaatatcaccgttgtccctttcaacatcactgcagaagaagtgctccaactaaatccggatggcttgatgctatctaatggcccaggaaacccagaagatttgccagaggctttagacatgattcgtggggtacaaggtaagattcctatttttggtatttgtatgggacatcaactctttagtctagcaaatggtgctaagacttgtaaaatgacctttggtcatcgtggctttaaccatgccgttagagaaattgcaacgggaagaattgattttaccagtcaaaaccatggttatgccgttgaacgtagtagtctacctgatactttaatggttacgcatgaagacattaacgataagacggtcgaaggagtgaaacatagagattttccagctttttcagtccaatttcaccctgatgcggctccaggacctcatgatgccagctacttatttgacgaatttttggaaatgattgattcttggagatgtacgagtaaa

SEQ ID NO: 2030 - protein, 360 aa, Streptococcus pyogenes
MTKRLLILEDGTIFEGEPFGADIDVTGEIVFNTGMTGYQESITDQSYNGQILTFTYPLIGNYGINRDDYESISPTCKGVVVSEVSRLASNWRKQMTLDAFLKIKGIPGISGIDTRALTKIIRQHGTMKATMADDGDSIQHLKDQLRATVLPTNTIEQVSTKTAYPAPGIGKNIVLVDFGLKHSILREFSKRQCNITVVPFNITAEEVLQLNPDGLMLSNGPGNPEDLPEALDMIRGVQGKIPIFGICMGHQLFSLANGAKTCKMTFGHRGFNHAVREIATGRIDFTSQNHGYAVERSSLPDTLMVTHEDINDKTVEGVKHRDFPAFSVQFHPDAAPGPHDASYLFDEFLEMIDSWRCTSK

SEQ ID NO: 2031 - DNA, 921 bp, Streptococcus agalactiae
atgaatcatcaaacacaaacactttcattagaacattttgtcagtttagaagaattatcaaatcaagaagttatgtctttgataaagagaagtatcgaagttaaagaaaatcctagcaacattggttttgataaagattactatgtgtcaaatctcttttttgagaattcaacaagaacacataagtcatttgaaatggcagaactcaaattaggattaaaaacaattgaatttaatgctgatacaagttctgttaataaaggagaaaccctttatgacactatcttaacaatgagtgctctaggattggacgtttgtgtcattaggcatcctgatattgactattataaagaattgattgctagtccgaacattcattcagctattgtcaatgggggtgatggctcaggccaacatccaagccaatcacttttggatttggtaactatttacgaagaatttggatacttcaaagggctaaaaattgcgattgtaggagatttaactcactcacgggtagctaaatctaacatgcaagtgctaaaacgattaggagctgaaattttcttttctggacccaaagaatggtatagtagtcaattcgatgaatatgggcaatatttaccaatagatcagttagttgatcaaattgatgtccttatgcttttacgtgttcaacacgaacgtcatgatggtaaaggggtgttttcaaaagaaagctatcatcaacaatttggtcttacaaaagaacgctataaacatttaagggatacagcaattattatgcacccagcacccgtcaatagggatgtagagattgctagcgatttggtagaagcagataaggctcgaatagtgaaacagatgagtaatggcgtctatgcaaggatagctatcttagaagcagtgctcaatagcaga

SEQ ID NO: 2032 - protein, 307 aa, Streptococcus agalactiae
MNHQTQTLSLEHFVSLEELSNQEVMSLIKRSIEVKENPSNIGFDKDYYVSNLFFENSTRTHKSFEMAELKLGLKTIEFNADTSSVNKGETLYDTILTMSALGLDVCVIRHPDIDYYKELIASPNIHSAIVNGGDGSGQHPSQSLLDLVTIYEEFGYFKGLKIAIVGDLTHSRVAKSNMQVLKRLGAEIFFSGPKEWYSSQFDEYGQYLPIDQLVDQIDVLMLLRVQHERHDGKGVFSKESYHQQFGLTKERYKHLRDTAIIMHPAPVNRDVEIASDLVEADKARIVKQMSNGVYARIAILEAVLNSR

SEQ ID NO: 2033 - DNA, 987 bp, Streptococcus pyogenes
ttgttgttagaccacttacatagtcatcagtcgttagtgataaaggggataatcatgtcagttgtaaataatcgcgttgcacttaccaatttagtttcaatggaagcattaaccaccgaagaagttttaggtcttatcaaccgtggttcagaatataaggctggtaaagttgttatttcggatcatcaaaaggatcttgttgccaatttattctttgaaaactccacccgaacccataagtcttttgaagtggctgagaagaaactcggcttgacagttcttgatttcaatgctgatgcaagtgcggttaacaagggagaaagtttgtatgatactgtgttaaccatgagtgcacttggaacagacatctgtgtgattcgtcacccagaagatgattattacaaggaattagtagaaagtccaactattacagcttccattgtcaatggaggagatggttctggacaacacccgagtcaatgtttacttgacttattaaccatctatgaagaatttggacgctttgaaggcttaaagattgcgatcgctggtgacttaactcactctagggtggcaaagtccaacatgcaaatcctcaaaagattaggagcagagctttatttctatggacctgaagaatggtattcagaagcctttaatgcttacggcacttatattgctattgaccagattattaaggaattggatgttcttatgttgctgcgtgtacagcacgaacgtcatgacggccatcagagtttttcaaaagaaggttaccatcaagcgtttggattgacacaggaacgttaccaacaattaaaagattctgctattattatgcatccagctccagttaatcgggatgtggaaattgcagatagtttggtggaagctcctaaagcgagaattgtatctcagatggctaatggtgtctttgttcgcatggctattattgaagccattttgaatggtagaaataaaaactca

SEQ ID NO: 2034 - protein, 329 aa, Streptococcus pyogenes
LLLDHLHSHQSLVIKGIIMSVVNNRVALTNLVSMEALTTEEVLGLINRGSEYKAGKVVISDHQKDLVANLFFENSTRTHKSFEVAEKKLGLTVLDFNADASAVNKGESLYDTVLTMSALGTDICVIRHPEDDYYKELVESPTITASIVNGGDGSGQHPSQCLLDLLTIYEEFGRFEGLKIAIAGDLTHSRVAKSNMQILKRLGAELYFYGPEEWYSEAFNAYGTYIAIDQIIKELDVLMLLRVQHERHDGHQSFSKEGYHQAFGLTQERYQQLKDSAIIMHPAPVNRDVEIADSLVEAPKARIVSQMANGVFVRMAIIEAILNGRNKNS

SEQ ID NO: 2035 - DNA, 1314 bp, Streptococcus agalactiae
ttggcaaagttagagaggacagatatgtatatcattaaaaacggattgattatcgaccctcaaagtggttttaatcaagtatcagacatgctgattgatcaaggaaaaattaaacaaatatcgaaagaaattgatattaaaggcattccaatcattgatgcaagcaataaaattgtagctccaggattagtcgatattcatgtacattttcgtgagcctggacagacacataaagaaaatatccatacaggggccctatcagctgcagtaggtggttttacgacagttcttatgatggccaatactaacccaacgatttctagcccagaaattgtaaaacaagttaaggagagtgcagcaaaagaagcaattaagattgaaacagttgctacaattactaaatctctgaatggtaaagatttagttaatttcgaagaactattagaggctggagttgctggattctcagacgatggtattcctttgacagatactaaggttttgcaagaagctatgaacttagctagaaaacatgatgttgtcctatcgttacatgaagaagatccatcgttaaatggtgtccttggtatcaacgaacatattgctcagaaaatttatcatgtctgtggagctagtggtcttgctgaatattcaatgattgcgcgagatgctatgattgcttaccaaacacaggcgaaagtccatatccagcatttgtcaagttcagaatcagtagaagtagttgattttgcgcagaagcttggtgctaacttaacagcagaagtaaccccccaacatttttcaaagacagagaacttacttttaactaagggtgctaatgcaaaattaaacccaccactgcgacttgaaaaggatagacaagccctcattgatggacttaaaagtggtgttatttcaattattgcaagtgaccacgctccccatcatattatggagaaagcagcagataatattagtcaagcgccctctggtatgactggcttagagacatcattagccttagggattacttatttagtatctactaaagaactctcaatgattgactttttggcaaaaatgacatgtaatcctgcacagttatatggatttgatgcaggttatctcagagaaggtggacctgcagatatcgttatttttgatcaagctgaagagagaataataaaggcagaatttgcctccaaatccagcaactctccttttatcggtgataaattgaagggagttattcactacacaatttgcaatggtgaaatagtctatcaaaaagatagccacgcagcgacattggta

SEQ ID NO: 2036 - protein, 438 aa, Streptococcus agalactiae
MAKLERTDMYIIKNGLIIDPQSGFNQVSDMLIDQGKIKQISKEIDIKGIPIIDASNKIVAPGLVDIHVHFREPGQTHKENIHTGALSAAVGGFTTVLMMANTNPTISSPEIVKQVKESAAKEAIKIETVATITKSLNGKDLVNFEELLEAGVAGFSDDGIPLTDTKVLQEAMNLARKHDVVLSLHEEDPSLNGVLGINEHIAQKIYHVCGASGLAEYSMIARDAMIAYQTQAKVHIQHLSSSESVEVVDFAQKLGANLTAEVTPQHFSKTENLLLTKGANAKLNPPLRLEKDRQALIDGLKSGVISIIASDHAPHHIMEKAADNISQAPSGMTGLETSLALGITYLVSTKELSMIDFLAKMTCNPAQLYGFDAGYLREGGPADIVIFDQAEERIIKAEFASKSSNSPFIGDKLKGVIHYTICNGEIVYQKDSHAATLV

SEQ ID NO: 2037 - DNA, 1266 bp, Streptococcus pyogenes
atgatactcatcaaaaatggacgcgttatggacccgaaatcgcagagagatcaagtggcagatgtcttgattgatggtaaacagattgtaaagatagcttcagctattgaatgccaagaagctcaagtgattgatgctagtggtcttattgttgccccgggtttggtcgatattcatgtgcattttagagaacccggtcaaacgcacaaagaagatattcacacgggagccttggcagcagcagcaggtggtgtgactacggttgtcatgatggctaataccaatcctgtcatttcagatgtcgaaactttacaggaagtgctagctagcgcagctaaagaaaagattcatatttacaccaatgccagtgtcacccaagcctttaatggaaaagacgtgactgattttaaagctttgttggaagcaggagcagtaagcttttcagatgatggtattcccttagaaagttctaaagttttaaaagaagcctttgatttggctaatgccaaccaaactttcatttctttgcatgaggaagatcctcagttaaatggggttcttggttttaatgaaggtattgctgaggagcattttcatttttgtggggcaactggtgtagcagaatatagtatgattgcaagagatgtcatgattgcttatgacaggcaagctcatgttcatatccaacatttatctaaagcagaatcggttcaagtagtggcttttgctcagcagttgggtgctaaggtaactgctgaagtgtccccacaacatttttcaacaactgaagatctcttattgatcgcaggtaccagcgccaagatgaatcctccccttcgtacacaaagagatcgcttagctgtcatagaaggcttgaaatcgggtgttatcacagtcattgccactgatcatgctcctcatcacaaggatgaaaaaactgtggatgatatgactaaagccccatctggtatgacaggacttgaaacttctttgtcattaggtttgacgcatttggttgaaccaggtcatcttacacttatgtcactattagaaaaaatgacgcttaatccagctttgctttatggttttgatgcgggttatttggcagaaaatggtccagcagatttggttatttttgcagacaagcaagaacgtctgatcactgagaattttgcttctaaagctagtaattccccatttattggtaacaaactcaaaggtgtcgtgaaatacactattgcagacggagaggttgtttaccctaat

SEQ ID NO: 2038 - protein, 422 aa, Streptococcus pyogenes
MILIKNGRVMDPKSQRDQVADVLIDGKQIVKIASAIECQEAQVIDASGLIVAPGLVDIHVHFREPGQTHKEDIHTGALAAAAGGVTTVVMMANTNPVISDVETLQEVLASAAKEKIHIYTNASVTQAFNGKDVTDFKALLEAGAVSFSDDGIPLESSKVLKEAFDLANANQTFISLHEEDPQLNGVLGFNEGIAEEHFHFCGATGVAEYSMIARDVMIAYDRQAHVHIQHLSKAESVQVVAFAQQLGAKVTAEVSPQHFSTTEDLLLIAGTSAKMNPPLRTQRDRLAVIEGLKSGVITVIATDHAPHHKDEKTVDDMTKAPSGMTGLETSLSLGLTHLVEPGHLTLMSLLEKMTLNPALLYGFDAGYLAENGPADLVIFADKQERLITENFASKASNSPFIGNKLKGVVKYTIADGEVVYPN

SEQ ID NO: 2039 - DNA, 627 bp, Streptococcus agalactiae
atggatttagcaagacagattgccatggaactattagatattcaagctgtttacttaagaccccaacaaccctttacttgggcttcgggggtcaaatcgccaatttacactgataatcgtgtaaccttatcgtatcctgagacaaggacactgattgaaaatggttttgttaaacaaatacagaaacatttcccaaacgttgatatcatagcagggacagcgactgcaggcataccacatggcgctattatagctgataagatgaacttgccctttgcctatatacgatcgaaggcaaaggatcatggtgtggggaatcaaatcgagggacgtgtttactcaggccaaaaaatggttatcattgaagatttgatttcaacaggaggatctgttttagaggctgttacggctgcgcagagtcaaggtattgaggttttaggggtagtagcgatatttacatatcaattagctaaggctgaacaagcatttcgtgaagctgatattcctttggtgactttgacggattacaatcaattaattaaagttgctaaagttaatggatatattacagctgaccaactggtattactgaaaaaatttaaagaagatcaaatgaattggcaaagt

SEQ ID NO: 2040 - protein, 209 aa, Streptococcus agalactiae
MDLARQIAMELLDIQAVYLRPQQPFTWASGVKSPIYTDNRVTLSYPETRTLIENGFVKQIQKHFPNVDIIAGTATAGIPHGAIIADKMNLPFAYIRSKAKDHGVGNQIEGRVYSGQKMVIIEDLISTGGSVLEAVTAAQSQGIEVLGVVAIFTYQLAKAEQAFREADIPLVTLTDYNQLIKVAKVNGYITADQLVLLKKFKEDQMNWQS

SEQ ID NO: 2041 - DNA, 627 bp, Streptococcus pyogenes
atgacactagcaagccaaattgcaactcaattacttgatattaaagctgtttatttaaagcctgaagacccttttacgtgggcatctggcattaaatcacctatttacactgataatcgtgtcaccctttcttatcctaagactcgtgatttaattgagaatgggtttgtggaaactatcaaggctcatttcccagaagttgaggtcatcgctggtacagctacagcaggtattcctcacggtgccattatagcagataaaatgactcttccttttgcttatattcgcagtaagccaaaagatcatggagcaggcaaccagattgaggggcgtgtgcttaaaggccaaaaaatggttatcattgaagatttgatttcaacaggtggttcggtactagatgcagccgcagcagccagtcgtgagggagctgacgttctgggagttgttgcgattttcacttatgagttaccaaaagctagtcagaattttaaagaagctggtatcaagttgattacgctttctaattatactgagctaattgcagttgcaaagttgcaaggctatattactaatgatggtttacatttacttaaaaaatttaaagaagaccaggtaaactggcaacaa

SEQ ID NO: 2042 - protein, 209 aa, Streptococcus pyogenes
MTLASQIATQLLDIKAVYLKPEDPFTWASGIKSPIYTDNRVTLSYPKTRDLIENGFVETIKAHFPEVEVIAGTATAGIPHGAIIADKMTLPFAYIRSKPKDHGAGNQIEGRVLKGQKMVIIEDLISTGGSVLDAAAAASREGADVLGVVAIFTYELPKASQNFKEAGIKLITLSNYTELIAVAKLQGYITNDGLHLLKKFKEDQVNWQQ

SEQ ID NO: 2043 - DNA, 753 bp, Streptococcus agalactiae
ttgtgtcatactggtacatttccaacaattattatttctatagagaggaattatatgttagaaaaatgccctatcattgccttagatttttctgatttggcttctgtaacaacttttttagaacattttccaaaagaagaattgctttttgtcaaaataggaatggagctttattattccgaaggtccctcaattattagatatattaaatccttaggacatcgcatttttttggatttaaaattacatgatatccctaatacagttcgatcatctatgtctgtcttagccaaattaggcattgatatgactaatgtgcatgctgcaggaggagtcgaaatgatgaaagcagctagagaaggtttggggaagggtccaatactattagcagtgacacaattaacctcgacttcacaagaacaaatgcaggtggatcaacatattaacttaagtgtagttgattcggtttgccattatgctcaaaaagctcaagaagcaggcttagatggagtagtcgcatcggctcaagagggaatgcaaatcaagaaacagactaacgaacatttcatttgcttaacgcctggtatcagacctccacaaaccaatcagttagatgatcaaaaaagaacgatgactcctgagcaagcacgtatagttggggctgattatatcgttgtgggaagacctataacgaaagcagaaaatccatatcaagcatatctagagataaaagaagaatggaatcgtattaaa

SEQ ID NO: 2044 - protein, 251 aa, Streptococcus agalactiae
MCHTGTFPTIIISIERNYMLEKCPIIALDFSDLASVTTFLEHFPKEELLFVKIGMELYYSEGPSIIRYIKSLGHRIFLDLKLHDIPNTVRSSMSVLAKLGIDMTNVHAAGGVEMMKAAREGLGKGPILLAVTQLTSTSQEQMQVDQHINLSVVDSVCHYAQKAQEAGLDGVVASAQEGMQIKKQTNEHFICLTPGIRPPQTNQLDDQKRTMTPEQARIVGADYIVVGRPITKAENPYQAYLEIKEEWNRIK

SEQ ID NO: 2045 - DNA, 690 bp, Streptococcus pyogenes
atgaaagaagaacgcccaattattgctttagacttttcatcatttgaggagactaaagcatttttagacttatttccagcagaagaaaaactatacgtgaaaattggtatggaattatattatgcgcaaggaccagatattgttcggtatatcaaatcgttagggcataatgtatttttggatttaaaattacatgatattccaaatactgttcgtgctgctatggcagttcttaaagaattagatattgatatggcaactgttcatgcagctggtggtgtagagatgctaaaagcagctcgagaaggactaggtcaaggccctaccttaattgcggtaacgcagctaacttcaaccagtgaagaccaaatgcgtggtgatcaaaatattcaaacgagtcttttagagtctgttttgcattacagcaagggggcagctaaagctcagctagatggggcggtttgttcggcacaagaagtagaagctatcaaggcggtgacgcctacgggatttacttgcttaactcctggcattcgtcctaaaggcagtaatattggcgatcaaaaacgagtgatgactccaaaccaagcaagacgcattggaagtgattatattgtggtagggcgaccaattacccaggcaaaagacccagtggctgcttaccaagccataaaagctgagtgggcaggc

SEQ ID NO: 2046 - protein, 230 aa, Streptococcus pyogenes
MKEERPIIALDFSSFEETKAFLDLFPAEEKLYVKIGMELYYAQGPDIVRYIKSLGHNVFLDLKLHDIPNTVRAAMAVLKELDIDMATVHAAGGVEMLKAAREGLGQGPTLIAVTQLTSTSEDQMRGDQNIQTSLLESVLHYSKGAAKAQLDGAVCSAQEVEAIKAVTPTGFTCLTPGIRPKGSNIGDQKRVMTPNQARRIGSDYIVVGRPITQAKDPVAAYQAIKAEWAG

SEQ ID NO: 2047 - DNA, 1230 bp, Streptococcus agalactiae
atgcaaaatgatatgagcgttgttcttagagcaggtaaattactgattgaaagcggagcagaagtctatcgtgtcgaagacacaatgaagcattttgctaaggctcttcagatagaaaattttgaagcttatgtggttagtagcagtattatcgcttccgggattaaccgctatggtaaacaagaagctaaagtatgcaatacagatggtgtaacagcaaatttaggtagacttgaagctgttaataacctttctaggcaaattgctaaacaagacttagtatctccagaagaaattgtaaagcagttagacttaattgaacatcaaaaagattatagtttacttgttactttaatttcttatttttgtggagcgggtagtttttctttagccttaggtagttccttattagattcattttccgctgctgtaacaggcttaattttaggatattttctgaatttgatggaaagtcgtatacatacaggatttcttttgaccattctaggtagttctgtagtggctttaagtgctaatttattatatttttcaggattaggtgagcatcgtagcattattatattaggggcactaatggttatggtgccaggggctgcctttgttaattcggtgagagaattttcacagaataatttttcaacaggtttagctttgattatgtctgctttactcatttgtatttctatatcagcaggtgtggctattacaattgaaattattccgtttgcagaacaaatgacaggttctttttctggtgttcctaataccatccttgagattatcatcagaacactaatggccggtttagggacgatagccttctctattctctaccatgttccaaaacgttatttccttgacttaggtatactaggagcaatatcttggatgctctacctgatcttatggcaacaatttcacatggatgctatagccgtattttttccagggcttttcatcacttatttttcacggctattagctgctaaacgtaagtgtcctgccactgtctttttagcgacaagtatgtttcctcttattccaggacttagcttctatagagctgtttactttttattgacgggagcagatgccgtagcaatggaatattttagatcctgttttgtaacagcttttacaattgctatagcaatcagtattgtacagcagattcctctatcgttctttattagacgtaaaatgataaaa

SEQ ID NO: 2048 - protein, 410 aa, Streptococcus agalactiae
MQNDMSVVLRAGKLLIESGAEVYRVEDTMKHFAKALQIENFEAYVVSSSIIASGINRYGKQEAKVCNTDGVTANLGRLEAVNNLSRQIAKQDLVSPEEIVKQLDLIEHQKDYSLLVTLISYFCGAGSFSLALGSSLLDSFSAAVTGLILGYFLNLMESRIHTGFLLTILGSSVVALSANLLYFSGLGEHRSIIILGALMVMVPGAAFVNSVREFSQNNFSTGLALIMSALLICISISAGVAITIEIIPFAEQMTGSFSGVPNTILEIIIRTLMAGLGTIAFSILYHVPKRYFLDLGILGAISWMLYLILWQQFHMDAIAVFFPGLFITYFSRLLAAKRKCPATVFLATSMFPLIPGLSFYRAVYFLLTGADAVAMEYFRSCFVTAFTIAIAISIVQQIPLSFFIRRKMIK

SEQ ID NO: 2049 - DNA, 879 bp, Streptococcus agalactiae
ttgaacgatgttatcaatattgtctatcatgttgaaaatcaagatttagtaagatattccggtgattatactaattttgaatcagtctatgcaatgaaaaaggctcaattagaagcagcctatgaacgtcaacaaaaggaaatagctgatttacaagattttgttaatcgtaataaagcacgcgtcgcaacacgtaatatggcaatgtctcgtcaaaagaaactagacaaaatggatattattgagttacaagcagagaaaccaaagccaagtttcgaatttaaagaatctcgcacaccaggacgttttattttccaagctaaagatcttcaaattggatatgatcgtgctttaacaaaacctctaaacctaacatttgaacgtaatcaaaaaatagctattgttggagcaaatgggataggaaaaacaacattacttaagagtttactaggtattatcccccctatttctggtaatgttgaacgaggtgattttattgatttaggttattttgaacaagaagtacccggaggaaatcgccaaactccactcgaagcagtatgggatgcttttcctgctttgaaccaagcagaggttagggcagctcttgctcgttgtggtttaacttcaaagcatattgaaagtcagattcaggtgttatctggtggggagcaatcaaaggtcagattttgcttattaatgaatcgcgaaaataatgtccttgtacttgacgaaccaaccaatcatttagatgtagatgctaaagatgagttaaaacgtgctttaaaagcttataagggatcaatcttgatggtatgtcatgaaccggacttttatgaaggatggatggatgatgtttgggactttaaccaacttagt

SEQ ID NO: 2050 - protein, 293 aa, Streptococcus agalactiae
MNDVINIVYHVENQDLVRYSGDYTNFESVYAMKKAQLEAAYERQQKEIADLQDFVNRNKARVATRNMAMSRQKKLDKMDIIELQAEKPKPSFEFKESRTPGRFIFQAKDLQIGYDRALTKPLNLTFERNQKIAIVGANGIGKTTLLKSLLGIIPPISGNVERGDFIDLGYFEQEVPGGNRQTPLEAVWDAFPALNQAEVRAALARCGLTSKHIESQIQVLSGGEQSKVRFCLLMNRENNVLVLDEPTNHLDVDAKDELKRALKAYKGSILMVCHEPDFYEGWMDDVWDFNQLS

SEQ ID NO: 2051 - DNA, 1578 bp, Streptococcus pyogenes
ttgacggcttttttgatgacagttaaggaagaaacgatgagtattttagaagttaagcagttgagtcacggttttggggatcgggctatttttgaaaatgtgtcatttcgcctcttaaaaggcgaacatattggactagttggggcaaatggtgaaggaaaatcaacctttatgagtatagtcacaggacatttacagcctgacgaaggaaaagtagagtggtcgaagtatgtcactgcaggttacctggatcaacatacagtgttggaatcaggacaaaccgttcgtgatgtcttgcgaactgcttttgatgagttatttaagaccgagaatcgtattaatgagatttacgcgtcaatggcagatgataaagctgatattgctgttttgatggaagaagtaggtgagcttcaagatcgtttagaaagtcgtgatttctatactttggatgctaagattgatgaagtagcgcgtgcgcttggtgttatggattttggaatggagtcagatgttacatccttatcaggtgggcaacgaacaaaggttttattagccaaattactattagaaaaacctgatattctgctattagatgaaccaactaaccatttggatgctgagcatattgaatggttaaaacgctatttacaacattatgaaaatgcttttgtgttgatttcgcatgatatttctttcttaaatgatgtgattaatattgtttatcatgttgaaaatcaaagtttagttcgctatactggggattattaccaatttcaagctgtttatgagatgaaacaatctcaacttgaagcagcctatgaacgtcaacaaaaagagattgctaacttgcaggattttgtcaaccgaaataaggctcgggtagcgacacgtaacatggcaatgtctcgccaaaaaaaacttgataagatggatataattgaacttcaagctgagaaaccaaaaccaaattttgaatttaagcaagctagaactcccagtcgattcatttttcaaacaaaaaatcttgtgattggttatgattacccattgaccaaagaacccttaaatataacgtttgaaagaaatcaaaaaattgctattgttggggccaacggtattggaaaatctactttgctaaaaagtttattaggtgttattgagcctttagaaggtcatattgtcacaggggattttttagaagttggctactttgaacaagaagtgacaggtgttaaccgacaaactccgctagaagtagtttgggatgcttttcctgccttaaatcaggcagaagttcgagcggcactagctcgttgcggactaacatcaaaacatatcgaaagtcaaattcaagtactttcgggtggtgaacaagcaaaagttcgtttttgtttgttgatgaatcgtgaaaataacgtgcttattttagacgaaccaacaaatcatcttgatattgatgctaaaaatgagctcaaacgtgctttaaaagcatataagggttctattttaatggtttgtcatgaacctgatttctacaatgggtgggtaaccgatacttgggattttagtaagttaacc

SEQ ID NO: 2052 - protein, 526 aa, Streptococcus pyogenes
LTAFLMTVKEETMSILEVKQLSHGFGDRAIFENVSFRLLKGEHIGLVGANGEGKSTFMSIVTGHLQPDEGKVEWSKYVTAGYLDQHTVLESGQTVRDVLRTAFDELFKTENRINEIYASMADDKADIAVLMEEVGELQDRLESRDFYTLDAKIDEVARALGVMDFGMESDVTSLSGGQRTKVLLAKLLLEKPDILLLDEPTNHLDAEHIEWLKRYLQHYENAFVLISHDISFLNDVINIVYHVENQSLVRYTGDYYQFQAVYEMKQSQLEAAYERQQKEIANLQDFVNRNKARVATRNMAMSRQKKLDKMDIIELQAEKPKPNFEFKQARTPSRFIFQTKNLVIGYDYPLTKEPLNITFERNQKIAIVGANGIGKSTLLKSLLGVIEPLEGHIVTGDFLEVGYFEQEVTGVNRQTPLEVVWDAFPALNQAEVRAALARCGLTSKHIESQIQVLSGGEQAKVRFCLLMNRENNVLILDEPTNHLDIDAKNELKRALKAYKGSILMVCHEPDFYNGWVTDTWDFSKLT

SEQ ID NO: 2053 - DNA, 246 bp, Streptococcus agalactiae
ttgacgctgtctggttgtgctaattggattgataaaggtcaatcaatcaccagcgttggttcaaccgccttacagccacttgtagaagctgcagcagatgagtttggtaagacaaacctcggtaagactatcaatgtccaaggaggaggctcaggaacaggcttatcacaagtacagtctggagctgttcaaattggtaatagcgacttatttgcagaagaaaaagaggtattgatgctaagaaat

SEQ ID NO: 2054 - protein, 82 aa, Streptococcus agalactiae
MTLSGCANWIDKGQSITSVGSTALQPLVEAAADEFGKTNLGKTINVQGGGSGTGLSQVQSGAVQIGNSDLFAEEKEVLMLRN

SEQ ID NO: 2055 - DNA, 567 bp, Streptococcus agalactiae
ttgaaagaccatcaagtcgcagtagctggattagctgttattgttaataaaaaagttaatgttaaaaatctaaccacccaccaacttcgtgatatttttgcaggaaaaatcaagaattggaaagaagtgggaggacaagatttagatatttccatcatcaatcgagcagcaagttctggatcccgtgcaaccttcgataatactattatgggaaatgttgctcctattcaaagccaagaacaagattcaaatggtatggtgaaatcaattgtttctcaaacacctggtgcgatttcatacctcgcttttgcatacgttgataaatctgtcggaacattaaaactaaatggttttgcgccaacagctaaaaatgttactaccgacaactggaaactttggtcatatgaacatatgtatacaaaaggtaatgaaacaggtctaacaaaagaattcttagactacatgaaaagtgataaagttcaaagtagtatcgtacaacatatgggatatatctctattaacgacatgaaagttgttaaagatgctgaaggtaaagtaaccccaaaa

SEQ ID NO: 2056 - protein, 189 aa, Streptococcus agalactiae
MKDHQVAVAGLAVIVNKKVNVKNLTTHQLRDIFAGKIKNWKEVGGQDLDISIINRAASSGSRATFDNTIMGNVAPIQSQEQDSNGMVKSIVSQTPGAISYLAFAYVDKSVGTLKLNGFAPTAKNVTTDNWKLWSYEHMYTKGNETGLTKEFLDYMKSDKVQSSIVQHMGYISINDMKVVKDAEGKVTPK

SEQ ID NO: 2057 - DNA, 933 bp, Streptococcus agalactiae
ttgatcctaggaggaattatgaaaaatcaagaattagctaaaaaattaacatctccttcaaaaaactctcgattagaaaaatttggtaaaggaataacttttctttcgcttgccctaatcgtcttcattgttgcgatgattttgatttttgttgctcaaaaaggactatctacattttttgttgatggcgttaaattaacagacttcttatttaatacaaaatgggaaccaagtgctaagtcatttggtgcttttccaatgatagctggatcatttattgttactattctatcagctatcattgctacaccatttgctatcggtgctgccgtatttatgactgaaatctcacctaaatatggttctaaaattttacaacctgcagttgaattactagttgggattccttctgttgtttacggttttattggtttacagattattgttcccttcgttcgctctatttttgggggaacaggttttggcattttatctggggtctgtgtcctcttcgtcatgattctaccaactgttactttcatgacagtagatagccttagagctgtgccacgtcactataaagaagcaagtttagccatgggggcaactcgttggcaaacaatttggcgtgttatattaaacgctgcacgtccaggaattttcactgcaattgtttttggtatggcacgtgcatttggtgaagctctagcaattcagatggttgtcggaaactctgcaattttaccaacgtcattgacaacaccagcagcaacattaacgtctgttctaacaatgggtattggtaatactgtaatgggaactgtacaaaacaatgtcctctggtcgctagccttagtacttttaattatgagtttagcatttaatacagttattaagttaattacaagggaaggaaagaaaaactatgaacgc

SEQ ID NO: 2058 - protein, 311 aa, Streptococcus agalactiae
MILGGIMKNQELAKKLTSPSKNSRLEKFGKGITFLSLALIVFIVAMILIFVAQKGLSTFFVDGVKLTDFLFNTKWEPSAKSFGAFPMIAGSFIVTILSAIIATPFAIGAAVFMTEISPKYGSKILQPAVELLVGIPSVVYGFIGLQIIVPFVRSIFGGTGFGILSGVCVLFVMILPTVTFMTVDSLRAVPRHYKEASLAMGATRWQTIWRVILNAARPGIFTAIVFGMARAFGEALAIQMVVGNSAILPTSLTTPAATLTSVLTMGIGNTVMGTVQNNVLWSLALVLLIMSLAFNTVIKLITREGKKNYER

SEQ ID NO: 2059 - DNA, 147 bp, Streptococcus agalactiae
ttgtataattgtattccaataccgcctcctgcttcatatgatgatgatttcccagttaaaaatgaccaagatacgtgtggcaatccgcgaacaagaataaaaattaaaagagaggcgaggattgtaacgatgatagctgcaatacta

SEQ ID NO: 2060 - protein, 49 aa, Streptococcus agalactiae
MYNCIPIPPPASYDDDFPVKNDQDTCGNPRTRIKIKREARIVTMIAAIL

SEQ ID NO: 2061 - DNA, 885 bp, Streptococcus agalactiae
atgaacgctaaaaaggctgacaaattagcaactacaatactctatagtattgcagctatcatcgttacaatcctcgcctctcttttaatttttattcttgttcgcggattgccacacgtatcttggtcatttttaactgggaaatcatcatcatatgaagcaggaggcggtattggaatacaattatacaattcctttttcctacttattgttactctgattatttctattcctctatctttaggagctggaatatacctctcagaatatgctaaaaaaggacgtttaacaaactttgttagaacatgtatcgaaattttgtcatctcttccttctgttgtagttggtctgtttggttacctaatcttcgttgttcaatttcaatatggcttctcaattatctcaggtgccttagcacttactgtttttaacttaccccaaatgacacgtagtgttgaagatagccttcaaaatgtacaccacacacagcgtgaagcaggattggccctaggtatttctcgttgggaaacggtcatttacgtcgttgtccctgaagctctgccaagtattgtaactggtgttgtgctagcttcaggacgtattttcggtgaggcagcagcacttatttatacagctggtcaatctgctccagcacttgattggtcaaattggaacgtccttagtgttacaagtccaatctcaattttccgtcaagcagaaactttagctgttcatatttggaaagttaatagcgaagggacaatccctgatgcaacacaagtatctgccggtagcgccgcagtcttattggttgttattcttattttcaacctttcagctcgctcgatcggtaagaaacttcattcgaaattaacctcgtctaat

SEQ ID NO: 2062 - protein, 295 aa, Streptococcus agalactiae
MNAKKADKLATTILYSIAAIIVTILASLLIFILVRGLPHVSWSFLTGKSSSYEAGGGIGIQLYNSFFLLIVTLIISIPLSLGAGIYLSEYAKKGRLTNFVRTCIEILSSLPSVVVGLFGYLIFVVQFQYGFSIISGALALTVFNLPQMTRSVEDSLQNVHHTQREAGLALGISRWETVIYVVVPEALPSIVTGVVLASGRIFGEAAALIYTAGQSAPALDWSNWNVLSVTSPISIFRQAETLAVHIWKVNSEGTIPDATQVSAGSAAVLLVVILIFNLSARSIGKKLHSKLTSSN

SEQ ID NO: 2063 - DNA, 801 bp, Streptococcus agalactiae
atggcagaatataattgggacgaacgccatatcattaccttccctgaagaaaattcagctctcaccacaaaagatttacacgtttactacggtgagaaagaagctatcaagggaattgatatgcaatttgaaaaaaataaaattacagccttaatcggcccatctggatgtggaaaatcaacatatcttcgtagcttaaatcgtatgaatgatacgattgatattgcacgcgtgactggacaaatcatgtatgaaggaattgatgttaacgctcaagatatcaatgtttacgagatgcgaaaacatatcggaatggttttccaacgtccaaacccgtttgcaaaatcaatttataaaaacattacctttgcatatgagcgtgctggtgtaaaagataaaaaattcttagatgaagttgtcgaaacctcactaaaacaagctgctctatgggatcaagtaaaagatgaccttcataaatcagcattcactttatctggcggtcaacagcagcgattatgtattgcacgtgctatcgcagttaaaccagaaattctcttaatggatgaacctgcttcagcactcgatccgattgcaactatgcaactagaagagacaatgtttgaactcaagaaaaattacactataattatcgtaacacataatatgcaacaagcagcacgtgctagtgattatactgcatttttctatcttggagacttaatcgaatacgataaaacgaataacattttccaaaatgctaaatgtcaatctactagcgattatgtttctggtcgatttgga

SEQ ID NO: 2064 - protein, 267 aa, Streptococcus agalactiae
MAEYNWDERHIITFPEENSALTTKDLHVYYGEKEAIKGIDMQFEKNKITALIGPSGCGKSTYLRSLNRMNDTIDIARVTGQIMYEGIDVNAQDINVYEMRKHIGMVFQRPNPFAKSIYKNITFAYERAGVKDKKFLDEVVETSLKQAALWDQVKDDLHKSAFTLSGGQQQRLCIARAIAVKPEILLMDEPASALDPIATMQLEETMFELKKNYTIIIVTHNMQQAARASDYTAFFYLGDLIEYDKTNNIFQNAKCQSTSDYVSGRFG

SEQ ID NO: 2065 - DNA, 756 bp, Streptococcus agalactiae
atgacacaacctattttacaagtcagtgatttgtctgtttactataataagaaaaaagctttaaaagaagtctcaatggacttctatcctaatgaaattacagccttaattggtccgtctggttctggaaagtcaacactcttacgagctattaaccgtatgggagacttaaatcctgaagtcactctaacaggagcagtgatgtataacggacataatgtttatagcccgcgcactgataccgtagaacttcgtaaagaaattgggatggtttttcagcagcctaatccatttcctatgtcagtatttgaaaatgttgtttatggtcttagactcaaaggaataaaagacaaagctacgttagatgaagccgtagagacttcattgaagggcgcgtctatctgggacgaggtcaaagatagattacacgactctgctcttggtttatctggtggtcaacaacaacgtgtttgtattgccagaacccttgctaccaagcctaaaattatccttctagatgagccaacctctgcacttgacccaatttctgctggtaaaattgaagagactttacatggtctaaaagatcaatataccatgttacttgttacacgttctatgcagcaagcctcacgtatttctgatcgtacaggtttcttcttagacggtaacttaattgaatatggcaatacaaaagaaatgtttatgaatcctaaacataaagaaactgaagattacattacaggtaaattcggt

SEQ ID NO: 2066 - protein, 252 aa, Streptococcus agalactiae
MTQPILQVSDLSVYYNKKKALKEVSMDFYPNEITALIGPSGSGKSTLLRAINRMGDLNPEVTLTGAVMYNGHNVYSPRTDTVELRKEIGMVFQQPNPFPMSVFENVVYGLRLKGIKDKATLDEAVETSLKGASIWDEVKDRLHDSALGLSGGQQQRVCIARTLATKPKIILLDEPTSALDPISAGKIEETLHGLKDQYTMLLVTRSMQQASRISDRTGFFLDGNLIEYGNTKEMFMNPKHKETEDYITGKFG

SEQ ID NO: 2067 - DNA, 759 bp, Streptococcus pyogenes
atgatgacagaacctattttacagatcagagacctttctgtttactacaatcaaaagaaaacgttaaaagatgtctctttggacctttatccaaatgaaataacagctttaattggtccttctggatctgggaaatcaacgctcttgcgttctatcaaccgtatgaatgatttgaatcctgaagtaaccattacaggctctatcgtctataacggacacaatatttatagtccaaggacagatacggttgatttacgcaaagaaattggtatggtattccaacaacccaacccatttccgatgtctatttatgagaacgtggtttacggccttcgcttaaaaggtatcagagataaatcaatcttagaccatgctgttgaaagctctcttaaaggggcttccatttggaatgaagtcaaagatcgtttacatgattctgcggttggcttatcaggcggacagcaacagagagtttgcatagctagagttcttgctaccagccccagaataatccttttagatgaacctacctcagctcttgatcctatctcagctgggaaaattgaagaaacattattgttattaaaaaaagattatacactggctattgtgacccgctcaatgcagcaagcctcacgtttatcagatcgaacaggttttttcttggagggtgacttacttgagtgtggtcctacaaaagccatgtttatgaatcctaagcgcaaagaaaccgaagactatatttctggtaaatttggt

SEQ ID NO: 2068 - protein, 253 aa, Streptococcus pyogenes
MMTEPILQIRDLSVYYNQKKTLKDVSLDLYPNEITALIGPSGSGKSTLLRSINRMNDLNPEVTITGSIVYNGHNIYSPRTDTVDLRKEIGMVFQQPNPFPMSIYENVVYGLRLKGIRDKSILDHAVESSLKGASIWNEVKDRLHDSAVGLSGGQQQRVCIARVLATSPRIILLDEPTSALDPISAGKIEETLLLLKKDYTLAIVTRSMQQASRLSDRTGFFLEGDLLECGPTKAMFMNPKRKETEDYISGKFG

SEQ ID NO: 2069 - DNA, 651 bp, Streptococcus agalactiae
atgttaagatcaaaatttgatgaagaattagataaactgcataaccaattctatgcaatgggaattgaagctatcggacaaatcaaaaaaacagttcgtgcttttgtcagtcatgatcgagagttagctaaagaagtgatagaagatgatgtaacgcttaacaactttgaaacgaagttagagaaaaaatcattggaaattattgcactccagcagcctgtatcacaagacttacgcaccgttattaccgttttaaaagctactagtgatgttgagcgtatgggagaccatgcagcagcagttgcaaaagcaaccatccgtatgaagggcgaggaaagaatcccagcagtagaattagaaatcaataatatgggaaaagcagttaaaaacatgcttgaagaagccttaacagcttatatcaatggtgatgatgaaaaagcttacgaagtagcagcaatggatgaaatagttgatgattacttccgtgatatccaaaaaatggtagttgaaacaattcaaaagcatcctgacgtagcatttgccgccaaagaatacttccaagtattgatgcacttggagcgaattggagattatggcaaaaatatctgtgaatggattgtttatttaaaaactggaaaaattatcgagtta

SEQ ID NO: 2070 - protein, 217 aa, Streptococcus agalactiae
MLRSKFDEELDKLHNQFYAMGIEAIGQIKKTVRAFVSHDRELAKEVIEDDVTLNNFETKLEKKSLEIIALQQPVSQDLRTVITVLKATSDVERMGDHAAAVAKATIRMKGEERIPAVELEINNMGKAVKNMLEEALTAYINGDDEKAYEVAAMDEIVDDYFRDIQKMVVETIQKHPDVAFAAKEYFQVLMHLERIGDYGKNICEWIVYLKTGKIIEL

SEQ ID NO: 2071 - DNA, 2547 bp, Streptococcus agalactiae
atgaaaactgtagaacattttgttaccaaatttgtccctgaaaactataaccttttcttggatattaatcgtcaaactaaaaccttttcaggtaacgttgctgtgtctggcgaagccttagataacaatatctcttttcaccaaaaagggttaaccattaaatctgtcttattagataatcaaccattagatttccaactagatgaagacaatgaagctatgcatattcaattgcatgaaactggtagcatggtattagtctttgaattcagcggtcacattaccgataatatgacaggtatgtatccatcttactatacagttaatggcatcaaaaaagaggttatctccacacaatttgaaagtcattttgctcgtgaagtattcccaagtattgacgaaccagaagcaaaagcaacctttgatttgagcctaaaattcgatcaaaaagaaggagagattgctctttcaaatatgccggaaatcaatgctgaacaacgtcaagaaacaggtttatggacatttgacaccacacctaaaatgtcctcatatttattagcttttgccttgggggaattgcatggtaaaacaacacataccaaaaacggcactcttgttggctcatatgccacaaaagcccatcagttaaatgaattagatttttctttagatatcgttgtgcgtgttattgagttttatgaggactactttggtgtacgttatcctattcctcagtcactccacgttgctctacctgatttttctgctggagctatggaaaattggggattagtaacatatcgtgaagtctatcttttagtagatgagaactctagtgtttccagccgtcagcaagtagcattagttgtagcacatgaaatagctcaccagtggtttggtaacctcgttactatgaaatggtgggatgatttatggttaaatgaatcatttgctaatatgatggaatatgtatcaattgattatattgaaccaaaacttaatatatttgaagactttcaaacaggtggtctaccattagctcttaagcgtgatgccacagatggcgtccaatctgttcacgttgaggtcaatcatcctgatgaaattaacacactttttgatccagctatcgtttatgcaaaaggtagccgcctcatgcacatgttacgtcgctggttaggcgatacagattttgccgcaggactaaaaatttattttgaaaaacatcaatatcaaaatactattggtcgtgacctttggaatgcactttctcaaacctcaggaaaagatgttgcagctttcatggattcttggttagagcaaccaggataccctgtgatggcagccaaaatagaagaagatgagctcattttaactcaaaaacaattctttattggtgaacacgaagataagtctcgcttgtggcaaattcctcttaatagtaattgggaaggaatcccagagatattaaccgaggaaacggtagtaatccccaattttagtcagttagctgaaaagaacaaagaaaatggtgcactgcgtttcaatactgaaaatactgcacattacattactaactatcaaggtcaactcttagagcatatcatttctgatcttcctcttatggataacatttctaaactacaaattgtacaagaacgtcatttacttgctgaaagtggtatgatttcatatagtagtttaatacctttagtctctcttttgagccaagagacatcatatcttgttaactctgctattaagagtgttattgatggtttatccttattcgtccaggaagatagccaagatgaattcgactttaaagaatttgttaataaattatcagcatttaattttaatagacttggctttgaaaaaagagaaggagaaggagatgatagcgaaatggtccgtcatctatccctaagccttgctctctactcagataatgaacatgctattgaagaagctcaccatatttttaaagcccacgaaaataatatcgctgctataccagctgcaattcgcctgttagttcttaccaatgaaatgaagcatttcgaatccaaagaacttagccacttgttattagagacttatagtactactaccgatgggaatttcaaacgacaactagcgagtgctttatctcatactacagatagcaagacactcaagaaattattgtcagattggaaaaataaagatattgtgaaaccacaagacttagctatgagttggtatgctactttccttaaaaattcttttacacaagaaagtgtctgggagtgggcccaagaaaactgggaatggatcaaagcaactctaggtggtgatatgagttttgataaatttgtgatttatccctcaagtagtttcaaaacagaagaacgccttgaacaatataaaaactttttcgagcctcaattaagcgatatggcgattagccgtaatatttcaatgggaattaaagaaatttctgctcgtgtccttttaatcacgaagcaaaaagaagaagttatcaatactatcaaaaaatatatc

SEQ ID NO: 2072 - protein, 849 aa, Streptococcus agalactiae
MKTVEHFVTKFVPENYNLFLDINRQTKTFSGNVAVSGEALDNNISFHQKGLTIKSVLLDNQPLDFQLDEDNEAMHIQLHETGSMVLVFEFSGHITDNMTGMYPSYYTVNGIKKEVISTQFESHFAREVFPSIDEPEAKATFDLSLKFDQKEGEIALSNMPEINAEQRQETGLWTFDTTPKMSSYLLAFALGELHGKTTHTKNGTLVGSYATKAHQLNELDFSLDIVVRVIEFYEDYFGVRYPIPQSLHVALPDFSAGAMENWGLVTYREVYLLVDENSSVSSRQQVALVVAHEIAHQWFGNLVTMKWWDDLWLNESFANMMEYVSIDYIEPKLNIFEDFQTGGLPLALKRDATDGVQSVHVEVNHPDEINTLFDPAIVYAKGSRLMHMLRRWLGDTDFAAGLKIYFEKHQYQNTIGRDLWNALSQTSGKDVAAFMDSWLEQPGYPVMAAKIEEDELILTQKQFFIGEHEDKSRLWQIPLNSNWEGIPEILTEETVVIPNFSQLAEKNKENGALRFNTENTAHYITNYQGQLLEHIISDLPLMDNISKLQIVQERHLLAESGMISYSSLIPLVSLLSQETSYLVNSAIKSVIDGLSLFVQEDSQDEFDFKEFVNKLSAFNFNRLGFEKREGEGDDSEMVRHLSLSLALYSDNEHAIEEAHHIFKAHENNIAAIPAAIRLLVLTNEMKHFESKELSHLLLETYSTTTDGNFKRQLASALSHTTDSKTLKKLLSDWKNKDIVKPQDLAMSWYATFLKNSFTQESVWEWAQENWEWIKATLGGDMSFDKFVIYPSSSFKTEERLEQYKNFFEPQLSDMAISRNISMGIKEISARVLLITKQKEEVINTIKKYI

SEQ ID NO: 2073 - DNA, 2595 bp, Streptococcus pyogenes
atgatacttaggtatcatctgttgatctattatgatttgttattagaattaaggagttatatgaagacagtagaacatctcatcgaaacatttgtgcctgaaaattataacatctttttagatattaatcgtcagactaaaacatttacggggaatgttgcgattaatggtgaagctttagataatcatgtggctttccaccaaaaagatttggacattaagtctattttgctcgataatgaagctgttatttatcaagtggataacgacaatgaagttgtgcgtgttgaattacctgaaacaggaatgatgacgcttgtcattgaattttcaggtagcattacagataatatgacaggtatttacccttcatattacactaaaaatggtgagaaaaaagaagtcatttcaactcagtttgaaagccattttgcacgtgaagctttcccatgtatcgatgaaccacaagcaaaagctacttttgatttaagcttgacctttgatcaagaaattggtgagatagcgttatcgaatatgccagaagtcaatattgaccgtcgcgaggagactggtctttggacatttgatacgacactaagaatgtcatcttacttgctagcgtttgcgctaggagaacttcatggaaagactgtagaaagcaaaaaaggaacaactgttggtgtgtatgcgacaacagcgcatcctcttagctcgcttgatttttcattggatattgcagttcgtgttatcaacttttatgaagactattttggagtacattacccaatcccgcaatctcttaatattgcgcttccagatttttcatctggtgctatggaaaattggggtttaatcacttatcgtgaaatttatttattagtagatgaaaattcgactgttcaaagccgacaacaagttgcacttgtaatcgcccacgagatagcacaccaatggtttggaaacttggttacaatgaaatggtgggacgatctgtggttaaatgagagttttgccaacatgatggaatatgtctctatcgaggctattgagccgtcttggaaaataatagaagatttccaaacaggcggtattcctcttgctttaaaacgtgatgctactgatggtgttcaatcagtgcatgttgaagtcaatcatccagatgagataaatacattgtttgatcctgctattgtctatgcaaaaggtagtcgtttgatgcatatgttacgccgttttattggtgatcgtgattttgccattggcttacatcactactttgaaaaatatcaatatcgaaatactgtcgggcgtgatttatggaatattttatcagatacttcaggcaaagacgtagctgcttttatggatgcttggcttgaacaaccaggttatccagttttaacagctcgccttgaaaacgatcaattgattttgagtcaaaaacaattttttattggaaaaggtgaagaaaaaggtcgcctttggccgattcctttaaacactaattggcatggccttcctgaaactttgacagaggcagaaatggtcattccaaactttagtcaattggcagcagaaaatgaaggagctctacgtttcaatattgataatacagctcattacattacagactaccaaggatcattattagatgccttagtcactgaacttgcccaacttgataatacttctgctttacaagttattcaagaacgtcgtttattggcagatagtggcttgatttcctatgctgaattggttgacttaattgctcaattggacgattctaagtcttatatggtagcagaagcggttcaacaagtggtctctggtttgaaacgcttcattgatgaaggaagcttagcagaaaaatcctttaatcgcttggtaaccaccatctatcaagaagactttaatcagcatggttttgagaaaaaagctgacgaatcagatgaagatgagatggtacgtcaggttgccttgggccgcttgtggctagcagaaaatcagacgattattgacggattgagaactatttttgaagcatatcaaaacaatattgcaagtattccagcagctgttcgtcgcttggttttagccaaccaaatgaaatattttgaaacagatagcttggttgatatttattttgagacttatgtagcaactactgataataatttacgcagtgatttaacggttgcttttagtcaaacaaaacaaccaactactattagacgtattcttgttagtttaaaagataaagatattattaaacctcaggatttatcttattggtacaatgctttgcttggacaaagctttactcaagatatcatttgggaatgggctagagaaaattgggattggattaaatctgcacttggtggagatatgagctttgataaatttgttatttatccagcaagtaactttaaaacaccaaaacatctagcagaatataaatctttctttgaacctaagctagatgatatggctattagccgtaatattaccatgggaattaatgaaattgaagcacgtgttgctttgattactaaagaaaaagaagcagttattgcagctctcagtcattac

SEQ ID NO: 2074 - protein, 865 aa, Streptococcus pyogenes
MILRYHLLIYYDLLLELRSYMKTVEHLIETFVPENYNIFLDINRQTKTFTGNVAINGEALDNHVAFHQKDLDIKSILLDNEAVIYQVDNDNEVVRVELPETGMMTLVIEFSGSITDNMTGIYPSYYTKNGEKKEVISTQFESHFAREAFPCIDEPQAKATFDLSLTFDQEIGEIALSNMPEVNIDRREETGLWTFDTTLRMSSYLLAFALGELHGKTVESKKGTTVGVYATTAHPLSSLDFSLDIAVRVINFYEDYFGVHYPIPQSLNIALPDFSSGAMENWGLITYREIYLLVDENSTVQSRQQVALVIAHEIAHQWFGNLVTMKWWDDLWLNESFANMMEYVSIEAIEPSWKIIEDFQTGGIPLALKRDATDGVQSVHVEVNHPDEINTLFDPAIVYAKGSRLMHMLRRFIGDRDFAIGLHHYFEKYQYRNTVGRDLWNILSDTSGKDVAAFMDAWLEQPGYPVLTARLENDQLILSQKQFFIGKGEEKGRLWPIPLNTNWHGLPETLTEAEMVIPNFSQLAAENEGALRFNIDNTAHYITDYQGSLLDALVTELAQLDNTSALQVIQERRLLADSGLISYAELVDLIAQLDDSKSYMVAEAVQQVVSGLKRFIDEGSLAEKSFNRLVTTIYQEDFNQHGFEKKADESDEDEMVRQVALGRLWLAENQTIIDGLRTIFEAYQNNIASIPAAVRRLVLANQMKYFETDSLVDIYFETYVATTDNNLRSDLTVAFSQTKQPTTIRRILVSLKDKDIIKPQDLSYWYNALLGQSFTQDIIWEWARENWDWIKSALGGDMSFDKFVIYPASNFKTPKHLAEYKSFFEPKLDDMAISRNITMGINEIEARVALITKEKEAVIAALSHY

SEQ ID NO: 2075 - DNA, 678 bp, Streptococcus agalactiae
atgataaaaattttattaattgaagatgacttgagtctttccaattccgtttttgatttccttgatgactttgccgatgtcatgcaaatttttgatggagaagagggtctttacgaagccgaaagtggagtctatgatctgattcttctagatctcatgttacctgaaaaaaacggcttccaagtgttgaaagagctacgtgaaaaaggtattacaacccctgtattaataatgaccgctaaagaaagcattgatgataagggacaaggtttcgacttaggtgctgatgattatctaacaaaacctttttacctagaagaactaaaaatgcgaattcaggctcttttaaagcgttctggaaaatttaatgataacagcctaatttatggtgatattcgcgtagacatgtctactaactcaacctttgttaatcaaacagaagttgagctcttaggtaaagagtttgatcttttagtctatttccttcaaaatcaaaatgttatcttaccgaaatctcaaatctttgatcgtatttggggatttgatagtgatacaacgatttcagttgtagaagtctatgtctctaaggttcggaaaaaattaaaaggaacacttttttcagaaaaccttcaaactttgcgtagtgtaggatatattttaaagcatgtcgaaaccgat

SEQ ID NO: 2076 - protein, 226 aa, Streptococcus agalactiae
MIKILLIEDDLSLSNSVFDFLDDFADVMQIFDGEEGLYEAESGVYDLILLDLMLPEKNGFQVLKELREKGITTPVLIMTAKESIDDKGQGFDLGADDYLTKPFYLEELKMRIQALLKRSGKFNDNSLIYGDIRVDMSTNSTFVNQTEVELLGKEFDLLVYFLQNQNVILPKSQIFDRIWGFDSDTTISVVEVYVSKVRKKLKGTLFSENLQTLRSVGYILKHVETD

SEQ ID NO: 2077 - DNA, 672 bp, Streptococcus pyogenes
atgataaaaatattattagtagaagatgacttgagcttatcaaattccatttttgattttttagatgattttgcagacgtcatgcaagtttttgatggcgatgaaggtttatacgaagcagaaagtggtatttatgatttgattttgttagaccttatgttgccggagaaaaatggctttcaagtcttaaaagaattgcgagaaaaagatattaaaattcctgtattgatcatgacagctaaagagggtttagatgataaaggccacggatttgaattaggtgctgatgattatctgacaaagccgttctatttagaagagttaaaaatgcgaattcaagcactgttaaaaagaacagggaaatttgcagataaaaatattagttttggcaatttagtggttgacttagctcgaaaagaggtgaaggttgaagggaaagtagttgaattacttggcaaagaatttgatttgttggtgtatcttttgcaaaatcaaaacgttattttaccaaagacacaaatttttgatcgtttatggggattcgatagtgatactacgatttcggttgttgaagtttacatttctaaaataaggaaaaaattaaaaggtacctgttttgttaacaggcttcaaactttaagaagcgtaggatatattctaaaaaacaatgaa

SEQ ID NO: 2078 - protein, 224 aa, Streptococcus pyogenes
MIKILLVEDDLSLSNSIFDFLDDFADVMQVFDGDEGLYEAESGIYDLILLDLMLPEKNGFQVLKELREKDIKIPVLIMTAKEGLDDKGHGFELGADDYLTKPFYLEELKMRIQALLKRTGKFADKNISFGNLVVDLARKEVKVEGKVVELLGKEFDLLVYLLQNQNVILPKTQIFDRLWGFDSDTTISVVEVYISKIRKKLKGTCFVNRLQTLRSVGYILKNNE

SEQ ID NO: 2079 - DNA, 1311 bp, Streptococcus agalactiae
atgtcgaaaccgattaagataagtaaattcaaaaaaaatgtctcagatagtcattttatccattttttcacagtttttagtggtatttttctggttatgactgttatcatcctccaagtcatgcgctatggtgtttattcttctgttgatagtagtttaaagtatatcagtacccatcctaaaaattacatcaatatggttatgtcacgtactgctgcctacctagataactccaatatcgcaagtgtcaagttaaaacccggcggtcagacagtagctaatactgatattattctttttacatcagaagaagaagtcattaactattttgacgcattttcaaactatcagtttttaaaacctaataaaaaaaatctaggtggcattagtgaattaactttaaccaacatctttggtcaagatgagacatatcatgctgtcaccgtaaaagttaataaccctgcttatcctaatgtgacttacatgacagctattgttaatattgatcaattagtaaatgctaaagaacgctatgaaaaaattattatatttgtcatgactactttttggattatttcaattggagcaagtatctacttagctaaatgggcacaaaaaccgattatagaaaactacgaaagacagaaggcttttgtcgaaaatgctagccacgagctgcgtactcccctagctgtcttacaaaatcgcctagaaacgctattcagaaaaccgaatgccaccattttagaaaatagtgaaaatatcgcttcaagtctagatgaagtacgaaatatgcgtattttaaccactaatcttttaaacttagcaagacgtgatgatggaatcaaaccagaattagctgttattaagcctacactttttgatagtatctttgagaattatgatctaatcacccaagagaatggtaaaaattttactggacataatatgatccaagatagtttcaaaacagataagacactgctaaaacaactcatgactattttatttgataatgctataaaatatactgacaatgatggtagcattgactttaccatatctgaaactgataagtatctctttttagaaatcgctgataatggaccaggaatttcagaggaggataaagtcagaatttttgatcgtttttaccgtgttgacaaagcaagaacacgacaacaaggagggtttggcctcggcctttctttagctcaacaaatcgttaactcactgcgaggtaatattacagtaattgataataaacctagaggcagtatttttaagataaaactaccaaaagtaaaaggt

SEQ ID NO: 2080 - protein, 437 aa, Streptococcus agalactiae
MSKPIKISKFKKNVSDSHFIHFFTVFSGIFLVMTVIILQVMRYGVYSSVDSSLKYISTHPKNYINMVMSRTAAYLDNSNIASVKLKPGGQTVANTDIILFTSEEEVINYFDAFSNYQFLKPNKKNLGGISELTLTNIFGQDETYHAVTVKVNNPAYPNVTYMTAIVNIDQLVNAKERYEKIIIFVMTTFWIISIGASIYLAKWAQKPIIENYERQKAFVENASHELRTPLAVLQNRLETLFRKPNATILENSENIASSLDEVRNMRILTTNLLNLARRDDGIKPELAVIKPTLFDSIFENYDLITQENGKNFTGHNMIQDSFKTDKTLLKQLMTILFDNAIKYTDNDGSIDFTISETDKYLFLEIADNGPGISEEDKVRIFDRFYRVDKARTRQQGGFGLGLSLAQQIVNSLRGNITVIDNKPRGSIFKIKLPKVKG

SEQ ID NO: 2081 - DNA, 1308 bp, Streptococcus pyogenes
atgaataaattaaaaaaagagattttatcagataactataaccacttttttcatttttttgcggtttttacaggtatttttgtcattatgactattattatcttacagattatgcggtttggcgtttattcgtcagttgacagtagtttagtttctgttagtaataatgcaagtagctatgctaatcgtacgatggctagaatatcttctttttactttgatactgaaaataacattattaaggcgctgcctgattcagatagttctaagttattaggaacgcctgcagctaatacagatatcattttgtttagtgctaatggaacaattttaaatgcttttgatgcgttttctaactatcaaaattttcatttagataaacgccggttggggagtattgaaaccaccagtttaatgaatttttatggacaagaagaaaaataccatacgataactgtaggggttcatatcaaaaattatcctgcagttgcctatatgatggcagtagtaaatgtggaacaattagaccgcgctaatgaacgttatgagcgcattattattatagttatgagtgttttttggctaatttctattttagcaagtatttatttagccaagtggagcagaaaacctattttagaaagctatgaaaaacaaaaaatgtttgttgaaaatgctagtcatgaattaaggacccctttggcggtcttacagaatcgtctggaatcgctttttcgtaagcccaacgaaacgatattagaaaatagtgagcatctcgcttctagtttagacgaggttcgcaacatgcgcatcttaacaactaatttattaaatttagcaagacgagatgatggcattaatccacagtggactcatttagatacagatttttttaatgctatttttgagaattatgaactagttgctaaagaatatggaaaaatattttattttcagaaccaagtcaatagatcgttaagaatggataaggctttactaaaacaattaataacgattttatttgacaatgctattaaatatacagataaaaatggtattattgaaattatagtgaaaacaacggacaaaaatttattaatttctgttattgataatggtccagggataacagatgaagaaaagaaaaagatttttgatcgtttttatcgagttgacaaagctagaacacggcaaacaggtggatttggcttggggttggctttagctcagcaaatcgtgatgtctttaaaaggaaatattacagtaaaggataatgatcctaaaggtagtatttttgaagtcaaacta

SEQ ID NO: 2082 - protein, 436 aa, Streptococcus pyogenes
MNKLKKEILSDNYNHFFHFFAVFTGIFVIMTIIILQIMRFGVYSSVDSSLVSVSNNASSYANRTMARISSFYFDTENNIIKALPDSDSSKLLGTPAANTDIILFSANGTILNAFDAFSNYQNFHLDKRRLGSIETTSLMNFYGQEEKYHTITVGVHIKNYPAVAYMMAVVNVEQLDRANERYERIIIIVMSVFWLISILASIYLAKWSRKPILESYEKQKMFVENASHELRTPLAVLQNRLESLFRKPNETILENSEHLASSLDEVRNMRILTTNLLNLARRDDGINPQWTHLDTDFFNAIFENYELVAKEYGKIFYFQNQVNRSLRMDKALLKQLITILFDNAIKYTDKNGIIEIIVKTTDKNLLISVIDNGPGITDEEKKKIFDRFYRVDKARTRQTGGFGLGLALAQQIVMSLKGNITVKDNDPKGSIFEVKL

SEQ ID NO: 2083 - DNA, 330 bp, Streptococcus agalactiae
atggaaattgaaaaaacaaatcgtatgaatgccctttttgagttttatgcggcattattaacagataaacaaatgaattatatcgagttatactacgccgatgactacagccttgctgaaatagctgaagaatccggtgttagccgacaagctgtctatgataatatcaaacgaactgaaaaaattcttgaggcgtacgaaatgaaactacatatgtattcagattatattgtccgtagtcagatttttgatgacattctagaaaaatataccgatgatgcctttttacaagaaaaaatttccattctaagtagcattgataatagagat

SEQ ID NO: 2084 - protein, 110 aa, Streptococcus agalactiae
MEIEKTNRMNALFEFYAALLTDKQMNYIELYYADDYSLAEIAEESGVSRQAVYDNIKRTEKILEAYEMKLHMYSDYIVRSQIFDDILEKYTDDAFLQEKISILSSIDNRD

SEQ ID NO: 2085 - DNA, 339 bp, Streptococcus pyogenes
atgaacattatggaaattgaaaaaacaaacaggatgaatgccctttttgaattttatgcagctttgctaacagataaacaaatgaattatattgaactgtattatgccgatgattatagcttagctgagattgctgatgaatttggtgtcagtcgtcaggctgtctatgataatattaagcgtacggaaaaaattttagagacttatgagatgaaacttcatatgtattcggattatgttgttcgaagtgaaatctttgacgacatgattgctcactaccctcatgatgagtatttgcaagaaaaaatttccattctaaccagtattgacaatagagag

SEQ ID NO: 2086 - protein, 113 aa, Streptococcus pyogenes
MNIMEIEKTNRMNALFEFYAALLTDKQMNYIELYYADDYSLAEIADEFGVSRQAVYDNIKRTEKILETYEMKLHMYSDYVVRSEIFDDMIAHYPHDEYLQEKISILTSIDNRE

SEQ ID NO: 2087 - DNA, 1563 bp, Streptococcus agalactiae
atggctttcgaaagtttaacagagcgcctgcaaggagtttttaaaaatattcgtggtaagaaaaagttatctgaaaaagatgtgcaagaagtcaccaaggagattcgtctagctcttttagaagctgacgttgctcttccagttgttaaaacctttattaaacatgttcgtgaacgtgctgttggacatgaaatcattgatacactagatcctacgcaacaaattgttaagattgtcaatgaagagctaacagatttattaggggctgagacctctgaaattgaaaaatcccctaaaattccaaccatcattatgatggttggtctacaaggtgctggtaaaacaacttttgccggtaagttagcaaacaaactaatcaaagaagacaatgctcgtcctatgatgatagcagctgatatttatcgaccagctgctattgatcagttaaaaacccttggtagccagattaatgttcctgtctttgatatgggaactaaccattcagcagttgagattgtcactaaaggtttagaacaggctcgtgaaaatcgtaatgactatgttcttattgatacagccggacgcctacaaattgatgcaacccttatgcaggaattgcatgatgtcaaagccatagctcaacctaatgaaatactccttgtcgttgacagcatgattggacaggaagctgcaaatgtcgctgaagaatttaaccgtcagctcagcattagtggtgttgttctgacaaagattgacggtgatacacgcggtggtgctgccctttcagtacgcgaaattactggaaaaccaattaaatttacagggacaggggaaaaaatcactgatattgaaactttccatcccgatcgtatggcaagccgtatattggggatgggagacctgctaacacttattgagcgcgctagtcaagaatacgacgaaaaacgttcaatggaattagcggagaaaatgcgtgaaaacacctttgacttcaacgattttattgatcaattagatcaagttcaaaatatggggccaatggaagatctccttaaaatgcttccaggaatggctaacaatccagcaatgaaaaacttcaaagtggatgaaaacgaaattgctcgcaaaagagccattgtgtcatcaatgactccagaagagagagaaaatccagatctcctcaatccaagtcgtagacgtcgtattgctgctggatcaggtaatactttcgttgatgttaataaattcattaaagattttaaccaggcaaaacaaatgatgcaaggcgtgatgtccggtgatatgaataaaatgatgaaaaaaatgggaattgatcctaataacctccctaaagatatgcctggaatggacggaatggatatgtctaatttagaaggtatgatggggcaaaatggcatgcctgacttatctagtttaggtggcgatatggacttcagccaaatgtttggtggtggcttaaaaggaaaagtaggagcctttgcagctaaacaatcaatgaaacgtatggctaataaaatgaagaaagctaagaagaaacgcaaa

SEQ ID NO: 2088 - protein, 521 aa, Streptococcus agalactiae
MAFESLTERLQGVFKNIRGKKKLSEKDVQEVTKEIRLALLEADVALPVVKTFIKHVRERAVGHEIIDTLDPTQQIVKIVNEELTDLLGAETSEIEKSPKIPTIIMMVGLQGAGKTTFAGKLANKLIKEDNARPMMIAADIYRPAAIDQLKTLGSQINVPVFDMGTNHSAVEIVTKGLEQARENRNDYVLIDTAGRLQIDATLMQELHDVKAIAQPNEILLVVDSMIGQEAANVAEEFNRQLSISGVVLTKIDGDTRGGAALSVREITGKPIKFTGTGEKITDIETFHPDRMASRILGMGDLLTLIERASQEYDEKRSMELAEKMRENTFDFNDFIDQLDQVQNMGPMEDLLKMLPGMANNPAMKNFKVDENEIARKRAIVSSMTPEERENPDLLNPSRRRRIAAGSGNTFVDVNKFIKDFNQAKQMMQGVMSGDMNKMMKKMGIDPNNLPKDMPGMDGMDMSNLEGMMGQNGMPDLSSLGGDMDFSQMFGGGLKGKVGAFAAKQSMKRMANKMKKAKKKRK

SEQ ID NO: 2089 - DNA, 1563 bp, Streptococcus pyogenes
ttgactatggcttttgaaagcttaacccaacgtttgcaagatgtgtttaaacacattcgcggtaaaaagaaattatcagaatcagatgttcaagaagtgacaaaagagattcgtctagctcttttagaagccgatgtcgctttaccagttgttaaaacctttattaagcgcgtacgtgagcgcgctattggccatgagattattgatactcttgatccaacacaacaaattcttaagattgttaatgaagaattaacgagtattttaggctcagaaactgcagagattgataaatctccaaaaattccaactattatcatgatggtcggtttgcaaggggctggtaaaacaacttttgcaggaaaactcgctaataaattaattaaagaagaaaacgcgcgaccactgatgattgctgccgatatttaccgtccagcggccattgatcagttaaaaacactggggcaacaaatcaatgtacctgtttttgatatggggacagaccactcagcagtcgatattgtcagaaaaggtttggaacaagctcgtgaaaaccacaatgactatgtcttgattgatactgcgggtcgcttgcaaattgatgaaaaactgatgggagagctgcgcgatgtcaaggctttagcacaaccaaatgaaattcttttggttgtagatagcatgattggtcaagaagctgccaatgtagcctacgagtttaatcatcagttgagcatcacaggggttgtgttaacaaagattgatggtgatacacgtggaggtgcggcgctatctgtccgtgaaatcactgggaaaccaattaaatttacaggtattggtgaaaaaatcacagatattgaaacatttcacccagaccgcatgtccagtcggattttgggaatgggggatttgcttaccctcattgaaaaagctagccaggaatatgatgagaaaaaatccttagagttagctgaaaaaatgcgtgaaaacacctttgatttcaatgattttattgaacagttagatcaagtgcaaaatatggggcctatggaagacctcttgaaaatgattccaggaatggctggtaacccagctttggccaatatcaaagttgacgaaaaccaaattgctcgcaaacgtgctattgtctcttcaatgacacccgctgaacgtgaaaatcctgacttactaaacccgagtcgtcgccgtcgtattgcagctggttccgggaacagctttgtagataataaatttatcaaagactttaaccaagccaaaagcatgatgcaaggggttatgtcgggcgatatgtctaaaatgatgaaagatatgggtattaatcccaataatcttcctaaaaacatgcctgctggtatgccagatatgtcttccttagaaggaatgatgggacaaggtggtatgcctgatttatctggccttggtggtgatatggatatgagtcaactatttggtaaagggtttaaaggaaaaattggccaatttgccatgaaacaggccatgaaacggcaggctaacaaactaaaaaaagcaaagaaaaaacgaaaa

SEQ ID NO: 2090 - protein, 521 aa, Streptococcus pyogenes
LTMAFESLTQRLQDVFKHIRGKKKLSESDVQEVTKEIRLALLEADVALPVVKTFIKRVRERAIGHEIIDTLDPTQQILKIVNEELTSILGSETAEIDKSPKIPTIIMMVGLQGAGKTTFAGKLANKLIKEENARPLMIAADIYRPAAIDQLKTLGQQINVPVFDMGTDHSAVDIVRKGLEQARENHNDYVLIDTAGRLQIDEKLMGELRDVKALAQPNEILLVVDSMIGQEAANVAYEFNHQLSITGVVLTKIDGDTRGGAALSVREITGKPIKFTGIGEKITDIETFHPDRMSSRILGMGDLLTLIEKASQEYDEKKSLELAEKMRENTFDFNDFIEQLDQVQNMGPMEDLLKMIPGMAGNPALANIKVDENQIARKRAIVSSMTPAERENPDLLNPSRRRRIAAGSGNSFVDNKFIKDFNQAKSMMQGVMSGDMSKMMKDMGINPNNLPKNMPAGMPDMSSLEGMMGQGGMPDLSGLGGDMDMSQLFGKGFKGKIGQFAMKQAMKRQANKLKKAKKKRK

SEQ ID NO: 2091 - DNA, 720 bp, Streptococcus agalactiae
ttgtctgctataatagacaaaaaggtggtgatatttatgtatttagcattaatcggtgatatcattaattcaaaacagatacttgaacgtgaaactttccaacagtcttttcagcaactaatgaccgaactatctgatgtatatggtgaagagctgatttctccattcactattacagctggtgatgaatttcaagctttattgaaaccatcaaaaaaggtatttcaaattattgaccatattcaactagctctaaaacctgttaatgtaaggttcggcctcggtacaggaaacattataacatccatcaattcaaatgaaagtatcggtgctgatggtcctgcctactggcatgctcgctcagctattaatcatatacatgataaaaatgattatggaacagttcaagtagctatttgccttgatgatgaagaccaaaaccttgaattaacactaaatagtctcatttcagctggtgattttatcaagtcaaaatggactacaaaccattttcaaatgcttgagcacttaatacttcaagataattatcaagaacaatttcaacatcaaaagttagcccaactggaaaatattgaacctagtgcgctgactaaacgccttaaagcaagcggtctgaagatttacttaagaacgagaacacaggcagccgatctattagttaaaagttgcactcaaactaaagggggaagctatgatttc

SEQ ID NO: 2092 - protein, 240 aa, Streptococcus agalactiae
MSAIIDKKVVIFMYLALIGDIINSKQILERETFQQSFQQLMTELSDVYGEELISPFTITAGDEFQALLKPSKKVFQIIDHIQLALKPVNVRFGLGTGNIITSINSNESIGADGPAYWHARSAINHIHDKNDYGTVQVAICLDDEDQNLELTLNSLISAGDFIKSKWTTNHFQMLEHLILQDNYQEQFQHQKLAQLENIEPSALTKRLKASGLKIYLRTRTQAADLLVKSCTQTKGGSYDF

SEQ ID NO: 2093 - DNA, 663 bp, Streptococcus pyogenes
atgacatatatagcgcttattggagatattatccagtccaaacaattgacggatcgttccaaagttcaaaaaactttagcagcttatttagacgacctcaacaaaacctttgctccttatattatttctaaattatccctaacgttgggagatgaatttcaaggactttttcaggtggatactcctattttccatctgattgatttgattaatcatcacatggatatccctattcgatttggagtaggagtaggttctattctaacagacatcaatcctgatattagtattggggctgatggacctgcttattggcatgctcgtgaggctattcgttatattcatcaaaaaaatgattatggtaatactacattagctcttcggactggtcatcacaaccaggatgatgtattaaacagtttactagcagctggagatgctattaaagccaactggcgagctagtcaatgggaaatttttgacacgcttttagatttgggcatttatgaggaatactttgatcaacaacgactaggaaagcaattatctcttagctctagcgctttgtcaaaacgtctaaaaagtagtcatgttaaaatttatctgagaacacggcagagtgcgctaaactgtctcaaacaaatcaaggaggaaactgatgat

SEQ ID NO: 2094 - protein, 221 aa, Streptococcus pyogenes
MTYIALIGDIIQSKQLTDRSKVQKTLAAYLDDLNKTFAPYIISKLSLTLGDEFQGLFQVDTPIFHLIDLINHHMDIPIRFGVGVGSILTDINPDISIGADGPAYWHAREAIRYIHQKNDYGNTTLALRTGHHNQDDVLNSLLAAGDAIKANWRASQWEIFDTLLDLGIYEEYFDQQRLGKQLSLSSSALSKRLKSSHVKIYLRTRQSALNCLKQIKEETDD

SEQ ID NO: 2095 - DNA, 114 bp, Streptococcus agalactiae
ttgaaatttattaaagaaaattttaaacacaatattaatgggtttggtgataatgataaaaaccagagctatgacaataaagtgcttgataggcaaaagccaatgattaggcgg

SEQ ID NO: 2096 - protein, 38 aa, Streptococcus agalactiae
MKFIKENFKHNINGFGDNDKNQSYDNKVLDRQKPMIRR

SEQ ID NO: 2097 - DNA, 771 bp, Streptococcus agalactiae
atgatttctgattttttaagggataatccaatcctaactttattattttgtgcacattttttagctgactttcagtggcaaagtcaatccttagcagatagtaaatcacatagttggaggggactctggagacatctcttgattgttttcctccccctagcagctttaatgatattgataccagaaactactttgttaaatttaagcatatggggaagtcatattgttattgatagtataaagaaattgagttacccttgggtagaggaagggcatttccaaaaagcagcttttattatagaccaactagcccactatacttgcattatcgttttttaccatgcgcttcctacatatttaccgcctaatcattggcttttgcctatcaagcactttattgtcatagctctggtttttatcattatcaccaaacccattaatattgtgtttaaaattttctttaataaatttcaagctaaagaattatcatcattattaacacaagaaaaaacaaaaataatgaaagaaaaatctgaagatcatgaagaaacaattgaaggagcaggagctatgattggtaatttagagcgtctaattatggctatattactaatctcaggacagtatgctgctataggtcttgtttttactgcaaaatccattgcacgttacgataaaatttctaaaagtcaggtttttgccgaatattatttaattggatcattgttctcaattataagtgttttgataactcattggttacttttggta

SEQ ID NO: 2098 - protein, 257 aa, Streptococcus agalactiae
MISDFLRDNPILTLLFCAHFLADFQWQSQSLADSKSHSWRGLWRHLLIVFLPLAALMILIPETTLLNLSIWGSHIVIDSIKKLSYPWVEEGHFQKAAFIIDQLAHYTCIIVFYHALPTYLPPNHWLLPIKHFIVIALVFIIITKPINIVFKIFFNKFQAKELSSLLTQEKTKIMKEKSEDHEETIEGAGAMIGNLERLIMAILLISGQYAAIGLVFTAKSIARYDKISKSQVFAEYYLIGSLFSIISVLITHWLLLV

SEQ ID NO: 2099 - DNA, 714 bp, Streptococcus pyogenes
atgattaatggtgtctctcactacctagctcaaacccctacacttaccctgtttctcatttgtcatgtgttatcagactaccagttacaaagtcagcaagtagctgatttaaaagaaaaacatttgacttatttaggttaccacttgattggagttagcattcccctaatttgtttaaccctcattatcccacaagcatggttgatgagcctattggttatgataagtcacgcgcttattgactggctaaagccaaagatggctaactctctaaaatggaaaagagagtggatttttctgctggatcaatgcttacatatcgctattagttcatttgctgggctaaggttagcaggggtgaccttgcctaattggcttccgatatctattttgatgaccgttttatttatcctactcattaccaaaccaactaatattgtctttaaactctttttcatcaaataccagcctgaccaaggagaaaaaatggacacgatcataggagcgggggctaccataggaattctagagagaattgttattggggtgtgtatgatcatggggcaatttgcttcaataggtctggtctttaccgctaaatctattgctcgctataataaaatttcggaaagtccagcttttgcagaatactacctaattggttctttatttagtattctcagtgtttttatcgcagcatggatttgtttcttc

SEQ ID NO: 2100 - protein, 238 aa, Streptococcus pyogenes
MINGVSHYLAQTPTLTLFLICHVLSDYQLQSQQVADLKEKHLTYLGYHLIGVSIPLICLTLIIPQAWLMSLLVMISHALIDWLKPKMANSLKWKREWIFLLDQCLHIAISSFAGLRLAGVTLPNWLPISILMTVLFILLITKPTNIVFKLFFIKYQPDQGEKMDTIIGAGATIGILERIVIGVCMIMGQFASIGLVFTAKSIARYNKISESPAFAEYYLIGSLFSILSVFIAAWICFF

SEQ ID NO: 2101 - DNA, 1659 bp, Streptococcus agalactiae
atgtctagttttaatagaaaaaaacttaagtttttgggtatatctttggcgactctaacagccaccacagttaccctggttgcctgtggtaatgagtcaaagaactctggagataataaagttattaattggtatattcctactgaaatcagtacattggacatttcaaagaatacagatgcttattcaaacttagctataggtaattcaggcagcaatttacttagaattgataaagagggcaaaccaaaacccgatttagctaaaaaagtatccgtttcttctgatggtcttacttatactgctacacttcgtgataatttaaaatggtcagatggaagcaaactaagcgctgaagattttgtttacacatggcggagaatagttgatcctaaaactgcatctgaatatgcttacttggcgacagaatcgcaccttttaaatgctgataagattaattctggagatattaaagatttaaataaacttggtgtaacagctaaaggcaatcaagtgacctttaaattgacaagtccatgccctcaatttaaatattatttagccttctctaattttatgcctcaaaaacaatcgtatgttgaaaaagttggtaaagattatggtacaacatcaaaaaatcaaatttactcaggtccttaccttgttaaggattggaatggttcaaatggtaaatttaaattagtcaaaaataaatattattgggattctaaacatgttaaaacaaatagtgtcatagttcaaactatcaaaaaaccagatactgcagttcaaatgtacaagcaaggtcagattgattttgctgaaatatcaggaacttctgctatttatcaagctaataaaaataataaagatgtagtagatgcgtctgatgcacgtactacatatattatttataaccaaactggttcggttaaagcattgacaaatcagaaaattaggcaagctttgaatttagcgactgatcgtaaaggtgttgttaaagcggcagttgatacaggttcaactcctgctgaatctctggtccctaaaaaattagccaaattacctaatggtgaggatctttccaagtatactgccccaggttatacgtataatacaagtaaagctcaaaaactttttaaagaaggtcttgctgaggttggtcagtcatctctcaagttaacaatcacagctgattcggactctccagcagctaaaaatgctgttgactatgtgaaatctacatgggagagtgctttgcctggtctaactgttgaagaaaaatttgttactttcaagcaacgccttgaagatgcaaaaaatgaaaattttgatgtcgtgctcttctcatggggaggagattatccagaaggatcaactttctatgggttattcacgactaattctgcgtataattatggtaaattttcttctaaagagtatgacaatgcctatcaaaaggcaattactactgacgccttgaaaccaggagatgccgctaatgattacaaaactgctgaaaaagctttatttgatcaatcatattataacccagtttattacctagggaaaaaaggactccaaaattctaaattaaaggggttggtaagaaattcaactggtttgaatgttgattttacttatgcttataagacagaa

SEQ ID NO: 2102 - protein, 553 aa, Streptococcus agalactiae
MSSFNRKKLKFLGISLATLTATTVTLVACGNESKNSGDNKVINWYIPTEISTLDISKNTDAYSNLAIGNSGSNLLRIDKEGKPKPDLAKKVSVSSDGLTYTATLRDNLKWSDGSKLSAEDFVYTWRRIVDPKTASEYAYLATESHLLNADKINSGDIKDLNKLGVTAKGNQVTFKLTSPCPQFKYYLAFSNFMPQKQSYVEKVGKDYGTTSKNQIYSGPYLVKDWNGSNGKFKLVKNKYYWDSKHVKTNSVIVQTIKKPDTAVQMYKQGQIDFAEISGTSAIYQANKNNKDVVDASDARTTYIIYNQTGSVKALTNQKIRQALNLATDRKGVVKAAVDTGSTPAESLVPKKLAKLPNGEDLSKYTAPGYTYNTSKAQKLFKEGLAEVGQSSLKLTITADSDSPAAKNAVDYVKSTWESALPGLTVEEKFVTFKQRLEDAKNENFDVVLFSWGGDYPEGSTFYGLFTTNSAYNYGKFSSKEYDNAYQKAITTDALKPGDAANDYKTAEKALFDQSYYNPVYYLGKKGLQNSKLKGLVRNSTGLNVDFTYAYKTE

SEQ ID NO: 2103 - DNA, 1068 bp, Streptococcus agalactiae
atgaaacgtgaattactactcgaaaaaatcgatgaactaaaagaaattatgccttggtatgttctagaatattatcaatcaaagctttctgttccttatagtttcacaacactctacgaatatttaaaagaatatagacgttttcttgaatggttattggattctggtgttgctaattgtcatcacattgcagaaattgagctttcagttttagaaaaccttactaaaaaagatatggaagcttttatactatatttacgagaacgccctttattaaatgctaacacaaggcaaaatggggtgtctcaaaccaccattaacagaactctatctgccttatctagtcttttcaaataccttactgaagaggttgagaatgctgacggggagccttacttttatcgcaatgtcatgaaaaaagtctcaaccaaaaagaaaaaggaaactttagcttctcgggcagaaaatattaaacaaaagttatttttgggcaatgaaacgatagaattcttagagtatatagattgtgaatatcaaaacaaactttccaaacgtgctttagcttttttcaacaaaaataaagagagagatttagctattattgctttgctactagcttcaggagtgcgtctatctgaggcagtaaacttagatttaaaggatattaaccttaatgtaatggttattgatgtcacacgaaaaggggggaaaagggactctgtcaatgtcgctagctttgcgaagccctaccttgctaattatttagacatccgtaaaaatagatacaaagcagaaaatcaggacattgctctatttttatcagaataccgtggggtgccaaatcgtattgatgcttcaagtgtagagaaaatggttgctaagtattcccaggattttaaggttcgtgtaacacctcataaactaaggcatactcttgctactaggctatatgatgctacaaaatctcaagtattagttagccaccaactaggtcatgcttccactcaagttactgacctatatacccatattgttaacgatgaacaaaagaacgctttagataaacta

SEQ ID NO: 2104 - protein, 356 aa, Streptococcus agalactiae
MKRELLLEKIDELKEIMPWYVLEYYQSKLSVPYSFTTLYEYLKEYRRFLEWLLDSGVANCHHIAEIELSVLENLTKKDMEAFILYLRERPLLNANTRQNGVSQTTINRTLSALSSLFKYLTEEVENADGEPYFYRNVMKKVSTKKKKETLASRAENIKQKLFLGNETIEFLEYIDCEYQNKLSKRALAFFNKNKERDLAIIALLLASGVRLSEAVNLDLKDINLNVMVIDVTRKGGKRDSVNVASFAKPYLANYLDIRKNRYKAENQDIALFLSEYRGVPNRIDASSVEKMVAKYSQDFKVRVTPHKLRHTLATRLYDATKSQVLVSHQLGHASTQVTDLYTHIVNDEQKNALDKL

SEQ ID NO: 2105 - DNA, 1104 bp, Streptococcus pyogenes
ttgaaaaaattgttattgttaaggaattatgatgatatgagacgcgaattattactagaaaaaattgaaacctacaaggctatcatgccctggtatgttttagattattaccaatccaaattagctgttccatacagctttaccaccttatatgagtatttaaaagaatacaaacgcttttttgattggctgatggatgctgatttaacgcaggcgccaaagattgctgatattgacttgagcacgcttgagcaccttaccaagaaggatttagaggcctttgtgctttatttgcgggaacgaccttctctcaacacctattccaccaaagaggggctttctcaaaccactattaatcggaccttgtctgccttatcaagcctttacaagtacttgactgaagaggttgaaaatgaccaaggggagccttatttttatcggaatgttatgaaaaaagtgtcaacaaaaaagaaaaaagaaaccctggcttccagagcggaaaatattaagcagaaactgtttttaggtgatgaaactctagctttcttggattatgtggataaggaatatgagcaaaaattgtctaatcgtgccaaatcttctttccgtaaaaataaggagagggatttggctattattgctctactacttgcttctggtgttcgtttgtctgaagcagtgaatcttgatttaaaagatgtcaatctaaatatgatgattatcgaagttattcgcaaaggcggaaaacgtgattcagtcaatgtagcaggttttgcgaaaggttatttggagtcttatttagctgttcgtcagagacgttacaaggctgaaaaacaggatcttgctttctttttaacagaataccgtggcgttccaaatcgaatggatgcttctagtatagaaaagatggttggcaagtactctgaggattttaaaattcgtgtgactcctcacaaattgcgtcatacgctagcgacaagactatatgatgctactaaatctcaggtgttagttagtcatcaattaggccattcctctactcaagtcacggatctttatacccatattgtcaatgatgagcaaaaaaatgctttagataacctt

SEQ ID NO: 2106 - protein, 368 aa, Streptococcus pyogenes
LKKLLLLRNYDDMRRELLLEKIETYKAIMPWYVLDYYQSKLAVPYSFTTLYEYLKEYKRFFDWLMDADLTQAPKIADIDLSTLEHLTKKDLEAFVLYLRERPSLNTYSTKEGLSQTTINRTLSALSSLYKYLTEEVENDQGEPYFYRNVMKKVSTKKKKETLASRAENIKQKLFLGDETLAFLDYVDKEYEQKLSNRAKSSFRKNKERDLAIIALLLASGVRLSEAVNLDLKDVNLNMMIIEVIRKGGKRDSVNVAGFAKGYLESYLAVRQRRYKAEKQDLAFFLTEYRGVPNRMDASSIEKMVGKYSEDFKIRVTPHKLRHTLATRLYDATKSQVLVSHQLGHSSTQVTDLYTHIVNDEQKNALDNL

SEQ ID NO: 2107 - DNA, 936 bp, Streptococcus agalactiae
atgatacgccagtttttaagagaacacttgatttggtatattttatatatcatgatgtttgtcctattttttattagtttctatctatatcatttaccaatgccctatttgtttaattccttaggtttaaatgttattgttttactaggaattagtatttggcaatacagtcgttacaggaaaaaaatgttacatctcaaatattttaatagtagtcaggacccctctttcgaacttcaaccgagtgattacgcttattttaatattattacacaattagaagctagagaagcgcaaaaagtttctgaaacaattgaacaaaccaatcatgttgcacttatgataaagatgtggtcgcaccaaatgaaagttccattggcagctatttcattaatggcccagacaaatcatctcgatcctaaggaagttgaacaacaattattgaaattgcaacattatcttgaaacgttgttagcatttttgaaatttagacaatatcgtgacgattttcgttttgaagctgttagccttagagaagtagtagtagaaattataaaatcgtataaggttatttgtctatccaaaagcttatctatcataattgaaggcgataatatctggaaaacagacaaaaagtggttaacttttgctctttcacaggtgctagataatgccataaaatattctaatcctgagtcaaagataataataagcataggagaagagagtattagaatacaagactacggtatcggcatactcgaagaagatatccctagactttttgaagatggctttacgggttacaacggtcatgagcaccaaaaggcaacaggcatggggttatatatgacaaaagaagtcttatctagtctgaatttgtccatttcggtggatagcaaaattaattatgggactgctgtttctatacataaa

SEQ ID NO: 2108 - protein, 312 aa, Streptococcus agalactiae
MIRQFLREHLIWYILYIMMFVLFFISFYLYHLPMPYLFNSLGLNVIVLLGISIWQYSRYRKKMLHLKYFNSSQDPSFELQPSDYAYFNIITQLEAREAQKVSETIEQTNHVALMIKMWSHQMKVPLAAISLMAQTNHLDPKEVEQQLLKLQHYLETLLAFLKFRQYRDDFRFEAVSLREVVVEIIKSYKVICLSKSLSIIIEGDNIWKTDKKWLTFALSQVLDNAIKYSNPESKIIISIGEESIRIQDYGIGILEEDIPRLFEDGFTGYNGHEHQKATGMGLYMTKEVLSSLNLSISVDSKINYGTAVSIHK

SEQ ID NO: 2109 - DNA, 1500 bp, Streptococcus pyogenes
atggaaaatcagaaacaaaaacagaagaaatataaaaattcgttaccaaaacgactatctaatatcttttttgttctttttttctgcattttctctgcctttacactgattgcctatagttcaacaaactatttcttattgaagaaagaaaagcagtcagtctttcaagctgtaaatattgttagagttcgtctttctgaggtggactctaattttacattagagaacttagcagaagttttgtacaaaaacgataaaacacatctgagaattgatgacagaaagggcagtcgagtcattaggagtgagcgcgatatcacaaatactctagatgcgaatcaagatatttatgtctataacattgataaacagatgatttttaccacagataacgaagaatcatctcctggcttgcatggtcctatcggtcgtgtgtatcacgaccatatcgaagatcagtatcgtgggttttccatgacacaaaaggtatattctaatcggactggaaaatttgtgggctatgttcaagtctttcatgatttaggcaattattatgtcattagagcaagactgctgttttggctactagttgttgagttatttggcacaagcttagcctatttaatcatcttaattactacgcggcgctttttgaagcctttacacaatttacatgaagtgatgcgtaatatctctgaaaatcctaataatttaaacctgcgctcagatatttcgtcaggagatgaaatcgaagaattgtctgttatctttgacaatatgttagacaaattggagacacatactaagttgcaatcacgttttattagtgatgtcagccatgaattacgaacaccggttgcgattattaaagggcatattggtctcttacaacgttggggtaaagatgacagtgatattcttgaagaaagcttgacagcaacagcgcatgaggctgaccgtatggcaatcatgattaatgatatgttagacatgattcgcgtacaaggctcatttgagggacatcaaaatgatatgacagttttggaagattctattgaaactgttgttggtaattttagagttttaagagaagattttatctttacatggcagtcagaaaatccaaaaacgatagcccgtatttataaaaatcattttgagcaggctttgatgattctgattgacaatgctgtgaagtattcccgtaaagaaaagaaaatcgcgattaacctttcagtgactggcaaacaagaagctattgttagagttcaagataaaggcgaaggaatttctaaagaagatattgaacatatctttgaacgcttttatagaacggataaatcacgtaatcgaacaagtacccaggctggattagggattggcttgtctattctcaagcaaattgtagatgggtatcatttacagatgaaggttgaaagtgaattaaatgaaggttcagtgtttatcttacatattcctttggcccagtctaaagagagt

SEQ ID NO: 2110 - protein, 500 aa, Streptococcus pyogenes
MENQKQKQKKYKNSLPKRLSNIFFVLFFCIFSAFTLIAYSSTNYFLLKKEKQSVFQAVNIVRVRLSEVDSNFTLENLAEVLYKNDKTHLRIDDRKGSRVIRSERDITNTLDANQDIYVYNIDKQMIFTTDNEESSPGLHGPIGRVYHDHIEDQYRGFSMTQKVYSNRTGKFVGYVQVFHDLGNYYVIRARLLFWLLVVELFGTSLAYLIILITTRRFLKPLHNLHEVMRNISENPNNLNLRSDISSGDEIEELSVIFDNMLDKLETHTKLQSRFISDVSHELRTPVAIIKGHIGLLQRWGKDDSDILEESLTATAHEADRMAIMINDMLDMIRVQGSFEGHQNDMTVLEDSIETVVGNFRVLREDFIFTWQSENPKTIARIYKNHFEQALMILIDNAVKYSRKEKKIAINLSVTGKQEAIVRVQDKGEGISKEDIEHIFERFYRTDKSRNRTSTQAGLGIGLSILKQIVDGYHLQMKVESELNEGSVFILHIPLAQSKES

SEQ ID NO: 2111 - DNA, 666 bp, Streptococcus agalactiae
atgtcacaagagcaaggaaaaatttatattgtagaagatgatatgacgattgtgtcacttttaaaagatcatttatcagctagctatcatgtctctagtgtcagcaattttcgtgatgtgaaacaagaaattatcgcatttcaacccgatttgatactaatggatattacgttaccctattttaatggtttttactggactgcagaattgcgtaagtttttaacaattcctattattttcatttcatctagtaatgatgaaatggatatggttatggcattaaatatggggggtgatgactttatttcaaaaccattctctctagctgtattagatgctaagctaactgctattttaaggagaagtcaacaatttatccaacaggaattaacttttgggggatttacgttgacaagagaagggttattgtctagccaagataaagaggttattttatcgccaacagaaaataaaatcctatctatcttgctcatgcatcctaaacaagtagtctcaaaagagtctctattagagaaactttgggaaaatgatagttttattgatcaaaatacacttaatgttaatatgacacgcttacgtaaaaaaattgtcccaataggttttgattacattcatacagtgagaggagttgggtatttactacaa

SEQ ID NO: 2112 - protein, 222 aa, Streptococcus agalactiae
MSQEQGKIYIVEDDMTIVSLLKDHLSASYHVSSVSNFRDVKQEIIAFQPDLILMDITLPYFNGFYWTAELRKFLTIPIIFISSSNDEMDMVMALNMGGDDFISKPFSLAVLDAKLTAILRRSQQFIQQELTFGGFTLTREGLLSSQDKEVILSPTENKILSILLMHPKQVVSKESLLEKLWENDSFIDQNTLNVNMTRLRKKIVPIGFDYIHTVRGVGYLLQ

SEQ ID NO: 2113 - DNA, 1962 bp, Streptococcus agalactiae
gtgaataatatgttttatctcaaaatagcctggcataatttaaaacattctatagaccagtacataccattcctcttagccagtttattactttattcattgacttgttctacgctactaatcttaatgagtgctgttggaagagatatggggacagcggcaacggttctttttcttggagtgattgttttgtcaatctttgcggtagtcatggaacattatagctacaatatcttgatgaaacagcgtagtagtgaatttggactgtataacattttggggatgaataaacgtcaagttgcgcgtgtagctagtctagagctgtttattatttatatatttcttatttctataggaagtctgtttagtgctttttttgctaaatttatttatttaatttttgtcaacattattaactatcatgcactaaatcttagtttaagtttatggccatttattatttgtatcgttatatttacaggtatttttctgactttagaagttccagttattcgacatgttcatttatcatccccattaagtctttttagaaagaaacaacagggagaaaaagaaccaaaaggtaatcttatacttgcaattttagcgttagtagctatcgccatcgcttatacaatggctcttacttcaggtaaagcacctgcattagctgttatctatcgtttcttctttgcagtacttttagttattgctggtacttatcttttttatattagttttatgacatggtacttaaaaaggttgcgtcaaaacaagcattattattataaatctgagcattttgtatcaacttcgcaaatgatttttcgaatgaagcaaaatgcagtagggttagcaagtatcactttattagctgttatggctctagttactattgctacaacagtctcactttattcaaatacacaaaatgttgttaccggactatttccaaaatcagtaagtttatcaatagataattcaaaaggtgacgcgaaaaatatatttgaagaaaagattttgaagaaactaggtaagtcatctaaggaagctatcacttataatcagacaatgatttcgatgccagttagtcaatcaagtgaacttaatatcacatctaaaaacgtcaaacatgttgatatcacaaaaacgggttttatgtacctaattactcagaatgatttccgtcgtttaggtcaccaattaccaaaattaaaagataaccaagtggcttactttgttcaaaaaggtgatagccgtttgaaaaaaataaatctattgggaaataaatttgacgttgtaaaaaatttaaaagaggcttatgtcccagagactacaaatacttacaacccgggtttgattatatttgcaaacaacaaacaaattgacaatattagaaaagcatatttaccttatactaagaacatcaatacttttccaaaaacctttaaggcatatttggatttgaatagtcaagagataaattcaatttctaaaaacgacataatagaggtagatggtaagtatgttggaaatattagcactaaacagagttttctaaaagaaggttatcaaatgtttggtgggttattatttactggatttctgttaggtataagctttttgctaggtatagctctaattgtttactataagcaatactcagaaggtcatgaagataagagatcttatcgtatcttacaagaagtaggtatgagcaaaaaattagttaaacggactattaattctcaaattatgattttcttcttccaacctttagtggtagcagttattcactttggagttgctattccaatgctaaaacagatgcttttggtatttggggtgcttaactcaacaatcgtatatgtagtaagtggtttgacagtacttgcgatttctataatttactttatcatttaccgtataactagtcgaacttattatcatattattgaacgc

SEQ ID NO: 2114 - protein, 654 aa, Streptococcus agalactiae
MNNMFYLKIAWHNLKHSIDQYIPFLLASLLLYSLTCSTLLILMSAVGRDMGTAATVLFLGVIVLSIFAVVMEHYSYNILMKQRSSEFGLYNILGMNKRQVARVASLELFIIYIFLISIGSLFSAFFAKFIYLIFVNIINYHALNLSLSLWPFIICIVIFTGIFLTLEVPVIRHVHLSSPLSLFRKKQQGEKEPKGNLILAILALVAIAIAYTMALTSGKAPALAVIYRFFFAVLLVIAGTYLFYISFMTWYLKRLRQNKHYYYKSEHFVSTSQMIFRMKQNAVGLASITLLAVMALVTIATTVSLYSNTQNVVTGLFPKSVSLSIDNSKGDAKNIFEEKILKKLGKSSKEAITYNQTMISMPVSQSSELNITSKNVKHVDITKTGFMYLITQNDFRRLGHQLPKLKDNQVAYFVQKGDSRLKKINLLGNKFDVVKNLKEAYVPETTNTYNPGLIIFANNKQIDNIRKAYLPYTKNINTFPKTFKAYLDLNSQEINSISKNDIIEVDGKYVGNISTKQSFLKEGYQMFGGLLFTGFLLGISFLLGIALIVYYKQYSEGHEDKRSYRILQEVGMSKKLVKRTINSQIMIFFFQPLVVAVIHFGVAIPMLKQMLLVFGVLNSTIVYVVSGLTVLAISIIYFIIYRITSRTYYHIIER

SEQ ID NO: 2115 - DNA, 1905 bp, Streptococcus pyogenes
atgatttggtcaattacaaaatctaacattaaaaaaaatttttcgttatatcgtatctattttctagctacgattggtttattaagtatttttatagcttttctaaattttatctcagataaaatcattacagaaaaaattggggatagtggtcaagctctagttatcgctaatgggtcattgatttttttgattgtatttttggtggtattcttaatttacttcaataatttctttgtaaaaaaacgtagtcaagagcttggagtcttagcaatactagggttttcaaaaagagaattaacaaaattactaactttagaaaatcttgttattctagttctgagttacttggtaagtttattgctgggaccgactttatattttttagctgtactggcaattactcatctattgaatttaacaatggaagttcagtggtttattacagttaatgagattatagagtctttaggaatattagtcgtagtttttctgattaatgtcatcacaaatggacttatcattagtaaacagtctttgattgaatttgttaatttctcaagaaaggctgagaaaaaaattaagataagaaaagtcagagctattattgctatcactgcattgctattgtcatatattttatgtttggcgacagtgttttcatccacacgaaatatgctattaagcatagggatggtaccggtttctctattgataattgtcttagttgttttaggaacagtgttcaccatcagatatggattggcttttgtagtttcgttgttaaaagaaaataaaaaaaggttataccgtcctctgtctaatatcatctatcccaaatttaactatcgtattgcaacaaaaaataaattattaacagtcttgggaggtcttttaacagtaaccgtttcagttgccggaatgatggtaatgctctatgcttattctcttaatgggatagagaggttgactccatctgccatagaatataatgttgaatcagaaaacggtcaagtcaatgttacaactattttagagaacgaccaagtgagcttggttgatgtcggcctgttgcgattgaatactatcccagaggtgactatcacagactctgggcaaacaataccttattttgatataattaactacagtgactacaaagagttaatgaaagctcaaggcagaacaaattctattgaaggtagtaagtcactcccattgttaataaattattatccaacagaaattagccttggaaaaacctttaacttaggaaatgcatatgatgttactgtaaaacaagtatcaacgaataatgtttttagtttttctacaagtgtcacgaccctggttgtttctgataaattatatgctaaacttagttctcgttttccagagaaagaaatgacaattaggacttttaatggaacttcgattaggtcaagtgaagcattttacaatcagtttagtatggttcctgatgttatcagtagttatagtaaggaacacacagtaaagactgctaatattgcgacttatatctttataactttcctatccatactctttattatttgtacaggtagtattctgtactttacaagcctcatcgaaatcatggaaaataaagaagaatatggctatctaagtaagctaggttatagtaaaaaaatgattcatcggattcttcgatatgaaacaggtatacttttccttattcctgtattcattgggattgtaaatggtggtatgttgcttatttactataaatatttattcatggatacattggtagcaggcaatatcataatgttatctttattgctttgtctgcttttcttcttgataatatatggcacattttatgtattgacattgcggttagtgacatccataatcaaaaat

SEQ ID NO: 2116 - protein, 635 aa, Streptococcus pyogenes
MIWSITKSNIKKNFSLYRIYFLATIGLLSIFIAFLNFISDKIITEKIGDSGQALVIANGSLIFLIVFLVVFLIYFNNFFVKKRSQELGVLAILGFSKRELTKLLTLENLVILVLSYLVSLLLGPTLYFLAVLAITHLLNLTMEVQWFITVNEIIESLGILVVVFLINVITNGLIISKQSLIEFVNFSRKAEKKIKIRKVRAIIAITALLLSYILCLATVFSSTRNMLLSIGMVPVSLLIIVLVVLGTVFTIRYGLAFVVSLLKENKKRLYRPLSNIIYPKFNYRIATKNKLLTVLGGLLTVTVSVAGMMVMLYAYSLNGIERLTPSAIEYNVESENGQVNVTTILENDQVSLVDVGLLRLNTIPEVTITDSGQTIPYFDIINYSDYKELMKAQGRTNSIEGSKSLPLLINYYPTEISLGKTFNLGNAYDVTVKQVSTNNVFSFSTSVTTLVVSDKLYAKLSSRFPEKEMTIRTFNGTSIRSSEAFYNQFSMVPDVISSYSKEHTVKTANIATYIFITFLSILFIICTGSILYFTSLIEIMENKEEYGYLSKLGYSKKMIHRILRYETGILFLIPVFIGIVNGGMLLIYYKYLFMDTLVAGNIIMLSLLLCLLFFLIIYGTFYVLTLRLVTSIIKN

SEQ ID NO: 2117 - DNA, 750 bp, Streptococcus agalactiae
atgttattagaaatcaatcacttagaaaaagtttttcgtacacgtttttcaaaagaagagacaagggctctacaagacgtcgattttaaagttgaacaaggggaattcattgctattatgggagagtctggttcgggaaaaacaactctgctaaatattttagctactttagaaaaaccgacaaatggacaagtgattttaaatggggaagatattacgaaaattaaagaggcaaaattagcgagttttcgtttgaaaaatcttggtttcgtctttcaggacttcaaccttttggatactctctctgtaagagataatatctatcttcctttagttcttgatcgtaaacgttacaaagaaatggatcatcgtttgtcagaattatcttctcatctgagaattgatgacttattagataagagacctttcgagctctctggtgggcaaaagcaacgtgtagcgattgctcgtagtttgataaccaaccctcaaattttattagcagatgaaccaacagcagcgttagattaccgtaattcagaagacttgctgaatttatttgaaactattaacttggatggacaaactattttgatggtaacccattcagcaaatgctgctagtcatgccaaacgcgttttatttatcaaagatggacgtatttttcaccaactttatcgtggtaataagaataatagcgaattcaataaagatatttctttaacaatgtctgccatattagggggtgaa

SEQ ID NO: 2118 - protein, 250 aa, Streptococcus agalactiae
MLLEINHLEKVFRTRFSKEETRALQDVDFKVEQGEFIAIMGESGSGKTTLLNILATLEKPTNGQVILNGEDITKIKEAKLASFRLKNLGFVFQDFNLLDTLSVRDNIYLPLVLDRKRYKEMDHRLSELSSHLRIDDLLDKRPFELSGGQKQRVAIARSLITNPQILLADEPTAALDYRNSEDLLNLFETINLDGQTILMVTHSANAASHAKRVLFIKDGRIFHQLYRGNKNNSEFNKDISLTMSAILGGE

SEQ ID NO: 2119 - DNA, 672 bp, Streptococcus pyogenes
ttgttaaaccttaaagatattcgaaaaagctatcatcttggaactgaagaatttgcgattttaaaaggaatcgatttagaagttaacgagggtgactttttagccatcatgggaccatcaggttcgggaaagtcaacattgatgaatatcattgggtgtttagataagcctggctctggctcatatgccattgaaggcagagacgtgtcatccttatctgataatgaacttgctgatttgcgtaatcaaaaaatcggctttgtttttcaaaattttaacctgatgcccaagctaacagcttgtcaaaatgtcgaattacccttgacttatatgaatgttcctaaaaaagagcgtcgcaaacgagccctagagatgttaaagctagtaggactagaagaacgtagtgaatttaaaccgatggagctatctggtgggcaaaaacagcgtgtagcgattgcaagagctttagtcactaacccgagttttatccttggtgatgagccaacaggtgcactagacacaaaaaccagcgtccaaatcatggacctatttaaacaattcaatgataacggcaaaacgattattatcatcacacacgagcctgaagtagctgccctatgcaaaaagacggtgatcctaagagatggtaatatagaacattccgatatagag

SEQ ID NO: 2120 - protein, 224 aa, Streptococcus pyogenes
LLNLKDIRKSYHLGTEEFAILKGIDLEVNEGDFLAIMGPSGSGKSTLMNIIGCLDKPGSGSYAIEGRDVSSLSDNELADLRNQKIGFVFQNFNLMPKLTACQNVELPLTYMNVPKKERRKRALEMLKLVGLEERSEFKPMELSGGQKQRVAIARALVTNPSFILGDEPTGALDTKTSVQIMDLFKQFNDNGKTIIIITHEPEVAALCKKTVILRDGNIEHSDIE

SEQ ID NO: 2121 - DNA, 960 bp, Streptococcus agalactiae
atgcggcgaaaaatagttttactttttgtagttccaatgcttatagttttaggaattttaggagtggtagttcattattatggttcagcattaaatatttatctattacctcctagtagcgaacgttatggacgtgttattttagatcgtgttgaacagcgtggtttgtattcgcaaggtcgtcaatggcaaattataagacaacgatcagaaaaaaagttgaaaacgtcaaaatcttaccaagagagtcgcaacattgtacaggaagcagtacggtatggaggcggtaaacatagtcaaatattatccaaagagactgtacgaagagataccctagatagtcgatatccagaatatcgaagattaaacgaagacattctcttaattactattccttctataagtaagttagataaacgatctattagccattatagtggtaaattacaaaatatattgatggaaaaaagttataagggactcattttagacttatcgaataatactggcggcaatatgatccctatgattgggggggtagcctctattttaccaaatgataccctatttcattatactgataagtatggaaataagaaaacaatcacgatgaaaaatataccgctagaagcattaaaaatatctaggaaaacaatcaatactaagcatgttccaatcgctattataactaatcataaaactgctagttcggcagaaatgacttttttatcatttaaaggattacctaatgttaaaagctttggtcaagctacagcaggatatacgactgttaatgaaactttcatgctttacgacggtgctagattagctttaactacaggaatagttagtgatcgacaaggatataaatacgagaacacccctatcttaccagatcaagtaaccagccttcctttacaagagtcacagtcttggttaaagagtagaatcaatcaaaat

SEQ ID NO: 2122 - protein, 320 aa, Streptococcus agalactiae
MRRKIVLLFVVPMLIVLGILGVVVHYYGSALNIYLLPPSSERYGRVILDRVEQRGLYSQGRQWQIIRQRSEKKLKTSKSYQESRNIVQEAVRYGGGKHSQILSKETVRRDTLDSRYPEYRRLNEDILLITIPSISKLDKRSISHYSGKLQNILMEKSYKGLILDLSNNTGGNMIPMIGGVASILPNDTLFHYTDKYGNKKTITMKNIPLEALKISRKTINTKHVPIAIITNHKTASSAEMTFLSFKGLPNVKSFGQATAGYTTVNETFMLYDGARLALTTGIVSDRQGYKYENTPILPDQVTSLPLQESQSWLKSRINQN

SEQ ID NO: 2123 - DNA, 171 bp, Streptococcus agalactiae
atggccaagacaagtaaaaaattgacaaaatctttagggcctattggtaaattaatttcaataatccctgacacaactgaacttattggaaaagcaattgataattctcgtccaattattgaaaaagaacttgaccgtcgtcatgaaaaaaaaacagacttatactcagct

SEQ ID NO: 2124 - protein, 57 aa, Streptococcus agalactiae
MAKTSKKLTKSLGPIGKLISIIPDTTELIGKAIDNSRPIIEKELDRRHEKKTDLYSA

SEQ ID NO: 2125 - DNA, 480 bp, Streptococcus pyogenes
atgccaaagagaataagaaaagctctaggagtagttgggaaactgatgtcaattgttcctgacactactgaaattattggaaaaacgattgataacagtcgaccaattatcgaaaaacgtatggaacaaaaacatgaaaaagagatgcaattacgcacgataaatgatgtgattaatcttcctgttgatcaggcacaagctcatttggaacaacttggctttgtagtagccactatacctgctaagcctcataaaaaatggcttcatagtaatctcaatgaagtggttgctatgtctccaaaatctggtaaatataagataggaagcctgatcaaactctactacattactgttgatgttttggaaaaaagtcaagacttattagaccaagaaaacttgcggactgtggaacgcaatcaaaaaatcgctgatacttttgagtctgtcaaacacattcgatttccttttaaaaaatggcgt

SEQ ID NO: 2126 - protein, 160 aa, Streptococcus pyogenes
MPKRIRKALGVVGKLMSIVPDTTEIIGKTIDNSRPIIEKRMEQKHEKEMQLRTINDVINLPVDQAQAHLEQLGFVVATIPAKPHKKWLHSNLNEVVAMSPKSGKYKIGSLIKLYYITVDVLEKSQDLLDQENLRTVERNQKIADTFESVKHIRFPFKKWR

SEQ ID NO: 2127 - DNA, 345 bp, Streptococcus agalactiae
atgaaaaaaaaacagacttatactcagcttgataatgtagtacaccttgatatcaatgatgcgcaagtttacttagagcaacgccattttaatgtatcaaggattgttgctgaaccaaattcaaagtgggcaaccctacatcctaatcaagttgtgaatatgtcgcctaaagctggtagggtcagaatcggttcattagtgaagttgtactatattacagaggatatccttgaagaaagtaagacactacttttatctaaatccgaaaaaagtaaagcacgacaacaacggttaacagaagtattgagtacccctagtcaattactcaaaaaaaatcgaaataaa

SEQ ID NO: 2128 - protein, 115 aa, Streptococcus agalactiae
MKKKQTYTQLDNVVHLDINDAQVYLEQRHFNVSRIVAEPNSKWATLHPNQVVNMSPKAGRVRIGSLVKLYYITEDILEESKTLLLSKSEKSKARQQRLTEVLSTPSQLLKKNRNK

SEQ ID NO: 2129 - DNA, 846 bp, Streptococcus agalactiae
atgaaaatcaaaaagctattagggttaacgacaacagtagtaatttcagcacttattttaggagcctgtggtcagtctaaaaatgaagacgccaaagtcgttagagttggaacaatggtaaagagtaaaactgaaaaagctcgttgggataaaatcgaagaattagttaagaaaaaaggcgttaagctaaaatttacggaattcacagattatacacaacctaataaagctttagaaagtgatgagattgatattaatgctttccagcattataattacttaaacaattggaataaagcaaataagaccaatcttgtttccgttgctgagacatactttacttcctttagattatactctggtactaagaacggtaaaggtaaataccaaacagtttctgaaattccaaataaagcaactattactatcccaaacgatgcagttaacgaaagtcgctctctctacttgttacaatcagcaggcttgctaaaattgaaagtatcaggtgatgcattagcaacaatgtcagatgttgtttccaatcctaaatctttagatttaaaagaagtagatgcagcacagaccgcacgttctttggattccacagatgcagcagttattaataatgattttgtgacagaagcaggaataaatcctaaatcagctatttttattgaaccaaaaagtaaaaatgcaaaacaatggtacaaccttttagttgctcaaaaaggttggcaagacaaatcaaaagctaaagccattaaagaagttgtgaaagcttaccatacagatgcggttaaaaaagttatcgaaaaaacatctcaaggtttagatcaacctgtttgg

SEQ ID NO: 2130 - protein, 282 aa, Streptococcus agalactiae
MKIKKLLGLTTTVVISALILGACGQSKNEDAKVVRVGTMVKSKTEKARWDKIEELVKKKGVKLKFTEFTDYTQPNKALESDEIDINAFQHYNYLNNWNKANKTNLVSVAETYFTSFRLYSGTKNGKGKYQTVSEIPNKATITIPNDAVNESRSLYLLQSAGLLKLKVSGDALATMSDVVSNPKSLDLKEVDAAQTARSLDSTDAAVINNDFVTEAGINPKSAIFIEPKSKNAKQWYNLLVAQKGWQDKSKAKAIKEVVKAYHTDAVKKVIEKTSQGLDQPVW

SEQ ID NO: 2131 - DNA, 789 bp, Streptococcus pyogenes
ttggttgcttgttctgaaaaacaagatgataaaaacactttaactattggggtgatgacaaaaacagaatctgatcaagcgagatgggataaagttgaagaattattgaaaaaagacaatatcactttgaagtacaaagaatttacagattactcgcaacctaataaggcagttgctaatggtgaagtcgatattaatgccttccaacactataatttcttaaataactggaataaggaaaataaggaacatttggtggccattgctgatacctatatcagcccaattaaccttttctctggaaccagtcaagatggaaaggctaaatacaaatcagtagctgatctgccaaatggtactcaaattgcagtaccaaatgatgcgaccaatgaaagccgtgccctctatgtgctgcaatcagctggcctcattaaattgaatgtgtctggtgatcaattagcaaccattgccaatatctcagagaacaaaaagaaattagatatcaaggaattagatgctagccaaacggcacgtgctttagtatctgctgatgcagctgttgtcaataatagttacgctgttcctgcaaaaattgactacaaaacctctcttttcaaagaaaaagcagatgacaattcaaaacagtggattaacattattgcaggtcaaaaagattgggaaaaatcagagaaggctgatgctattaaaaaactcatcaaggcctaccaaactgatgaggtgaagaaagtcgtggaaaaaacttcaaatggtatagatgtatccgtatgg

SEQ ID NO: 2132 - protein, 263 aa, Streptococcus pyogenes
LVACSEKQDDKNTLTIGVMTKTESDQARWDKVEELLKKDNITLKYKEFTDYSQPNKAVANGEVDINAFQHYNFLNNWNKENKEHLVAIADTYISPINLFSGTSQDGKAKYKSVADLPNGTQIAVPNDATNESRALYVLQSAGLIKLNVSGDQLATIANISENKKKLDIKELDASQTARALVSADAAVVNNSYAVPAKIDYKTSLFKEKADDNSKQWINIIAGQKDWEKSEKADAIKKLIKAYQTDEVKKVVEKTSNGIDVSVW

SEQ ID NO: 2133 - DNA, 756 bp, Streptococcus agalactiae
atgaatggagtaaatatgcactataaagaattacttgagtcatccgaaaaagcttatttggaaactaatcggtataaacattttaagaatataatcatttcagagcgttatttttcaaactatattagctacaaaataatgcctacagtaagtgagtttttacaggatatgatctatttagcagatgaacaaaaagattatcagtctgattttgcttttgtattttttgaggaaaatgctgaattgagcagtgaattacagagaactttatcacaacaaggctttgaatcagagaaacatatcatatttacaaattcattaaatcatcttaaactttttgaaaaagaatttgatgacatcacatttactaaacttaatgaaaattacctagaaaaatacctaaagttcaaatataaacaaagtatagtttacggagaaatttacgctaagcaaatgtataatgataatcgtgttaatcttttaaataataatgctaaagtttacctagctattaaagataatcaaattattggagatgtaacagcttgggactatggtgaatacgtggaaatagatgatttttatgtccaagagtcctacagaggacaaggaattggtacgcgcctacaatttgatgcaagtagggggtttaagaaagttatcttaatttcagaagaagaaaacagaaaaatgtatgagcaccaaggttatgaggaagtcgcctattattggaccgctttacggagccctcgaaag

SEQ ID NO: 2134 - protein, 252 aa, Streptococcus agalactiae
MNGVNMHYKELLESSEKAYLETNRYKHFKNIIISERYFSNYISYKIMPTVSEFLQDMIYLADEQKDYQSDFAFVFFEENAELSSELQRTLSQQGFESEKHIIFTNSLNHLKLFEKEFDDITFTKLNENYLEKYLKFKYKQSIVYGEIYAKQMYNDNRVNLLNNNAKVYLAIKDNQIIGDVTAWDYGEYVEIDDFYVQESYRGQGIGTRLQFDASRGFKKVILISEEENRKMYEHQGYEEVAYYWTALRSPRK

SEQ ID NO: 2135 - DNA, 1332 bp, Streptococcus agalactiae
atgtctcaatcttacattaatgttatcggcgctggtttggctggttctgaagcagcttatcaaattgctaaacgtggaataccagttaagctttatgaaatgcgtggggttaaatcaacccctcaacataaaacagataattttgcagaattagtatgttccaattcattccgcggtgattctctaacaaatgcagttggtcttttaaaagaagaaatgcgtcgtttggattctatcattatgagaaatggggaggcacatcgagttccagcaggtggagccatggccgttgatagagaaggttattctgaagctgttactgaggaaatccataaacatccattaatcgaagtaattcgtgatgaaatcacagatatccctggagatgctattacagttatcgctacaggaccattaacaagtgatagtctggcagctaaaatccatgaacttaatggtggtgatggtttttatttttacgatgccgccgctccaattgtcgataaaaatacgattgacataaataaagtttaccttaagtctaggtatgacaaaggtgaagcagcttatctaaattgtccaatgaccaaagaagaatttatggcttttcatgaagctttaactacagctgaggaagcaccactaaattcttttgagaaagaaaaatacttcgaaggttgtatgcctatcgaagtgatggctaagcgtggtattaaaacgatgctttatggtccaatgaaaccagttggtttggagtatcctgaggactacaaaggaccgcgagatggtgaatttaaaacaccatatgctgttgttcaattacgtcaagataatgctgcaggctctctttataacatagttggtttccaaactcatcttaagtggggagaacaaaaacgtgtatttcaaatgattcctggtcttgaaaatgctgaatttgtccggtatggtgttatgcatcgcaattcttatatggattcaccaaatcttttaaaccaaacctttgctacacgtaagaacccaaatcttttctttgctggacaaatgaccggtgttgaaggttatgtagaatcggcagcaagtggtcttgtagcgggaatcaatgctgtccgtcgcttcaatggggagagtgaagtagttttcccacaaactactgctattggtgcactgccacattatattacacatacagacagcaaacatttccaaccaatgaatgttaactttggtatcatcaaagaattagaaggtccacgaattcgtgataagaaagagcgttatgaagctattgctacacgagctttgaaagatttagaaaaatttctcaactat

SEQ ID NO: 2136 - protein, 444 aa, Streptococcus agalactiae
MSQSYINVIGAGLAGSEAAYQIAKRGIPVKLYEMRGVKSTPQHKTDNFAELVCSNSFRGDSLTNAVGLLKEEMRRLDSIIMRNGEAHRVPAGGAMAVDREGYSEAVTEEIHKHPLIEVIRDEITDIPGDAITVIATGPLTSDSLAAKIHELNGGDGFYFYDAAAPIVDKNTIDINKVYLKSRYDKGEAAYLNCPMTKEEFMAFHEALTTAEEAPLNSFEKEKYFEGCMPIEVMAKRGIKTMLYGPMKPVGLEYPEDYKGPRDGEFKTPYAVVQLRQDNAAGSLYNIVGFQTHLKWGEQKRVFQMIPGLENAEFVRYGVMHRNSYMDSPNLLNQTFATRKNPNLFFAGQMTGVEGYVESAASGLVAGINAVRRFNGESEVVFPQTTAIGALPHYITHTDSKHFQPMNVNFGIIKELEGPRIRDKKERYEAIATRALKDLEKFLNY

SEQ ID NO: 2137 - DNA, 1494 bp, Streptococcus pyogenes
ttgaaaagggttcccgtagaaagagacaaacgcttagtctctttctttttctttcttctcatttctgttataataagtcaggtaactacattagaaagatttgtgggtctgtcatctaagagatgtcattcccgaagaggtattagtgacttgtctcaatcaactgcaacttatattaatgttattggagctgggctagctggttctgaagctgcctatcagattgctaagcgcggtatccccgttaaattgtatgaaatgcgtggtgtcaaagcaacaccgcaacataaaaccactaattttgccgaattggtctgttccaactcatttcgtggtgatagcttaaccaatgcagtcggtcttctcaaagaagaaatgcggcgattagactccattattatgcgtaatggtgaagctaaccgcgtacctgctgggggagcaatggctgttgaccgtgaggggtatgcagagagtgtcactgcagagttggaaaatcatcctctcattgaggtcattcgtggtgaaattacagaaatccctgacgatgctatcacggttatcgcgacgggaccgctgacttcggatgccctggcagaaaaaattcacgcgctaaatggtggcgacggattctatttttacgatgcagcagcgcctatcattgataaatctaccattgatatgagcaaggtttaccttaaatctcgctacgataaaggcgaagctgcttacctcaactgccctatgaccaaagaagaattcatggctttccatgaagctctgacaaccgcagaagaagccccgctgaatgcctttgaaaaagaaaagtattttgaaggctgtatgccgattgaagttatggctaaacgtggcattaaaaccatgctttatggacctatgaaacccgttggattggaatatccagatgactatacaggtcctcgcgatggagaatttaaaacgccatatgccgtcgtgcaattgcgtcaagataatgcagctggaagcctttataatatcgttggtttccaaacccatctcaaatggggtgagcaaaaacgcgttttccaaatgattccagggcttgaaaatgctgagtttgtccgctacggcgtcatgcatcgcaattcctatatggattcaccaaatcttttaaccgaaaccttccaatctcggagcaatccaaaccttttctttgcaggtcagatgactggagttgaaggttatgtcgaatcagctgcttcaggtttagtagcaggaatcaatgctgctcgtttgttcaaaagagaagaagcacttatttttcctcagacaacagctattgggagtttgcctcattatgtgactcatgccgacagtaagcatttccaaccaatgaacgtcaactttggcatcatcaaagagttagaaggcccacgcattcgtgacaaaaaagaacgttatgaagctattgctagtcgtgctttggcagatttagacacctgcttagcgtcgctt

SEQ ID NO: 2138 - protein, 498 aa, Streptococcus pyogenes
LKRVPVERDKRLVSFFFFLLISVIISQVTTLERFVGLSSKRCHSRRGISDLSQSTATYINVIGAGLAGSEAAYQIAKRGIPVKLYEMRGVKATPQHKTTNFAELVCSNSFRGDSLTNAVGLLKEEMRRLDSIIMRNGEANRVPAGGAMAVDREGYAESVTAELENHPLIEVIRGEITEIPDDAITVIATGPLTSDALAEKIHALNGGDGFYFYDAAAPIIDKSTIDMSKVYLKSRYDKGEAAYLNCPMTKEEFMAFHEALTTAEEAPLNAFEKEKYFEGCMPIEVMAKRGIKTMLYGPMKPVGLEYPDDYTGPRDGEFKTPYAVVQLRQDNAAGSLYNIVGFQTHLKWGEQKRVFQMIPGLENAEFVRYGVMHRNSYMDSPNLLTETFQSRSNPNLFFAGQMTGVEGYVESAASGLVAGINAARLFKREEALIFPQTTAIGSLPHYVTHADSKHFQPMNVNFGIIKELEGPRIRDKKERYEAIASRALADLDTCLASL

SEQ ID NO: 2139 - DNA, 696 bp, Streptococcus agalactiae
ttgttaccagcatatattaaaattcacgacgctattaaaaaggaaatcgataaagggacttggaagattgggcagcggttacctagcgaaagagatttagcggatgattatagtgtaagtcgtatgacacttcgccaatcaattacattgttagttgaagaaggtattttggagagacgagttggtagtggcacctatgttgctagtcatcgtgttcaagaaaaaatgcggggaacaactagttttacagaaattgtcaattctcaagggcgtaagccatccagtaaactaatctcatttcaaagaaaactagcaaatgaaaccgaaattcaaaaattaaatttatcacagtcagattatgtggttcgtatggaaagggtacgttatgctgataaggtaccgttggtttatgaggtagcctctataccagagaatttaattaaaggttttgaacaatcagaggttacagaacatttctttaaaaccttaacagagaatggctacgaaattgggaaaagccaacaaactatatatgctagaaatgctagtgaacgtgttgcttcgcatttagaagttaacgcaggccatgctattttggcattgacacaagtttcatactttactgatggtaagccttttgaatatgttcatgggcaatatgttggagatcgttttgagttttatttagagaataac

SEQ ID NO: 2140 - protein, 232 aa, Streptococcus agalactiae
MLPAYIKIHDAIKKEIDKGTWKIGQRLPSERDLADDYSVSRMTLRQSITLLVEEGILERRVGSGTYVASHRVQEKMRGTTSFTEIVNSQGRKPSSKLISFQRKLANETEIQKLNLSQSDYVVRMERVRYADKVPLVYEVASIPENLIKGFEQSEVTEHFFKTLTENGYEIGKSQQTIYARNASERVASHLEVNAGHAILALTQVSYFTDGKPFEYVHGQYVGDRFEFYLENN

SEQ ID NO: 2141 - DNA, 1560 bp, Streptococcus agalactiae
atgactgatatttctatattgaatgatatccaaaaaattatcgttctagattacggtagtcaatataaccagcttatcgcacgtcgtatccgtgaatttggtgtattttctgagttaaaatcacataaaattacggctgatgaaattcgcgatattaatcctattggtatcgtactttcaggtggtccaaattccgtatacgctgatggcgcttttggaatcgatgaagaaatttttgaattaggaattccaatcttaggaatttgttatggcatgcaactgattacccataaactcggtggtaaggttcttcctgcgggagaagctggtcatcgtgagtatggtcaatcagcacttcgcctacgctcagaatcagcactctttgctggcactcctcaagaacaacttgttttgatgagccatggtgatgctgtcactgaaattcctgagggtttccatctcgttggtgactctgttgactgtccatttgctgcaatggaaaatactgaaaaacaattttatggtatccaattccaccccgaagttcgtcactcagtatatggcaatgatatccttaaaaattttgctgttaatatctgtggcgcacgtggtgattggtcaatggataacttcattgatatggaaattgcaaaaatacgtgaaactgtaggcgatcgtaaagtacttcttggactatctggcggtgttgattcatctgttgtcggagtactcctacaacgtgctatcggtgatcaattaacatgtatttttgtagatcatggtttattacgtaaaaatgaaggtgaccaagttatggatatgcttggtggtaaatttggacttaatattatccgtgttgatgcttcaaaacgcttcctagatcttctttctggtgttgaagatcccgagagaaaacgaaaaatcatcggaaatgagttcgtgtacgtttttgatgatgaggcaagtaaacttaaaggcgttgatttccttgctcaaggtaccctctacacagatattattgaatctgggacagaaacagcccaaacaatcaagtcacaccataatgttggtggattgccagaagatatgcaatttgaattgattgagccacttaacacattattcaaagatgaggttcgcgctcttggtactgcacttggaatgcctgatgaagttgtatggcgtcaaccattccctgggcctggtcttgctattcgcgttatgggtgaaattaccgaagaaaaacttgaaacagtccgcgaatcagatgctattcttcgtgaagaaatcgctaaagctggtctagatcgtgacgtatggcagtatttcacagttaatactggcgtacgttctgtcggtgttatgggagatggtcgtacttatgactatacaattgctatccgtgcaattacttcaattgatggcatgacagctgactttgcgcaacttccttgggatgtacttaagaaaatttcgacacgtattgttaacgaagttgatcacgttaaccgtattgtttatgatattacaagtaaaccacctgcaactgttgagtgggaa

SEQ ID NO: 2142 - protein, 520 aa, Streptococcus agalactiae
MTDISILNDIQKIIVLDYGSQYNQLIARRIREFGVFSELKSHKITADEIRDINPIGIVLSGGPNSVYADGAFGIDEEIFELGIPILGICYGMQLITHKLGGKVLPAGEAGHREYGQSALRLRSESALFAGTPQEQLVLMSHGDAVTEIPEGFHLVGDSVDCPFAAMENTEKQFYGIQFHPEVRHSVYGNDILKNFAVNICGARGDWSMDNFIDMEIAKIRETVGDRKVLLGLSGGVDSSVVGVLLQRAIGDQLTCIFVDHGLLRKNEGDQVMDMLGGKFGLNIIRVDASKRFLDLLSGVEDPERKRKIIGNEFVYVFDDEASKLKGVDFLAQGTLYTDIIESGTETAQTIKSHHNVGGLPEDMQFELIEPLNTLFKDEVRALGTALGMPDEVVWRQPFPGPGLAIRVMGEITEEKLETVRESDAILREEIAKAGLDRDVWQYFTVNTGVRSVGVMGDGRTYDYTIAIRAITSIDGMTADFAQLPWDVLKKISTRIVNEVDHVNRIVYDITSKPPATVEWE

SEQ ID NO: 2143 - DNA, 1560 bp, Streptococcus pyogenes
atgactgaaatttcaattttgaatgatgttcaaaaaattatcgttcttgattatggtagccagtacaatcagcttattgctagacgtattcgagagtttggtgttttctccgaactaaaaagccataaaatcaccgctcaagaacttcgtgagatcaatcccataggtatcgttttatcaggagggcctaactctgtttacgctgataacgcctttggcattgaccctgaaatctttgaactagggattccgattcttggtatctgttacggtatgcaattaatcacccataaattaggtggtaaagttgttcctgctggacaagctggtaatcgtgaatacggtcagtcaacccttcatcttcgtgaaacgtcaaaattattttcaggcacacctcaagaacaactcgttttgatgagccatggtgatgctgttactgaaattccagaaggtttccaccttgttggagactcaaatgactgtccctatgcagctattgaaaatactgagaaaaacctttacggtattcagttccacccagaagtgagacactctgtttatggaaatgacattcttaaaaactttgctatatcaatttgtggcgcgcgtggtgattggtcaatggataattttattgacatggaaattgctaaaattcgtgaaactgtaggcgatcgtaaagttcttctaggtctttctggtggagttgattcttcagttgttggtgttctacttcaaaaagctatcggtgaccaattaacttgtattttcgttgatcacggtcttcttcgtaaagacgagggcgatcaagttatgggaatgcttgggggcaaatttggcctaaatattatccgtgtggatgcttcaaaacgtttcttagaccttcttgcagacgttgaagatcctgagaaaaaacgtaaaattattggtaatgaatttgtctatgtttttgatgatgaagccagcaaattaaaaggtgttgacttccttgcccaaggaacactttatactgatatcattgagtcaggaacagaaactgctcaaaccatcaaatcacatcacaatgtgggtggtctccccgaagacatgcagtttgaattgattgagcccttaaacactcttttcaaagatgaagttcgagcgcttggaatcgctcttggaatgcctgaagaaattgtttggcgccaaccatttccaggtcctggacttgctatccgtgtcatgggagcaattactgaagaaaaacttgaaaccgttcgcgaatcagacgctatccttcgtgaagaaattgctaaggctggacttgatcgtgacgtgtggcaatactttacagttaacacaggtgtccgttctgtaggcgtcatgggagatggtcgtacttatgattataccatcgccattcgtgctattacgtctattgatggtatgacagctgactttgctcaacttccttgggatgtcttgaaaaaaatctcaacacgtatcgtaaatgaagttgaccacgttaaccgtatcgtctacgacatcacaagtaaaccacccgcaacagttgaatgggaa

SEQ ID NO: 2144 - protein, 520 aa, Streptococcus pyogenes
MTEISILNDVQKIIVLDYGSQYNQLIARRIREFGVFSELKSHKITAQELREINPIGIVLSGGPNSVYADNAFGIDPEIFELGIPILGICYGMQLITHKLGGKVVPAGQAGNREYGQSTLHLRETSKLFSGTPQEQLVLMSHGDAVTEIPEGFHLVGDSNDCPYAAIENTEKNLYGIQFHPEVRHSVYGNDILKNFAISICGARGDWSMDNFIDMEIAKIRETVGDRKVLLGLSGGVDSSVVGVLLQKAIGDQLTCIFVDHGLLRKDEGDQVMGMLGGKFGLNIIRVDASKRFLDLLADVEDPEKKRKIIGNEFVYVFDDEASKLKGVDFLAQGTLYTDIIESGTETAQTIKSHHNVGGLPEDMQFELIEPLNTLFKDEVRALGIALGMPEEIVWRQPFPGPGLAIRVMGAITEEKLETVRESDAILREEIAKAGLDRDVWQYFTVNTGVRSVGVMGDGRTYDYTIAIRAITSIDGMTADFAQLPWDVLKKISTRIVNEVDHVNRIVYDITSKPPATVEWE

SEQ ID NO: 2145 - DNA, 348 bp, Streptococcus agalactiae
gtgcaatcggcaacacctgtaggagcttcaaacgtttattatttgacaggtttcactacacaaggatcaaccaaagctaaagctttccatgatcattacgttaaggcatatggtgaagaaccatccatgttctcggctttatcatacgacgctgtgtatatggcagctaaatctgctaaaggagctaaaacttcaattgatattaaaaaagctttagctaagctgaaagattttaaaggtgtgacagggaaaatgtctattgataaaaatcacaatgttgttaaatcagcttacgttgtcaaattagaggatggaaaaacaagtagcgttaacattatttcagcaaaa

SEQ ID NO: 2146 - protein, 116 aa, Streptococcus agalactiae
MQSATPVGASNVYYLTGFTTQGSTKAKAFHDHYVKAYGEEPSMFSALSYDAVYMAAKSAKGAKTSIDIKKALAKLKDFKGVTGKMSIDKNHNVVKSAYVVKLEDGKTSSVNIISAK

SEQ ID NO: 2147 - DNA, 867 bp, Streptococcus agalactiae
atgcttcaacagctcgttaatggacttatcttaggatccatatatgctttacttgccttaggatatactatggtatatggcattattaagctgattaattttgctcatggggacatctatatgatgggcgctttcatgggctattatttgattaatcatcttcatcttaattttttcctagctttattaattgcaatgctggggtctgctttcctaggtgttgtaattgaatatttagcttatcgtccactgagaaaatcaactagaattgccgcgttaattacagctattggtgtttcttttcttttggagtacgggatggtataccttgttggagcggatactagggcatttccgcaagccattcatactgttaaatataatttaggaccgataactataaccaatgttcagctcatcattttaggtattgcgctattactaatgcttactttacagttcatcgttcaaaaaactaaaatggggaaagctatgagagctttatcagtggatagcgatgccgcacaattgatgggaattaatgttaaccgtaccattagttttacatttgcgctggggtctgctttagctggagcaggtggagtactgattgggctttattataattctgttcaacctcttatgggggtaactccagggttgaaagcatttgttgcagctgtcttaggtggtattggtatcattccgggagcggctatcggtggttttgttattggcattttagaaactttagcgactgcacttggtgtgtcagattttcgagatggtatcgtttatgctattttaattctcattttcttgatccgtccagcaggaattcttggaaaaaatattaaggagaaggtc

SEQ ID NO: 2148 - protein, 289 aa, Streptococcus agalactiae
MLQQLVNGLILGSIYALLALGYTMVYGIIKLINFAHGDIYMMGAFMGYYLINHLHLNFFLALLIAMLGSAFLGVVIEYLAYRPLRKSTRIAALITAIGVSFLLEYGMVYLVGADTRAFPQAIHTVKYNLGPITITNVQLIILGIALLLMLTLQFIVQKTKMGKAMRALSVDSDAAQLMGINVNRTISFTFALGSALAGAGGVLIGLYYNSVQPLMGVTPGLKAFVAAVLGGIGIIPGAAIGGFVIGILETLATALGVSDFRDGIVYAILILIFLIRPAGILGKNIKEKV

SEQ ID NO: 2149 - DNA, 1089 bp, Streptococcus pyogenes
gtggttcaattcataaggaggaaggtcatgtctaaaaatgcgcaaaaaattgctgtaccattgatttctgtcttgctaggatttttacttggcgctattattatggttatctttggttatgatcctatctgggggtatgaaggtttattccaaattgcctttggtagtgttaaaaatattggagaaatattccgttcaatggggccattgattttaatagcgcttggctttactgttgctagccgtgcaggcttctttaacgttggtttgtctggacaggctttagctggatggatttcagcaggttggtttgcactcttaaatccagatatgcctcgtccattattgattcttatgacagctcttatcggaatgattgctggtggtattgctggagctattccagggatacttcgtgcttatcttggtacaagtgaagttatcgttacgattatgatgaactacatcattttatatgtcggaaatgctattgttcaacgtggttatcctgagagtgtcaaacaaagtattgattcaactattcaagttagtgataatgctagttatcaaacgcattggttatcagccctaactaataactctcgtattaatattggtattttctttgccattattgccattgccctaatctggttcttgcttaacaaaactactttaggttttgagattcgttcagttggtctcaacccacatgcttcagaatacgcagggatgtcatcaaaacgtactatcattttatcaatgattatctctggagctcttgcaggtcttggaggagtagttgaaggtctaggaacctttgaaaatgtttttgtacaaggatcttctttagcagttggttttgacggtatggcagttagcttattagcagcaaattcaccgcttggaatatttttctcatcattcctatttggtgtcttaaatattggtgctccaggaatgaatattgcaggcattccaccagaacttgttaaagtagtaactgcatcaatcattttctttgttggttcacattacctcattgaacgttacattattcgccctaaaaaattagtgaaaggtggtaaa

SEQ ID NO: 2150 - protein, 363 aa, Streptococcus pyogenes
VVQFIRRKVMSKNAQKIAVPLISVLLGFLLGAIIMVIFGYDPIWGYEGLFQIAFGSVKNIGEIFRSMGPLILIALGFTVASRAGFFNVGLSGQALAGWISAGWFALLNPDMPRPLLILMTALIGMIAGGIAGAIPGILRAYLGTSEVIVTIMMNYIILYVGNAIVQRGYPESVKQSIDSTIQVSDNASYQTHWLSALTNNSRINIGIFFAIIAIALIWFLLNKTTLGFEIRSVGLNPHASEYAGMSSKRTIILSMIISGALAGLGGVVEGLGTFENVFVQGSSLAVGFDGMAVSLLAANSPLGIFFSSFLFGVLNIGAPGMNIAGIPPELVKVVTASIIFFVGSHYLIERYIIRPKKLVKGGK

SEQ ID NO: 2151 - DNA, 951 bp, Streptococcus agalactiae
atgaaagaaaatatgaaatcaattttatcttggttagctatagtagtgttagattatctcttgattagcgtgctaatatctatgggtatatttaacctctatcatattcaaattattgaaacaattgggattaatgttattttagcagttggtttgaacctaattgtaggttgttcgggacagttttcactaggacatgcaggtttcatggctattggcgcttatgcagttgctattatcggcgttaaaatgccaacttatgtaggttttttgatagctatacttgttggaactcttgttgcaggaggtattgccttaggtgtaggaattcctactttgagactaaaaggtgattatttagctatagctactttaggtgttgctgagattatccgtattttgttggttaatggaggtgatattacgaatggtgctgcgggtatcatggggattccgccttttacaacctggtctttagtttatggggtggcagttgtgagccttatccttgcaatgaattttttgcgtagtcccttagggcgtaatacaattgctatacgagaagatgaaattgcagcagagtctatgggtgtggatacaacaaaagtgaaagtaattgtttttgtttttggagctattttagcttctatcgctggtagtttacaggctggctacgttggaactgttatgccaaaagacttttcatttatgatgtctgtcaatgttttaattattgttgttttaggtggtttaggttcaatgacagggacagttttagcagcaattttattaggattattgaatatgttactacaagactacgcttctgttcgaatgattatctatgctttagccctgattttaattatgatttttagacctagcggtttattaggaacgaaagagttaactctatctcatctatttcgtaagacgagtaagggaggcaat

SEQ ID NO: 2152 - protein, 317 aa, Streptococcus agalactiae
MKENMKSILSWLAIVVLDYLLISVLISMGIFNLYHIQIIETIGINVILAVGLNLIVGCSGQFSLGHAGFMAIGAYAVAIIGVKMPTYVGFLIAILVGTLVAGGIALGVGIPTLRLKGDYLAIATLGVAEIIRILLVNGGDITNGAAGIMGIPPFTTWSLVYGVAVVSLILAMNFLRSPLGRNTIAIREDEIAAESMGVDTTKVKVIVFVFGAILASIAGSLQAGYVGTVMPKDFSFMMSVNVLIIVVLGGLGSMTGTVLAAILLGLLNMLLQDYASVRMIIYALALILIMIFRPSGLLGTKELTLSHLFRKTSKGGN

SEQ ID NO: 2153 - DNA, 762 bp, Streptococcus agalactiae
atggcacttcttgaagtaaaaaatttaagtaaacatttcggtggcctaactgctgtaggtgatgtttcgatgaaattacataaaggtgaattaattggcttaatcggccccaacggtgcgggtaagacaacgctttttaatctcttaacaggagtataccttcctagtaaagggacaatatcaattgatggtaagatattaaatgggaggaaaccagctaaaatagcttctttaggtttaggtagaacttttcaaaatatccgactttttaaaaatatgactgttttagacaatgtactagtaggactcagtaatcatcacttatcacatcctattgctagttttttacgattacccaaatactatcatagtgaaaaagccttaaggaaaaaggcactggagctattagagatttttggtttgaaagcatatcaagatgctcttgctaagaacctcccttatggaaaacaacggcgtttagaaattgttcgtgctttagcaacagaaccaaaaatattgtttttggatgagcccgcggcaggaatgaatcctcaagaaactgcagaattgacgcagttaattagtcaaataaagagtgattttgatattactattatgctgattgaacatgatatgaacttggttatgcaagtaacagagagaatttatgtattggaatatggtcgtctgattgctcacgggacacctgaagaaattaaaaataataaacgtgttatagaagcatacttggggggtgagcta

SEQ ID NO: 2154 - protein, 254 aa, Streptococcus agalactiae
MALLEVKNLSKHFGGLTAVGDVSMKLHKGELIGLIGPNGAGKTTLFNLLTGVYLPSKGTISIDGKILNGRKPAKIASLGLGRTFQNIRLFKNMTVLDNVLVGLSNHHLSHPIASFLRLPKYYHSEKALRKKALELLEIFGLKAYQDALAKNLPYGKQRRLEIVRALATEPKILFLDEPAAGMNPQETAELTQLISQIKSDFDITIMLIEHDMNLVMQVTERIYVLEYGRLIAHGTPEEIKNNKRVIEAYLGGEL

SEQ ID NO: 2155 - DNA, 708 bp, Streptococcus agalactiae
atgaccatgttgaaagtagaaaatctatctattcactatggtgttattcaagcggtgaatgatgtctcgtttgaagttaaccaaggtgaggttgtaaccttaattggagccaatggtgcaggaaagacatcaattttgaggacaatttctggtttagtaagaccaagtcagggttctatttcttttatggggaaacctatacataagttagcagctagaaaaattgttggcaatggtttagctcaggttccagaagggcgccacgttttctcaagtttgtctgttatggaaaatttagaaatgggagcctttcttcaaaaggatcgtgaacaaaatcaaaaaatgttaaaaaaagtgtttgatcgttttcctcgcttagaagaacgtaaaaaccaagatgcagcaaccttatcaggtggtgagcagcaaatgctcgctatggggcgtgcattgatgagtcgtcctaaattattacttttagatgaaccgtcaatgggcctagctccaatttttattcaagaaatttttaatatcattgaagacatcaaaaaacaagggactacagttcttttagttgaacaaaatgcaaataaagctctgacgattgctgataaagcatatgttctagagactgggaaggttgttttatcagggacaggtaaggaattactagtttcagatcaagttcgtaaagcttacttaggtgga

SEQ ID NO: 2156 - protein, 236 aa, Streptococcus agalactiae
MTMLKVENLSIHYGVIQAVNDVSFEVNQGEVVTLIGANGAGKTSILRTISGLVRPSQGSISFMGKPIHKLAARKIVGNGLAQVPEGRHVFSSLSVMENLEMGAFLQKDREQNQKMLKKVFDRFPRLEERKNQDAATLSGGEQQMLAMGRALMSRPKLLLLDEPSMGLAPIFIQEIFNIIEDIKKQGTTVLLVEQNANKALTIADKAYVLETGKVVLSGTGKELLVSDQVRKAYLGG

SEQ ID NO: 2157 - DNA, 807 bp, Streptococcus pyogenes
ttgaacgccgtttcgatgccgatacttacaccactggagcaaaccaaatgcagattgcggaggtctcaaatgtctaactcaattattgaaatcaaaaatctcaaaaaatcttacggcagcaatgaagtactcaaagatatctccctttctgttaacaagggagaagtgatttccattatcggttcttctggttctggaaaatcaaccctcctgcgctcgatcaatcttttggaagagccaagtgccggtcaaatcctctttcatggtgaagatgtccttgctgaacactacaacttgactcactaccgtgaaaaactaggcatggttttccaatcctttaacttgtttgaaaacctaaatgtattggaaaatgctatcgtcgctcaaaccaccgtcctcaaaagagaccgtgcacaagccgaacaaatcgctaaagaaaacctcaatgcggttggtatgacagaacaatactggcaagccaaaccaaaacaattatcaggggggcaaaaacaacgggttgccattgccagagccttatctgtcaatccagaagccatgctctttgatgaaccaacatcagctcttgatcctgaaatggttggtgaggtccttaaaaccatgcaagacttggcaaaatcagggttgaccatgattattgttacccatgaaatggaatttgctcgtgatgtttctgaccgtatcatcttcatggataagggattgattactgaagaaggaagtcctcaacaaattttcgagaatcctacacaagatcgtaccaaagaatttttacaacgcttcttaaaa

SEQ ID NO: 2158 - protein, 269 aa, Streptococcus pyogenes
LNAVSMPILTPLEQTKCRLRRSQMSNSIIEIKNLKKSYGSNEVLKDISLSVNKGEVISIIGSSGSGKSTLLRSINLLEEPSAGQILFHGEDVLAEHYNLTHYREKLGMVFQSFNLFENLNVLENAIVAQTTVLKRDRAQAEQIAKENLNAVGMTEQYWQAKPKQLSGGQKQRVAIARALSVNPEAMLFDEPTSALDPEMVGEVLKTMQDLAKSGLTMIIVTHEMEFARDVSDRIIFMDKGLITEEGSPQQIFENPTQDRTKEFLQRFLK

SEQ ID NO: 2159 - DNA, 657 bp, Streptococcus agalactiae
atgccagtgaaagattttatgacaaaaaaattagtttatgtctctccagatactacagttgcagaagctgctgatttattgagagaacaccacttaaggcgtttgccagttgttgaaaatgatcagctagtggggttagtgacagaagggacaatggcagaagcacaaccttctaaagcaaccagtctttctatatatgagatgaactatcttcttaataagacaaaaattcgagatattatgattaaagatattgtgactgtttcacagtatgctagccttgaggacgctatttatttgatgatgtctcgaaagatcggtgttttaccagtagttgataatggacaactttatgggattgtcacggatagggatgtttttaaagccttccttgaaattgcggggtatggtcaagaaagttatcgcttggttatattagctgatgaggggataggggtactatcaaaagtcctaaatcgtctttctagtgcaaatttaagtgttaaacgtttagtcattattgaacgaaaagcaggtaagaaagcggtcgagatacaactagaaggatacgctgacaaggatgttttaaaacaagaactagtatttgatgatgttattgtggaaactttagaaaagaccatgaaaaaaccactttct

SEQ ID NO: 2160 - protein, 219 aa, Streptococcus agalactiae
MPVKDFMTKKLVYVSPDTTVAEAADLLREHHLRRLPVVENDQLVGLVTEGTMAEAQPSKATSLSIYEMNYLLNKTKIRDIMIKDIVTVSQYASLEDAIYLMMSRKIGVLPVVDNGQLYGIVTDRDVFKAFLEIAGYGQESYRLVILADEGIGVLSKVLNRLSSANLSVKRLVIIERKAGKKAVEIQLEGYADKDVLKQELVFDDVIVETLEKTMKKPLS

SEQ ID NO: 2161 - DNA, 1479 bp, Streptococcus pyogenes
atgtcaaattgggacactaaatttttgaaaaaaggctacacttttgacgatgtcttgcttattccggcagagagtcatgttcttccaaatgaagttgatttaaagacaaaactcgcagacaatttgacattaaatattcctattattacagcagctatggatacggttactggtagtaaaatggctattgcaattgcgcgtgcgggtggtttaggtgttattcataaaaacatgtctattactgagcaagcagaagaagttcgcaaggtaaaacgttctgaaaatggtgtcatcattgatccattcttcttaacacctgaacacaaggtttcagaagctgaagaattaatgcagcgctaccgtatcagtggtgtgccaattgttgaaactttagcaaaccgtaagttggtcggtatcattactaatcgtgatatgcgttttatttctgattacaatgcaccaatctctgaacatatgactagtgagcacctcgttacggctgctgttggtacagatcttgaaactgcagaacgtattcttcatgaacaccgtattgaaaaacttcctttggttgataatagcggtcgtctgtctggtttaatcactatcaaagatattgaaaaagtaatcgaattcccacatgctgctaaagatgaatttggtcgtcttctggtcgctgctgcggtaggtgttacctcagatacttttgagcgtgccgaggccttgtttgaagctggtgcagatgcgattgttattgacacagctcatggtcattcggctggtgttcttcgtaaaattgctgaaattcgtgctcatttcccaaatcgtactttgattgctggaaatattgccactgctgaaggtgcgcgtgctctttatgatgcaggtgttgatgttgttaaagtgggtattggtcccggatctatctgtaccactcgtgtggttgcaggtgtcggtgttcctcaagtgactgctatttacgatgctgctgctgttgctcgtgaatatggcaaaacgattattgctgatggtggtatcaagtattctggcgatattgttaaggctcttgcagccggcggtaatgctgttatgcttggatcaatgtttgcaggtactgatgaagctccaggtgaaactgaaatctaccaaggccgtaagttcaaaacttatcgtggaatgggttccattgcagctatgaagaaaggatcaagcgatcgttacttccaaggttccgtcaatgaagctaataagctagttccagaaggtattgaaggccgtgttgcttataaaggagctgcttcagatattgtcttccaaatgttaggtggtatccgctcaggtatgggctatgttggcgcaggtgacattcaagaattacatgaaaatgctcaatttgttgaaatgtcaggtgcaggcttgattgaaagtcatccacatgatgtccaaatcacaaatgaagcaccaaactattctgtgcac

SEQ ID NO: 2162 - protein, 493 aa, Streptococcus pyogenes
MSNWDTKFLKKGYTFDDVLLIPAESHVLPNEVDLKTKLADNLTLNIPIITAAMDTVTGSKMAIAIARAGGLGVIHKNMSITEQAEEVRKVKRSENGVIIDPFFLTPEHKVSEAEELMQRYRISGVPIVETLANRKLVGIITNRDMRFISDYNAPISEHMTSEHLVTAAVGTDLETAERILHEHRIEKLPLVDNSGRLSGLITIKDIEKVIEFPHAAKDEFGRLLVAAAVGVTSDTFERAEALFEAGADAIVIDTAHGHSAGVLRKIAEIRAHFPNRTLIAGNIATAEGARALYDAGVDVVKVGIGPGSICTTRVVAGVGVPQVTAIYDAAAVAREYGKTIIADGGIKYSGDIVKALAAGGNAVMLGSMFAGTDEAPGETEIYQGRKFKTYRGMGSIAAMKKGSSDRYFQGSVNEANKLVPEGIEGRVAYKGAASDIVFQMLGGIRSGMGYVGAGDIQELHENAQFVEMSGAGLIESHPHDVQITNEAPNYSVH

SEQ ID NO: 2163 - DNA, 141 bp, Streptococcus agalactiae
gtgtttagcagtttcgatagctgtcttagaatccatcagtttggcaaagatgaagttacagaaggcgacattgaaggtgagaaggacctttccaccaatccgtccaataaccgtgtccatttcaagccaggagttcagctc

SEQ ID NO: 2164 - protein, 47 aa, Streptococcus agalactiae
MFSSFDSCLRIHQFGKDEVTEGDIEGEKDLSTNPSNNRVHFKPGVQL

SEQ ID NO: 2165 - DNA, 669 bp, Streptococcus agalactiae
gtgaagttcaaaaaaaggcgaaagagcacactccctcctattccaaaagcgattaaagaagggcgacggtacgaggattttatagaacacatgaaccaatcagagctgaactcctggcttgaaatggacacggttattggacggattggtggaaaggtccttctcaccttcaatgtcgccttctgtaacttcatctttgccaaactgatggattctaagacagctatcgaaactgctaaacacatacaggtcattaagaggacactctatgataacaagagagacttcttcgaactctttcctgttatcctaacggataatggtggggaattcgctagagtggatgatattgagatagatgtttgtggacagtctcaactcttcttttgtgaccctaatcggtctgaccagaaagcaagaatcgagaagaatcataccctcgtgagagacatactgcctaaggggacttccttcgacaacttgactcaagaggacattaatctggcactatctcatatcaacagcgttaagagacaggctctaaatggtaaaacggcttatgagctattctcttttacttacggaaaagacatcgcaagtatactcggtattgaggaaattactgcggaagacgtctgccaatctcccaaactattaaaagacaaaatc

SEQ ID NO: 2166 - protein, 223 aa, Streptococcus agalactiae
MKFKKRRKSTLPPIPKAIKEGRRYEDFIEHMNQSELNSWLEMDTVIGRIGGKVLLTFNVAFCNFIFAKLMDSKTAIETAKHIQVIKRTLYDNKRDFFELFPVILTDNGGEFARVDDIEIDVCGQSQLFFCDPNRSDQKARIEKNHTLVRDILPKGTSFDNLTQEDINLALSHINSVKRQALNGKTAYELFSFTYGKDIASILGIEEITAEDVCQSPKLLKDKI

SEQ ID NO: 2167 - DNA, 564 bp, Streptococcus agalactiae
atgagtttatccatcatgacaaaacacaaacacctaactctcttagaccgtaatgacatccaatctggtttggatagaggagaaacctttaaagccatcgggcttaatctactgaaacaccctactactatcgcaaaagaagtcaaacgaaataagcaactaagagaatcaaccaaagactgcctagactgtccgctactaagaaaagctccctatgtttgtaatgggtgtccaaagaggaggatcaactgtggttacaagaagaccttctatcttgctaagcaagctcaaagaaactatgaaaaacttttagttgaatctagagaaggaatccctttgaacaaagagaccttctggaaaatagatagagtgctttctaatgggggtcaagaagggccaacgtatctatcatatcctcaaaaccaacgatctagaagtgagttcttcaaccgtttatcgacacatcaagaaaggctacctatccatcacaccaatcgacctacccagagctgtgaagttcaaaaaaaggcgaaagagcacactccctcctattccaaaagcgat

SEQ ID NO: 2168 - protein, 188 aa, Streptococcus agalactiae
MSLSIMTKHKHLTLLDRNDIQSGLDRGETFKAIGLNLLKHPTTIAKEVKRNKQLRESTKDCLDCPLLRKAPYVCNGCPKRRINCGYKKTFYLAKQAQRNYEKLLVESREGIPLNKETFWKIDRVLSNGGQEGPTYLSYPQNQRSRSEFFNRLSTHQERLPIHHTNRPTQSCEVQKKAKEHTPSYSKSD

SEQ ID NO: 2169 - DNA, 681 bp, Streptococcus agalactiae
ttgataaattttgatagaatagtagtaattataaataaaggatgtaccatgaaaaaaggactaatgatttcttttgagggcccagatggtgcgggtaaaacaaccgttttagaagctgttttacccttgctcagagaaaaattatcacaagatattctcaccaccagagagcctggtggcgtaactatttcagaagaaattcgtcatattattttagatgttaaacacacgcaaatggataaaaaaacagagctattgctttacatggctgctcgacgccaacatctagtggaaaaggtactcccagctctagaagaagggaaaatagtcctaatggatcgttttattgatagttctgttgcctatcagggatcaggaagaggattagataagtcacatataaaatggcttaatgactatgcgactgatagtcataaacctgatttaactttatattttgatgttccttctgaagtaggtttagagcgtattcaaaaaagtgttcaaagggaggtaaatcgtctagatctcgagcaattagatatgcatcaacgcgtccgtcaaggttaccttgaattggcggattcggagccaaaccgcattgtgacgattgatgcctcccaacagctagatgaagtaatagctgagacattctctattattttagatcgtatcaaccaa

SEQ ID NO: 2170 - protein, 227 aa, Streptococcus agalactiae
MINFDRIVVIINKGCTMKKGLMISFEGPDGAGKTTVLEAVLPLLREKLSQDILTTREPGGVTISEEIRHIILDVKHTQMDKKTELLLYMAARRQHLVEKVLPALEEGKIVLMDRFIDSSVAYQGSGRGLDKSHIKWLNDYATDSHKPDLTLYFDVPSEVGLERIQKSVQREVNRLDLEQLDMHQRVRQGYLELADSEPNRIVTIDASQQLDEVIAETFSIILDRINQ

SEQ ID NO: 2171 - DNA, 696 bp, Streptococcus pyogenes
atgccagtgctttttagctcattttttgataaaatagaactactaaaaagtgaaggaaataagatgatcacaggaaaactcataaccgttgaaggtccagatggcgcagggaaaacgactgttttagagcaactcattccactgttaaaacaaaaagtggctcaggatatcttgacaacaagagagcctggaggtgttgccatttcagaacacattagagaacttattttagacatcaaccatactgctatggaccctaaaacagaactcttactttatattgcggctcgaaggcagcatttggtggaaaaggtactaccagctcttgaagcaggccagttggtttttattgatcgtttcatcgatagttcagtagcttatcaaggtgcgggacgcggtttgatcaaagcagacattcagtggctcaacgagttcgcaacagatggtttagagcctgacttgaccctttattttgatgttccttctgaaattggtttagcacggattaacgcgaaccaacaaagagaagtcaatcgtttagatttggaaacaatagagatacatcaacgagtacgaaaaggatacctagccttagctaaggagcatccaaaacgtattgtcacaattgatgcgactaaaccattgaaagaagttgtctctgtcgctttggaacatgtcttagccttgcttttagcc

SEQ ID NO: 2172 - protein, 232 aa, Streptococcus pyogenes
MPVLFSSFFDKIELLKSEGNKMITGKLITVEGPDGAGKTTVLEQLIPLLKQKVAQDILTTREPGGVAISEHIRELILDINHTAMDPKTELLLYIAARRQHLVEKVLPALEAGQLVFIDRFIDSSVAYQGAGRGLIKADIQWLNEFATDGLEPDLTLYFDVPSEIGLARINANQQREVNRLDLETIEIHQRVRKGYLALAKEHPKRIVTIDATKPLKEVVSVALEHVLALLLA

SEQ ID NO: 2173 - DNA, 861 bp, Streptococcus agalactiae
atggatttaaagcgaacacaacccaaattgctggaaaagtttaatactattttacagtcagataggatgagtcatgcctatcttttttcgggaaattttgcaagtctagatatggcactttatttagcacaaagtcagttctgtgaaaagcgccagagtggtttaccatgtcaagagtgtagagcctgtcgtttaatcgctaatggggaattttcagatgttaaaatcatagaaccacaggggcaacttattaagacagagactataaaagagctgactaaagatttttcaagatcaggtttcgaagggaaatcacaggtctttatcatcaaagattgcgaaaaaatgcatgtcaatgcagccaacagtcttttgaaatttattgaagaacctcaaagttcatcttatgtcatcttattgactaatgatgaaaacaatgttttgccaacaattaagagtagaacgcaaatttttcgttttccaaaacaattggacatgttggttcatcaagctgaacaagcaggattgctaaaatcacaagctagcttattagctcaagtagcagacgatcctaaacatttagaaatattgttgactaacaaaaagttattagattacttgaatttaagtcaacagtttgtgacgactttggcaaaagataggcaaactgcttatttagaagtatctcgcttgacatcgcaagttgtagataaaaatgatcaggcatttgtttttcaatggctgacaataatgctggctaaagaaggccaactttatgatttagaaaatacttatagagctcagcaaatgtggaagagcaatgttagttttcaaaatagtttagagtatatggtgctttct

SEQ ID NO: 2174 - protein, 287 aa, Streptococcus agalactiae
MDLKRTQPKLLEKFNTILQSDRMSHAYLFSGNFASLDMALYLAQSQFCEKRQSGLPCQECRACRLIANGEFSDVKIIEPQGQLIKTETIKELTKDFSRSGFEGKSQVFIIKDCEKMHVNAANSLLKFIEEPQSSSYVILLTNDENNVLPTIKSRTQIFRFPKQLDMLVHQAEQAGLLKSQASLLAQVADDPKHLEILLTNKKLLDYLNLSQQFVTTLAKDRQTAYLEVSRLTSQVVDKNDQAFVFQWLTIMLAKEGQLYDLENTYRAQQMWKSNVSFQNSLEYMVLS

SEQ ID NO: 2175 - DNA, 873 bp, Streptococcus pyogenes
atggatttagcgcaaaaagctcctaacgtttatcaagcttttcagacaattttaaagaaagaccgtctgaatcatgcttatcttttttcgggtgattttgctaatgaagaaatggctctttttttagctaaggtcatcttttgtgaacagaaaaaggatcagacgccctgcgggcattgtcgctcttgtcaattgattgaacaaggagattttgccgatgtgacggtattggaaccaacagggcaagtgattaaaacggatgtggtcaaagaaatgatggctaacttttctcagacaggatatgaaaacaaacgacaagtttttattatcaaagattgtgacaaaatgcatatcaatgccgctaatagcttgctaaaatacattgaggagcctcagggagaagcttacatatttttattgaccaatgatgataacaaagtgcttccgaccattaaaagtcggacacaggtttttcagtttcctaaaaacgaagcctatctttaccaattggcacaagaaaagggattattaaaccatcaggctaagctagtagccaaacttgccacaaacaccagtcatctagaacgtctgttgcaaacgagcaagcttttagaactgataactcaagcagagcgttttgtatctatttggctgaaagatcagttgcaggcatatttagcgttgaaccgtctggtacagttagcaactgaaaaagaagaacaagatttagttttgacccttttgaccttgctcttggcaagagagcgtgcgcaaacgcctttgacacaattggaggctgtctatcaggctaggctcatgtggcagagcaatgttaattttcaaaacacattagaatatatggtgatgtcagaa

SEQ ID NO: 2176 - protein, 291 aa, Streptococcus pyogenes
MDLAQKAPNVYQAFQTILKKDRLNHAYLFSGDFANEEMALFLAKVIFCEQKKDQTPCGHCRSCQLIEQGDFADVTVLEPTGQVIKTDVVKEMMANFSQTGYENKRQVFIIKDCDKMHINAANSLLKYIEEPQGEAYIFLLTNDDNKVLPTIKSRTQVFQFPKNEAYLYQLAQEKGLLNHQAKLVAKLATNTSHLERLLQTSKLLELITQAERFVSIWLKDQLQAYLALNRLVQLATEKEEQDLVLTLLTLLLARERAQTPLTQLEAVYQARLMWQSNVNFQNTLEYMVMSE

SEQ ID NO: 2177 - DNA, 324 bp, Streptococcus agalactiae
atggataaaaaagacttgtttgatgcctttgatgatttttcacaaaatttattagttgggttgtctgaaattgagactatgaaaaaacaaatccaaaaattattggaggagaatactgttctacgcattgaaaatggtaaacttcgtgagcgtctgagcgttattgaagcagaaacagaaactgcagttaaaaattctaaacaaggaagagaattactcgaaggcatttacaatgatggctttcacatttgtaatactttctatggtcaacgtcgtgaaaatgacgaagaatgtgctttttgtattgaattattatatagagat

SEQ ID NO: 2178 - protein, 108 aa, Streptococcus agalactiae
MDKKDLFDAFDDFSQNLLVGLSEIETMKKQIQKLLEENTVLRIENGKLRERLSVIEAETETAVKNSKQGRELLEGIYNDGFHICNTFYGQRRENDEECAFCIELLYRD

SEQ ID NO: 2179 - DNA, 321 bp, Streptococcus pyogenes
gtgaataaaaaagaattattcgatgcttttgatggattttcccaaaatttaatggttactttagctgaaattgaagccatgaaaaaacaagtccaatcactagtagaagaaaacacgattcttcgcctagaaaatacaaaactacgggaacgtttgagtcacctagaacatgaaacggtagctaaaaatccttccaaacaaaggaaggatcacttagagggaatttatgatgaagggtttcatatctgcaattttttctatggacaacgtcgtgaaaatgatgaagaatgtatgttttgcagagaattattagatagaaag

SEQ ID NO: 2180 - protein, 107 aa, Streptococcus pyogenes
VNKKELFDAFDGFSQNLMVTLAEIEAMKKQVQSLVEENTILRLENTKLRERLSHLEHETVAKNPSKQRKDHLEGIYDEGFHICNFFYGQRRENDEECMFCRELLDRK

SEQ ID NO: 2181 - DNA, 870 bp, Streptococcus agalactiae
ttgatggaaatgcaagttcaaaaaagttttaaatcaaatatacattacggaacactctatctagtcccaactccaattggtaatctagatgatatgacttttcgtgccattaggattttaagagaagttgattttatttgtgcagaggatacacgaaatacgggacttttactcaagcactttgatattactactaaacaaattagttttcacgaacacaatgcttacgataaaatctctgggttaattgatttgttaaaagaagggaaatctttagcccaagtatctgatgcaggaatgccctctatttctgacccaggacatgaccttgtcaaggctgctattgaaggggatatcccagttgtatctataccaggagctagcgctggtattactgctctcatcgcttcaggtttagctccacaacctcatattttttatggcttcttacctcgtaagaaaggtcaacaaataactttctttgaaacaaagcaagattaccctgaaacacaaatcttttatgagtcaccgtttcgagtctctgatacgctaaaacacatgaaagagatttacggagatcgccaagttgttttagtacgcgaattgacgaaactctatgaagagtatcaaagaggaaccattagtcaacttttagagcatattgaaaaggtccctctcaaaggtgaatgcttaattattgttgatggtaagagagataccgagcgagtgaaagacagtagccaacaagatccactagtattagtaaaagaatatatcgctaatggtgataaaactaatcaagcgataaaaaaagtagcaaaagaatttaatctcaatagacaagaactctatgctagtttccatgattta

SEQ ID NO: 2182 - protein, 290 aa, Streptococcus agalactiae
MMEMQVQKSFKSNIHYGTLYLVPTPIGNLDDMTFRAIRILREVDFICAEDTRNTGLLLKHFDITTKQISFHEHNAYDKISGLIDLLKEGKSLAQVSDAGMPSISDPGHDLVKAAIEGDIPVVSIPGASAGITALIASGLAPQPHIFYGFLPRKKGQQITFFETKQDYPETQIFYESPFRVSDTLKHMKEIYGDRQVVLVRELTKLYEEYQRGTISQLLEHIEKVPLKGECLIIVDGKRDTERVKDSSQQDPLVLVKEYIANGDKTNQAIKKVAKEFNLNRQELYASFHDL

SEQ ID NO: 2183 - DNA, 861 bp, Streptococcus pyogenes
atgcaggttcaaaaaagttttaaagacaaaaaaacaagcggaaccttgtatttggttccaaccccaattggcaatctgcaggacatgacctttagagcagtggcaacgttaaaagaggttgattttatttgtgcagaagacacaagaaacacaggtcttttgctaaaacactttgatattgctaccaagcaaatcagctttcatgagcacaacgcctatgagaagattcctgatttaattgatttattaatatcaggacggtcactagctcaggtgtctgatgcaggaatgccatcgatttctgatcctgggcatgatttggtcaaggctgctattgatagtgatatcgcagtcgttgctttaccaggtgcctcagcagggattacagctttgattgctagtggactggctcctcaaccccatgttttttatgggtttttacccagaaaagcagggcaacaaaaggctttctttgaggacaaacaccattacccagagacacaaatgttttatgaatcaccctatcgcatcaaagataccctgaccaatatgttggcttgttatggtgatcgtcaagtggtgcttgtcagagaattaaccaagctttttgaggagtaccaacgggggtcgatttcagaaatcttgtcctaccttgaggaaacacccctcaaaggggagtgtctgctgattgtggctggagcccaagcagacagtgaggttgagctgacagctgatgttgacttagtgtctctagtgcaaaaagaaattcaagcaggagccaagccaaatcaggctattaaaacaattgctaaagcttaccaggtaaatcgccaagagctttaccaacaatttcatgactta

SEQ ID NO: 2184 - protein, 287 aa, Streptococcus pyogenes
MQVQKSFKDKKTSGTLYLVPTPIGNLQDMTFRAVATLKEVDFICAEDTRNTGLLLKHFDIATKQISFHEHNAYEKIPDLIDLLISGRSLAQVSDAGMPSISDPGHDLVKAAIDSDIAVVALPGASAGITALIASGLAPQPHVFYGFLPRKAGQQKAFFEDKHHYPETQMFYESPYRIKDTLTNMLACYGDRQVVLVRELTKLFEEYQRGSISEILSYLEETPLKGECLLIVAGAQADSEVELTADVDLVSLVQKEIQAGAKPNQAIKTIAKAYQVNRQELYQQFHDL

SEQ ID NO: 2185 - DNA, 633 bp, Streptococcus agalactiae
atgattttgagggaattttgtgcagagaatttaacagacttaaccagattagataaagctattatttcacgtgtcgagctttgtgataaccttgctgtcggaggcactactcctagctacggtgttatcaaagaagctaatcaatatttacatgaaaaaggtattagtgtcgctgttatgattcgtccccgtggaggaaattttgtatacaatgatttagaattacgtattatggaagaggatatcctacgtgctgttgagttagaatcagatgctcttgttttgggaatattaacttcaaataatcatattgatactgaagccattgaacaacttctacctgctacccaaggtttgccacttgtttttcatatggcatttgatgttatcccgaaatctgaccaaaaaaaatcaatagatcaattagttgctttaggctttacaaggattctcctacatggttcatctaatggcgaaccaattatagaaaatatcaaacatatcaaagcattagttgaatatgctaataatcgtattgaaattatggttggcggcggtgtgactgctgaaaactatcaatatatttgccaagaaactggggttaaacaagcccatggtactagaataactcaa

SEQ ID NO: 2186 - protein, 211 aa, Streptococcus agalactiae
MILREFCAENLTDLTRLDKAIISRVELCDNLAVGGTTPSYGVIKEANQYLHEKGISVAVMIRPRGGNFVYNDLELRIMEEDILRAVELESDALVLGILTSNNHIDTEAIEQLLPATQGLPLVFHMAFDVIPKSDQKKSIDQLVALGFTRILLHGSSNGEPIIENIKHIKALVEYANNRIEIMVGGGVTAENYQYICQETGVKQAHGTRITQ

SEQ ID NO: 2187 - DNA, 627 bp, Streptococcus pyogenes
atgattaaagaattttgtgctgagaacctcacactactgccaacccttgatgctggtcaaatcagtcgtgtggaactctgtgataacctagctgtcggagggaccacgccatcttatggcgtcatcaaagaagcctgtcagctcttacacgataaaaagattagcgtagcgaccatgattcgacctcgcggtggcgattttgtctataacgacctcgaactaaaagctatggaagaagatatcttaaaagctgttgaagctggctcagatgcgctagtcttaggcttgctgaccacagaaaatcaactggataccgacgctatcgagcaattactgcctgctacacaaggcttgccactggttttccacatggcttttgaccggattccgactgatcaccagcaccaagcgcttgaccaactgattgattatggctttgtgcgtgtgctaactcatggctcacctgaagctactcctattacagacaatgtggaacagcttaaaagtcttgtgacctatgccaataaacgcattgaaatcatgattgggggaggcatcactgctgagaattgccaaagcttgagtcaactcactggaacggccattgttcacgggactaaaatcatt

SEQ ID NO: 2188 - protein, 209 aa, Streptococcus pyogenes
MIKEFCAENLTLLPTLDAGQISRVELCDNLAVGGTTPSYGVIKEACQLLHDKKISVATMIRPRGGDFVYNDLELKAMEEDILKAVEAGSDALVLGLLTTENQLDTDAIEQLLPATQGLPLVFHMAFDRIPTDHQHQALDQLIDYGFVRVLTHGSPEATPITDNVEQLKSLVTYANKRIEIMIGGGITAENCQSLSQLTGTAIVHGTKII

SEQ ID NO: 2189 - DNA, 351 bp, Streptococcus agalactiae
atgacaatttataatttttctgcaggtcctgcagtcttaccaaaaccagtgcttgtaaaagcccaatctgaactccttaattatcaagggtctagtatgagtgttttggaggtatcgcaccgctccaaagagtttgatgatattatcaaaggtgctgagcgttacttaagagatttgatgggaattccggataattataaagtaatctttttacaaggtggtgcatccttacagtttagtatgattcccttgaatattgccagagggcgtaaagcttactatcatgttgctggttcgtggggggaaaaaagcttatacagaggctgtaaaactatcaaaaacaattccttt

SEQ ID NO: 2190 - protein, 117 aa, Streptococcus agalactiae
MTIYNFSAGPAVLPKPVLVKAQSELLNYQGSSMSVLEVSHRSKEFDDIIKGAERYLRDLMGIPDNYKVIFLQGGASLQFSMIPLNIARGRKAYYHVAGSWGEKSLYRGCKTIKNNSF

SEQ ID NO: 2191 - DNA, 90 bp, Streptococcus agalactiae
atgaagctaatagaattggttcaaaaggaattgtttttgatagttttacagcctctgtataagcttttttccccccacgaaccagcaaca

SEQ ID NO: 2192 - protein, 30 aa, Streptococcus agalactiae
MKLIELVQKELFLIVLQPLYKLFSPHEPAT

SEQ ID NO: 2193 - DNA, 642 bp, Streptococcus agalactiae
gtgacaacaaataataccattgaaggaacatcgctttatgatattcctaaaactaatgaagtgcctgttattgcggatatgtcttctaatatattagctgtaaaatataaagtagaagattttgcaatgatttatgcaggagctcaaaaaaatattggacctgctggtgtaacggtagttattatccgtgaagatatgattaatgaggaaccaactttatcatcaatgttggattataagattcagtcagatgctggttctctttataatacgccgcctgcttacagtatttacattgctaaattagtctttgaatgggtgaaaagtctaggtggtgttgatgctatggaaaaagctaatcgtgaaaaatcaggacttctctatgattatattgattcctcagaattttatagtaatcctgtcagagataaaaagagtcgttctctatgtaacattcctttcataactattaataaagatttagatgaaaaatttgtaaaggaagcgacagaacgtggatttaaaaatattaaaggacatcgttcggtaggtggtatgagagctagcctttataatgcctttcctaaacaaggtgtcatcgaattaattgattttatgaaaacatttgaagcagaaaataca

SEQ ID NO: 2194 - protein, 214 aa, Streptococcus agalactiae
MTTNNTIEGTSLYDIPKTNEVPVIADMSSNILAVKYKVEDFAMIYAGAQKNIGPAGVTVVIIREDMINEEPTLSSMLDYKIQSDAGSLYNTPPAYSIYIAKLVFEWVKSLGGVDAMEKANREKSGLLYDYIDSSEFYSNPVRDKKSRSLCNIPFITINKDLDEKFVKEATERGFKNIKGHRSVGGMRASLYNAFPKQGVIELIDFMKTFEAENT

SEQ ID NO: 2195 - DNA, 558 bp, Streptococcus agalactiae
gtgggtaatataatgcaaatcagattagcttttccaaatgaaattgaccaaattatgcttcttattgaggaagcgcgtgccgaaattgctaaaacaggaagtgatcaatggcaaaaagaagatggataccctaatcgtaacgatattattgatgatatcttgaacggttatgcttgggttggtattgaagatgggatgctagcgacttatgcggctgtcattgatggtcatgaagaggtttatgatgctatttatgagggaaaatggctccatgataaccatcgctatcttacatttcatcgtattgcgatctcaaatcaatttcgtggtagaggactagcacagacattccttcaagggttaattgaaggtcataaaggacctgattttcgttgcgatactcatgaaaaaaatgtcactatgcagcatattctaaataaattaggctatcaatattgtggtaaagtacctctagatggggtacgattggcttatcagaagataaaagaaaagggagaaacgagcatctatcgtgagattgatgaaagaaatcccatg

SEQ ID NO: 2196 - protein, 186 aa, Streptococcus agalactiae
MGNIMQIRLAFPNEIDQIMLLIEEARAEIAKTGSDQWQKEDGYPNRNDIIDDILNGYAWVGIEDGMLATYAAVIDGHEEVYDAIYEGKWLHDNHRYLTFHRIAISNQFRGRGLAQTFLQGLIEGHKGPDFRCDTHEKNVTMQHILNKLGYQYCGKVPLDGVRLAYQKIKEKGETSIYREIDERNPM

SEQ ID NO: 2197 - DNA, 99 bp, Streptococcus agalactiae
gtgagattgatgaaagaaatcccatgtaagaaaaaaagaaaggggttattttggtcaatgatgactaaagagataaccttagtgaaaaagaatggtttt

SEQ ID NO: 2198 - protein, 33 aa, Streptococcus agalactiae
MRLMKEIPCKKKRKGLFWSMMTKEITLVKKNGF

SEQ ID NO: 2199 - DNA, 1179 bp, Streptococcus agalactiae
atggtttttagtgtcaaaacatttaataatattaatcaaattggtttacaagagttagggaatcgtttccagattgatggggatatgtcagaaaatcctgatgcctatattattcgtagtcaaaatttgcataatcaggatttcccaagtaacctcaaagctattgctagggcgggtgcaggaacaaataatattcctattgaagaggcaagtgcacagggaatagtcgtgtttaataccccaggtgcaaatgctaatgctgtaaaagaagcggtcattgctgccttattactttcagctcgtgattatttaggagctaaccgatgggttaatactctaactggaacagatattcccaaacaaattgaagcaggaaagaaagcttttgctggtaatgaaattgcaggaaaaaaattgggagttatcggccttggtgccattggagctagaattgcgaatgatgctagacgcttaggaatgacagttcttggttatgatccctatgtttcaattgaaacagcttggaatatttcaagccatgttcaaagggttaaagagattaaggatatttttgaaacttgtgactatatcacaattcatgttcccttaacaaatgaaactaagcatacttttgatgcgaaagctttttcaatcatgaaaaaaggaactacgattatcaactttgctcgtgcagaattagtcaataaccaagagctatttgaagcgatagaaactggtgttgtcaagcgctatattactgattttggagacaaagaattattaaaccaaaaaggaattacagtctttcctcatgtaggcggatcaacagatgaggcagagctaaattgtgctattatggcaagtcaaaccattcgttgttttatggagacaggagaaatcactaattcagttaatttccccaatgtacatcaaattcaaaccgcaccatttcgtattactttaattaacaagaatgttcctaacattgtggctaaaatttcaactgctgtatcagagttaggtataaatattgataacattattaaccgttcaaagggtgactacgcctacacactaatagatttagatgaaacggataataacaagatttctactttaattgaagaatttgaaggtgatgagaatatcgtccgtgtacgtttaattgcaaaacaacaa

SEQ ID NO: 2200 - protein, 393 aa, Streptococcus agalactiae
MVFSVKTFNNINQIGLQELGNRFQIDGDMSENPDAYIIRSQNLHNQDFPSNLKAIARAGAGTNNIPIEEASAQGIVVFNTPGANANAVKEAVIAALLLSARDYLGANRWVNTLTGTDIPKQIEAGKKAFAGNEIAGKKLGVIGLGAIGARIANDARRLGMTVLGYDPYVSIETAWNISSHVQRVKEIKDIFETCDYITIHVPLTNETKHTFDAKAFSIMKKGTTIINFARAELVNNQELFEAIETGVVKRYITDFGDKELLNQKGITVFPHVGGSTDEAELNCAIMASQTIRCFMETGEITNSVNFPNVHQIQTAPFRITLINKNVPNIVAKISTAVSELGINIDNIINRSKGDYAYTLIDLDETDNNKISTLIEEFEGDENIVRVRLIAKQQ

SEQ ID NO: 2201 - DNA, 474 bp, Streptococcus agalactiae
atgttatatcaagaattctatcagtcccctcttggagaaattcgccttctagcagacaatctaggtttatcagggctttattttgttgggcaaaaatatgatatgctagcagtcaaccaagaggaaattgttaatatgtcaaattcctatactttacttggtaagaagtggttagatgcttatttttcacagcaaaatttacctagtattccattatcattgagagggacagcatttcagacgagagtatggcaggaattacagaaaatcccttttggagataccaaaacttatggagaattagcgaaagagctaaattgtcaatctgcacaggctgttggaggagcaataggtaaaaattctatttctctaattataccttgtcaccgtgttttaggaagatatggtcaattaactggttatgctggtggcttagaaagaaaatcttggttattagaatacgaaaaggagaaa

SEQ ID NO: 2202 - protein, 158 aa, Streptococcus agalactiae
MLYQEFYQSPLGEIRLLADNLGLSGLYFVGQKYDMLAVNQEEIVNMSNSYTLLGKKWLDAYFSQQNLPSIPLSLRGTAFQTRVWQELQKIPFGDTKTYGELAKELNCQSAQAVGGAIGKNSISLIIPCHRVLGRYGQLTGYAGGLERKSWLLEYEKEK

SEQ ID NO: 2203 - DNA, 354 bp, Streptococcus agalactiae
atgtatacgttttatgaataccccaaatgtaccacttgtcgttcagcaaaaaaagagttaactgaactcggcttgacttttgaagcgattgatataaaaagcaatcctcccaaagtttcgttattaaaagaattgttagagaattcgccttatgaccttaaaaagtttttcaatacttcaggaaattcttacagagaattaggcttaaaagataaatttgatgatttaactcttgaccaagctttggacttattggcatcggatggaatgcttattaagcgtccattgctagttaaagataataaaattcttcagattggctaccgtactaagtataaagacctcaacttagta

SEQ ID NO: 2204 - protein, 118 aa, Streptococcus agalactiae
MYTFYEYPKCTTCRSAKKELTELGLTFEAIDIKSNPPKVSLLKELLENSPYDLKKFFNTSGNSYRELGLKDKFDDLTLDQALDLLASDGMLIKRPLLVKDNKILQIGYRTKYKDLNLV

SEQ ID NO: 2205 - DNA, 306 bp, Streptococcus pyogenes
atggctgaattaaagcaactggttagtgactttgaagccattgacatcaaagctaatccacccaaagctcaggacctcaaacattggatggaaacatctggttataccatcaaaaatttctttaataccagtggtaacagctaccgcgaattgggacttaaagataaaatagaccagcttagccttgataaagctgctgaacttttagccacagatggtatgttgattaaacggcctattttgattaaggacggtaacgtcttacaagttggctatcgcaagccatatcaagagttggatttagga

SEQ ID NO: 2206 - protein, 102 aa, Streptococcus pyogenes
MAELKQLVSDFEAIDIKANPPKAQDLKHWMETSGYTIKNFFNTSGNSYRELGLKDKIDQLSLDKAAELLATDGMLIKRPILIKDGNVLQVGYRKPYQELDLG

SEQ ID NO: 2207 - DNA, 825 bp, Streptococcus agalactiae
atgaaactcatttcatggaatattgattccctcaatgcggcattaacaagtgaatcaacacgtgctttaatgtcacgccaagttattgatactttagttgctgaagatgccgacatcattgcgattcaagaaactaaactgtctgccaaaggacctactaaaaaacatttggaagtacttgaaacttacttcccagaatatgatttggtttggcgatcatcagtcgaacctgctcgtaagggctatgctggtacaatgttcttatatcgtaaagggttaaatcctattgttagcttccctgaaatcgatgctcctactacaatggataatgaaggtcgcattattactctcgaattggaaaactgctatatcacacaggtctatactccaaatgcaggtgatggcctaaagcgcttagctgaccgtcaaatatgggatattaaatatgctgagtatttagcaacattggatagtcaaaaacctgttctagcaacaggtgactataacgtagcccacaaggaaatagacctagctaatcctagcagtaatcgtcgttctgctggattcacagctgaagagcgccaaggctttacaaatctactagccaaaggttttacagatacttttcgttaccttcatggcgatgttccaaatgtttatagctggtgggcacaacgaagtcgtacatccaaaatcaacaatacagggtggagaattgattattggctaacaagtaaccgtgtcgcagataaaattaccaagtcagaaatgattcattctggtgatcgtcaagatcatacaccaattattttggagattgaacta

SEQ ID NO: 2208 - protein, 275 aa, Streptococcus agalactiae
MKLISWNIDSLNAALTSESTRALMSRQVIDTLVAEDADIIAIQETKLSAKGPTKKHLEVLETYFPEYDLVWRSSVEPARKGYAGTMFLYRKGLNPIVSFPEIDAPTTMDNEGRIITLELENCYITQVYTPNAGDGLKRLADRQIWDIKYAEYLATLDSQKPVLATGDYNVAHKEIDLANPSSNRRSAGFTAEERQGFTNLLAKGFTDTFRYLHGDVPNVYSWWAQRSRTSKINNTGWRIDYWLTSNRVADKITKSEMIHSGDRQDHTPIILEIEL

SEQ ID NO: 2209 - DNA, 825 bp, Streptococcus pyogenes
atgaaactgatttcatggaacattgattccttaaatgctgctctcacaggagagtcccctcgtgcgcttttatcacgcgctgttttagacactttagtcgctcaagatgcggatattattgccatccaagaaactaaattatctgctaaggggcctaccaaaaaacatatcgagaccctacttagttactttccaaactatttgcatgtgtggcgttcttcagttgagcctgctaggaaaggctatgctggcaccatgttcctgtacaaaaacacgttaaaccctgtcattacttttccagaaattggtgccccaacaacaatggatgctgagggccgtatcattaccctagaatttgaagactttttcgtcacacaggtttacacgcctaatgctggtgatggccttagacgtttagatgaccgtcaaatttgggaccacaaatacgctgattatttgactgaactggatgctcaaaagcctgttttggctacgggagattacaacgttgcccataaagagattgatttggcaaatccaaacagcaatcgacgttctcctggttttaccgacgaagaacgtcaaggctttactaacctattagcaagaggctttacagatacttttcgtcacgtgcacggcgatattcctcatgtttatacctggtgggcacaacgtagcaaaaccagcaaaatcaataataccggttggagaattgactattggctagcttcaaaccgacttgtggataaggttaagcgttctgaaatgatttcttctggggaacgccaagaccatacgccaattttactagatattgatctc

SEQ ID NO: 2210 - protein, 275 aa, Streptococcus pyogenes
MKLISWNIDSLNAALTGESPRALLSRAVLDTLVAQDADIIAIQETKLSAKGPTKKHIETLLSYFPNYLHVWRSSVEPARKGYAGTMFLYKNTLNPVITFPEIGAPTTMDAEGRIITLEFEDFFVTQVYTPNAGDGLRRLDDRQIWDHKYADYLTELDAQKPVLATGDYNVAHKEIDLANPNSNRRSPGFTDEERQGFTNLLARGFTDTFRHVHGDIPHVYTWWAQRSKTSKINNTGWRIDYWLASNRLVDKVKRSEMISSGERQDHTPILLDIDL

SEQ ID NO: 2211 - DNA, 900 bp, Streptococcus agalactiae
ttgttggcttctttatttatcgtccgtttgtcaaaatcgctttcgctaaggaggagcaatatgaaaaaattacttagatggcttcctcctgtacttttcattattatccttataggaatgactatcttaggtaagtcctatatcaataaagtaacagctcacaaaataaaactctataactctcgaatgactcctactattttaattccaggatccagtgctactcaagaacgatttaacagcatgttagcacagctcaaccaaatgggagaaaaacatagcgttttaaagttaactgtcaaaaaagacaatagcattatctacaatggacaaattagcggcaatgaccacaaaccctacattgtcattggatttgaaaataatgaagatggttatagtaacatcaaaaaacaaacaaaatggctacagattgctatgaatgatcttcagaagaaatataaatttaaacgttttaacgctatcggtcattcaaatggtggcttatcatggactattttcctagaagattattacgactctgatgaatttgatatgaaatcattgttaacaatgggaacaccttttaactttgaagaaagtaacacctcaaatcatactcaaatgcttaaagatttaatcagtaataaaggaaatattccatcaagtctcatggtatacaatttggcaggaactaattcatatgatggtgataaaattgttccatttgctagtgtggagactggtaaatatattttccaagaaaccgctaaacactatacccaactaacagtaactggtaataatgctacacattctgacttgcctgataatcctgaagttatccaatatgtcgcagaaaaaattcttaaaaatgagaaaggtaaattaccaaaacctcac

SEQ ID NO: 2212 - protein, 300 aa, Streptococcus agalactiae
MLASLFIVRLSKSLSLRRSNMKKLLRWLPPVLFIIILIGMTILGKSYINKVTAHKIKLYNSRMTPTILIPGSSATQERFNSMLAQLNQMGEKHSVLKLTVKKDNSIIYNGQISGNDHKPYIVIGFENNEDGYSNIKKQTKWLQIAMNDLQKKYKFKRFNAIGHSNGGLSWTIFLEDYYDSDEFDMKSLLTMGTPFNFEESNTSNHTQMLKDLISNKGNIPSSLMVYNLAGTNSYDGDKIVPFASVETGKYIFQETAKHYTQLTVTGNNATHSDLPDNPEVIQYVAEKILKNEKGKLPKPH

SEQ ID NO: 2213 - DNA, 1215 bp, Streptococcus agalactiae
atgcacagcactatttataaatgtcatcattgccgttatctaatttataaaagttttaaagatatctttccttttgctctcattttttcttggattgaaatccttcaaaaactcgttatatcagatgattcttttttagctcaaacaacaaagtccagtatttataaaaacgagtggttatatacggtttccaatactctttatgatttatctcatttactaatctactttatggctagttattttgtggctagtttagtatggagagacttatctaaccaaactaaagaaagtttttctgcaagtttacttggctttgccactgtttggttgcttctaacttcagttgttccaggtacagattatcactatcctagccaacccatttggcttatgctggctttgatttcgtatctttttatctttttaactcgactgcttcaaaatcgacatcatattttccagtatagtatgttagctatactactattaatctcttctattttgtcacatatcttatatcgttatcctaatattgatttagaataccttatacaaaatcacttttctcaatggctgggtgatgggccacatcaattaattcctattatgctttggtctatcttagctatttttctaaccttatcaggtctttttgtaccagatattttatttcgtccttactcctatttttcagtagttagcgaaaatttaaatgctgccttgagccaacatacagataaaatcccttatctgtataccttttatactgttaaaaatagctttgctatgtttggcggtattggaatcctattatccttatttttagcagttttatatgaaagtagaaaactacaatcgaagaattactataaattgacattactgaccttaactcctcttatttttgatcaaaatttaccatttttagtaggtctacctgtcattttacaaccaatattattcattccgatggtattaacaactatctttgcagaggcttttggagctcttatgctctacctaaaatttgtcgaccctgcagtttatactgtcccaagtggtacacctagtctactatttggctttcttgcttcaaatggggattggcgttaccttccagtcactgcaattattctagttgttggcttctttatttatcgtccgtttgtcaaaatcgctttcgctaaggaggagcaatatgaaaaaattact

SEQ ID NO: 2214 - protein, 405 aa, Streptococcus agalactiae
MHSTIYKCHHCRYLIYKSFKDIFPFALIFSWIEILQKLVISDDSFLAQTTKSSIYKNEWLYTVSNTLYDLSHLLIYFMASYFVASLVWRDLSNQTKESFSASLLGFATVWLLLTSVVPGTDYHYPSQPIWLMLALISYLFIFLTRLLQNRHHIFQYSMLAILLLISSILSHILYRYPNIDLEYLIQNHFSQWLGDGPHQLIPIMLWSILAIFLTLSGLFVPDILFRPYSYFSVVSENLNAALSQHTDKIPYLYTFYTVKNSFAMFGGIGILLSLFLAVLYESRKLQSKNYYKLTLLTLTPLIFDQNLPFLVGLPVILQPILFIPMVLTTIFAEAFGALMLYLKFVDPAVYTVPSGTPSLLFGFLASNGDWRYLPVTAIILVVGFFIYRPFVKIAFAKEEQYEKIT

SEQ ID NO: 2215 - DNA, 1302 bp, Streptococcus pyogenes
atggcaaaaatgaatatgcaaaacatcatcaagccaatcatgacatttgtgaatatgcgcggcatcattgccttaaaagacggtatgttagccattttacctttgaccgttgtggggagtcttttcctgattgctgggcagattcctttccaaggggttaatgatgccattgctagtgtgtttggtgctgactggacagaaccctttatgcaggtttaccatggaacatttgctattatggggttgatttcctgttttgcaattggctattcttatgctaaaaactcaggtgttgaacctctcccttcaggggttctatccttgtcagccttctttattttattgagatcatcttatgttccagcagaaggtgaagctattggagatgctatcagtaaggtttggtttggtggtcaagggattattggtgctattgtgattggtttaacggtcggagctgtttacacaacatttatccgtcgtcatatcgtcattaaaatgccagatcaagtgccacaagccatcgccaaacagtttgaagccatgattccagcctttgtgatctttaccttgtcaatgcttgtgtatattattgccaagtcagtaacaggtggtggcacctttattgaaatgatttatgatgtcattcaggtaccgctgcaagggttaacgggttctctttatggcgcactaggtattgccttctttatttcctttctttggtggtttggcgtgcatgggcaatctgtggtcaatggaattgtcactgctcttctcttatcaaatctagatgccaataaggccttgatggcagcaggtgagttatccctagacaagggtgcccatattgtaacccaacaatttttagactctttcttgattctatcaggttctggcattacctttggtttagtggtagctatgatctttgcggctaaatccaaacaatacaaggctttaggcaaggttgcagccttcccagccctctttaatgttaatgaaccagtcgtctttggttttccaattgtgatgaatccagtcatgttcttgccatttatcttggttccggtcttggcagctctcacagtttatggcgccattgctattggtttcatgcagccctttgcaggagtgacccttccgtggtcaacaccagccattatctcagggttcatggttggtggctggcaaggagctattgtgcaaattcttatactcatcatgtcaacgttggtgtacttcccattctttaaaatccaagataatatggcttatcaaaatgaacaagctagtgaagagtca

SEQ ID NO: 2216 - protein, 434 aa, Streptococcus pyogenes
MAKMNMQNIIKPIMTFVNMRGIIALKDGMLAILPLTVVGSLFLIAGQIPFQGVNDAIASVFGADWTEPFMQVYHGTFAIMGLISCFAIGYSYAKNSGVEPLPSGVLSLSAFFILLRSSYVPAEGEAIGDAISKVWFGGQGIIGAIVIGLTVGAVYTTFIRRHIVIKMPDQVPQAIAKQFEAMIPAFVIFTLSMLVYIIAKSVTGGGTFIEMIYDVIQVPLQGLTGSLYGALGIAFFISFLWWFGVHGQSVVNGIVTALLLSNLDANKALMAAGELSLDKGAHIVTQQFLDSFLILSGSGITFGLVVAMIFAAKSKQYKALGKVAAFPALFNVNEPVVFGFPIVMNPVMFLPFILVPVLAALTVYGAIAIGFMQPFAGVTLPWSTPAIISGFMVGGWQGAIVQILILIMSTLVYFPFFKIQDNMAYQNEQASEES

SEQ ID NO: 2217 - DNA, 120 bp, Streptococcus agalactiae
ttgcttaataatttatttagaactgttaggctagctagtgctaatattaatactattttaaaccaatctattagaaaaaaagtgctgagcaagattgcccagtcttatttttgtttgcca

SEQ ID NO: 2218 - protein, 40 aa, Streptococcus agalactiae
MLNNLFRTVRLASANINTILNQSIRKKVLSKIAQSYFCLP

SEQ ID NO: 2219 - DNA, 720 bp, Streptococcus agalactiae
ttgtttgccataaagttagaggaaaatatgtctaaaaagtctcaccgtcaatatcaaatatatgaagggctcaggtgtgcggttgcactctgttttatttcaggttatatcaatgcttttacttatgtaacacaaggaaaacgttttgcaggtgtacaaacagggaatttgttatcttttgctattcatcttagtaataagcattatagtcaagcgcttgcttttttgctacctataatggttttcatgttaggtcaatcgtttacttatttcatgaatcgttgggcgaataaacatcaactgcactggtacctattatctagttttgcgttgacacaggttgctatagtaacaattatattgactcctttcttaccatcgtcgtttactgtggcaggactagccttctttgcttcaatacaagtagatacctttaaatcgctcagaggagcaccttatgctaatatgatgatgactggtaatatcaagaatgctgcttatttattaacaaagggactttacgaaaaaaattctgatattttcttaattgctagaaatacgattattattattggaggatttatctttggtgttgtttgctcgacttatttttcaagtaaactgggcgaatggagcttatcattaatattaattcctcttttatatgtcaacttgctgttaggccatgaattttataacctacaagtagaaaggcactcc

SEQ ID NO: 2220 - protein, 240 aa, Streptococcus agalactiae
MFAIKLEENMSKKSHRQYQIYEGLRCAVALCFISGYINAFTYVTQGKRFAGVQTGNLLSFAIHLSNKHYSQALAFLLPIMVFMLGQSFTYFMNRWANKHQLHWYLLSSFALTQVAIVTIILTPFLPSSFTVAGLAFFASIQVDTFKSLRGAPYANMMMTGNIKNAAYLLTKGLYEKNSDIFLIARNTIIIIGGFIFGVVCSTYFSSKLGEWSLSLILIPLLYVNLLLGHEFYNLQVERHS

SEQ ID NO: 2221 - DNA, 705 bp, Streptococcus pyogenes
atgtcaaaaaagaaacgaaaacactatcaggtttatgagggattacgctgtgctatgacgctttgttttatcagtggctatgtcaatgcctttacctatatgacccaaggaaaacgttttgcaggtgttcagacaggcaaccttttgtcatttgccattcgcttgtcagaacagcaactgaaggaggcactgcaatttttacttcccatgatcgtttttatgcttgggcagtcctttacttatttcatgcaccgctgggccactaaaaaagggctccactggtacttattatcaagtgttatcttaacagggattgcttttggaacggccctattcacgccttttcttccttccaatgttacggtagcagctttagccttttttgcctctattcaggttgatacgtttaaaaccttacgaggagctagctatgctaatgtgatgatgacaggaaatatcaaaaatgccgcctatttactaaccaaaggcttgtacgaaaaaaatcacgaactaacacatatcggacgcaacaccttaatagtcatcttggcttttgctgttggggtggtttgttcgacgttgctttgcatagcttatggcgagtatgctttgatgcctattttaatgcctttactctatgtcaattacctgttggctcaggaattttatcacattcaaaccaaaatcaaaccgattaaaagaact

SEQ ID NO: 2222 - protein, 235 aa, Streptococcus pyogenes
MSKKKRKHYQVYEGLRCAMTLCFISGYVNAFTYMTQGKRFAGVQTGNLLSFAIRLSEQQLKEALQFLLPMIVFMLGQSFTYFMHRWATKKGLHWYLLSSVILTGIAFGTALFTPFLPSNVTVAALAFFASIQVDTFKTLRGASYANVMMTGNIKNAAYLLTKGLYEKNHELTHIGRNTLIVILAFAVGVVCSTLLCIAYGEYALMPILMPLLYVNYLLAQEFYHIQTKIKPIKRT

SEQ ID NO: 2223 - DNA, 873 bp, Streptococcus agalactiae
atggttaatacaaaaacacttctcccctacaaaactatgccggtttggactgcacagtctattccaaaggcatttttagaaaagcataatactaaggaaggcacctgggcaaaactaaccattctaagtggttctttagtattttaccagttatctcctgatggagaggaaatctcgcggcatatttttgatgctagtagtgatattccttttgttgatccacaagtctggcataaagtttcgccgaatagtccagacttaagttgctatctaactttttactgccaaaaagaagattacttccataaaaaatatggtctcacgcgcacacattctgaggttatcgccagtgcacctctcttatctgagaagagtaatatattagaccttgggtgtggtcaagggcgaaactcactttatttatcgctgctgggacatcaagtgacttctgtcgattcaaacggacagagccttgtagctttagaaaatatggcattagaagaagagcttccttacaatataaaaaggtatgatattaatactgctgctattgaagggcactatgattttattttatcaactgtggtatttatgtttttaaatcccgactgcatttctgatattattttacaaatgcaatcacatactcagattggaggatacaatcttatcgtttctgctatggataccgctgaaaatccttgcccgcttccattcccttttaccttcaaagaaggacaattgaaatcttattacaatgactgggaaatcatcaaatataatgaaaatttaggtgaattgcacagggtggatgaaaacggtaatcgcttaaaattacagtttgcgactttattagctcgaaaattaagatca

SEQ ID NO: 2224 - protein, 291 aa, Streptococcus agalactiae
MVNTKTLLPYKTMPVWTAQSIPKAFLEKHNTKEGTWAKLTILSGSLVFYQLSPDGEEISRHIFDASSDIPFVDPQVWHKVSPNSPDLSCYLTFYCQKEDYFHKKYGLTRTHSEVIASAPLLSEKSNILDLGCGQGRNSLYLSLLGHQVTSVDSNGQSLVALENMALEEELPYNIKRYDINTAAIEGHYDFILSTVVFMFLNPDCISDIILQMQSHTQIGGYNLIVSAMDTAENPCPLPFPFTFKEGQLKSYYNDWEIIKYNENLGELHRVDENGNRLKLQFATLLARKLRS

SEQ ID NO: 2225 - DNA, 2046 bp, Streptococcus agalactiae
atgtatcatgataaaaaacacctctcattagggtggcttataggagaaatcatgacagaaaaaaaatcattttacattactaccccaatttattacccatcaggtaaattgcacatcggttctgcctatacaacgatagcatgtgatgttttggcacgttacaaacgcatgatgggctttgatgttcagtatttgactggtcttgatgagcatggtcagaaaattcaacaaaaggctgaagaagcaggcattacaccacaggaatatgttgatggcatggctgaaagtgtcaaaacattatgggaacttttagatatttcctatgacaaattcatccgtacaacagatacttaccatgaagaagcggttgctaaaatttttgaacaattgttggcacaaggggacatctatcttggtgagtataccggatggtattctgtttcagatgaagaattttttactgaaagccaattagcagaagtttatcgtgacgaaaacggtaatatgattggtggtgttgcgccatctggtcatgaagttgaaaaagtttctgaagaatcttatttcttccgcatgagcaaatatgcagatcgtttaaaagcgtactacgctgagcatccagaatttattcagccagatggtcgtatgaatgaaatgcttaaaaactttatagaaccaggtttagaagatttagcagtgtctcgtacaacttacacatggggagttcaggtaccatcaaatccaaaacatgttatttatgtctggattgatgctttgatgaactatatttctgctcttggttatggttggtctgacgatctcagtcaatatcataaattttggccagcagacattcatatgattggtaaagatattcttcgtttccactctatttattggcctatcatgttgatggcgctggatttgccattaccaaaacgtctagttgctcatggttggtttgtgatgcaagatggtaaaatgtctaaatcaaaagggaatgtcgtttatccagaaatgttagtagagcgttttggtcttgatccactccgttattatctcatgcgttcattgcctgttggttcagacggaacttttacgccagaagattatgttggacgtattaactatgaacttgctaatgatttaggaaaccttctcaaccgcactattgctatggttaacaagtatttcgatggagaagtaccaaggtttgctgttgcaactgactttgatgccgatttagcttctgttgcgacagatagtattgaaaactatcataaacaaatggaagcggtggatttcccacgtgcccttgaagctgtatggaatcttatttcacgaactaacaaatatattgatgaaacagcaccgtgggtacttgcaaaagacgaaacagatcgtgataagttagcagctgtaatgagtcatttagttgctagtctacgtgttgttgctcacctcattcaaccgttcatgatggaaacttccgatgccattatggaacaacttggtttaggggcaacattcgatcttgaaaaattgacttttgctgatctaccagaaggtgttcgagttgttgcaaaaggttcaccaattttcccaaggttggatatggaagacgaaattacttatatcaaagaacaaatgaatgctggaaaagcaccagtggaaaaggagtgggttcctgaagaagttgaattgacatcaagcaaaggtcaaatcaagtttgaggattttgacgctgttgaaatccgcgttgcagaagtaattgaagttgagaaagtggaaggttctgataaacttcttcgtttccgtctagatgctggtgatgagggccatcgtcaaatcttatcagggattgcaaaattttacccaaatgaacaagagttagtagggaaaaaactccaaattgttgctaacctcaaaccacgtaaaatgatgaaaaaatatgtcagtcaaggcatgattctctcagcagaacatgatggtaaattgacagtgttgacggtcgattcagcagtggcaaatggatcaattattggt

SEQ ID NO: 2226 - protein, 682 aa, Streptococcus agalactiae
MYHDKKHLSLGWLIGEIMTEKKSFYITTPIYYPSGKLHIGSAYTTIACDVLARYKRMMGFDVQYLTGLDEHGQKIQQKAEEAGITPQEYVDGMAESVKTLWELLDISYDKFIRTTDTYHEEAVAKIFEQLLAQGDIYLGEYTGWYSVSDEEFFTESQLAEVYRDENGNMIGGVAPSGHEVEKVSEESYFFRMSKYADRLKAYYAEHPEFIQPDGRMNEMLKNFIEPGLEDLAVSRTTYTWGVQVPSNPKHVIYVWIDALMNYISALGYGWSDDLSQYHKFWPADIHMIGKDILRFHSIYWPIMLMALDLPLPKRLVAHGWFVMQDGKMSKSKGNVVYPEMLVERFGLDPLRYYLMRSLPVGSDGTFTPEDYVGRINYELANDLGNLLNRTIAMVNKYFDGEVPRFAVATDFDADLASVATDSIENYHKQMEAVDFPRALEAVWNLISRTNKYIDETAPWVLAKDETDRDKLAAVMSHLVASLRVVAHLIQPFMMETSDAIMEQLGLGATFDLEKLTFADLPEGVRVVAKGSPIFPRLDMEDEITYIKEQMNAGKAPVEKEWVPEEVELTSSKGQIKFEDFDAVEIRVAEVIEVEKVEGSDKLLRFRLDAGDEGHRQILSGIAKFYPNEQELVGKKLQIVANLKPRKMMKKYVSQGMILSAEHDGKLTVLTVDSAVANGSIIG

SEQ ID NO: 2227 - DNA, 1998 bp, Streptococcus pyogenes
atgatgaaaaaaccattttacattacgacacccatttattacccatctgggaaattacacattggttctgcctatacaactattgcttgtgatgtcttggcacgctacaagcgcctgatgggccatgaggtcttttacctcacaggactagatgaacacggacaaaagattcaaaccaaggcaaaagaagctggtattacacctcaaacctacgttgataacatggcaaaggatgtcaaagccctttggcaattgctagatatttcctatgacacatttatccggacaacggacgattaccacgaagaggtcgttgctgctgtctttgaaaaattgctggcgcaagatgacatttaccttggcgaatactctggttggtattctgtctctgatgaggaatttttcactgaaagccaattaaaagaagtctttagagatgaagacggtcaggttattggagggattgccccatcaggtcatgaggtcgagtgggtctctgaagaatcctacttcctacgccttagcaaatacgatgatcgtcttgtggccttctttaaagagcgacctgactttatccaaccagatggtcgtatgaatgaaatggtgaaaaactttatcgagccaggcctagaagatttggctgttagccgtactacctttacatggggtgtacctgttccatcagacccaaaacacgtggtttatgtctggatcgatgccctcttaaactacgcgacagctcttggttatcgtcaagctaatcacgctaactttgataagttttggaatggaacggttttccacatggttggaaaagatatcttgcgttttcatagcatctactggccaattttactcatgatgcttgatttaccaatgccagaccgcttaattgcccatggttggtttgtcatgaaagacggtaaaatgtctaaatcaaaaggcaatgtggtctatccagaaatgttagttgagcgctttggacttgatcctcttcgttattacctcatgcgttctttgccagttggttcagacgggacctttacccctgaagattatgtgggtcgtatcaactatgagttagccaacgaccttggcaatttattgaaccgtaccgttgccatgatcaacaagtattttgacggcacggtgccagcttatgttgacaatggaactgcctttgatgctgacttaagtcaactgattgatgctcagctagcagactaccataagcacatggaagcggtggactacccacgcgccttggaggctgtttggaccatcatcgctcgtaccaacaaatacatcgatgaaaccgctccttgggtgctcgctaaagaagatggtgacaaagctcaactagccagtgtcatggcacacttagcagccagcttgcgtctggtcgctcatgtgatccaaccctttatgatggaaacatcagctgctatcatggcccagcttggtttggaacctgtttctgatttgtcaacacttgctctagcagattttcctgccaatacaaaggttgttgccaaagggacaccgattttcccacgtcttgacatggaagctgagattgactacatcaaagcccaaatgggtgacagctcagctatttcccaagaaaaagaatgggtccctgaagaggttgcgctcaaatctgaaaaagacgtcatcacatttgaaacctttgatgctgtggaaatccgtgtggcagaagtcaaggaagtgtcaaaagtggaaggttcagaaaaattgctgcgctttagagtagatgcaggagacgggcaagaccgtcaaatcttgtcaggtattgccaaattttaccccaacgaacaagaattagtgggtaaaaaactacaaattgttgctaacctgaaaccgcgtaaaatgatgaaaaaatacatcagtcaagggatgattctatcagcagagcatggagatcagctaacggtcttaaccgttgattcctctgttccaaatggaagtatcattggc

SEQ ID NO: 2228 - protein, 666 aa, Streptococcus pyogenes
MMKKPFYITTPIYYPSGKLHIGSAYTTIACDVLARYKRLMGHEVFYLTGLDEHGQKIQTKAKEAGITPQTYVDNMAKDVKALWQLLDISYDTFIRTTDDYHEEVVAAVFEKLLAQDDIYLGEYSGWYSVSDEEFFTESQLKEVFRDEDGQVIGGIAPSGHEVEWVSEESYFLRLSKYDDRLVAFFKERPDFIQPDGRMNEMVKNFIEPGLEDLAVSRTTFTWGVPVPSDPKHVVYVWIDALLNYATALGYRQANHANFDKFWNGTVFHMVGKDILRFHSIYWPILLMMLDLPMPDRLIAHGWFVMKDGKMSKSKGNVVYPEMLVERFGLDPLRYYLMRSLPVGSDGTFTPEDYVGRINYELANDLGNLLNRTVAMINKYFDGTVPAYVDNGTAFDADLSQLIDAQLADYHKHMEAVDYPRALEAVWTIIARTNKYIDETAPWVLAKEDGDKAQLASVMAHLAASLRLVAHVIQPFMMETSAAIMAQLGLEPVSDLSTLALADFPANTKVVAKGTPIFPRLDMEAEIDYIKAQMGDSSAISQEKEWVPEEVALKSEKDVITFETFDAVEIRVAEVKEVSKVEGSEKLLRFRVDAGDGQDRQILSGIAKFYPNEQELVGKKLQIVANLKPRKMMKKYISQGMILSAEHGDQLTVLTVDSSVPNGSIIG

SEQ ID NO: 2229 - DNA, 186 bp, Streptococcus agalactiae
gtgcctagtaggagggtaataatagctaatccaactcctgacaaacaaaatcctaaaatcgctggccagaaatcttgtccagatgctacacctaatgctggtggaaaaatgaggttccctgcaccaaagaagataccaaataagagtaatcccgttaaaaagcctttttttaccataagcaaccat

SEQ ID NO: 2230 - protein, 62 aa, Streptococcus agalactiae
MPSRRVIIANPTPDKQNPKIAGQKSCPDATPNAGGKMRFPAPKKIPNKSNPVKKPFFTISNH

SEQ ID NO: 2231 - DNA, 1131 bp, Streptococcus agalactiae
atgtcggaaaaatttagtccgtggttttctttaacatttttagttatactctacctaactattggtccactttttgctattcctagaacagcaacggtttcttttgaaattggggttgctccaattgtagggcatagtccgattgctcttttgtgttttacagcctgtttttttgctgcagcttattatctcgctattagaccaaatggtatattagatagtgttggaaaaatcttaacgcctgtttttgcctttttaattctctctttggttgttgttggagctattgcttatggaaacttggagagtgctaaggcgagtgctgactatgcaggaaaagcgtttggaagtggtgtcttagcaggctataatacacttgatgcacttgcagcagttgctttttgtctagtagcaacagaaacgcttaaaaagtttggttttaaaactaaaaaagaatatttatcaaccatttggattgttggaattgttactagtttagcatttagtattttatatattggcttaggttttttagggaataagtttcctgtcccagctgatattttagctgacccaaatgttaataaaggagcttatgtattatcacaagcatcttataaattatttggaaattttggtcgttatttcttgagtattatggtaacattgacatgctttacaacaacagttgggcttattgtgtcagtatctgaattttttgataagaactttcgttttgggaattataaattatttgctactgtttttactttgattggctttttaattgctaatcttggtttaaatgctgtaattactttttcagttcctgtgctaactttattgtatccgattgttattgttattgtcttaattattttgattaataagtggttgccgctttcaaaaaagggaatgtctttgacaattggtcttgtcactttagtgtcgtttgttgaggttctagcgggacaatggcaagaaaaaacattaactcagttagttggattcctcccctttcatactatttcaatggggtggctagttccaatgttgattggtatagtattttctttggtgctgtcagataaacaaaaaggccaagcatttgatttagagaaatttgaagga

SEQ ID NO: 2232 - protein, 377 aa, Streptococcus agalactiae
MSEKFSPWFSLTFLVILYLTIGPLFAIPRTATVSFEIGVAPIVGHSPIALLCFTACFFAAAYYLAIRPNGILDSVGKILTPVFAFLILSLVVVGAIAYGNLESAKASADYAGKAFGSGVLAGYNTLDALAAVAFCLVATETLKKFGFKTKKEYLSTIWIVGIVTSLAFSILYIGLGFLGNKFPVPADILADPNVNKGAYVLSQASYKLFGNFGRYFLSIMVTLTCFTTTVGLIVSVSEFFDKNFRFGNYKLFATVFTLIGFLIANLGLNAVITFSVPVLTLLYPIVIVIVLIILINKWLPLSKKGMSLTIGLVTLVSFVEVLAGQWQEKTLTQLVGFLPFHTISMGWLVPMLIGIVFSLVLSDKQKGQAFDLEKFEG

SEQ ID NO: 2233 - DNA, 1368 bp, Streptococcus pyogenes
atgaaacaaaaaaatgtatatatcgtcattggattcatgctatttgcgctattttttggagcagcaaacctcatttacccagcttttttaggcatctactcaggtcatcagattctatggtctatcattggtttttgtttaactggtgtctccttgcctttactcggtgtcattgctgttgctaaatctggatcaggcgatgttgaaagtttggcacgccccatctctaaatggtatgcaatcttctattcttccattttgtatttatctattggcccattttttgctattccaagaacaggagccacttctttttcagtcggtatcgctcctatcttaggagataatacaaccaataaagctatttatgctatactattttttggtctgtcctacttccttgctatcaaacctagtaaactagctgaaaatatcggaaaatttttaacgccaacgttgttagttgttatttctattttggttatcgcgtcctttgtccatcctgctggaaattacggtgatgcttttaacgctggggtcggtgttaataatgcctttaaagattttccttttatagcaggattaattcaaggttatggcactatggatgcactagcttctcttgtttttgctattttagtcattgaggctaccaaacaatttggcgctaagacggacaaagaaatgaccaaaataacacttatttctggggctattgccattttgctattagcacttgtctatatctttgtcggtcgtattggagcaacatcacaatcattatttccttttattgatggcagctttacccttcatggtaatccagttaatggcggtcaaatcttaagtcatgcttctcgtttttacctaggtggcatcggacaagcatttctagctgttgtgattttcctggcctgtctaaccacttcaacaggcttaatcacgtcaagtgctgaatacttccataaattagtgcctgctttatctcatattgcttgggcaactatctttactttactatcagctttcttttattttggtggcttatcagtcattatcaactggtcagctcctgttttattccttttatacccattaacagtcgatttaattttccttgttttggcacaaaaatgcttcaataatgatcctattgtctatcgaactacaattggtctaacctttattcctgccatatttgatgcactcctaacactatcacaaatgactggattatttcatttaccagaagccgttgtaacttttttccaaaaaactgttccactagggcaattctcaatgggatggattatctttgctgctattggttttttaatagggcttatactaagtaaaacgaagaaaagc

SEQ ID NO: 2234 - protein, 456 aa, Streptococcus pyogenes
MKQKNVYIVIGFMLFALFFGAANLIYPAFLGIYSGHQILWSIIGFCLTGVSLPLLGVIAVAKSGSGDVESLARPISKWYAIFYSSILYLSIGPFFAIPRTGATSFSVGIAPILGDNTTNKAIYAILFFGLSYFLAIKPSKLAENIGKFLTPTLLVVISILVIASFVHPAGNYGDAFNAGVGVNNAFKDFPFIAGLIQGYGTMDALASLVFAILVIEATKQFGAKTDKEMTKITLISGAIAILLLALVYIFVGRIGATSQSLFPFIDGSFTLHGNPVNGGQILSHASRFYLGGIGQAFLAVVIFLACLTTSTGLITSSAEYFHKLVPALSHIAWATIFTLLSAFFYFGGLSVIINWSAPVLFLLYPLTVDLIFLVLAQKCFNNDPIVYRTTIGLTFIPAIFDALLTLSQMTGLFHLPEAVVTFFQKTVPLGQFSMGWIIFAAIGFLIGLILSKTKKS

SEQ ID NO: 2235 - DNA, 696 bp, Streptococcus agalactiae
gtgatgaacgaagttcttagacaggaaaaaaaatatttaatatcacttgaagattactatcttttatctaagaaattttcccaagtaatgacgctcgattcgcatagttcagacgacggctatactatccgttcgctatactttgattctttagaagatgttgattggcaagaaaaggaagatggtgttgagatacgaagaaagattcgtttgcgcaattatggtagtcaaagcaattttgcgaaattagaaatgaaacaaaaacaaggtgctaatcaaaaaaagcgctctctaaaattaagcaagacagatgctcaagcgctgattaatggtaacaatagtgttttattaaattatccggatacatttgctgcggagtgttattcaaggataacaacgcaactttatcaacctaaaacggttattgagtaccaaagaaaagcttttgttgctaaggaaaacaatatccgaatcacctttgaccaccatataataggtacagaggctagttatgatattttctcagaggatttaaatcaaaattatttattagatccttatcttgttattttagaagttaaatataatggatttttattgtcttatattaaagaactcttagattcggtagatagaagtgaactttcagcgagtaagtattgtttaggaagagctgttagtaaacattatcgtttt

SEQ ID NO: 2236 - protein, 232 aa, Streptococcus agalactiae
MMNEVLRQEKKYLISLEDYYLLSKKFSQVMTLDSHSSDDGYTIRSLYFDSLEDVDWQEKEDGVEIRRKIRLRNYGSQSNFAKLEMKQKQGANQKKRSLKLSKTDAQALINGNNSVLLNYPDTFAAECYSRITTQLYQPKTVIEYQRKAFVAKENNIRITFDHHIIGTEASYDIFSEDLNQNYLLDPYLVILEVKYNGFLLSYIKELLDSVDRSELSASKYCLGRAVSKHYRF

SEQ ID NO: 2237 - DNA, 675 bp, Streptococcus agalactiae
atgaaagacctattacgaaatagtctagagcaaagtggaaatttaagttttcaagatatgattttacatattcttgtagcagctttattgagtgtagttatttatgtttcctatgcttatacgcatagtggaactgcctatagtaaaaagtttaatgtttcattaatgacattgacggtcttgactgcaacagtaatgaccgttattggtaataatgtagccttgtcattgggtatggtcggtgccttgtcagttgttcgttttaggacagccataaaagattcaagagatacagtttatattttttggaccatagttgttggtatctgttgtggtgtcggtgactatgtggtagctgcattaggaagtagcgttatctttatcttattatgggttatgggacgtgttaaaaacgagaatcgtatgttattgattgtgaagtgcgatagaacactagaagttgatttagaaggaattttcttccaatattttgacggaaaagctgttcagcgtgttaaaaattcaacaactaatactattgaaatgattttcgaaatctctagaaaagattacgataagcaactccatgtagataatcagttaactgaaaaagtgtaccaattgggaaatattgattatttcaacattgttagccaaagcgacgaaatcaatggg

SEQ ID NO: 2238 - protein, 225 aa, Streptococcus agalactiae
MKDLLRNSLEQSGNLSFQDMILHILVAALLSVVIYVSYAYTHSGTAYSKKFNVSLMTLTVLTATVMTVIGNNVALSLGMVGALSVVRFRTAIKDSRDTVYIFWTIVVGICCGVGDYVVAALGSSVIFILLWVMGRVKNENRMLLIVKCDRTLEVDLEGIFFQYFDGKAVQRVKNSTTNTIEMIFEISRKDYDKQLHVDNQLTEKVYQLGNIDYFNIVSQSDEING

SEQ ID NO: 2239 - DNA, 1482 bp, Streptococcus agalactiae
ttgattatttcaacattgttagccaaagcgacgaaatcaatgggtagacttatgagagggaaggttatttacggcacaacccttataggtctttttctattcttatttttctatttttggattcctaagcatcacatcgagagaatacatcatcatcgtataaagcaggtagatgcgaagagtgatttaacaggatttaaaacccatttgcccattatcagcattgatacaaagcaacaagttattcctcttgttacaaaagaaggcggaaaatatgtcaaagctagggataatattaatgttgatatcgaattacgggattctccaagtagatcacatcatttatcagaaaagccgagaattaggacaaaagggttaatatcatatagaggaaatacctctcgttactttgataagaagtcattgaaagttaagtttgttactaataagttaaaggaaaagaagcatcgattagcaggaatgcctaaagaatcggagtgggtattgcatggtccctttctagacagaacattattaagaaattatctgagttataatattgctggtgagattatgtcctatgccccaaacgttcgctactgtgagttatttgtcaatggtgagtatcagggagtatatctagcagttgagaatatcgaacaaggtgagcaacgagttcccattgaaaaaagtgataaaaagttgcataaaacaccttatatcgttgcttgggatcgtgaacataaggcaaagcaaaagttagataactatgtacattatacacaccagtctggtatctcagctcttgatgtgaaatatccaggtaaacaaagattgacatcaaaacaattagagtttattaataaggacatcaatcatattgaaaaagtcctttattcttatgatttttcacaatatcctaaatatattgatagagaatcatttgcaaattattttgtcatcaatgaattttttagaaatgtggatgcgggtaaattttcaacctatctatataaagatcttcgtgatagagcaaaactagtagtttgggattttaataatgcttttgataatcaaattgaaggacgtgttgatgaggcagattttaccttgacggatgcaccgtggttcaatatgctcattaaggacaaagcatttatagacctggttgttcatcgctataaagaattacgaaagggagttctagcgacagaatatttatctaattacatagacgagacaaggcattttttaggtccagctattgatcgaaattataaaaaatggggctatgtctttgatttaaagaatactgatccaaggaattatttgattcctactgaacgcaatgtgacaagttatcacaaatcagtagaacaattaaaagattttatcaaaaagcgtggcagatggatggatagaaatattgagaccttgtatcaatatagtgcaccatcgaaaaatactaatactttactggag

SEQ ID NO: 2240 - protein, 494 aa, Streptococcus agalactiae
MIISTLLAKATKSMGRLMRGKVIYGTTLIGLFLFLFFYFWIPKHHIERIHHHRIKQVDAKSDLTGFKTHLPIISIDTKQQVIPLVTKEGGKYVKARDNINVDIELRDSPSRSHHLSEKPRIRTKGLISYRGNTSRYFDKKSLKVKFVTNKLKEKKHRLAGMPKESEWVLHGPFLDRTLLRNYLSYNIAGEIMSYAPNVRYCELFVNGEYQGVYLAVENIEQGEQRVPIEKSDKKLHKTPYIVAWDREHKAKQKLDNYVHYTHQSGISALDVKYPGKQRLTSKQLEFINKDINHIEKVLYSYDFSQYPKYIDRESFANYFVINEFFRNVDAGKFSTYLYKDLRDRAKLVVWDFNNAFDNQIEGRVDEADFTLTDAPWFNMLIKDKAFIDLVVHRYKELRKGVLATEYLSNYIDETRHFLGPAIDRNYKKWGYVFDLKNTDPRNYLIPTERNVTSYHKSVEQLKDFIKKRGRWMDRNIETLYQYSAPSKNTNTLLE

SEQ ID NO: 2241 - DNA, 93 bp, Streptococcus agalactiae
gtggcgaaagatgtattccacgcccttgcattccaatcgtcttgccatgcattgatagtcgctccaaaactaccggatgatataaaagattca

SEQ ID NO: 2242 - protein, 31 aa, Streptococcus agalactiae
MAKDVFHALAFQSSCHALIVAPKLPDDIKDS

SEQ ID NO: 2243 - DNA, 2157 bp, Streptococcus agalactiae
atgaaaaaatatctaagtattgtagcccttttaactattttgtttagctctatttattatttgtattactttgatggtagtttgtatttaccaaagggcttattaaaagaaaatacaagaactaactttgttgttaaaggtgatactgtacttcacaagcccaccaataaaccttttgttgttaaaggagtagacgttgagtcttccttagcgggttatcatcacaacgattttcctattactcaaaaaacgtatcgtgaatggttccatttaatttccaacatgggggcaaatactgtaagagtcaaggtaccgatgaatgttgcattttacgatgccttatatcaccacaacaaagcatcaaagaggccactgtatttgttgcaaggaatacgtatagattcttatcgcaataatgcttctataacagcttttaatgataattatagggggtatttaaaacgagaagcaaaaggcgttgtggatattctccatgggcgtaagcaagtatggaatactgatttgggtagccgtcattatcattatgatcttagtccttgggtacttggttatgtcgtaggggatgattggaatagtggtactgtcgcttatactaatcatcaagagaaaaaaacgcaatataaaggacgttattttaaaacttctgtggcagctaatccatttgaggtcatgctagctcaagtaatggatgaattgacacattatgagacagctaaatatggttggcaacatttgattagtttttcaaactcaccaacaacagacccttttcattatcgaaaaccatttgaggcacaggctcctaaatacgtacaactaaatgtagaaaatattcaagctaattcaaatgttaaagcaggtatgtttgcagcatataaagctattgatttccatcctcgatacaaggattatctattatttgataaagagaatatcagtaaagaagatagacaaaagattaaagaactttctttgtcacagggatacgttaaactgctaaatgcttatcacaaaatccctgttctagtcacgggttatggctattcgacagcgagaggtattgcccaaaaagaaattgataaacgtcctctgccgattaatgaaaaagaacaaggtcagcgtttactagaagattatgaatcttttatatcatccggtagttttggagcgactatcaatgcatggcaagacgattggaatgcaagggcgtggaatacatctttcgccacaaataaacatagtcaattcctatggggggatgcacaagtatttaatcaaggttatggtttattaggctttaaaaacgcaaaacatcattatcaagttgatggtaaaagaggcaaaggagagtggaaacatcctctgatgactagtgcaacaggagatgacttatatgctagcagtgatgaaagctatctctaccttgcgattaaaacaaaacctgaaaaactaaaagaaaaacgattattaccaatagatattacaccaaaatctggtagtagaaaaatgaatggtagtaaggtcacattttctaaatctagtgactttgtattgtctattgatccaaatggcaagtctgaattatttgtccaagagcgctataatgccttaaaagcgaactatcttcgacagcttaacggtaaagatttttatgctttcccaccaaagaagaacagtagtaattttgagcagataaatatggtattgagaaatacaaagattgttgaagacatggaaaaagtaaaagcaacagagaggttcttaccaactcatcctactggtcttctcaaaacaggaacaactgataggcaccaaaaaacatttgattcacaaacagatatttcgtttggaaaggactttatagaggtcagaattccgtggcagttgttgaatttttctgatccatcatctcaaaaaattcacgatgattactttaaacattatggtgtgaaggagttagaaattgagagcattgctttaggattaggtgctaatagcaaagaaaacacactgataaagatggcagattatcgtttgaaaaattgggagagacccgataccaaaacctttttaaaagactcctattatagtattaagaaagaatggtctaaagaaagagagagaacatatggtaca

SEQ ID NO: 2244 - protein, 719 aa, Streptococcus agalactiae
MKKYLSIVALLTILFSSIYYLYYFDGSLYLPKGLLKENTRTNFVVKGDTVLHKPTNKPFVVKGVDVESSLAGYHHNDFPITQKTYREWFHLISNMGANTVRVKVPMNVAFYDALYHHNKASKRPLYLLQGIRIDSYRNNASITAFNDNYRGYLKREAKGVVDILHGRKQVWNTDLGSRHYHYDLSPWVLGYVVGDDWNSGTVAYTNHQEKKTQYKGRYFKTSVAANPFEVMLAQVMDELTHYETAKYGWQHLISFSNSPTTDPFHYRKPFEAQAPKYVQLNVENIQANSNVKAGMFAAYKAIDFHPRYKDYLLFDKENISKEDRQKIKELSLSQGYVKLLNAYHKIPVLVTGYGYSTARGIAQKEIDKRPLPINEKEQGQRLLEDYESFISSGSFGATINAWQDDWNARAWNTSFATNKHSQFLWGDAQVFNQGYGLLGFKNAKHHYQVDGKRGKGEWKHPLMTSATGDDLYASSDESYLYLAIKTKPEKLKEKRLLPIDITPKSGSRKMNGSKVTFSKSSDFVLSIDPNGKSELFVQERYNALKANYLRQLNGKDFYAFPPKKNSSNFEQINMVLRNTKIVEDMEKVKATERFLPTHPTGLLKTGTTDRHQKTFDSQTDISFGKDFIEVRIPWQLLNFSDPSSQKIHDDYFKHYGVKELEIESIALGLGANSKENTLIKMADYRLKNWERPDTKTFLKDSYYSIKKEWSKERERTYGT

SEQ ID NO: 2245 - DNA, 1266 bp, Streptococcus agalactiae
ttgtaccatattttgtttcgcaggaagtctattgtaccagcctataatgaatcaacaaccattgtgagttcgattgattcgttattgcaccttgattatgaagcgtatgaaattatcgttgtggatgacggttccagtgacaatacttcagatgttctcaaggaagagtttgcattaatgaaaatctcgaatacgattgattcaattattgctactcaaacttgtaaagatgtctttcagagacaggttggtaaggttaaactgacactcattgttaaagaaaatggtggcaaaggggatgccttaaatatggggatcaatgctgctaattacgattattttctatgtctagatgcagattctatgttgcaggtagattctttgagtcaaattagcaaatccatacaggtagatccgacggttatagcagtgggagggctcgtccaagttgcccaaggtgttaagattgagcaggggaaagtagcatcttatcgtttgccttggagaattattccttgtgcacaagcacttgagtatgattcatcatttttaggagctcgaatctttttagactatttaagagctaatttaattatttcgggggctttcggtctttttaagaaagaccttgttaaagcggtgggaggatatgacacccagactctaggagaagatatggagttggtgatgaaattacatttcttctgtcgtaataataatattccttatcgtatttgttatgaaacagatgctgtttgttggagtcaagcaccaacgaatttaggggatttacgtaaacagagacgccgatggtatcttggcttgtaccaatgtttaaaaaaatataaaagtatttttgccaattatcgctttggagctgtaggatcaatttcttatatttactatattttatttgaattactgaccccttttatagaatgttttggtattgtcattatatttttgtccttattatttaatcaattaaacatcccattctttatatcattggtgagcctttatatcttttactgtgttttaattacattaagctctttcttacaccgtatttattctcagcaactagtaataggaattttagatattgttaaagtattttatattgctgtttttaggtatcttatcctacatcctgtattaacttttgttaaggttgcaagtgttattggctataaaaataaaaaaatggtttgggggcatattacgagagagaaacaaatgaaggattttgaaacaagtgttact

SEQ ID NO: 2246 - protein, 422 aa, Streptococcus agalactiae
MYHILFRRKSIVPAYNESTTIVSSIDSLLHLDYEAYEIIVVDDGSSDNTSDVLKEEFALMKISNTIDSIIATQTCKDVFQRQVGKVKLTLIVKENGGKGDALNMGINAANYDYFLCLDADSMLQVDSLSQISKSIQVDPTVIAVGGLVQVAQGVKIEQGKVASYRLPWRIIPCAQALEYDSSFLGARIFLDYLRANLIISGAFGLFKKDLVKAVGGYDTQTLGEDMELVMKLHFFCRNNNIPYRICYETDAVCWSQAPTNLGDLRKQRRRWYLGLYQCLKKYKSIFANYRFGAVGSISYIYYILFELLTPFIECFGIVIIFLSLLFNQLNIPFFISLVSLYIFYCVLITLSSFLHRIYSQQLVIGILDIVKVFYIAVFRYLILHPVLTFVKVASVIGYKNKKMVWGHITREKQMKDFETSVT

SEQ ID NO: 2247 - DNA, 1335 bp, Streptococcus pyogenes
ttgacattaccccttatttatattagaatatcgaggtccctgtctttcaaggaaattaaaaaagaaagaggtgtaattgtgcctatttttaaaaaaactttaattgttttatcctttatttttttgatatctatcttgatttatctaaatatgtatctatttggaacatcaactgtaggaatttatggagtaatattaataacctatctagttattaaacttggattatctttcctttatgagccatttaaaggaaagccacatgactataaagttgctgctgtaattccttcttataatgaagatgccgagtcattattagaaactcttaaaagtgtgttagcacagacctatccgttatcagaaatttatattgttgatgatgggagttcaaacacagatgcaatacaattaattgaagagtatgtaaatagagaagtggatatttgtcgaaacgttatcgttcaccgttcccttgtcaataaaggaaaacgccatgctcaagcgtgggcatttgaaagatctgacgctgacgtttttttaaccgtagattcagatacttatatctatccaaatgccttagaagaactcctaaaaagcttcaatgatgagacagtttatgctgcaacaggacatttgaatgctagaaacagacaaactaatctattaacgcgacttacagatatccgttacgataatgcctttggggtggagcgtgctgctcaatcattaacaggtaatattttagtttgctcaggaccattgagtatttatcgacgtgaagtgattattcctaacttagagcgctataaaaatcaaacattcctaggtttacctgttagcattggggatgatcgatgtttaacaaattatgctattgatttaggacgcactgtctaccaatcaacagctagatgtgatactgatgtacctttccaattaaaaagttatttaaagcaacaaaatcgatggaataaatctttttttaaagaatctattatttctgttaaaaaaattctttctaatcccatcgttgccttatggactattttcgaagtcgttatgtttatgatgttgattgtcgcaattgggaatcttttgtttaatcaagctattcaattagaccttattaaactttttgcctttttatccatcatctttatcgttgctttatgtcgtaatgttcattatatgatcaaacatcctgctagttttttgttatctcctctgtatggaatattacacttgtttgtcttacagcccctaaaactttattctttatgcaccattaaaaatacggaatggggaacacgtaaaaaggtcactatttttaaa

SEQ ID NO: 2248 - protein, 445 aa, Streptococcus pyogenes
LTLPLIYIRISRSLSFKEIKKERGVIVPIFKKTLIVLSFIFLISILIYLNMYLFGTSTVGIYGVILITYLVIKLGLSFLYEPFKGKPHDYKVAAVIPSYNEDAESLLETLKSVLAQTYPLSEIYIVDDGSSNTDAIQLIEEYVNREVDICRNVIVHRSLVNKGKRHAQAWAFERSDADVFLTVDSDTYIYPNALEELLKSFNDETVYAATGHLNARNRQTNLLTRLTDIRYDNAFGVERAAQSLTGNILVCSGPLSIYRREVIIPNLERYKNQTFLGLPVSIGDDRCLTNYAIDLGRTVYQSTARCDTDVPFQLKSYLKQQNRWNKSFFKESIISVKKILSNPIVALWTIFEVVMFMMLIVAIGNLLFNQAIQLDLIKLFAFLSIIFIVALCRNVHYMIKHPASFLLSPLYGILHLFVLQPLKLYSLCTIKNTEWGTRKKVTIFK

SEQ ID NO: 2249 - DNA, 498 bp, Streptococcus agalactiae
atggcttgcataatcaggagagcaagattaggagatgaagtcaatttagcttatattcaaacggagagctggaaagctgcttttggtaagatactacctgaggatatcattcaaaaaactacggaaatagaacctgccataacaatgtatcaacagctactacacaaggaggttggtaaggggtatatattggaagtagatagcaatcctcattgtatggcttggtgggataaaagtagagaagatggtatgcttgattatgcagaactcatttgtatacatagtcttaaagaaggttggggaaaaggttatgggtctcaaatgatgaatcatgtactatcagagatacaacaagcaggttataataaagtgatactttgggtatttacagaaaatacacgcgcaaggaaattttacgataggtttggtttttcttttaagggtaaatcaaaaacttattttgaaaaggaagaaatgtgttatgagaagattttgcac

SEQ ID NO: 2250 - protein, 166 aa, Streptococcus agalactiae
MACIIRRARLGDEVNLAYIQTESWKAAFGKILPEDIIQKTTEIEPAITMYQQLLHKEVGKGYILEVDSNPHCMAWWDKSREDGMLDYAELICIHSLKEGWGKGYGSQMMNHVLSEIQQAGYNKVILWVFTENTRARKFYDRFGFSFKGKSKTYFEKEEMCYEKILH

SEQ ID NO: 2251 - DNA, 246 bp, Streptococcus agalactiae
atggagaaaattacgaatgattttgaaaaagttatagctgtgctaaatcaactaagtatttcttatgaattagtggaaaatggacctgttttgttgacggagcaagcagataactttattgtgggaattgaaggagtaagaacaaaaataatgttcttgaccaacaagaaaaagacgaaatattatttactaataatggatgaccagaaactattttatcctatgaaaacaatagtagcctttaga

SEQ ID NO: 2252 - protein, 82 aa, Streptococcus agalactiae
MEKITNDFEKVIAVLNQLSISYELVENGPVLLTEQADNFIVGIEGVRTKIMFLTNKKKTKYYLLIMDDQKLFYPMKTIVAFR

SEQ ID NO: 2253 - DNA, 273 bp, Streptococcus agalactiae
ttgatatatcaatggttaaagacaataaaggagaacaatatgacatttgaagaaattttaccaggtttaaaagcaaagaaaaaatatgtacgtacaggttgggggggcgctgaaaattatgttcagttatttgatacccttgaagttaatgggaaagtactacaggctacaccttattttcttattaatgttactggtgaaggtgaaggtttttccatgtgggcaccaacaccatgtgatgttttagcagaggattggatcgaggtcaatgac

SEQ ID NO: 2254 - protein, 91 aa, Streptococcus agalactiae
MIYQWLKTIKENNMTFEEILPGLKAKKKYVRTGWGGAENYVQLFDTLEVNGKVLQATPYFLINVTGEGEGFSMWAPTPCDVLAEDWIEVND

SEQ ID NO: 2255 - DNA, 264 bp, Streptococcus pyogenes
gtgtctatttcgtcaataaaggagaacaatatgacatttgaagagattttaccaggtttaaaagccaagaaaaaatatgtacgtacaggttggggtggcgctgaaaattatgtgcagttgtttgatacccttgaagtggatgggaaagtactacaggcgacgccttattttctgattcatgttactggtgcaggtgaaggtttttccatgtgggcaccgacaccatgtgatgtgttagcagaggattggattgaggtcaatgac

SEQ ID NO: 2256 - protein, 88 aa, Streptococcus pyogenes
VSISSIKENNMTFEEILPGLKAKKKYVRTGWGGAENYVQLFDTLEVDGKVLQATPYFLIHVTGAGEGFSMWAPTPCDVLAEDWIEVND

SEQ ID NO: 2257 - DNA, 696 bp, Streptococcus agalactiae
atgactaaagttgttttagtgacgggctgtgctagtggaattggttatgcacaggctcaatattttttgaaacaagggtatcaagtatatggtgtggataagtcggataaaccgaacttaaatggtaattttaactttataaagttggatttatcctctgatttatccccactattcacaatggtaccgactgttgatattttgtgtaatactgcaggtattctagatgcctacaagccacttctagaagtaagtgatgaagaactggaacacctatttgatattaattttttcgtgactgttaggctaacacgtcattatcttagacgtatggtggaaaagaagtcaggtattattatcaatatgtgctcaatagcaagttttatagcgggtggcggtggagctgcatatactagttctaaacatgcccttgcgggattcacacgtcaattggctttggattacgcaaaagattgtattcaaatttttggtatagcgccaggtgctgtacaaactgctatgactgctagtgattttgaacctggtggattagcagaatgggtagctagtgagacgccaattggtcgttggactaaaccaagtgaagttgctgaattaactggatttcttgcttcaggaaaagcgagatcaatgcaaggtgaaattgtcaaaattgatggtggctggagtttgaaa

SEQ ID NO: 2258 - protein, 232 aa, Streptococcus agalactiae
MTKVVLVTGCASGIGYAQAQYFLKQGYQVYGVDKSDKPNLNGNFNFIKLDLSSDLSPLFTMVPTVDILCNTAGILDAYKPLLEVSDEELEHLFDINFFVTVRLTRHYLRRMVEKKSGIIINMCSIASFIAGGGGAAYTSSKHALAGFTRQLALDYAKDCIQIFGIAPGAVQTAMTASDFEPGGLAEWVASETPIGRWTKPSEVAELTGFLASGKARSMQGEIVKIDGGWSLK

SEQ ID NO: 2259 - DNA, 705 bp, Streptococcus pyogenes
ttgaggtcaatgactaaagttgttttagtgacgggctgtgctagtgggattggttatgcacaggcccgctattttttgaaacaagggcatcacgtatatggtgtggataagtcggataaaccggacttaagcggtaactttcactttatcaaattggatttatcctctgagttagccccactatttaaagtggtccccagtgttgatattttgtgtaatactgcagggattttagatgcctacaagccacttttagacgtcagtgatgaagaagtggaacacctatttgatattaatttttttgcgacggtgaagttaacacgtcattatcttagacgtatggtggaaaagcagtcaggtgttatcatcaatatgtgctcaatagcaagttttatagcgggtggcggtggtgttgcctatacgagttctaagcatgcccttgcgggattcacgcgccagctggctttggattacgccaaagatcagattcacatttttggtatagcaccaggtgctgtcaaaaccgctatgacggctaacgattttgagcctggtggcttagcagactgggtagctcgtgagacgccaattgggcgttggactaaaccagatgaagttgctgaattaacgggatttcttgcttcaggaaaagcgagatcaatgcaaggcgagattgtcaaaattgacggtggctggactttgaaa

SEQ ID NO: 2260 - protein, 235 aa, Streptococcus pyogenes
LRSMTKVVLVTGCASGIGYAQARYFLKQGHHVYGVDKSDKPDLSGNFHFIKLDLSSELAPLFKVVPSVDILCNTAGILDAYKPLLDVSDEEVEHLFDINFFATVKLTRHYLRRMVEKQSGVIINMCSIASFIAGGGGVAYTSSKHALAGFTRQLALDYAKDQIHIFGIAPGAVKTAMTANDFEPGGLADWVARETPIGRWTKPDEVAELTGFLASGKARSMQGEIVKIDGGWTLK

SEQ ID NO: 2261 - DNA, 240 bp, Streptococcus agalactiae
atgaaggcacaagaattatggaataagtttaaatctttgaatccttcaatcggtgatgagatagacgcatggcaatttggagcagaaccagatcttctggcaaagttagttgtagatgggacaaaaactgcaacggcctctgcctatgatttatatgaattagatgaggaagggttacacaagttggttcatatgatattattttggatagcaatgatgaagctatctgtattattgaaa

SEQ ID NO: 2262 - protein, 80 aa, Streptococcus agalactiae
MKAQELWNKFKSLNPSIGDEIDAWQFGAEPDLLAKLVVDGTKTATASAYDLYELDEEGLHKLVHMILFWIAMMKLSVLLK

SEQ ID NO: 2263 - DNA, 246 bp, Streptococcus agalactiae
ttggatagcaatgatgaagctatctgtattattgaaataactaaagttgatattgtcccttttaaagatgtctctgcagaccatgcttttaaagaaggagaaggagataaaactttagaatggtggagaaaagctcacattgatttctttaaaccttattttgaggagtttggtttaatgtttagtgaggactctaggatagttttagaggaattccaagtggtttacccaaaggagattaacgaa

SEQ ID NO: 2264 - protein, 82 aa, Streptococcus agalactiae
MDSNDEAICIIEITKVDIVPFKDVSADHAFKEGEGDKTLEWWRKAHIDFFKPYFEEFGLMFSEDSRIVLEEFQVVYPKEINE

SEQ ID NO: 2265 - DNA, 954 bp, Streptococcus agalactiae
atgaaattagcggttttggggacaggtatgattgttaaggaagttttgcctgtcttgcagaaaattgaaggtattgatctagttgctatcttatcaacagttagaagtttggagacagctaaagatctagctaaggaatataacatgtctctagctacgagtgaatataaggctgtcttggacaatgaggagattgacacagtctatattggactgccgaatcacttgcattttgactatgctaaggaggcactcttggcaggaaaacatgtcatttgtgagaagccatttacattagaagcaagtcaattagaagaacttgtatctattgccaatactaggcaactaatattactcgaagcaattacaaatcaatatttacctaattttgaccttgtaaaagaacatttaagcaaccttggagatattaaaattgtagaatgtaattattcccaatattcatcgcgttatgatgcctttaaacgtggggaaatagcaccagctttcaatcctgaaatgggtggaggtgcgttgagagaccttaatatttataatttacatttagtaattggactttttggagaacctataacagcacagtatttaccaaatatagagcgtggtattgatacttcaggagttctagtcctagactatgggcactttaaaacagtctgtattggagcaaaagattgtagtgcagaagtaaaatctactattcaaggtgataaggggtctatagcgattttagggccaactaatactatgcctaaaatttcattaactatgaatggacaagaaagtcatgtttatcaattaaatggtgataggcaccgcatgcacgatgaatttgttatttttgaaggtattattagcaatttagattttaagcgtgctgctcaagctttagaacatagtagaacggtgatgaaagttctagatatggtaacgaaa

SEQ ID NO: 2266 - protein, 318 aa, Streptococcus agalactiae
MKLAVLGTGMIVKEVLPVLQKIEGIDLVAILSTVRSLETAKDLAKEYNMSLATSEYKAVLDNEEIDTVYIGLPNHLHFDYAKEALLAGKHVICEKPFTLEASQLEELVSIANTRQLILLEAITNQYLPNFDLVKEHLSNLGDIKIVECNYSQYSSRYDAFKRGEIAPAFNPEMGGGALRDLNIYNLHLVIGLFGEPITAQYLPNIERGIDTSGVLVLDYGHFKTVCIGAKDCSAEVKSTIQGDKGSIAILGPTNTMPKISLTMNGQESHVYQLNGDRHRMHDEFVIFEGIISNLDFKRAAQALEHSRTVMKVLDMVTK

SEQ ID NO: 2267 - DNA, 375 bp, Streptococcus agalactiae
atgatttcatcaattggacaggtaatgctctacgttagcaatgttgaagcatcagcagatttttggaaaaacaaggtgggttttgagcgtgttgaaaaacagacacaaggagattatgtaacctatatagttgcaccgaagttggatagtgaagttagcttcgtcttacatgacaaagcaattatagctcaaatgagtcctgagctagatttagcaactccctctattttatttgaaactactgatattgacagtacatatcaagaattaacagcaaatgaggttatgacaaatcctattgttgatatggggagtatgagagtttttaatttttccgataatgacaataattactttgcaatccgtgaagtaaaa

SEQ ID NO: 2268 - protein, 125 aa, Streptococcus agalactiae
MISSIGQVMLYVSNVEASADFWKNKVGFERVEKQTQGDYVTYIVAPKLDSEVSFVLHDKAIIAQMSPELDLATPSILFETTDIDSTYQELTANEVMTNPIVDMGSMRVFNFSDNDNNYFAIREVK

SEQ ID NO: 2269 - DNA, 411 bp, Streptococcus agalactiae
atggttaaagcactagaaacatacatcgtaacaaatggaaatgggcgacaagcggttgatttttataaagatgtctttcaagcggatttagtgaatatgatgacatgggaagagatggaccccaactgtcttgaagaccgcaaggatttaatcattaatgctcagcttatttttgatggcattcgtcttcaaatctcggatgaaaatccagatttcgtgtatcaagctggtaaaaatgttacagccgctattattgtgggtagcgtagaggaggcgcgtgaaatttatgaaaaattaaagaagagtgcacaagaagttcagttagagttacaagaaactttctggagtcctgcttacgcaaacttagtagaccaatttggtgtgatgtggcaaatttcaacagagttaaac

SEQ ID NO: 2270 - protein, 137 aa, Streptococcus agalactiae
MVKALETYIVTNGNGRQAVDFYKDVFQADLVNMMTWEEMDPNCLEDRKDLIINAQLIFDGIRLQISDENPDFVYQAGKNVTAAIIVGSVEEAREIYEKLKKSAQEVQLELQETFWSPAYANLVDQFGVMWQISTELN

SEQ ID NO: 2271 - DNA, 1377 bp, Streptococcus agalactiae
atgtcaaattatgccattattttagctgcgggtaagggaactcgcatgaaatctgatttaccaaaagttatgcataaagtatctggtattaccatgcttgagcatgttttccgtagtgtgcaagctattgagccaagtaaaattgttactgttattggacataaggcggagcttgtacgtgatgttttaggtgacaaatcagagtttgtaatgcaaacagaacagctaggaactggccatgctgtaatgatggcggaagaagaattagcgacatcaaaaggacatacactagttattgcaggtgatacacccctgattactggagaaagtttaaaaaacttaattgattttcatgtcaatcataaaaacgttgcaacaatcttaacagccgatgctgcaaatccatttggatatggtcgtattatccgtaattcagatgatgaagttactaaaattgtagaacaaaaggatgctaatgactttgagcagcaggttaaagagattaatactggaacttatgtttttgataatcaaagtctatttgaagcacttaaagacattaatacaaataacgctcaaggagagtattatctaactgatgttattggaattttcaaagaagcgggtaaaaaggtaggtgcctataaacttcgtgactttgacgaaagtctaggagttaatgatcgtgtagcacttgcaactgctgaaaaagtgatgcgtcaccgaattgcacgtcaacatatggttaatggggtcacagtggttaatcctgattccgcttatattgatattgatgttgagattggagaagaatctgtaattgagcctaatgtgactttaaaaggacagacgaagattggtaaaggtactttattaaccaatggtagttatttagtagatgctcaagtcggaaatgatgttaccatcactaattcgatggttgaagaatccattatttctgatggagtaaccgtaggcccttatgcgcatattagaccaggaacaagtcttgcaaaaggtgttcatattggtaatttcgttgaagtaaagggttctcaaataggtgagaatacgaaggcaggtcatttaacttatatcggcaatgcagaggtaggttgtgatgttaactttggcgcagggacgattactgtcaattatgatggacaaaataaatttaaaacagaaatcggaagtaatgtctttatcggaagtaattctactctgattgcaccacttgaaattggtgataatgctttaacagcagctggatctaccatcacagataatgttccaattgatagcatagctattggaagaggacgtcaagtcaataaagaaggatatgccaataaaaaaccacatcatccttcacaaaag

SEQ ID NO: 2272 - protein, 459 aa, Streptococcus agalactiae
MSNYAIILAAGKGTRMKSDLPKVMHKVSGITMLEHVFRSVQAIEPSKIVTVIGHKAELVRDVLGDKSEFVMQTEQLGTGHAVMMAEEELATSKGHTLVIAGDTPLITGESLKNLIDFHVNHKNVATILTADAANPFGYGRIIRNSDDEVTKIVEQKDANDFEQQVKEINTGTYVFDNQSLFEALKDINTNNAQGEYYLTDVIGIFKEAGKKVGAYKLRDFDESLGVNDRVALATAEKVMRHRIARQHMVNGVTVVNPDSAYIDIDVEIGEESVIEPNVTLKGQTKIGKGTLLTNGSYLVDAQVGNDVTITNSMVEESIISDGVTVGPYAHIRPGTSLAKGVHIGNFVEVKGSQIGENTKAGHLTYIGNAEVGCDVNFGAGTITVNYDGQNKFKTEIGSNVFIGSNSTLIAPLEIGDNALTAAGSTITDNVPIDSIAIGRGRQVNKEGYANKKPHHPSQK

SEQ ID NO: 2273 - DNA, 1380 bp, Streptococcus pyogenes
atgacaaattatgccattattttagcagcgggcaaagggactcgcatgacttctgatctcccaaaagttcttcataaagtatctggactaaccatgcttgagcatgtttttcgtagtgtaaaagcgattagtcctgaaaaatccgtgacggttattggtcacaaatcagaaatggtacgtgctgtcttagcagatcaatcagcctttgtccatcaaacagagcagttaggaactggccatgccgtgatgatggcagaaacacaactagaaggactagaagggcataccttggtgattgcaggagatactcccttgatcactggagaaagcctgaagagtctgattgattttcatgtgaatcataaaaatgtcgccactattttaacagctacggctcaagatccatttggttatggtcgtattgttcgcaacaaagatggcgaagtgatcaagattgttgagcaaaaagacgccaatgagtatgagcaacaattaaaagaaatcaatacaggaacctatgtgtttgataacaagcgtctctttgaagcgctcaaatgcatcactaccaacaatgctcaaggagagtattacctgactgacgttgtggctatttttagagcaaacaaagaaaaggtaggagcctatatcctgagagacttcaatgaaagtctgggagtaaatgatcgtgtggccttagcaatagctgaaacagtgatgcgtcagcgcattacccaaaaacatatggtcaatggggtgactttccaaaatcctgaaactgtttatattgaaagcgatgttgagattgctccagacgtccttatcgaaggaaatgtgaccttaaaagggcgtacacatatcggctcaggaactgtcttgacgaatggtacttatattgtggattctgaaattggtgataactgtgttgttaccaattcgatgatcgaatcatctgttttagctgcaggagttacggttggcccttacgcccaccttcgaccgggaacgaccttagatagggaagtccatatcggtaactttgtcgaggtcaagggttctcacattggtgaaaaaacaaaggctgggcatctgacttatattggaaacgctcaggttgggtcttcagtcaatgttggggctggaaccatcactgtcaactacgacggccaaaacaaatatgaaacagtcattggagatcacgcttttattgggagcaactcgactctcattgcacctttggaagttggggatcacgctttaacagcagcaggttcaacgatttcaaaaacagttcctatcgatagcattgctattggtcgtagccgccaagtcacaaaagaaggttatgccaagcgcctagcgcatcacccaagtcgaagcaaa

SEQ ID NO: 2274 - protein, 460 aa, Streptococcus pyogenes
MTNYAIILAAGKGTRMTSDLPKVLHKVSGLTMLEHVFRSVKAISPEKSVTVIGHKSEMVRAVLADQSAFVHQTEQLGTGHAVMMAETQLEGLEGHTLVIAGDTPLITGESLKSLIDFHVNHKNVATILTATAQDPFGYGRIVRNKDGEVIKIVEQKDANEYEQQLKEINTGTYVFDNKRLFEALKCITTNNAQGEYYLTDVVAIFRANKEKVGAYILRDFNESLGVNDRVALAIAETVMRQRITQKHMVNGVTFQNPETVYIESDVEIAPDVLIEGNVTLKGRTHIGSGTVLTNGTYIVDSEIGDNCVVTNSMIESSVLAAGVTVGPYAHLRPGTTLDREVHIGNFVEVKGSHIGEKTKAGHLTYIGNAQVGSSVNVGAGTITVNYDGQNKYETVIGDHAFIGSNSTLIAPLEVGDHALTAAGSTISKTVPIDSIAIGRSRQVTKEGYAKRLAHHPSRSK

SEQ ID NO: 2275 - DNA, 552 bp, Streptococcus agalactiae
atggattttgaagaaaaaacaattaatcgtcaaactgtttttgatggacaaattatcaaagtagctgttgatgatgtagagttgccaaatggattgggacaatccaaacgtgaacttgtttttcatggaggagctgttgctactttggcggtaactcctgagcataaaattgttttagtgaaacagtatcgtaaggctattgaaggtatttcttacgaaattccagcagggaaacttgagacgggtgagtcaggttctaaggaagaagctgcccttcgggaattagaagaagagactggctacacagggaatcttgaaattctttatagtttctacactgctattggtttttgtaatgagaaaatcgtcctctatctagctactgatttacaaaaagttgaaaatcctaggccacaagatgatgatgaggtccttgagcttctagagttaagttatgaggattgtatgcaaatggtagaaaaaggcatgattcaagatgcgaaaacgatcattgctttacaatattacggtttaaaaatgggaggtcattct

SEQ ID NO: 2276 - protein, 184 aa, Streptococcus agalactiae
MDFEEKTINRQTVFDGQIIKVAVDDVELPNGLGQSKRELVFHGGAVATLAVTPEHKIVLVKQYRKAIEGISYEIPAGKLETGESGSKEEAALRELEEETGYTGNLEILYSFYTAIGFCNEKIVLYLATDLQKVENPRPQDDDEVLELLELSYEDCMQMVEKGMIQDAKTIIALQYYGLKMGGHS

SEQ ID NO: 2277 - DNA, 552 bp, Streptococcus pyogenes
atgaaatttgaagaaaaaacgcttaagagacaaacagtttttgatggtcatatttttaaagttgttgtggatgatgttgaacttcccaacaatctggggcaatccaagcgagaattaatttttcatcgtggtgccgttgctgttttggctattactcctgaacgtaagattgtccttgtcaaacaataccgtaaggctattgaacgtgtctcatacgagatcccagcgggtaagctagagattggtgaggaaggctcaaagctaaaagctgctgcacgtgagctagaagaagaaacagcctatacggggacattgacgtttttgtatgaattttatacagcgattggtttttgcaacgaaaaaatcacacttttcttagcgacagacctaatacaagttgccaatcccaaacctcaagacgacgatgaagttatcgaggtcttagagttgacatatcaagagtgcatggacttagtcgctcaaggtaaacttgctgacgctaaaacgttgattgctttgcaatactatgccttacattttggaggtgagcag

SEQ ID NO: 2278 - protein, 184 aa, Streptococcus pyogenes
MKFEEKTLKRQTVFDGHIFKVVVDDVELPNNLGQSKRELIFHRGAVAVLAITPERKIVLVKQYRKAIERVSYEIPAGKLEIGEEGSKLKAAARELEEETAYTGTLTFLYEFYTAIGFCNEKITLFLATDLIQVANPKPQDDDEVIEVLELTYQECMDLVAQGKLADAKTLIALQYYALHFGGEQ

SEQ ID NO: 2279 - DNA, 267 bp, Streptococcus agalactiae
atgggaaaaccattgttaacagatgatatgattgaacgttcaaatcgaggtgaaaaagtttcaggtcaaacaatcttagatcaagaaactaaaattatttctacagaagatggcatggagcaactaactgacgagaacggtaaacatatctacaagagtcgccggattgagaatgcaaaacgaaatgaatttcaacgtaagttgaatttagttttattcattttgcttattttgttggctctcttgttttatgcaatttttaaatta

SEQ ID NO: 2280 - protein, 89 aa, Streptococcus agalactiae
MGKPLLTDDMIERSNRGEKVSGQTILDQETKIISTEDGMEQLTDENGKHIYKSRRIENAKRNEFQRKLNLVLFILLILLALLFYAIFKL

SEQ ID NO: 2281 - DNA, 252 bp, Streptococcus pyogenes
gtgatgggaaggccattgttgaccgatgatatcatcgaaaaagcgagacgaatggaaacatttgagccagatgatgctgtaaactttgacacaaaagtaatgacgctaccagaaaaagatgataaagcacgcatttataaaagtcgtcggattgaaaatgccaaacgcagccaattgcaatctaaattaaatgtgattttgatagctgttatgctgttaattgccatcttggtatatgctatcttttatctt

SEQ ID NO: 2282 - protein, 84 aa, Streptococcus pyogenes
VMGRPLLTDDIIEKARRMETFEPDDAVNFDTKVMTLPEKDDKARIYKSRRIENAKRSQLQSKLNVILIAVMLLIAILVYAIFYL

SEQ ID NO: 2283 - DNA, 687 bp, Streptococcus agalactiae
atgaaaattggaattattgcagccatggaggaagagttaaaactccttgtggaaaatcttgaggataaatctcaagagacagtattatcaaatgtatattacagtggacgttatggtgaacatgagcttgttttagtacagtctggtgttgggaaagtcatgtcagcgatgagtgttgctattttagtagaaagctttaaagttgatgctattattaatacaggatcagctggtgcagtagcaacaggattgaatgtaggagacgtcgttgtcgcagatacattagtttatcacgatgtagatttaaccgcctttggttatgactatggacaaatgtcaatgcagccactttattttcattcggataagacttttgtttccacttttgaagcagttttatctaaagaagaaatgattagtaaagttggtttaattgcaactggggatagttttattgctggccaggaaaagattgatgttattaaggggcattttccacaggttttagctgtcgagatggaaggtgcagcaattgcccaagctgctcaagctacaggaaagccctttgtggtggtacgtgctatgagtgatactgcagctcatgatgccaatatcacatttgatgaatttatcattgaagctggtaaacgctctgcccaagtattaatggcatttttgaaagcatta

SEQ ID NO: 2284 - protein, 229 aa, Streptococcus agalactiae
MKIGIIAAMEEELKLLVENLEDKSQETVLSNVYYSGRYGEHELVLVQSGVGKVMSAMSVAILVESFKVDAIINTGSAGAVATGLNVGDVVVADTLVYHDVDLTAFGYDYGQMSMQPLYFHSDKTFVSTFEAVLSKEEMISKVGLIATGDSFIAGQEKIDVIKGHFPQVLAVEMEGAAIAQAAQATGKPFVVVRAMSDTAAHDANITFDEFIIEAGKRSAQVLMAFLKAL

SEQ ID NO: 2285 - DNA, 693 bp, Streptococcus pyogenes
atgaaaataggaattattgctgctatggaggaggagttgtccctgctcttagcaaatcttttggatgctcaagaacatcaggtgctttcaaaaacttactatacgggtcgttttggcaagcatgagctcattttggtacagtcgggtgttggaaaagtgatgtctgctatgacagttgcgatcttggttgagcatttcaaagcccaagctattatcaatacaggatcagcaggggcagtcgcttcacatttagcgatcggagatgtggtggttgcagatcggttagtgtatcatgatgtggatgctactgcatttggttatgcttatggtcaaatggctggtcaaccattatactatgattgtgatccacagtttgtggctatcttcaaacaagtcctaaaacacgaaaagacaaatggccaagttggtttgattgcaacaggagacagttttgttgctggtcaggacaagattgaccagatcaaaacagcttttagcgacgtgttagcagtagaaatggaaggcgcagctattgctcaagcagcacatactgcagggaaacccttcatcgttgttcgtgcgatgagtgataccgcagcgcatgatgccaatattacttttgatcaatttattatagaagctggcaagcgttcggcccagacattaatgacatttttagaaaacttacctgtt

SEQ ID NO: 2286 - protein, 231 aa, Streptococcus pyogenes
MKIGIIAAMEEELSLLLANLLDAQEHQVLSKTYYTGRFGKHELILVQSGVGKVMSAMTVAILVEHFKAQAIINTGSAGAVASHLAIGDVVVADRLVYHDVDATAFGYAYGQMAGQPLYYDCDPQFVAIFKQVLKHEKTNGQVGLIATGDSFVAGQDKIDQIKTAFSDVLAVEMEGAAIAQAAHTAGKPFIVVRAMSDTAAHDANITFDQFIIEAGKRSAQTLMTFLENLPV

SEQ ID NO: 2287 - DNA, 534 bp, Streptococcus agalactiae
gtgtcagaaatgattaaaaaaatgataagtgaacaactgattgttaaagataaagatttaggatattatcttaccaaacaaggtttattagttgtttctgacctttaccgtaaacatcgtctagtagaggtatttttagttaaccatttgcactatactgctgatgatattcatgaagaagcggaagttttagaacatactgtatcaacaacttttgttgatcaattagaaaagttgttagactttccacaattttgtccacacggtgggactattcctaaaaagggagagtttttagtagaaattaaccaaatgacattggaccaaattagtcagcttggcacatatgttatcagtcgtgttcatgatgattttcagctactgaaatacctagaacaacaccgtttgcatatcaacgataccattgaattgacacaaattgacccttatgcaaaaacttatcacatcacctataacgatgaaaatctaacaatccctgagcgtatcgcaagtcaaatatatgtatctgctaca

SEQ ID NO: 2288 - protein, 178 aa, Streptococcus agalactiae
MSEMIKKMISEQLIVKDKDLGYYLTKQGLLVVSDLYRKHRLVEVFLVNHLHYTADDIHEEAEVLEHTVSTTFVDQLEKLLDFPQFCPHGGTIPKKGEFLVEINQMTLDQISQLGTYVISRVHDDFQLLKYLEQHRLHINDTIELTQIDPYAKTYHITYNDENLTIPERIASQIYVSAT

SEQ ID NO: 2289 - DNA, 336 bp, Streptococcus pyogenes
atgacgcctaataaagaagattacttgaaatgtatttatgaaattggagaacaagaacccaagattacaaataaaatggttgcagaaaagatgcacgtttcggcacctgccgtttcagagatgattaaaaaaatgatttcacaaggctggattgtcaaagataaagcaaaaggctatttgctaaaagacaaaggctatgctcttgttgctaacctctaccgcaaactccgcttgattgaggtatttttgattcatcagctgggctataatacccaagaagtgcaccaagaagctgaagtcttagagcacactgtctcagactcctttatcgaccgt

SEQ ID NO: 2290 - protein, 112 aa, Streptococcus pyogenes
MTPNKEDYLKCIYEIGEQEPKITNKMVAEKMHVSAPAVSEMIKKMISQGWIVKDKAKGYLLKDKGYALVANLYRKLRLIEVFLIHQLGYNTQEVHQEAEVLEHTVSDSFIDR

SEQ ID NO: 2291 - DNA, 495 bp, Streptococcus agalactiae
atgaaccttccggttaaattttttgataaatatgtaccagagttagataaaaataatgtacgtgtacaggtcatcggagatactcataaattacctaaggcaacatacgatgcaatgcaacgcgcttgtttgaggacaaaacataattcggggctcgtcttgaattttgcgctaaattatggcggacgttcagaaatcactaatgccattaaggaaattgctcaggatgttttggaagctaagttgaatcctgacgatattacagaggatttagtagcaaatcatttaatgacaaatagcttaccctatctttatagagaccctgatttgattatccgaactagtggagagttacgcttgagtaactttttaccttggcaatcagcttatagtgaattttactttactcccgttttatggccagattttaaaaaagacgaactacataaggccattgtggattataatcaacgccatcgtcgatttggtagtgta

SEQ ID NO: 2292 - protein, 165 aa, Streptococcus agalactiae
MNLPVKFFDKYVPELDKNNVRVQVIGDTHKLPKATYDAMQRACLRTKHNSGLVLNFALNYGGRSEITNAIKEIAQDVLEAKLNPDDITEDLVANHLMTNSLPYLYRDPDLIIRTSGELRLSNFLPWQSAYSEFYFTPVLWPDFKKDELHKAIVDYNQRHRRFGSV

SEQ ID NO: 2293 - DNA, 747 bp, Streptococcus pyogenes
atgtttggattaaaagcgaaatcaacaaaaaaagttttggggagtatcccaaagcatattggaattatcatggatggtaatggacgttgggccaaaaaaagactaaaacctagagtgtttgggcataaagctgggatggatgctttacaagaagtaacgattactgcatctgagttgggggttaaagttctgacagtctatgccttttcgacagaaaactggtccagaccccaagatgaggtgtcttttatcatgaatttaccagtaaccttctttgacaaatatgtgcctgtgcttcatgagaacaatgtaaagattcaaatgattggagagactagtcgtttacctgaagataccttggcagcgctaaatgcagccatcgacaaaacaaaacgtaatacgggtttaattttgaattttgctctcaattatggaggacgtgctgagattaccagtgctgttcgctttattgctcaagatgtcttagatgccaaattaaatccaggagatattacggaggatttgattgctaattacttgatgacagaccatctgccatatctctaccgagaccccgatttgattattcgcaccagtggtgagctgcgtttgagcaatttcttgccttggcaatcagcttacagtgaattttatttcacaccagtcttgtggcctgattttaaaaaggcagagctactaaaggccattgcggattataaccgccgccaacgtcgttttggcaaggtc

SEQ ID NO: 2294 - protein, 249 aa, Streptococcus pyogenes
MFGLKAKSTKKVLGSIPKHIGIIMDGNGRWAKKRLKPRVFGHKAGMDALQEVTITASELGVKVLTVYAFSTENWSRPQDEVSFIMNLPVTFFDKYVPVLHENNVKIQMIGETSRLPEDTLAALNAAIDKTKRNTGLILNFALNYGGRAEITSAVRFIAQDVLDAKLNPGDITEDLIANYLMTDHLPYLYRDPDLIIRTSGELRLSNFLPWQSAYSEFYFTPVLWPDFKKAELLKAIADYNRRQRRFGKV

SEQ ID NO: 2295 - DNA, 792 bp, Streptococcus agalactiae
atgaaagaacgtgttatttggggagctgtcgcgcttgccatatttatcccttttttagtaatgggtggtttgcctttccaatttttagttggacttttagctatgattggtgtttctgaattacttcgtatgcgtcgtttagaaatattttcctttgaaggtgcattagctatgataggagcctttgttttaacagttcctttagatagttatttgtcctttttaccagttgacgctagtttatcagcatacggtattgttatttttatgattttggcaggtactgttttgaacagtaattcttacagttttgaagatgctgcctttccaattgcgtctagtttttatgtgggtattggctttcaaaatctagtcagtgctcgtatggctggaatagataaggtgttgttagctttatttattgtctgggcgactgatatcggtgcttatatgattggtcgtcaatttggacaacgcaaactactaccctcagtgtctccaaataaaacaattgaagggagtctaggagggattgcttcagccattgtggtagctttcttttttatgctttttgataagaccgtctatgcgcctcatagcttcctagtcatgttagttttagtggctatctttagcatttttggtcaatttggagatttagttgaaagtagtattaaacgtcattttggtgttaaagattcgggtaaattgattccgggtcatggggggattttggatcgctttgatagtatgatttttgttttcccaatcatgcacttctttggcttattc

SEQ ID NO: 2296 - protein, 264 aa, Streptococcus agalactiae
MKERVIWGAVALAIFIPFLVMGGLPFQFLVGLLAMIGVSELLRMRRLEIFSFEGALAMIGAFVLTVPLDSYLSFLPVDASLSAYGIVIFMILAGTVLNSNSYSFEDAAFPIASSFYVGIGFQNLVSARMAGIDKVLLALFIVWATDIGAYMIGRQFGQRKLLPSVSPNKTIEGSLGGIASAIVVAFFFMLFDKTVYAPHSFLVMLVLVAIFSIFGQFGDLVESSIKRHFGVKDSGKLIPGHGGILDRFDSMIFVFPIMHFFGLF

SEQ ID NO: 2297 - DNA, 792 bp, Streptococcus pyogenes
atgaaagaacgtgttgtttgggggggagtagcagtagctattttcctaccttttctcataataggaaacctaccattccaattatttgtaggcgttttggccatgattggggtatcagaattactgaaaatgaaaagattagaagtcttttcttttgaaggtgtttttgccatgttagccgcctttgtattggcagttccgatggaccattacctcacttttttaccaattgatgcgaatgttgctttttacagcttaatggtttttttcattttggcaggtactgttttaaatagcagagcttattcatttgatgatgcggcctttccgattgcaactagtttttatgttgggattggttttcaacatttgatcaatgctcgcctgtcaggaattgacaaggtctttttggccttatttatcgtttgggccactgatattggagcatatctgattgggcgtcagtttggtagacgcaaactattgcctacagtttctccaaacaaaaccattgaaggtagtttaggagggatcgcttgtgcagtccttgtgtcttttatctttatggtgattgataggtctgtttatgcgccacatcactttttgaccatgttggttttggtcgctcttttttccatttttgcccaatttggtgatttggttgaaagtgctctcaaacgtcactttggtgtcaaagattcaggtaagcttatcccgggacatggtggtattttagaccgctttgattccatgatttttgtttttcccatcatgcatctctttggtttattt

SEQ ID NO: 2298 - protein, 264 aa, Streptococcus pyogenes
MKERVVWGGVAVAIFLPFLIIGNLPFQLFVGVLAMIGVSELLKMKRLEVFSFEGVFAMLAAFVLAVPMDHYLTFLPIDANVAFYSLMVFFILAGTVLNSRAYSFDDAAFPIATSFYVGIGFQHLINARLSGIDKVFLALFIVWATDIGAYLIGRQFGRRKLLPTVSPNKTIEGSLGGIACAVLVSFIFMVIDRSVYAPHHFLTMLVLVALFSIFAQFGDLVESALKRHFGVKDSGKLIPGHGGILDRFDSMIFVFPIMHLFGLF

SEQ ID NO: 2299 - DNA, 1257 bp, Streptococcus agalactiae
atgctaggaattttaacctttattattatttttggtgtcattgtagttgttcacgaatttgggcatttctattttgcaaagaaatcaggaattcttgttcgtgaatttgctattggtatgggtccaaaaatcttttctcacattgataaagaaggaacaacctatactattcgtatattaccgctaggtggttatgtccgtatggctggttggggtgatgataagactgaaattaagacagggacgccggctagccttactttaaataaagaaggcattgtaactcgtattaatttatcaggaaaacaattagacaatacttctttaccaatcaatgtaacagcttatgatttagaagataaactaactatcacaggattggtcttaagtgagacaaaaacctatagtgttgatcacgatgctactatcattgaggaggatggtactgaaattcgtattgctcccttagatatgcagtatcagaatgcttctgtatgggggcgcttaattaccaattttgcaggtccgatgaataattttattttaggtcttgtagtctttattgcacttgcttttattcaaggaggtgttcaagacttatcaaccaatcaggtccgtgtatcagaaaatggtcctgccgctagtgcaggtttaaaaaataatgatcgtattttacaaatagggtcgcacaaagtttctaactgggaacagttgacagcagcagtagaaaagtcaactaggcatttagaaaaaaaacaaaaacttgcccttaagattaagagcaaagaggtggtgaaaacgatcaacgttaagccacagaaagttgataaatcctacatcatcggcattatgccagctttaaagacaagctttaaagacaaacttttaggtggattaaaactagcatgggaaagtttctttagaattttaaatgaattaaagaaacttattgctcattttagtattaataaattgggaggtccagtagctctctatcaggctagtagccaagctgctaaaaatggtttcgtcacagttctcaacttaatgggattaatctctatcaacttaggtattatgaatctcatccctataccagcccttgacgggggtaagatagtgatgaatattttagaagccattcgtcgcaaaccacttaaacaagaaacagaaacttatattacgctcgctggggtagcagttatgttagtattaatgattgctgtgacctggaacgatatcatgcgagctttcttc

SEQ ID NO: 2300 - protein, 419 aa, Streptococcus agalactiae
MLGILTFIIIFGVIVVVHEFGHFYFAKKSGILVREFAIGMGPKIFSHIDKEGTTYTIRILPLGGYVRMAGWGDDKTEIKTGTPASLTLNKEGIVTRINLSGKQLDNTSLPINVTAYDLEDKLTITGLVLSETKTYSVDHDATIIEEDGTEIRIAPLDMQYQNASVWGRLITNFAGPMNNFILGLVVFIALAFIQGGVQDLSTNQVRVSENGPAASAGLKNNDRILQIGSHKVSNWEQLTAAVEKSTRHLEKKQKLALKIKSKEVVKTINVKPQKVDKSYIIGIMPALKTSFKDKLLGGLKLAWESFFRILNELKKLIAHFSINKLGGPVALYQASSQAAKNGFVTVLNLMGLISINLGIMNLIPIPALDGGKIVMNILEAIRRKPLKQETETYITLAGVAVMLVLMIAVTWNDIMRAFF

SEQ ID NO: 2301 - DNA, 1257 bp, Streptococcus pyogenes
atgttaggaataataacctttattattatttttggtattttagtgattgtccatgaatttggacatttctattttgctaaaaaatcaggcattctagtaagagaatttgccattggaatgggccctaaaattttttctcatgttgaccaaggaggaactctttataccttgaggatgttacccttgggcggttatgtgcgaatggctggttggggtgatgacaaaactgagatcaaaacaggtactccagcaagtttaacccttaatgagcaaggttttgttaagcgcatcaacttgtctcaaagtaagttagacccaacgagtctcccaatgcatgttacaggctatgacttagaagatcagctgagtattactggcttagttttagaagaaaccaagacatataaggtcgctcacgatgctactattgttgaagaagacggtactgagataagaattgctccgcttgatgttcaatatcaaaatgctagtattggcggacgtttaatcaccaattttgcaggtcccatgaataattttattttagggattgtggtttttatcctcttggtctttttacaaggtgggatgccagattttagtagcaatcatgtccgtgttcaagaaaatggagcagcagctaaggctggtcttcgagataatgaccaaattgtcgcaattaatggttacaaggtgactagctggaatgatctcactgaggctgtagaccttgcaacacgggatctaggcccgtcacagaccattaaggtcacctacaagtcacatcagcgcttaaaaacggtggctgtgaaaccacaaaagcatgcaaagacatacacgataggagttaaggcgagtctgaaaacaggatttaaggataagctcttaggcggtctagaattagcttggagtagggcgtttactattttgaatgctttgaaaggattgatcactggctttagtctcaataaattaggtggacctgttgccatgtatgacatgtccaatcaggctgctcaaaacggcttagagtcagtcttatctcttatggcaatgctttcgatcaatttagggatctttaacctgattccgattcctgcacttgatgggggaaaaatcttgatgaatatcattgaagccattcgtcgcaagcctatcaagcaagaaacagaggcctatatcaccctagctggggttgctatcatggtcgtattgatgattgctgtgacatggaatgatatcatgcgcgtctttttc

SEQ ID NO: 2302 - protein, 419 aa, Streptococcus pyogenes
MLGIITFIIIFGILVIVHEFGHFYFAKKSGILVREFAIGMGPKIFSHVDQGGTLYTLRMLPLGGYVRMAGWGDDKTEIKTGTPASLTLNEQGFVKRINLSQSKLDPTSLPMHVTGYDLEDQLSITGLVLEETKTYKVAHDATIVEEDGTEIRIAPLDVQYQNASIGGRLITNFAGPMNNFILGIVVFILLVFLQGGMPDFSSNHVRVQENGAAAKAGLRDNDQIVAINGYKVTSWNDLTEAVDLATRDLGPSQTIKVTYKSHQRLKTVAVKPQKHAKTYTIGVKASLKTGFKDKLLGGLELAWSRAFTILNALKGLITGFSLNKLGGPVAMYDMSNQAAQNGLESVLSLMAMLSINLGIFNLIPIPALDGGKILMNIIEAIRRKPIKQETEAYITLAGVAIMVVLMIAVTWNDIMRVFF

SEQ ID NO: 2303 - DNA, 1851 bp, Streptococcus agalactiae
atgaaacaaagtaaaatgcttattccaacacttcgcgaaatgccaagtgatgctcaggttatcagccatgctcttatggttcgtgcaggatatgtccgccaagtttcggctggaatctatgcttatttgcctctagctaaccgtactattgaaaaatttaaaacaattatgcgtcaagaatttgagaagattggtgcagttgaaatgttagctccagctcttcttacagcagatttatggcgtgaatctgggcgctacgaaacatatggtgaagacctttataaattaaagaatcgtgatcaatcggattttatcttaggaccaactcatgaagagactttcacaactcttgttcgtgatgcagtaaaatcttataagcaattaccactaaacctttatcaaattcagtctaaatatcgtgatgagaagcgtcctcgtaatggacttcttcgaacacgtgaatttatcatgaaagatggatacagcttccacaaagattatgaagaccttgatgtcacttacgaagattaccgtaaagcatatgaagccatcttcacacgtgctggacttgactttaaaggcattataggtgacggaggtgctatgggaggtaaagatagccaagaatttatggcagtaactcccaatcgtacagatttaaatcgttggttagtccttgataaaactattccttctattgatgatattccagaggatgttttagaagaaattaaggtagaactctcggcttggctagtttctggtgaggacactattgcatactctactgaatcaagctatgctgctaaccttgagatggcaacgaatgagtacaaaccatctactaaggctgctacctttgaagaagtaacaaaagtagaaactcctaactgcaaatcaattgatgaggtagctggatttttatcaattgatgaaaatcaaactatcaagacactattgtttattgctgatgaacagcccgtggttgctttactagttggtaacgatcaagtcaatgatgtgaagttaaaaaattatttagcggctgatttcttagagcctgcaagtgaagagcaagcaaaagagatttttggtgcaggttttggttctcttgggccagttaacctacctgactctgttaaaattattgctgatcgtaaagttcaagaccttgctaatgctgtgtctggtgctaaccaagatggttatcattttactggagttaatccagaacgtgatttcacagctgaatacgttgatattcgtgaagtaaaagaaggggagatttctccagacggtaaaggtactctgaaatttgctcgtggtattgaaattggacatatctttaaactaggtacccgttattcagatagtatgggagcgaacatccttgatgaaaatggccgctcaaatcctattgttatggggtgttatggtattggtgttagtcgtattctctcagctgtcattgaacaacatgcccgactttttgtgaataagacaccaaaaggagcttatcgctttgcttgggggattaatttcccagaagaattagccccatttgatgtacatttgattactgtcaatgtcaaagatcaagagtcacaagaccttactgagaaaattgaagctgatttgatgcttaaaggttatgaagtcctgacagacgatcgtaatgaacgtgttggttctaaattctcagacagtgacttaattggacttccaattcgagtaactgttgggaagaaagcttctgaaggtatcgttgaagtgaaaattaaagcaagtggtgatacgattgaggttcacgctgataacttaattgaaactttagagattctaacaaaaaaa

SEQ ID NO: 2304 - protein, 617 aa, Streptococcus agalactiae
MKQSKMLIPTLREMPSDAQVISHALMVRAGYVRQVSAGIYAYLPLANRTIEKFKTIMRQEFEKIGAVEMLAPALLTADLWRESGRYETYGEDLYKLKNRDQSDFILGPTHEETFTTLVRDAVKSYKQLPLNLYQIQSKYRDEKRPRNGLLRTREFIMKDGYSFHKDYEDLDVTYEDYRKAYEAIFTRAGLDFKGIIGDGGAMGGKDSQEFMAVTPNRTDLNRWLVLDKTIPSIDDIPEDVLEEIKVELSAWLVSGEDTIAYSTESSYAANLEMATNEYKPSTKAATFEEVTKVETPNCKSIDEVAGFLSIDENQTIKTLLFIADEQPVVALLVGNDQVNDVKLKNYLAADFLEPASEEQAKEIFGAGFGSLGPVNLPDSVKIIADRKVQDLANAVSGANQDGYHFTGVNPERDFTAEYVDIREVKEGEISPDGKGTLKFARGIEIGHIFKLGTRYSDSMGANILDENGRSNPIVMGCYGIGVSRILSAVIEQHARLFVNKTPKGAYRFAWGINFPEELAPFDVHLITVNVKDQESQDLTEKIEADLMLKGYEVLTDDRNERVGSKFSDSDLIGLPIRVTVGKKASEGIVEVKIKASGDTIEVHADNLIETLEILTKK

SEQ ID NO: 2305 - DNA, 1854 bp, Streptococcus pyogenes
atgaaacaaagtaaactgcttatcccaaccttgcgcgaaatgccaagtgatgcccaggttatcagccacgcgcttatggtgcgtgccggttatgtgcgccaagtttctgctggtatctatgcttatttaccactggcaaatcgtaccattgagaaattcaagaccatcatgcgtgaagagtttgaaaagatcggtgctgttgaaatgttggcgccagctcttttgacagctgatctctggcgtgaatcaggccgttatgagacctatggagaggacctctataagcttaaaaaccgtgataactcagactttatcttgggtccaactcacgaagaaacctttacgactttggtgcgtgatgcggtcaaatcttacaagcaattgcccttaaacctttatcaaattcagtctaagtatcgtgatgaaaaacgtccgcgtaatggcttgcttcgtacccgtgagtttattatgaaagacggctatagtttccatcacaactatgaagatttagatgtgacctacgaagattatcgtcaagcttacgaagctatttttaccagagctggtttagatttcaaagggattattggagatggcggtgccatgggggggaaagattcccaagaatttatggccattacaccagctcgtacggatcttgatcgctgggtggttcttgacaagtctattgcgtcaatggatgatattccaaaagaggtcttagaagatattaaggcagaattggctgcttggatgatttcaggtgaagatactattgcttattcaacagaatcaagctacgctgccaaccttgagatggcaactaacgaatacaaaccgtcctcaaaagtagctgctgaagatgccttggcagaagttgagacaccacattgcaaaacgattgatgaagtggctgcttttctttcagtagatgaaacacaaaccatcaaaaccttgctttttgtggcagataatgaacctgttgttgctttgctagttggaaatgaccatatcaataccgttaaattaaaaaactatctagctgctgattttttagagccagctagtgaagaagaagcccgtgctttctttggtgcaggttttggctcacttgggcctgtcaacttggcacaaggtagtcgtattgtggctgaccgcaaagtgcaaaaccttaccaatgccgttgcaggagctaacaaggatggtttccatatgacaggagtcaatccaggacgtgacttccaggctgaatatgtagatattcgtgaagtcaaagaaggggaaatgtctccggacggtcatggtgttctccagtttgcgcgtggtatcgaagtcggtcatatcttcaagttgggcactcgttattcagacagcatgggagcaacgattcttgatgaaaatggcagaacagttccaattgtgatgggttgttatggtatcggggttagccgcattttgtctgctgtcattgaacagcatgcccgtctctttgtgaacaagacaccaaaaggcgattaccgttatgcttggggtattaacttccctaaagaattagccccatttgacgtgcatttgattacagttaatgtcaaagatcaagtggcccaagacttgacggcgaagttagaagctgacttgatggctaaagggtatgatgtcttgacagatgaccgtaatgaacgcgtcggttcgaaattctctgatagcgatttgattggtttgccaattcgtgtcactgttggtaaaaaagccgctgaaggtatcgtggaaattaaaatcaaggcaacaggtgacagcattgaagttaatgcagaaaacctcatcgaaacccttgaaattttaacaaaagaacac

SEQ ID NO: 2306 - protein, 618 aa, Streptococcus pyogenes
MKQSKLLIPTLREMPSDAQVISHALMVRAGYVRQVSAGIYAYLPLANRTIEKFKTIMREEFEKIGAVEMLAPALLTADLWRESGRYETYGEDLYKLKNRDNSDFILGPTHEETFTTLVRDAVKSYKQLPLNLYQIQSKYRDEKRPRNGLLRTREFIMKDGYSFHHNYEDLDVTYEDYRQAYEAIFTRAGLDFKGIIGDGGAMGGKDSQEFMAITPARTDLDRWVVLDKSIASMDDIPKEVLEDIKAELAAWMISGEDTIAYSTESSYAANLEMATNEYKPSSKVAAEDALAEVETPHCKTIDEVAAFLSVDETQTIKTLLFVADNEPVVALLVGNDHINTVKLKNYLAADFLEPASEEEARAFFGAGFGSLGPVNLAQGSRIVADRKVQNLTNAVAGANKDGFHMTGVNPGRDFQAEYVDIREVKEGEMSPDGHGVLQFARGIEVGHIFKLGTRYSDSMGATILDENGRTVPIVMGCYGIGVSRILSAVIEQHARLFVNKTPKGDYRYAWGINFPKELAPFDVHLITVNVKDQVAQDLTAKLEADLMAKGYDVLTDDRNERVGSKFSDSDLIGLPIRVTVGKKAAEGIVEIKIKATGDSIEVNAENLIETLEILTKEH

SEQ ID NO: 2307 - DNA, 582 bp, Streptococcus agalactiae
atgaaaagtcgaaaaaaagataaattggtattgaggttaacaacaacactattggtttttggtttgggtggggtttggttttataattataaaaatgataatgtcgaaccgacagtcactagtgcatcggatcaaacgacgacttttattcaaacgatttctccaacagctattgaaatttctaagacctatgatttgtatgcgtcagtcttattagcacaagctattttggaatcatccagtggacaatcagatttgtctaaggctcctaattataacctctttggcatcaaaggagaatataaaggtaaatctgtccaaatgcctactttagaagatgatgggaaaggcaatatgactcaaatccaagctccttttcgcgcctatccaaattattctgcttcactatatgattatgctgagttagtatctagtcaaaagtatgcatctgtttggaaatcaaatacctcttcttataaggatgctactgcagctctaacaggtctttatgcgacagatactgcttatgctagtaaattaaaccaaattattgaaacctacagtctagatgcttatgataaa

SEQ ID NO: 2308 - protein, 194 aa, Streptococcus agalactiae
MKSRKKDKLVLRLTTTLLVFGLGGVWFYNYKNDNVEPTVTSASDQTTTFIQTISPTAIEISKTYDLYASVLLAQAILESSSGQSDLSKAPNYNLFGIKGEYKGKSVQMPTLEDDGKGNMTQIQAPFRAYPNYSASLYDYAELVSSQKYASVWKSNTSSYKDATAALTGLYATDTAYASKLNQIIETYSLDAYDK

SEQ ID NO: 2309 - DNA, 705 bp, Streptococcus pyogenes
atgacaaaaaagaaaggtaagcttgtacttatcagtctttttgttctagcagcttgtttaggagcttatagtgcaatgagacaatctcataaaacttcaaacgtgtcagctgagactatcgccagttcttcaacccgacattttattgatgaaattggtccaactgctagtactattggtcaagaacgtgatctttatgcgtctgttatgatagcacaagcgattttagaatcaagtaatggtaaatcaagtctaagtcaagcaccttattataattttttcggtattaagggtgcctataacggttcttctgtgacgatgtcaacttgggaagatgatggtaatggcaatacctatacgattgatcaagcctttagagcttatccaagtattgcagactcccttaatgactacgcggacttgctaagttctagcacttatataggtgctagaaaatcaaacacgctatcgtatcaagatgctacagcagctctaactggcttatacgctacagacaccagttataacttaaaactaaataatattattgcaacctatggtttgacggcttatgatgttgctaatagctcagctcaagaaactggtctagcaacttcgggttatgtttggaatgaatatcgtcgtaattacactgatgcggagaccctagcagttgatgaggcttgggctaaacgcatgacttat

SEQ ID NO: 2310 - protein, 235 aa, Streptococcus pyogenes
MTKKKGKLVLISLFVLAACLGAYSAMRQSHKTSNVSAETIASSSTRHFIDEIGPTASTIGQERDLYASVMIAQAILESSNGKSSLSQAPYYNFFGIKGAYNGSSVTMSTWEDDGNGNTYTIDQAFRAYPSIADSLNDYADLLSSSTYIGARKSNTLSYQDATAALTGLYATDTSYNLKLNNIIATYGLTAYDVANSSAQETGLATSGYVWNEYRRNYTDAETLAVDEAWAKRMTY

SEQ ID NO: 2311 - DNA, 4404 bp, Streptococcus agalactiae
atgtcagaattgttcaagaaacttatggatcagattgaaatgccgcttgaaattaagaattcaagtgttttttcgtctgctgatattatcgaggtaaaggttcattctctatcacgcttatgggaatttcatttttcatttccagaattattgccaattgaggtgtatcgtgaattacaaactcgtttagtgaatagttttgaaaaagcagatataaaggctacttttgatataagagcagaaactattgatttttctgatgatctgctacaggattattatcaacaagctttttgtgaacccttgtgtaatagtgcaagttttaagagttctttttcacaattaaaagttcattacaatggcagtcagatgattatttcagcacctcaatttgtcaataataatcattttcgtcagaatcatttgccgcgtttggaacaacagttttcattgtttggatttggtaaacttgctattgatatggtttctgatgaacaaatgacgcaagacttaaaatcatcatttgaaactaatcgcgagcaattgcttgaaaaagctaaccaagaagctatgcaagccttggaagcacaaaaatcactagaagattcagcgcctccatcagaagaagtgaccccaactcaaaattatgatttcaaagagcgtatcaaacaacgtcaagctggctttgaaaaagcagagattacacccatgattgaggtgacaacagaagaaaatcgtatcgtttttgaaggaatggtttttagtgttgaacgaaaaacaacccgcactggacgtcatatcattaattttaagatgactgattatacctcaagttttgctatgcaaaagtgggctaaagatgatgaagaattgaagaagtacgatatgatttctaaaggttcgtggttgcgagtcagagggaatattgagaacaataactttactaaatctttgacaatgaatgttcaagatatcaaagagattgtgcatcatgaacgtaaagacttaatgccagcagatcaaaaacgtgtggaatttcatgctcataccaatatgtcaacgatggatgctttaccaactgtcgagagcctcattgatactgcagctaagtggggacacccagctattgcaattactgaccatgccaatgttcaaagttttccgcatggctaccacagagcaaaaaaagcaggtataaaagcaatttttggattagaggcaaatattgttgaagataaagtgcctatttcctacaacgaagttgatatgaatttgcacgaagcaacttatgttgtatttgatgtggaaactacaggtctttctgcagctaataatgacctaattcagattgcagcatcaaaaatgttcaagggtaatattattgagcaatttgatgagtttattgacccaggtcatcctctttctgcctttacaactgaattgacaggtattacggataatcatgtcagaggttcaaaacctattttacaagtccttcaggaatttcagaatttttgtcaaggtacggttttagttgcgcataatgcaacctttgacgttggttttatgaatgcgaattatgaacgtcataatctgcctttgatcacacagccggtcattgataccttagaatttgcaagaaatctttatcctgaatataagcgtcatggtttggggcctctaaccaaacgtttccaagttgctttggaacatcatcatatggccaactacgatgctgaagcaacgggtcgcttactctttattttcttaaaagaggcgcgggaaaatcgtgatgtgactaatttgatggagctcaatactaaattggtagctgaagactcttacaaaaaggcacgcataaagcatgcaaccatttatgtccaaaatcaggttggacttaaaaatatatttaagttagttagcctttcaaatgttaaatattttgaaggggtggcaagaattcctaggtcagttttagatgctcacagagaaggtctcttgctaggtactgcctgttctgatggagaagtttttgatgccttgttatcaaatggaattgatgcagcagtgaccctagctaaatattatgattttattgaagtcatgccacctgctatttatcgccccttggtagtacgtgatttaattaaagatgaggtggggattcaacaaattattagagacctaatagaggtcggtcggcgtttagataagcctgttttagctacgggaaatgttcattatattgagcctgaagatgagatttaccgtgagattattgttcgtagtcttggacaaggtgccatgattaataggactataggtcgtggggaggatgctcagccagcgcctttgccaaaagcacatttccgcacaacaaatgagatgttagatgaatttgcctttcttggtaaagatttagcctatgagatcgttgtaaccaatacgaatacttttgcagatcgatttgaagacgttgaagttgtaaaaggggatctctatactccgtttgttgatcgtgctgaagaacgagttgctgaattaacttatgctaaagcattcgaaatatatggtaatcctcttcctgatattattgatttacgtatcgaaaaagagttagcatctatacttggtaatggatttgccgttatctatcttgcttcgcaaatgttggtgcaacgttctaatgaacgtggttatctagtaggatcacgtgggtctgttgggtcgagttttgtagcgaccatgataggaattactgaagttaatccaatgccacctcattatgtttgcccaaattgtcagcattctgaatttatcacagatggttcttgtggttcaggctatgatttaccaaataaaaattgtcctaaatgtggtactttgtacaagaaagatggacaggatattccgtttgaaactttcttaggatttgatggagataaggttcctgatattgatctgaatttctctggagatgatcaaccttctgctcacttagacgttcgtgatatctttggagaagaatatgcttttcgtgcaggaacggtaggtaccgtagctgaaaaaactgcctttggttttgtcaaaggttacgaacgagattacaataaattttataacgatgcagaggtcgaacggttagcgactggtgctgcgggagttaaacgttctacaggtcaacaccccggtggtattgttgttattcctaactatatggatgtttatgattttactccggttcaatatccagcagatgatatgacagctgcttggcagacaactcacttcaatttccatgatattgatgagaatgtcttgaagttagatattctaggacatgatgatcctactatgattcgtaaacttcaggatttatcaggaattgatccatcaaatatccttccagatgatccagacgttatgaagttattttctggtacggaagttttaggagtgacagaagagcaaattggaactcctacaggaatgcttggtattccagagtttggtacgaactttgttcgtggtatggtgaacgaaacccatccaaccacatttgcagaattgttgcaactgtcagggctatcacatggtacggatgtttggttaggtaatgctcaagacttaatcaaggaaggtattgctaccttatcaactgttattggttgtcgtgatgacatcatggtttatttaatgcacgctggcctacaaccaaagatggcctttacaatcatggagcgcgtgcgtaaggggttatggttgaaaatttcagaagatgagcgtaatggttatatccaagcaatgcgtgataataatgtcccggattggtatattgaatcgtgtggaaaaatcaagtatatgttccctaaagcccatgcagcagcctatgttttaatggcattacgtgtggcgtactttaaagtacattatccaatattttattattgtgcttatttttctattcgcgccaaagcttttgaattacgcacaatgagtgctggacttgatgccgttaaggcgcgcatgaaggatatcactgagaagcgtcagcgtaatgaggcgacgaatgtcgaaaatgatctttttacgacattagagttggttaatgaaatgcttgagcgtggctttaaatttgggaaattagatctttatcgtagccatgcgactgactttattattgaagaggatacgctaatccctccatttgttgctatggaaggcttgggagaaaacgttgcaaaacagatagttcgggcacgtgaagatggtgaatttttatcaaaaacagagcttcgtaaacgaggaggagtctcaagtaccttagttgaaaaatttgatgagatgggtattttgggaaatttaccagaagacaatcagttgagtctttttgatgatttcttc

SEQ ID NO: 2312 - protein, 1468 aa, Streptococcus agalactiae
MSELFKKLMDQIEMPLEIKNSSVFSSADIIEVKVHSLSRLWEFHFSFPELLPIEVYRELQTRLVNSFEKADIKATFDIRAETIDFSDDLLQDYYQQAFCEPLCNSASFKSSFSQLKVHYNGSQMIISAPQFVNNNHFRQNHLPRLEQQFSLFGFGKLAIDMVSDEQMTQDLKSSFETNREQLLEKANQEAMQALEAQKSLEDSAPPSEEVTPTQNYDFKERIKQRQAGFEKAEITPMIEVTTEENRIVFEGMVFSVERKTTRTGRHIINFKMTDYTSSFAMQKWAKDDEELKKYDMISKGSWLRVRGNIENNNFTKSLTMNVQDIKEIVHHERKDLMPADQKRVEFHAHTNMSTMDALPTVESLIDTAAKWGHPAIAITDHANVQSFPHGYHRAKKAGIKAIFGLEANIVEDKVPISYNEVDMNLHEATYVVFDVETTGLSAANNDLIQIAASKMFKGNIIEQFDEFIDPGHPLSAFTTELTGITDNHVRGSKPILQVLQEFQNFCQGTVLVAHNATFDVGFMNANYERHNLPLITQPVIDTLEFARNLYPEYKRHGLGPLTKRFQVALEHHHMANYDAEATGRLLFIFLKEARENRDVTNLMELNTKLVAEDSYKKARIKHATIYVQNQVGLKNIFKLVSLSNVKYFEGVARIPRSVLDAHREGLLLGTACSDGEVFDALLSNGIDAAVTLAKYYDFIEVMPPAIYRPLVVRDLIKDEVGIQQIIRDLIEVGRRLDKPVLATGNVHYIEPEDEIYREIIVRSLGQGAMINRTIGRGEDAQPAPLPKAHFRTTNEMLDEFAFLGKDLAYEIVVTNTNTFADRFEDVEVVKGDLYTPFVDRAEERVAELTYAKAFEIYGNPLPDIIDLRIEKELASILGNGFAVIYLASQMLVQRSNERGYLVGSRGSVGSSFVATMIGITEVNPMPPHYVCPNCQHSEFITDGSCGSGYDLPNKNCPKCGTLYKKDGQDIPFETFLGFDGDKVPDIDLNFSGDDQPSAHLDVRDIFGEEYAFRAGTVGTVAEKTAFGFVKGYERDYNKFYNDAEVERLATGAAGVKRSTGQHPGGIVVIPNYMDVYDFTPVQYPADDMTAAWQTTHFNFHDIDENVLKLDILGHDDPTMIRKLQDLSGIDPSNILPDDPDVMKLFSGTEVLGVTEEQIGTPTGMLGIPEFGTNFVRGMVNETHPTTFAELLQLSGLSHGTDVWLGNAQDLIKEGIATLSTVIGCRDDIMVYLMHAGLQPKMAFTIMERVRKGLWLKISEDERNGYIQAMRDNNVPDWYIESCGKIKYMFPKAHAAAYVLMALRVAYFKVHYPIFYYCAYFSIRAKAFELRTMSAGLDAVKARMKDITEKRQRNEATNVENDLFTTLELVNEMLERGFKFGKLDLYRSHATDFIIEEDTLIPPFVAMEGLGENVAKQIVRAREDGEFLSKTELRKRGGVSSTLVEKFDEMGILGNLPEDNQLSLFDDFF

SEQ ID NO: 2313 - DNA, 4395 bp, Streptococcus pyogenes
atgtcagatttattcgctaaattgatggaccagatagaaatgccacttgacatgagacgttcaagtgccttttcatctgctgatattatcgaggtaaaggtacattcggtgtcacgcttgtgggaatttcattttgcctttgcagcggttttaccgattgcaacttatcgtgaattgcatgatcgtttgataagaacttttgaggcggctgacattaaggtaacctttgacatccaagctgctcaggtggattattcagatgatctgcttcaagcttattaccaagaagcttttgagcatgcaccgtgtaatagtgctagttttaaatcttctttctcaaagctcaaagtgacttatgaggatgacaaactcattattgcagcgccaggttttgtgaataacgatcattttagaaacaatcatctgcctaatctggtcaagcaattagaagcctttggctttggcatcttgaccatagatatggtgtcagatcaggaaatgactgagcatttgaccaagaattttgtttccagtcgtcaggctcttgtgaaaaaggctgtgcaggataatttggaagcccaaaaatctcttgaagccatgatgccaccagttgaggaagccacacctgctcctaagtttgactacaaggaacgagcagctaagcgtcaggcagggtttgaaaaagcaaccatcacaccaatgattgagattgagaccgaagaaaaccggattgtctttgagggtatggtttttgacgtggagcgtaaaacgactaggacaggtcgccatatcatcaactttaaaatgacagactatacctcctcgtttgctctccaaaaatgggctaaagacgatgaggagctccgtaaatttgatatgattgctaagggagcttggttacgggtacaagggaatattgagaccaatccttttacgaagagtctcaccatgaatgtccagcaggtcaaagaaattgtccgtcatgagcgcaaagacctgatgccagaagggcaaaagcgggtcgaacttcatgcccacaccaatatgtctaccatggatgccttaccgacagtagaaagcttgattgatacggcagccaagtggggacacaaggcgattgctatcaccgaccatgctaatgtgcaaagttttcctcatggctaccatagggctcgcaaagctgggattaaggctatttttggcctagaagccaatattgttgaggacaaggtgcctatttcttatgaacctgttgatatggatttgcacgaagctacctatgtggtctttgacgtggaaaccacaggtctatctgctatgaataatgacctgattcagattgcggcttccaaaatgtttaaaggaaatattgtagagcagtttgatgaattcattgatcctgggcatcctctttcagcctttaccaccgaattgacaggaattaccgataagcatttgcagggcgccaagccattggttactgtcctaaaagcttttcaggacttttgcaaagatagtatcttggttgcccacaacgccagttttgacgtgggctttatgaacgccaattatgaacgccacgacttgcccaaaatcacacagcctgtgattgataccttagaatttgctagaaacttgtatcctgagtacaagcgtcacggtttgggaccgctcaccaagcgtttccaagtgagtctagaccaccatcatatggccaattacgacgcggaagccacaggacgtcttttgtttatttttctaaaagatgccagagaaaagcatggcatcaaaaatcttttgcaactcaatacagatttggtggctgaggattcttacaaaaaagcgcggattaagcatgcgactatctatgtgcaaaatcaggttggtcttaaaaatatgtttaagttggtcagcctttccaatatcaaatattttgaaggggtgccgcgtattccaagaaccgtcttagatgctcacagagagggtttgttacttggtacagcttgttctgacggcgaggtttttgatgccgttctgactaaaggaattgatgcagcggttgatttggctaggtattatgattttatcgaaatcatgccaccagccatttaccagccattggttgtccgtgaattaatcaaagatcaagcaggtattgagcaggtgattcgtgacctcattgaagtagggaaacgagctaagaaacctgtgcttgccactgggaatgtgcattatctagagcctgaagaagagatttaccgtgaaattattgtgcgtagtcttggtcagggtgccatgattaatagaacaatcggccgtggggaaggggcacagcctgctcctctacctaaagcgcactttagaacaaccaatgaaatgctggatgagtttgcctttcttggaaaagacctcgcttatcaagtagttgtgcaaaatactcaggattttgcggaccgtattgaggaagtggaagtggttaagggcgatctttacaccccgtatattgataaggccgaagagacggttgccgaattaacctatcaaaaagcctttgaaatttatggtaatcctctcccagatattattgatttacgcattgaaaaagagttaacctctatcttggggaacggttttgctgtgatttatctcgcttcccaaatgcttgttaaccggtcaaatgagcgaggctacctagttggttctaggggatctgtagggtctagctttgtcgccaccatgattgggattactgaggttaatcctatgccgcctcactacgtttgcccgtcctgccaacattctgaatttatcacagatgggtcagttggatctggctatgatttgcctaataaaccctgtccgaaatgtggcaccccttatcaaaaagatgggcaagacattccctttgagacctttcttgggtttgatggggataaggtgcccgatattgatttgaacttctctggtgatgaccagcccagtgcccatttggatgtccgagatatttttggtgacgaatacgcctttcgtgctggaacagttggtaccgtagcagaaaaaacagcttatggatttgtcaaaggctatgaacgcgactatggcaagttctatcgtgatgctgaggtggatcgtctagcagcaggtgctgctggtgtgaaacgaacgactgggcagcaccctggggggattgttgttattcctaattacatggatgtttatgattttacccccgtgcaatatccagccgatgatgtaacggcttcttggcagacaactcactttaacttccatgatattgatgaaaacgtcttgaaacttgatatcctagggcatgatgatccgaccatgattcgtaaacttcaggatttatcgggcattgatcctattactattcctgctgatgatccgggagttatggctctcttttctgggacagaggttttgggcgttaccccggaacaaattgggacaccgactggtatgctaggcattccagaatttggaaccaactttgttcgcggcatggttaatgagacgcatccgaccacttttgcggagcttttgcagttgtctggactatctcatggaaccgatgtttggcttggtaatgcacaagatttgattaaagaaggcattgcaaccctaaaaaccgttatcggttgtcgtgacgacatcatggtttacctcatgcacgcaggcttagaaccaaaaatggcctttaccattatggagcgtgtgcgtaagggattatggctaaaaatttctgaggaagaacgtaatggctatattgatgccatgcgagaaaacaatgtgcccgactggtacattgaatcgtgtggaaaaatcaagtacatgttccctaaagcccatgcggcagcttatgttttgatggcccttcgggtggcttatttcaaggtgcaccaccccattatgtattattgtgcttatttctctattcgtgcgaaggcttttgaattaaaaaccatgagtggtggtttagatgctgttaaagcaagaatggaagatattactataaaacgtaaaaataatgaagccaccaatgtggaaaatgacctctttacaaccttggagattgtcaacgaaatgttagaacgcggctttaagtttggcaaattagacctttacaaaagtgatgctatagaattccaaatcaaaggagatacccttatccctccatttatagcgctagaaggtctgggtgaaaacgtggccaagcaaatcgttaaagctcgtcaagaaggcgaattcctctctaaaatggaattgcgtaaacgaggcggggcatcgtcaacgctcgttgagaaaatggatgagatgggtattttaggaaatatgccagaagataatcaattaagtctttttgatgactttttc

SEQ ID NO: 2314 - protein, 1465 aa, Streptococcus pyogenes
MSDLFAKLMDQIEMPLDMRRSSAFSSADIIEVKVHSVSRLWEFHFAFAAVLPIATYRELHDRLIRTFEAADIKVTFDIQAAQVDYSDDLLQAYYQEAFEHAPCNSASFKSSFSKLKVTYEDDKLIIAAPGFVNNDHFRNNHLPNLVKQLEAFGFGILTIDMVSDQEMTEHLTKNFVSSRQALVKKAVQDNLEAQKSLEAMMPPVEEATPAPKFDYKERAAKRQAGFEKATITPMIEIETEENRIVFEGMVFDVERKTTRTGRHIINFKMTDYTSSFALQKWAKDDEELRKFDMIAKGAWLRVQGNIETNPFTKSLTMNVQQVKEIVRHERKDLMPEGQKRVELHAHTNMSTMDALPTVESLIDTAAKWGHKAIAITDHANVQSFPHGYHRARKAGIKAIFGLEANIVEDKVPISYEPVDMDLHEATYVVFDVETTGLSAMNNDLIQIAASKMFKGNIVEQFDEFIDPGHPLSAFTTELTGITDKHLQGAKPLVTVLKAFQDFCKDSILVAHNASFDVGFMNANYERHDLPKITQPVIDTLEFARNLYPEYKRHGLGPLTKRFQVSLDHHHMANYDAEATGRLLFIFLKDAREKHGIKNLLQLNTDLVAEDSYKKARIKHATIYVQNQVGLKNMFKLVSLSNIKYFEGVPRIPRTVLDAHREGLLLGTACSDGEVFDAVLTKGIDAAVDLARYYDFIEIMPPAIYQPLVVRELIKDQAGIEQVIRDLIEVGKRAKKPVLATGNVHYLEPEEEIYREIIVRSLGQGAMINRTIGRGEGAQPAPLPKAHFRTTNEMLDEFAFLGKDLAYQVVVQNTQDFADRIEEVEVVKGDLYTPYIDKAEETVAELTYQKAFEIYGNPLPDIIDLRIEKELTSILGNGFAVIYLASQMLVNRSNERGYLVGSRGSVGSSFVATMIGITEVNPMPPHYVCPSCQHSEFITDGSVGSGYDLPNKPCPKCGTPYQKDGQDIPFETFLGFDGDKVPDIDLNFSGDDQPSAHLDVRDIFGDEYAFRAGTVGTVAEKTAYGFVKGYERDYGKFYRDAEVDRLAAGAAGVKRTTGQHPGGIVVIPNYMDVYDFTPVQYPADDVTASWQTTHFNFHDIDENVLKLDILGHDDPTMIRKLQDLSGIDPITIPADDPGVMALFSGTEVLGVTPEQIGTPTGMLGIPEFGTNFVRGMVNETHPTTFAELLQLSGLSHGTDVWLGNAQDLIKEGIATLKTVIGCRDDIMVYLMHAGLEPKMAFTIMERVRKGLWLKISEEERNGYIDAMRENNVPDWYIESCGKIKYMFPKAHAAAYVLMALRVAYFKVHHPIMYYCAYFSIRAKAFELKTMSGGLDAVKARMEDITIKRKNNEATNVENDLFTTLEIVNEMLERGFKFGKLDLYKSDAIEFQIKGDTLIPPFIALEGLGENVAKQIVKARQEGEFLSKMELRKRGGASSTLVEKMDEMGILGNMPEDNQLSLFDDFF

SEQ ID NO: 2315 - DNA, 435 bp, Streptococcus agalactiae
ttgggagatgaaatgggaaactttaaaaattcagcggttaaatctatggttgtcatgcgaaaagcatttagaacaatagacggaaaagtctcagaatcatttaaagaatttgaattaacaccaactcagtttgcagttttggatgttctctatgctaaaggcacaatgaaaattggagaattgattgaaaatatgcttgctacatcaggtaatatgactgttgttattaaaaatatggaaaaaaagggatgggtattacgccattcttgtccgaatgataagagagcctttttggtgagtttaacaactgaaggagaagaagtgataaaaaaagctctaccagagcatattaaacgtgtagaagatgctttttcagtcttaacagaaacagagcaagaagacttgattaaccttttaaaaaaatttaaaaccttg

SEQ ID NO: 2316 - protein, 145 aa, Streptococcus agalactiae
MGDEMGNFKNSAVKSMVVMRKAFRTIDGKVSESFKEFELTPTQFAVLDVLYAKGTMKIGELIENMLATSGNMTVVIKNMEKKGWVLRHSCPNDKRAFLVSLTTEGEEVIKKALPEHIKRVEDAFSVLTETEQEDLINLLKKFKTL

SEQ ID NO: 2317 - DNA, 456 bp, Streptococcus pyogenes
gtgacataccgtataaagcgaggaaatcaaatgagtcatttagataagaacaccgctttgaaagccatggtggtgtttcgtaaagctcagcgaacgctagatgcttttggggctgatatttttaaaaaggcagatttaacagccacgcagttcagtgtgcttgaagtactatatactaaaggctgtatgcgaatcaatcacttgattgattctttgttagcgacttcggggaatatgactgttgtactaaataatatggaacgcaatggctggattagcaagtgcaaagacaaaacggataaaagagcctatgtggttaccttaacagataagggtactcgcttgattgaagctgttttgcctaaacacgtcgcacgggtggaagaagcctttgctgttttgactgaaaaagaacaactttgtctgattgaacttctcaaaaagttcaaacaatta

SEQ ID NO: 2318 - protein, 152 aa, Streptococcus pyogenes
VTYRIKRGNQMSHLDKNTALKAMVVFRKAQRTLDAFGADIFKKADLTATQFSVLEVLYTKGCMRINHLIDSLLATSGNMTVVLNNMERNGWISKCKDKTDKRAYVVTLTDKGTRLIEAVLPKHVARVEEAFAVLTEKEQLCLIELLKKFKQL

SEQ ID NO: 2319 - DNA, 612 bp, Streptococcus agalactiae
atgtcatttttggaagaattaaaaaaccgtcgctctatttacgctcttggtcgcaatacagaagtttctgatgagaaaatagtagagattattaaagaggcagttcgccaatccccatctgcttttaatagtcaaacttcccgtgttgtcattttattgaatgatgaagttactaagttctgggatgaattggttgctaatgatttggtagaaacaatgaaagtacaaggtgctccagagacagctattgctggaactaaggaaaaattagctagttttggagcttcaaagggaacagtactcttctttgaagatcaagatgttgtcaaatctcttcaagaacaattcgttctttatgcggataactttccagtttggtctgagcaatcaacaggtattgcctcagtaaatacttggacagccctttctgcagaacttggacttggtggtaatttacaacattacaatccagttattgatgcatcagtacaagctgtttatggtgttccagctagttggaaacttcgtggacaactaaattttggttcaatcgaagctgaaacaggagaaaaagaattcatgaatgatgatgaccgctttaaagtcatcgga

SEQ ID NO: 2320 - protein, 204 aa, Streptococcus agalactiae
MSFLEELKNRRSIYALGRNTEVSDEKIVEIIKEAVRQSPSAFNSQTSRVVILLNDEVTKFWDELVANDLVETMKVQGAPETAIAGTKEKLASFGASKGTVLFFEDQDVVKSLQEQFVLYADNFPVWSEQSTGIASVNTWTALSAELGLGGNLQHYNPVIDASVQAVYGVPASWKLRGQLNFGSIEAETGEKEFMNDDDRFKVIG

SEQ ID NO: 2321 - DNA, 1497 bp, Streptococcus agalactiae
ttgatgaataaaaaacataaattacttaaaaatatagaggaatttaagacgataacccaaaaaaggctaactgagagaggaaagttcccatatgataccgttcattctacgtttgaaattaaggatgaaaactttatcatggaaagattgaaatcatcagggttatctatgggtaaaccagttgattatatgggcgtaaatggtatccctatttacactaaaacattatctatagttaataagtttgcctttgaaaataattcaaaagattcttcatattcttcaaacattaatattagtgaagataaaataaaagaaaatgaccaaaaaattctagatttaatagttaaatctggagctaataatcaaaacttaacagatgaagaaaaagtaattgctttcactaaatatataggtgaaataactaattatgacaatgaagcttacagagctagaaatgtcgacacagaatattacagagcttcagatttattttctgtaacagaaagaaaacttgctatgtgcgttggctatagtgtaacagccgctagggcatttaatattatggggatacctagttatgtcgtttctggtaaaagtcctcaaggaatatctcatgcagctgtgagagcgtattataatagaagttggcatatcatagatatcacagccagtacatattggaaaaatggtaattacaaaacaacgtattccgattttattaaagaatactgtatagatggttatgacgtttatgatcccgcaaaaacaaataatagatttaaagttaagtatatggaatcaaatgaagcgtttgaaaattggatacataataatggaagcaaatctatgttatttattaatgaatctgcagctctaaaagataaaaaaccaaaagatgattttgtaccagtaacagaaaaagaaaaaaacgagctgatagataagtataaaaaattattgtcacagattcctgaaaacacacaaaatccaggagaaaaaaacataagagattatttgaaaaatgaatatgaagaaatattaaagaaagataatttatttgagcatgaacatgcagaatttaaagaaagtctaaatttaaatgaatcattctacctacaattaaagaaagaagaaatgaaaccgagtgataatctcaaaaaagaagaaaaaccaagagaaaattcagtaaaagagagggagactccagctgaaaacaatgattttgtttcagtaacagaaaaaaacaacttgattgataaatataaagaattattatcaaaaatcccagagaatacacaaaatcctggggaaaagaatatacgaaattatctagagaaagaatatgaagaactactacaaaaagataaattattcaagcatgagtacacagagtttacaaaaagtctaaatttgaatgaaacattctattcacaattaaaagaaggagaaatgaaactaagtgaaaatcccgaaaaaggagaaacgaacacgaat

SEQ ID NO: 2322 - protein, 499 aa, Streptococcus agalactiae
MMNKKHKLLKNIEEFKTITQKRLTERGKFPYDTVHSTFEIKDENFIMERLKSSGLSMGKPVDYMGVNGIPIYTKTLSIVNKFAFENNSKDSSYSSNINISEDKIKENDQKILDLIVKSGANNQNLTDEEKVIAFTKYIGEITNYDNEAYRARNVDTEYYRASDLFSVTERKLAMCVGYSVTAARAFNIMGIPSYVVSGKSPQGISHAAVRAYYNRSWHIIDITASTYWKNGNYKTTYSDFIKEYCIDGYDVYDPAKTNNRFKVKYMESNEAFENWIHNNGSKSMLFINESAALKDKKPKDDFVPVTEKEKNELIDKYKKLLSQIPENTQNPGEKNIRDYLKNEYEEILKKDNLFEHEHAEFKESLNLNESFYLQLKKEEMKPSDNLKKEEKPRENSVKERETPAENNDFVSVTEKNNLIDKYKELLSKIPENTQNPGEKNIRNYLEKEYEELLQKDKLFKHEYTEFTKSLNLNETFYSQLKEGEMKLSENPEKGETNTN

SEQ ID NO: 2323 - DNA, 96 bp, Streptococcus agalactiae
gtgtctaaaaaacgactattaatgatatcactcaactatcaaaacttcaaaataacggtacactcaaaagctgagacgcagaaaaaatacttctgt

SEQ ID NO: 2324 - protein, 32 aa, Streptococcus agalactiae
MSKKRLLMISLNYQNFKITVHSKAETQKKYFC

SEQ ID NO: 2325 - DNA, 636 bp, Streptococcus agalactiae
atgataaaatcaaagattttgttgcaattaatgcaaggaaaaatagttgctgtcattcgtggaaatagccaagaagaagcttttcaagctgctcaagcatgcataaaaggtggtatttctgctatcgaaatcgcctatactaatagcaaagctagccaagtcattgaacaactagtcacacaatatactaaccaagaacaagttgtcgttggggcaggaactgttctagactcagaaactgcccgaatggctattttagcaggagcaaagtttattgtatctcccgcatttaatctacagactgctaaactatgtaatcgttatgctattccttatttaccaggttgcatgaccttatcagaggtaacaacagcacttgaagccggttgcgaaataattaaaatattcccaggaggtactctaggaacatctttcatctcatcactaaaggcacctttacctcaagtacaaattatggtgactggtggggtaaatctcacaaatgccaaagactggtttctatctggagtaacagccattggtattggtggagagttcaataaactagcagctttgggggaatttgataaaatcacagaaatggctaaacaatacaaaatacagctaaatctgaat

SEQ ID NO: 2326 - protein, 212 aa, Streptococcus agalactiae
MIKSKILLQLMQGKIVAVIRGNSQEEAFQAAQACIKGGISAIEIAYTNSKASQVIEQLVTQYTNQEQVVVGAGTVLDSETARMAILAGAKFIVSPAFNLQTAKLCNRYAIPYLPGCMTLSEVTTALEAGCEIIKIFPGGTLGTSFISSLKAPLPQVQIMVTGGVNLTNAKDWFLSGVTAIGIGGEFNKLAALGEFDKITEMAKQYKIQLNLN

SEQ ID NO: 2327 - DNA, 1005 bp, Streptococcus agalactiae
atgtctaagattctttttttcggtgaacctctcattcgcatcactccaaaagaaaatgactattttgcagatagtatctcaactaaactattctatggtggctctgaagttaataccgcaagagctctacaaggctttgggcaagatactaaactcctctcagccttacccaataatcccataggtaatagttttcttcaatttttaaaagcacagggtattgatactcattctattcagtgggttggagaacgtgttgggttatattttttagaagattcctttgcttgcagaaaaggtgaggtggtctacgaccgcgatcatagtagtttacatgactttaggataaatcaaattgatttcgatcaattatttgaaggagtttctctctttcattttagtggtattacactatcattggatgagtctatccaagagataacactgcttcttttaaaagaagctaaaaaaagagagataacaatctccttagatctcaattttcgcagtaaactaatttctcctaaaaatgccaaaatccttttttctcagttcgctacctttgcggatatttgttttggtattgaacctcttatggttgactcacaggacactaccttcttcaatcgcgatgaagctacaatagaggacgtcaaagaacgaatgatttcgcttataaatcactttgactttcaagtcattttccatactaaacgtctacaggatgaatggggacgaaaccactaccaagcttacatagcaaatcgtaaacaagagtttgtcacttcaaaagaaatcaccacagctgtaaaccagagaattggaagcggagatgcttttgtggcgggagcgctatatcaactacttcagcactcagacagcaagacagtcattgatttcgctgtcgctagtgcatctttaaaatgtgctttggaaggggacaatatgtttgagaccgttaccgcagttaacaaagtactaaatcaatcgaaagacattattcgt

SEQ ID NO: 2328 - protein, 335 aa, Streptococcus agalactiae
MSKILFFGEPLIRITPKENDYFADSISTKLFYGGSEVNTARALQGFGQDTKLLSALPNNPIGNSFLQFLKAQGIDTHSIQWVGERVGLYFLEDSFACRKGEVVYDRDHSSLHDFRINQIDFDQLFEGVSLFHFSGITLSLDESIQEITLLLLKEAKKREITISLDLNFRSKLISPKNAKILFSQFATFADICFGIEPLMVDSQDTTFFNRDEATIEDVKERMISLINHFDFQVIFHTKRLQDEWGRNHYQAYIANRKQEFVTSKEITTAVNQRIGSGDAFVAGALYQLLQHSDSKTVIDFAVASASLKCALEGDNMFETVTAVNKVLNQSKDIIR

SEQ ID NO: 2329 - DNA, 636 bp, Streptococcus agalactiae
atgaaaattgcattaatcaacgaaaatagccaagcaagtaaaaatactattatctacaaagaattgaaagcggtttctgatgaaaaaggatttgaagttttcaactacggaatgtatggcaaagaagaagaaagccagctaacttatgtacaaaatggtttactgactgctattttacttaatagcggtgctgcagattttgttattacaggctgtgggacaggaattggagcgatgcttgcttgtaatagttttcctggcgtagtctgtggattcgctgctgatcctgtcgacgcttacttattctctcaagtaaacggaggaaatgctctttcccttccttttgctaaaggatttggttggggagctgaattgaatctgaggtatttatttgaacgtcttttcgaagatgaaaaaggagggggataccctaaagagagggctgtacctgagcaacgcaatgcacgtatccttagcgaaataaaacagattacttacagagatttactctctgttttaaaagaaattgatcaagatttcttaaaggaaactatttctggggagcatttccaagaatatttcttcgctaattgccaaaatcaaaatatagcagactacttgaaatctgtcttagac

SEQ ID NO: 2330 - protein, 212 aa, Streptococcus agalactiae
MKIALINENSQASKNTIIYKELKAVSDEKGFEVFNYGMYGKEEESQLTYVQNGLLTAILLNSGAADFVITGCGTGIGAMLACNSFPGVVCGFAADPVDAYLFSQVNGGNALSLPFAKGFGWGAELNLRYLFERLFEDEKGGGYPKERAVPEQRNARILSEIKQITYRDLLSVLKEIDQDFLKETISGEHFQEYFFANCQNQNIADYLKSVLD

SEQ ID NO: 2331 - DNA, 639 bp, Streptococcus pyogenes
atgaaaattgcattaattaatgaaaatagccaagcggctaaaaatggtatcatttacgatgcccttaccacagtgacagataaacacggctaccaagtctttaactatggtatgtatggcacagaaggtgaaagccagttgacctatgttcaaaatggactcttagcttctattttattgaccactaaggcggctgattttgtggtgactggttgtgggacaggtgttggagctatgttggccttgaacagcttcccaggtgttacctgtggttttgcgagtgagccaacagaagcttatctcttttctcaaatcaatggtggtaatgccttgtccattccttttgccaaaggttttggttggggagcagagttgaatttgaccttaatatttgaacgcctctttgcagaaccaatgggtggtggttaccctaaagagcgagctattcctgaacagcggaatgcacgtattttaagtgatctgaaaaaaattacttacagagatttgttggcaattgtcaaagacatcgaccaagatttcctcaaagaaacgatttctggcgctcatttccaagagtacttctttgccaatgcggagccgtcagaattagtcacttatttgaaatcagtacttgaacag

SEQ ID NO: 2332 - protein, 213 aa, Streptococcus pyogenes
MKIALINENSQAAKNGIIYDALTTVTDKHGYQVFNYGMYGTEGESQLTYVQNGLLASILLTTKAADFVVTGCGTGVGAMLALNSFPGVTCGFASEPTEAYLFSQINGGNALSIPFAKGFGWGAELNLTLIFERLFAEPMGGGYPKERAIPEQRNARILSDLKKITYRDLLAIVKDIDQDFLKETISGAHFQEYFFANAEPSELVTYLKSVLEQ

SEQ ID NO: 2333 - DNA, 93 bp, Streptococcus agalactiae
atgcctttgtcaacgagttcttgcttaatatcattgaagacaatagttgctccagctctagcaaaagcagttgctattgaaaaaccaatgccg

SEQ ID NO: 2334 - protein, 31 aa, Streptococcus agalactiae
MPLSTSSCLISLKTIVAPALAKAVAIEKPMP

SEQ ID NO: 2335 - DNA, 810 bp, Streptococcus agalactiae
atgactgaacaattcttaaaagacaacttttcactagaaggtaaagtcgccttaataacaggcgcttcttacggcattggtttttcaatagcaactgcttttgctagagctggagcaactattgtcttcaatgatattaagcaagaactcgttgacaaaggcatctccgcctataaaaaacttggcattaaggcccatggctatgtttgtgatgttacagatgaagatggaatcaacgaaatggtggacaaaatttctcaagatgttggggtaattgatattctagttaacaacgcaggtattataaaacgcacccctatgctagagatgagcgctgcagattttcgacaagttattgatattgatttgaatgctccctttatcgtatcaaaagcggtattacctggaatgatccaaaaaggacatggtaaaatcatcaatatttgctccatgatgagtgagcttggacgcgaaacagttgctgcctatgctgctgccaaagggggacttaaaatgttaaccaagaacatcgcttctgaatacggttctgctaacatccaatgtaacggtatcgggcccggctatattgccacaccacaaacagctccccttcgtgaacgtcaagatgatggttcacgtcatccattcgaccaatttatcatcgctaaaacacctgccgctcgctggggtgaggcagaagatttaggtgcaccagctatcttccttgctagtgatgcatcaaactttatcaatggtcacatactctatgtagatggcggtattttagcttacatcggtaaacaacctcaa

SEQ ID NO: 2336 - protein, 270 aa, Streptococcus agalactiae
MTEQFLKDNFSLEGKVALITGASYGIGFSIATAFARAGATIVFNDIKQELVDKGISAYKKLGIKAHGYVCDVTDEDGINEMVDKISQDVGVIDILVNNAGIIKRTPMLEMSAADFRQVIDIDLNAPFIVSKAVLPGMIQKGHGKIINICSMMSELGRETVAAYAAAKGGLKMLTKNIASEYGSANIQCNGIGPGYIATPQTAPLRERQDDGSRHPFDQFIIAKTPAARWGEAEDLGAPAIFLASDASNFINGHILYVDGGILAYIGKQPQ

SEQ ID NO: 2337 - DNA, 432 bp, Streptococcus agalactiae
atgataaaaattattattgtagcacacggcaactttccagatggtattttaagctctttagaacttattgctgggcatcaggaatatgttgttggtattaactttattgcaggcatgtcttctaatgatgttagagttgctttgcaaagagaggttatcgatttcaaagaaattttagtattgactgatttgctaggtgggactcctttcaatgtttcttccgccttatcagtagaatatacagataaaaagataaaagttttatcgggcttgaacctttcaatgttaatggaagctgttttatctagaacgatgtttgaacatgtagatgatcttgttgataaagttataacatcatctcatgaaggaattgttgatttttctacttgccttgctacacaaactgcagaagcaacttttgagggaggcatt

SEQ ID NO: 2338 - protein, 144 aa, Streptococcus agalactiae
MIKIIIVAHGNFPDGILSSLELIAGHQEYVVGINFIAGMSSNDVRVALQREVIDFKEILVLTDLLGGTPFNVSSALSVEYTDKKIKVLSGLNLSMLMEAVLSRTMFEHVDDLVDKVITSSHEGIVDFSTCLATQTAEATFEGGI

SEQ ID NO: 2339 - DNA, 435 bp, Streptococcus pyogenes
atgattgctattatcgttatgggacatggacattttgcgagtggtattgtttcagccttagaattgatcgcaggcaaacaagaaaaggtaactgcaattgattttactactgagatgaccgccgctgatgtgcaggaccaattatctcgtgctttaatcccagaagaggaaaccttagttctttgtgaccttctaggaggtaccccttttaaagtcgctgcaaccttaatggaatctcttccaaacacgacgtgtaatgttctttctggccttaacttagccatgctgattgaagctagttttgcaagacaaacagcagcttcttttgacgacttagtatcaggacttataacatgttctaaagaaggcattgttgactggaaaactctttctcagcaagaagacggtgcgacagacgatgagttaggaggcatt

SEQ ID NO: 2340 - protein, 145 aa, Streptococcus pyogenes
MIAIIVMGHGHFASGIVSALELIAGKQEKVTAIDFTTEMTAADVQDQLSRALIPEEETLVLCDLLGGTPFKVAATLMESLPNTTCNVLSGLNLAMLIEASFARQTAASFDDLVSGLITCSKEGIVDWKTLSQQEDGATDDELGGI

SEQ ID NO: 2341 - DNA, 1194 bp, Streptococcus agalactiae
atgatgaaaataaaaccggtcaaggttgagtcaattgaaaatccaaagcgttttttaaacagtagattattaactaagattgaagttgaggaagcgattgaaaaagccttgaagcaactttatattaatattgattactttggtgaagagtatccaacgcctgcaacattcaataatatttataaagttatggataacacagaatggacaaatggtttttggacagggtgcttgtggttagcttatgagtataatcaggataaaaagttaaaaaacatagcccacaaaaatgtattgtcatttctaaatcgtattaataatcgtatagcattagatcaccacgacttaggatttctttacacaccatcttgtacagcagaatatcgtatcaatggtgatgttaaagctttagaagccactataaaagctgcagataaattgatggagcgctatcaagaaaaaggtggatttattcaggcttggggagaactcgggtataaggaacactatcgcttaattatcgattgcttacttaatatccaactcttattttttgcttatgaacagacaggtgatgaaaagtatagacaagttgcggtgaatcacttctacgcttcagctaacaatgtggtgcgtgatgattcttctgcttttcatactttttatttcgacccagaaactggagaaccgttaaaaggtgtcacacgacagggttatagtgatgagtcatcttgggcaagagggcaagcatggggcatctacggtattccgcttagttaccggaaaatgaaagattatcagcagattatcctttttaaaggtatgacaaactattttctaaatcgtttacctgaagacaaggtatcctattgggaccttatttttacggatggctcgggccagcctagagatacatccgcaacagcaacggctgtgtgtggaattcatgagatgcttaaatatttaccagaagtagatcctgataaagagacatacaaatatgctatgcatacaatgcttcgtagtctgattgaacagtatagtaataatgaacttatagcaggacgtcctcttctattgcacggtgtgtattcgtggcattcaggtaaaggagtagatgaaggtaatatttggggagattattattacttagaagccttaataagattctataaagactgggaactttattgg

SEQ ID NO: 2342 - protein, 398 aa, Streptococcus agalactiae
MMKIKPVKVESIENPKRFLNSRLLTKIEVEEAIEKALKQLYINIDYFGEEYPTPATFNNIYKVMDNTEWTNGFWTGCLWLAYEYNQDKKLKNIAHKNVLSFLNRINNRIALDHHDLGFLYTPSCTAEYRINGDVKALEATIKAADKLMERYQEKGGFIQAWGELGYKEHYRLIIDCLLNIQLLFFAYEQTGDEKYRQVAVNHFYASANNVVRDDSSAFHTFYFDPETGEPLKGVTRQGYSDESSWARGQAWGIYGIPLSYRKMKDYQQIILFKGMTNYFLNRLPEDKVSYWDLIFTDGSGQPRDTSATATAVCGIHEMLKYLPEVDPDKETYKYAMHTMLRSLIEQYSNNELIAGRPLLLHGVYSWHSGKGVDEGNIWGDYYYLEALIRFYKDWELYW

SEQ ID NO: 2343 - DNA, 1197 bp, Streptococcus pyogenes
atggcacgacctttaaaaaccattgctcttgaacctatcaagcagcctgaacgatttaccaaagaagatttcctaagccaagaagacattactcaggcccttgacttagccctcaaacaagttcggcttaatatggactattttaaagaagactttccaacgccagctaccaaagataaccaatatgccattatggataatacagaatggaccaatgccttttggacaggttgcctttggttagcttacgaatacagtggggatgatgctattaaagctctggctcaagcaaatgacctttctttcctagatcgagtaacaagagacattgagctagatcaccatgatttgggctttctttacaccccttcttgcatggctgagtggaaacttttaaaaacacctgagtctagagaagctgctttgaaagcagccgacaaattagtccaacgctatcaagacaaaggcggctttattcaggcctggggagaactgggtaaaaaagaagattaccgtttaatcattgattgtctcctaaacatccaattactcttttttgctagccaagaaactggagacaaccgttaccgtgacatggcgatcaatcatttctacgcctcagccaatcatgtcatccgagatgacgcctctgcttaccacaccttctactttgatccagaaacaggtgatcctgttaaaggggtcacccgacaaggttatagcgatgattctgcttgggccagagggcaagcttggggcatttatggtattcctttgacctatcgtttcctaaaagaacctgaactcattcaactcttcaagggcatgacccattatttcttgaaccgtcttcctaaagaccaggtgtcctactgggatttaatttttggagatggtagcgagcagtctcgtgatagttcagcaaccgccattgctgtgtgtggtattcatgaaatgttaaaaaccttaccagatcatgatcctgataaaaaaacatatgaagctgccatgcacagcatgctaagagccttgattaaggattatgctaacaaagatctcaagcctggtgctcctctactgcttcacggagtctattcttggcactctggaaaaggggttgacgagggaaatatctggggagactattactatcttgaagctctgcttcgtttctacaaagactggaacccttactgg

SEQ ID NO: 2344 - protein, 399 aa, Streptococcus pyogenes
MARPLKTIALEPIKQPERFTKEDFLSQEDITQALDLALKQVRLNMDYFKEDFPTPATKDNQYAIMDNTEWTNAFWTGCLWLAYEYSGDDAIKALAQANDLSFLDRVTRDIELDHHDLGFLYTPSCMAEWKLLKTPESREAALKAADKLVQRYQDKGGFIQAWGELGKKEDYRLIIDCLLNIQLLFFASQETGDNRYRDMAINHFYASANHVIRDDASAYHTFYFDPETGDPVKGVTRQGYSDDSAWARGQAWGIYGIPLTYRFLKEPELIQLFKGMTHYFLNRLPKDQVSYWDLIFGDGSEQSRDSSATAIAVCGIHEMLKTLPDHDPDKKTYEAAMHSMLRALIKDYANKDLKPGAPLLLHGVYSWHSGKGVDEGNIWGDYYYLEALLRFYKDWNPYW

SEQ ID NO: 2345 - DNA, 492 bp, Streptococcus agalactiae
atggcagcaggaccaaatattgtaatgacacgtgttgatgagcgtcttattcatggacaaggacaactttgggtgaaatttttaagttgtaatactgttattgtggcaaatgatgatgtctccaaagatcatcttcaacaaacgttaatgaagacggtggtgccagaatcaatagcattgcgattttttgatattcaaaaagttattgatattattcacaaggccaacccagcacagacgatttttataattgttaaagatttgaaagatgtctatagacttgtagcagggggcgtcccaattaaagagattaatattggaaatattcataatggagaaggtaaagagcaggtaagtcgctctatcttcttagggatgaaggataaagagataattagaaaattaaaccaagaatatcacattgcatttaatactaaaacaactccaacaggtaacgatggtgctgtggaagttaatattttagattatatt

SEQ ID NO: 2346 - protein, 164 aa, Streptococcus agalactiae
MAAGPNIVMTRVDERLIHGQGQLWVKFLSCNTVIVANDDVSKDHLQQTLMKTVVPESIALRFFDIQKVIDIIHKANPAQTIFIIVKDLKDVYRLVAGGVPIKEINIGNIHNGEGKEQVSRSIFLGMKDKEIIRKLNQEYHIAFNTKTTPTGNDGAVEVNILDYI

SEQ ID NO: 2347 - DNA, 486 bp, Streptococcus pyogenes
atgacacaaccaaacattatcatgacgcgagttgatgagcgtttgattcacggacaggggcaattatgggtcaaattcctcaactgcaacaccgttatcgtcgctaacgatgcggtttctgaagataagattcaacaatccctcatgaaaacagttattccatccagtattgccattcgttttttctccattcaaaaagtgattgacatcattcataaagcaagtcctgctcaaagtatcttcatcgtggtcaaagatttgcaagatgccaaactcctagttgaagggggtgttcccatcacagaaatcaatatcggtaatattcataaaactgatgataaggttgcgattacccagtttatttcgctgggagaaacagacaagtctgctattcgttgcttagcccatgaccaccacgtggtttttaacaccaaaacaactccagctggcaatagcgcctctgacgttgacatcttagattatatt

SEQ ID NO: 2348 - protein, 162 aa, Streptococcus agalactiae
MTQPNIIMTRVDERLIHGQGQLWVKFLNCNTVIVANDAVSEDKIQQSLMKTVIPSSIAIRFFSIQKVIDIIHKASPAQSIFIVVKDLQDAKLLVEGGVPITEINIGNIHKTDDKVAITQFISLGETDKSAIRCLAHDHHVVFNTKTTPAGNSASDVDILDYI

SEQ ID NO: 2349 - DNA, 864 bp, Streptococcus agalactiae
atggatattagtattcttcaggctgtcttaattggactgtggacggctttctgttttagtggcatgttgcttggcctctatacaaatcgttgtatcgttctctctctaggcgttggtgttattttaggagatattcaaacagctttggcagttggagcaatatctgaactggcttacatgggatttggtgtgggagcgggagggacagttcctccaaacccaatcggtcctgggatttttggaactttgatggctattacaacagctggaactaaaggaaaaatcacaccggaagctgctcttgcattatcaaccccaattgcagttggtattcaatttcttcaaacagcaacttatactgcttttgcaggggcgcctgaaacagctaaaaaagctttgcaagcaggtaatttccgaggatttaaaattgcagcaaatggtacaatttgggcattcgctggattgggatttggtttaggagtactgggtgctctttcaacgcaaactttgacagatttatttgctctcattccccctgttttgcttaatggtctaaccttagctgggaaaatgcttcctgcaattggttttgcgatgattctctctgtaatggctaaaaaagaactcattccttatatcctacttggatatgttctagctgtttattttggtttgccagttctaactccaacagcaaatggagacggagttttaacatcagtggctactaacagtgtgcttggggttccaactatcggggtagctataattgcaacaatatttgctttgcttgatattttcagaaaaccagctgcacctactaaagaaactaagacagaaggagacaaccaagatgactggatc

SEQ ID NO: 2350 - protein, 288 aa, Streptococcus agalactiae
MDISILQAVLIGLWTAFCFSGMLLGLYTNRCIVLSLGVGVILGDIQTALAVGAISELAYMGFGVGAGGTVPPNPIGPGIFGTLMAITTAGTKGKITPEAALALSTPIAVGIQFLQTATYTAFAGAPETAKKALQAGNFRGFKIAANGTIWAFAGLGFGLGVLGALSTQTLTDLFALIPPVLLNGLTLAGKMLPAIGFAMILSVMAKKELIPYILLGYVLAVYFGLPVLTPTANGDGVLTSVATNSVLGVPTIGVAIIATIFALLDIFRKPAAPTKETKTEGDNQDDWI

SEQ ID NO: 2351 - DNA, 780 bp, Streptococcus pyogenes
atggatatcaatttgttacaggcacttttaattggtctttggacagccttttgtttcagcggaatgttacttggcatctacaccaaccgttgtattattctgtcttttggtgtagggattatcttaggtgacttgccaactgcacttagcatgggagctatctccgaattagcttatatgggatttggagtgggtgccggtggtaccgttcctcctaatcctatcggccctggtatctttggtaccttgatggctattaccagtgctggtaaagtcaccccagaagcggcactagccttatcaacaccaatcgcagttgccatccaattccttcaaacattcgcctatacagcttttgctggcgctcccgaaaccgctaaaaaacaattgcaaaaaggcaatattagaggcttcaaattcgctgccaacggcactatctgggctttcgcttttatcggattaggccttggtttattaggtgccttgtcaatggatactctccttcacttggttgattatatcccacctgtcttgctcaatggattgactgtcgctggtaaaatgttacctgctatcggatttgccatgatcttatctgttatggccaagaaagaattgattccttttgtactaattggttatgtttgtgcagcctacctccaaattccaaccattggtatcgccattattggtatcattttcgccttgaatgaattttacaacaaacctaaacaagtcgatgcaacaactgtccaaggaggccaacaagatgactggatc

SEQ ID NO: 2352 - protein, 260 aa, Streptococcus pyogenes
MDINLLQALLIGLWTAFCFSGMLLGIYTNRCIILSFGVGIILGDLPTALSMGAISELAYMGFGVGAGGTVPPNPIGPGIFGTLMAITSAGKVTPEAALALSTPIAVAIQFLQTFAYTAFAGAPETAKKQLQKGNIRGFKFAANGTIWAFAFIGLGLGLLGALSMDTLLHLVDYIPPVLLNGLTVAGKMLPAIGFAMILSVMAKKELIPFVLIGYVCAAYLQIPTIGIAIIGIIFALNEFYNKPKQVDATTVQGGQQDDWI

SEQ ID NO: 2353 - DNA, 255 bp, Streptococcus agalactiae
atgccagtaactaatttaattcccgttaaaatagtattcatagccacaaagaacagaatcggtcccatcaccaaaccatctgtcgctaaagaggctgcaatcgttgagaacaagggtgctaagcaaaattgtgataaagaatcaccgatacctgcaagaggccccataagcgccatcttaataccgcgaatttcttcttctggccgctcattatcaagcattgctaaatgtaagctagttacaaaaggtaagaaa

SEQ ID NO: 2354 - protein, 85 aa, Streptococcus agalactiae
MPVTNLIPVKIVFIATKNRIGPITKPSVAKEAAIVENKGAKQNCDKESPIPARGPISAILIPRISSSGRSLSSIAKCKLVTKGKK

SEQ ID NO: 2355 - DNA, 885 bp, Streptococcus agalactiae
ttgctttgcttgatattttcagaaaaccagctgcacctactaaagaaactaagacagaaggagacaaccaagatgactggatctaaaaaattagcaaaaagtgattacactaaaacagctttacgtgccttttatttacaaaatggctttaattacagtaactatcaaggtcttggttatgctaatgtcatatatccagctctcaaaaaatattatggagatgacaaaaaagctttagcgggagctctagaagaaaatgtggagttttacaatacaaaccctcatttcttaccttttgtaactagcttacatttagcaatgcttgataatgagcggccagaagaagaaattcgcggtattaagatggcgcttatggggcctcttgcaggtatcggtgattctttatcacaattttgcttagcacccttgttctcaacgattgcagcctctttagcgacagatggtttggtgatgggaccgattctgttctttgtggctatgaatactattttaacgggaattaaattagttactggcatgtatggttatcgtcttgggaccagttttattgataaattgagtgaacaaatgtcagttatctcacgggcagctaatatcgttggtgtaacggtcatctcaagtttagctgcaacacaagttaagcttacaatcccttacacttttgctccagaaaaagtaactagtacaacgcaaaagattgttactgtccaaggtatgcttgataaaattgcaccagctctacttccagcactctacactttccttatgttttaccttattaaaaataaaaaatggacaacttataagttagttatccttacagttattattggtatccttggtagctggttaggtattttagct

SEQ ID NO: 2356 - protein, 295 aa, Streptococcus agalactiae
MLCLIFSENQLHLLKKLRQKETTKMTGSKKLAKSDYTKTALRAFYLQNGFNYSNYQGLGYANVIYPALKKYYGDDKKALAGALEENVEFYNTNPHFLPFVTSLHLAMLDNERPEEEIRGIKMALMGPLAGIGDSLSQFCLAPLFSTIAASLATDGLVMGPILFFVAMNTILTGIKLVTGMYGYRLGTSFIDKLSEQMSVISRAANIVGVTVISSLAATQVKLTIPYTFAPEKVTSTTQKIVTVQGMLDKIAPALLPALYTFLMFYLIKNKKWTTYKLVILTVIIGILGSWLGILA

SEQ ID NO: 2357 - DNA, 879 bp, Streptococcus pyogenes
atgaattttacaacaaacctaaacaagtcgatgcaacaactgtccaaggaggccaacaagatgactggatctaataaattaaccaagaaagattacctcaaaacagctctgagagctttcttcctacaaaatgggtttaattacaataattaccaaggtatcggatacgccaatgtcatctatcctgccttgaaaaaacattttggcaatgataaaaagggcttatatcaagctttagaagataactgtgagttttacaatactaatcctcacttccttcctttcatcaccagtctgcacttggtcatgttagaaaataatcgccctgaagaagaaacccgaaacatcaaaatggcacttatggggcctttagctggtatcggtgactccttatcacaattttgcttggcgccactcttttcaacgattgcagcttccttagctagtgatggtctggttttgggaccaatcctcttcttcctagccatgaatattatcctaaccgctattaaaattggttctggactctatggctacaaggtcggcacaagctttattgataaattaagtgaacaaatggcggttgtgtcgcgcatggcaaatattgtcggcgttaccgttatcgctggactagcagctacttctgttaaaattactgttcccattacttttgccgctggcaaggtggatgcggccaatacagcacaaaaatttgtgactattcaaggaatgcttgataagattgcccctgcacttttaccagctctctttaccttactcatgtattaccttattaaaaacaaaaaatggacaacctacaaattggtcattttaactgttatcattggtgttattggcagttggttgggtattttagct

SEQ ID NO: 2358 - protein, 293 aa, Streptococcus pyogenes
MNFTTNLNKSMQQLSKEANKMTGSNKLTKKDYLKTALRAFFLQNGFNYNNYQGIGYANVIYPALKKHFGNDKKGLYQALEDNCEFYNTNPHFLPFITSLHLVMLENNRPEEETRNIKMALMGPLAGIGDSLSQFCLAPLFSTIAASLASDGLVLGPILFFLAMNIILTAIKIGSGLYGYKVGTSFIDKLSEQMAVVSRMANIVGVTVIAGLAATSVKITVPITFAAGKVDAANTAQKFVTIQGMLDKIAPALLPALFTLLMYYLIKNKKWTTYKLVILTVIIGVIGSWLGILA

SEQ ID NO: 2359 - DNA, 1902 bp, Streptococcus agalactiae
atgaaagatcgcttatataataaattcaaggattttgatagggaattttgtcaaaagtatattaaaacataccaatctaatgcctatcaagaaatgaaagcctctgttaatttgatgatgaggaacacttttgtatttaatgataattgggatatggaaccttgttctaaagcatattgtcttgatcctttggagtgggataagccagtaacagatgatccagaatggttgtatatgctaaatcgtcaaacttatctttttaaattcctggtggtctacattgttgaaggcgataagtcttaccttagacaaatgaaatattttatgtaccattggattgattgtcaatttacactaaagccagaaggggcggtaagtcgtactattgacactgggatacgttgcatgtcatggctcaaagttttgatttttttagattattttggattaataacagaaactaaaaaaattaaactattaactagtttacgggagcagataacttatatgagggactattatcgtgaaaaagatagtctaagtaactggggaattttacaaacaacagcaatattggcgtgtttatactattatgaagatgaattaaatctacctgaaattcagagttttgctgaagaagaattattacttcaaatcaagcttcaaattttagatgacgggagccagtatgaacaatcaattatgtatcatgtagaagtcttgaagtccttaatggaactagttatccttgcgcctaaatattatctaccattagaagaaactattgaaaaaatggttacctatctaattgctatgactggtccggattattgtcaactagctataggggacagtgatgtgaccgatactcgtgatattctaactttggcaacacttgtgttgaaatcttctaaaacaaaatcattttcttttgataatgttaatttagaaactttacttttgtttgggaagccatcaatttatctttttgaagaaataccgcgtgcgacaataggagagtctgcttatctttttccagattctggtcatgtgtgtttacgtgatgataggcgttatatattttttaagaacggtccatttggtagcgctcatactcatagtgataataatagtgtttgtctctatgataaaaagaaacctattttcattgatgcaggaagatatacttacaaagaagaacaactaaggtatgattttaaacgttcgactagtcattcaacatgtacccttgatgggcaacccttagaaatgatcaaggactcttggacatacaattcttatccaaaatgtgactattgtcagttgacttcaaaggataggtaccatttagtcgaaggacaactacatgtccaaagagcttctgatatctattaccataagcgatggttgttaactttaccgcaggccattaccttagttattgataaggtgagttgtccaggagagcatgtcttaacaaatcaatatattttagatgatcaggtcatttatgaaaatgggtttgttaatgacttgaaattagtaagtcctacgacctttaatctagaagattgccttatttctaagcggtataatcaattgacagaaagtcataaattagttaagaaaataaaatttgttgatgaggtgatggattataccttgatagttgatcggaactgtcaggtgaaatatgttcctttagtgcaaacgaacagtcataaggaactaagtaatagcattgcatttgatattaggtctcaagactttcattatttaattggagtgcttatggatgatattatctttggggataaactctatttgatgcaagggataaaatgcaaaggaaaagtcattgtatatgataaaaataatggcaaaatgagtcgtttaaaaaat

SEQ ID NO: 2360 - protein, 634 aa, Streptococcus agalactiae
MKDRLYNKFKDFDREFCQKYIKTYQSNAYQEMKASVNLMMRNTFVFNDNWDMEPCSKAYCLDPLEWDKPVTDDPEWLYMLNRQTYLFKFLVVYIVEGDKSYLRQMKYFMYHWIDCQFTLKPEGAVSRTIDTGIRCMSWLKVLIFLDYFGLITETKKIKLLTSLREQITYMRDYYREKDSLSNWGILQTTAILACLYYYEDELNLPEIQSFAEEELLLQIKLQILDDGSQYEQSIMYHVEVLKSLMELVILAPKYYLPLEETIEKMVTYLIAMTGPDYCQLAIGDSDVTDTRDILTLATLVLKSSKTKSFSFDNVNLETLLLFGKPSIYLFEEIPRATIGESAYLFPDSGHVCLRDDRRYIFFKNGPFGSAHTHSDNNSVCLYDKKKPIFIDAGRYTYKEEQLRYDFKRSTSHSTCTLDGQPLEMIKDSWTYNSYPKCDYCQLTSKDRYHLVEGQLHVQRASDIYYHKRWLLTLPQAITLVIDKVSCPGEHVLTNQYILDDQVIYENGFVNDLKLVSPTTFNLEDCLISKRYNQLTESHKLVKKIKFVDEVMDYTLIVDRNCQVKYVPLVQTNSHKELSNSIAFDIRSQDFHYLIGVLMDDIIFGDKLYLMQGIKCKGKVIVYDKNNGKMSRLKN

SEQ ID NO: 2361 - DNA, 1923 bp, Streptococcus pyogenes
ttggaaaggaaatgtcctatgttttttgccttcgcacgctttaaagaaacagtcaatccagacttttgcaggaattacctgctagactatcagactgacagctatgctgatcaaaaaagaatagctgacctactcttaaccaatacctttttatttgaagataattgggatatggagccctgccacatcccttaccacttagatcccattacttggcaagaggctgtcatagatgatcctgagtggaactttatgttaaatcgacagacctatctccaaaaattaatcctcgtctaccttgttgaaagagatgaacggtatctcttaacagctaaaggtttcatcctcaattggattgaatcagctattcctttagaccctaaggggttagctactagaaccttagatactggcatccgttgttttgcttgggtcaaatgtttgatttaccttaatctttttaacgccttaaccaagcaagaggaaagcctcatcctagcttccctggaaaaacaacttcaatttctccatgccaactaccttgataaatacagcctcagcaattggggaatcttgcaaaccactgcgattttattagctgatgcctactttggttctgaccttgatattgctgcagcaacagctttcgctagaaaagaattgacgcaacaaatcgcactacaaattctcgaagacggcagtcaatttgaacaatcaaccatgtatcatgtggaagtactcaaagcccttctggaattaactgctctagtccctgattatcttccacagcttagacctactttgcttgccatgagtgattatctcctcaaaatgactggtccagatcataaacaaatccctcttggtgatagcgatgttacagataccagagatattctaacgcttgcagccactatccttgaagaaccacacttaaaagctgctgcttttcccacacttgatatcgatagtcttctccttctaggagaaaaaggtgtccacacttttgaacagttacccgtccaaaccttaccaacttttgcgcatcactttgaacattccgggcacattaccatcaatcaagaaaattattatctttttttcaaaaatgggcccatcggtagttcccatacccatagcgaccaaaatagtctctgtctctattataaaggacaaccacttttctgtgatgctgggcgatacacttacaaagaagaaccattacgctatgccctaaaaagcgctagccatcattctaccgccttcttagaagaacaattacctgagcagattgatagctcctgggcttacctttcttaccccaaatccaattattgtcaccttcgacaaaatggacacgtttactttattgaaggtagctaccagacgcaattctctgataggaacaactaccaacatgaccgacaaattctcatcttaccaccaggaatttttcttatcattgatacgatacaggctcaaggcaaccactgtcttgtcagtcaatttattcttgataatcacttagacgtaaagacagatcaccttagtgacctcagactaatcagtgactgccctttcactatcgaagaaacgattttgtcaaaaaaatacaaccaatacctgactagtcacaaactcatcaaacgaaaaccctttaaagacaagggttgcaccagtaccctattagtccctgacgataccaaagttactcccttaacaccacttcaaacaggcaaacgcaacccaattgagactgccctttcctggcatttaaaaggaaagcagtttgactacagtatctgtgttctccaagaggatttaattaaaggagaaaaactagttctcctaaatagtcataaaatcagaggaaaggtggttgttatcaaccatatcacgaatgagattattcgattgaaacac

SEQ ID NO: 2362 - protein, 641 aa, Streptococcus pyogenes
LERKCPMFFAFARFKETVNPDFCRNYLLDYQTDSYADQKRIADLLLTNTFLFEDNWDMEPCHIPYHLDPITWQEAVIDDPEWNFMLNRQTYLQKLILVYLVERDERYLLTAKGFILNWIESAIPLDPKGLATRTLDTGIRCFAWVKCLIYLNLFNALTKQEESLILASLEKQLQFLHANYLDKYSLSNWGILQTTAILLADAYFGSDLDIAAATAFARKELTQQIALQILEDGSQFEQSTMYHVEVLKALLELTALVPDYLPQLRPTLLAMSDYLLKMTGPDHKQIPLGDSDVTDTRDILTLAATILEEPHLKAAAFPTLDIDSLLLLGEKGVHTFEQLPVQTLPTFAHHFEHSGHITINQENYYLFFKNGPIGSSHTHSDQNSLCLYYKGQPLFCDAGRYTYKEEPLRYALKSASHHSTAFLEEQLPEQIDSSWAYLSYPKSNYCHLRQNGHVYFIEGSYQTQFSDRNNYQHDRQILILPPGIFLIIDTIQAQGNHCLVSQFILDNHLDVKTDHLSDLRLISDCPFTIEETILSKKYNQYLTSHKLIKRKPFKDKGCTSTLLVPDDTKVTPLTPLQTGKRNPIETALSWHLKGKQFDYSICVLQEDLIKGEKLVLLNSHKIRGKVVVINHITNEIIRLKH

SEQ ID NO: 2363 - DNA, 999 bp, Streptococcus agalactiae
atgtctaaaaaaatgaccattaatgacatcgctcaattatcaaaaacttccaaaacaacggtttcttttttcttgaatcaaaaatttgaaaaaatgtcggatgagacgaggcaacgtattcaagaggtgattgatgaaacaggttatagaccaagtacgatagcaagaagtctaaattctaaaaaaacaaaactactaggtgtcttaattggagatataacaaacacattttcaaatcaaattgtaaaaggaattgagcacatcaccaaacaaaaaggctatcaaattattgtgggtaatagtaattacgatgccaaaagtgaagaagattatattgaaaatatgttaaatttaggtgttgatggtttcattattcagcctacatcaaattttcgaaagtattctcgtattttaaaagaaaaaaagaaaccaatggtattttttgatagtcaactttatgaacataagacgagttgggttaaggctaataactatgatgctgtttatgatatgacacaggagtgtctaaatcgagggtataaaaagtttattatgattactgctgatacgagcttgcttagtacacgtattgagagagcttcgggattcatggatgctttaaaggacaatggtttcggttatgacactttggtgattgaagatgatgatcattcaaaaagtgatatagaagactttctaaaagcggtagttccagataaggaggagacattagtatttgcaccaaattgttgggctttaccaatggtttttactgccatgaagaatctcaattttgatatgccacgagttggtttagttgggtttgacaatattgaatggacagacttttcatctcctaaagtgtcaacaattgtccagccggcttatgaagaaggtgaacaagtagcacagattttgattaatcgtattgaaggagatgactccgtcgataaccaacagattgtagattgccagatgttttggaaagagtcgactttt

SEQ ID NO: 2364 - protein, 333 aa, Streptococcus agalactiae
MSKKMTINDIAQLSKTSKTTVSFFLNQKFEKMSDETRQRIQEVIDETGYRPSTIARSLNSKKTKLLGVLIGDITNTFSNQIVKGIEHITKQKGYQIIVGNSNYDAKSEEDYIENMLNLGVDGFIIQPTSNFRKYSRILKEKKKPMVFFDSQLYEHKTSWVKANNYDAVYDMTQECLNRGYKKFIMITADTSLLSTRIERASGFMDALKDNGFGYDTLVIEDDDHSKSDIEDFLKAVVPDKEETLVFAPNCWALPMVFTAMKNLNFDMPRVGLVGFDNIEWTDFSSPKVSTIVQPAYEEGEQVAQILINRIEGDDSVDNQQIVDCQMFWKESTF

SEQ ID NO: 2365 - DNA, 1029 bp, Streptococcus pyogenes
atgactaaccattactattttaaaggagtgtatgcaatgcagcgcaaagtaaccatcaaagatattgctgaattagcgaaaacttcaaaaacaacagtttctttctacttaaatggcaggtttgacaagatgtctgaagaaactaaaaaccgcatcagcgagagtatcaaagctactaattataaaccgagcattgctgctagaagtctcaatgcaaaatcgactaaactcattggtgttgttataggtgacatcacaaacagtttttcaaaccaaattgtcaaaggaattgaaagcaaagcccaggaatttggttaccaaattatcatcggaaacagcaactacgacccttctcgcgaagatgaactcattgaaaagatgctcaatcttggtgttgatggttttattattcaaccaacttctaactttagaaaatattcacgtattatcgatattaaaaaaaagaaggttgtcttttttgatagccaactttacgaacatcgcacaaactgggtcaaaactaataattatgatgctgtttatgataccattcaacaatgtatcgataaaggttatgaacattttatcatgatcacgggtaaccccaatttacttagcactcgtattgaacgcgcttcaggcttcattgatgtgttagaagctaatcatcttactcatcaagaaatgattattgatgaaaatcagacttcttcagaggcaattgctcagtttttgcaaggatcactgactaaaaagagtttggtttttgtccccaattgttgggctcttccaaaagtatttacagctatgaagtctcttaaatttaatataccagagattggactagtaggatttgataacattgagtggacaaaattttcttcaccaacactaacaactattatccaacccgcctatgaagaaggcgaacaggctactaagattttaatcgatgatattgaaggtcacagtcaagaagccaaacaacaaatttttgactgtcaagtcaattggcaagaatcaactttt

SEQ ID NO: 2366 - protein, 343 aa, Streptococcus pyogenes
MTNHYYFKGVYAMQRKVTIKDIAELAKTSKTTVSFYLNGRFDKMSEETKNRISESIKATNYKPSIAARSLNAKSTKLIGVVIGDITNSFSNQIVKGIESKAQEFGYQIIIGNSNYDPSREDELIEKMLNLGVDGFIIQPTSNFRKYSRIIDIKKKKVVFFDSQLYEHRTNWVKTNNYDAVYDTIQQCIDKGYEHFIMITGNPNLLSTRIERASGFIDVLEANHLTHQEMIIDENQTSSEAIAQFLQGSLTKKSLVFVPNCWALPKVFTAMKSLKFNIPEIGLVGFDNIEWTKFSSPTLTTIIQPAYEEGEQATKILIDDIEGHSQEAKQQIFDCQVNWQESTF

SEQ ID NO: 2367 - DNA, 612 bp, Streptococcus agalactiae
atgtctgctattgataaattagtaaaagctagtcatttaattgacatgaatgacattatccgtgaaggcaatccaacccttcgcaaagtggctgaagaagtcacattcccactttctgagaaagaagaaattctcggagaaaaaatgatgcaatttttaaaacactctcaagatccaattatggctgagaagctaggcttacgtggtggtgttggtttagccgcaccacaattagacatctcaaaacgcatcattgccgtccttgttccaaacgttgaggatgctcaaggaaatccacctaaagaagcttatagcctccaagaagtaatgtacaaccctaaagttgtatcgcattctgttcaagatgctgctttatctgacggggagggatgcctatcagtagatcgtgaagtacctggctatgtcgtccgccacgcgcgtgtaactattgaatatttcgacaaaactggtgaaaaacatcgactcaaattaaaaggttacaactctattgttgttcaacatgaaattgaccacattgatggtattatgttttacgaccgtatcaatgagaaaaatcctttcgctgtcaaagaaggcttacttattttagaa

SEQ ID NO: 2368 - protein, 204 aa, Streptococcus agalactiae
MSAIDKLVKASHLIDMNDIIREGNPTLRKVAEEVTFPLSEKEEILGEKMMQFLKHSQDPIMAEKLGLRGGVGLAAPQLDISKRIIAVLVPNVEDAQGNPPKEAYSLQEVMYNPKVVSHSVQDAALSDGEGCLSVDREVPGYVVRHARVTIEYFDKTGEKHRLKLKGYNSIVVQHEIDHIDGIMFYDRINEKNPFAVKEGLLILE

SEQ ID NO: 2369 - DNA, 612 bp, Streptococcus pyogenes
atgtctgcacaagataaattaattaaacctagtcatctgattaccatggatgacattattcgtgaagggaatccaactttaagagctgtcgccaaagaagtgagcttacccttgtgtgatgaggatatcctattaggagaaaagatgatgcaatttttgaagcattctcaagatcctgtaatggcggaaaaacttggtcttagggccggtgttggtctagcagctcctcagattgatgtgtcaaaacgtatcatcgctgtgctcgttcctaatcttcctgataaagaaggaaatcctcctaaagaagcctatagctggcaagaagtcctgtataatcctaaaatcgtttctcattctgttcaagatgcagccctttctgatggcgaaggttgtttatctgtcgatcgtgttgttgaagggtatgtggttcgccatgctcgtgttacagtagactactatgataaagaaggacaacagcatcgcatcaaattaaagggatacaacgctattgtggttcaacatgaaattgaccatatcaatggtgttttgttctacgatcggatcaatgctaaaaacccctttgaaaccaaagaagagctcttgattttagac

SEQ ID NO: 2370 - protein, 204 aa, Streptococcus pyogenes
MSAQDKLIKPSHLITMDDIIREGNPTLRAVAKEVSLPLCDEDILLGEKMMQFLKHSQDPVMAEKLGLRAGVGLAAPQIDVSKRIIAVLVPNLPDKEGNPPKEAYSWQEVLYNPKIVSHSVQDAALSDGEGCLSVDRVVEGYVVRHARVTVDYYDKEGQQHRIKLKGYNAIVVQHEIDHINGVLFYDRINAKNPFETKEELLILD

SEQ ID NO: 2371 - DNA, 684 bp, Streptococcus agalactiae
atgacatatgtcctaaaactatctcaaatagggagtcaatacatggatatagaaaactactgccaagactactgtttggagactatctttccaaaacattatttcaaggatttacaagtaatcaccctaactgccggccaatccgtctgtaaacagggagaacaattagaatacttgcactacatcgtcaagggacgttttaaaattgtacgtcgactctttaacggcaaagaacatattttagatattaaaacaaaaccaacactgattggtgatattgaacttttgactaatagacaaattgtatcatctgttattgccttagaggatcttacagtcattcaattatcacttaaaggacggaaagagaaactgttaacagacgcaactttcctcctaaaacttagtcaagagctagctcaggcttttcatgatcaaaacatcaaagcgtctactaatctagggtataccgtcaaagagttacttgcaagtcatattttagcaattgaagaacaaggttactttcaacttgagttaagtagtttagctgattcgtttggcgtcagttatcgtcatttattaagagttatccacgatatggtcaaagaaggccttatccaaaaagaaaaaccaaaatactttatcaaaaatcgtttcgcactagaatcattaaatattcagcca

SEQ ID NO: 2372 - protein, 228 aa, Streptococcus agalactiae
MTYVLKLSQIGSQYMDIENYCQDYCLETIFPKHYFKDLQVITLTAGQSVCKQGEQLEYLHYIVKGRFKIVRRLFNGKEHILDIKTKPTLIGDIELLTNRQIVSSVIALEDLTVIQLSLKGRKEKLLTDATFLLKLSQELAQAFHDQNIKASTNLGYTVKELLASHILAIEEQGYFQLELSSLADSFGVSYRHLLRVIHDMVKEGLIQKEKPKYFIKNRFALESLNIQP

SEQ ID NO: 2373 - DNA, 267 bp, Streptococcus pyogenes
ttgacacaaaatgtttgccaacaaaacattacctataccgtcaaagagcgctttgcttcctatacccttgaagcgcaagccaaccaagaggttcatctaaaccttacattattagcaaaccgttttggaacaagcgatcgccatcttaagcacgtacttaagcagcccatttttcagaggattatcgaacgcatctgcttcaaaacctatcgtattgccgatttagacgctctaactcaattaagacctctgaggtatgcagcccat

SEQ ID NO: 2374 - protein, 89 aa, Streptococcus pyogenes
LTQNVCQQNITYTVKERFASYTLEAQANQEVHLNLTLLANRFGTSDRHLKHVLKQPIFQRIIERICFKTYRIADLDALTQLRPLRYAAH

SEQ ID NO: 2375 - DNA, 1161 bp, Streptococcus agalactiae
ttgaaaatctttatggagaagctaagtttactctctttatcacttatcttgctatcaactttttcgacatcaccagccctaccacaaatgatatcttattatagagataagggcttaccatcaccccaagttgaattattgttttcaattccttcgatggctattatcttcatcttgcttatcacaccttggttaagtaaaaaactttctgagaaacatatgattatctttgggctattgctaacagcattagggggaggattgccggttgtcagtcagaactaccttttagtatttgtatcgcgtcttttattggggagtggtattggttttattaatactagggccattagtgtgattagtgaatattatcaaggcaaagaaagaagaaaactcttaggattaagggggtcctttgaagttttaggaaatgctggtttgacagctttagttgggctgttgttgacttttggttggtccaaatcatttatgatttattttttagctttaccaatcttagttctatatcttgtttttgcgcctaagaaagtggtgaaagatacaaatgacaagattaaaactaaaggtcaaaaaatccctaaagctgatttaacttatattgtcgccttagctattttagcaggatttgtcataactataaatactgggattaatcttaggatacctctgctagtagtagaatttggtttgggtacgccagctcaagctagtcttgttcttagtgcgatgatgcttatgggaataatagcaggtatgagttttggtcagttgatagctatgtttcataaacaattaattccaatctgcctcgtcttattttctttaacattgcttggagttggattgccttctaatctaatggtactaacaattagtgcgatggcatcaggtttcctttacagcctgatggtcactgctgtgtttagcctagtagcagaccgtgttgaatattcgttggttggttctgcaacgacattagttttagtattttgtaatattggtggagctagtgcggctattcttctgtcttgttttgatcatttactaggacaaataaatgcagttttctatgtttatgctattttaagtttagcagttggtatgatttatttctttaaacgcctattttttaagaaaatg

SEQ ID NO: 2376 - protein, 387 aa, Streptococcus agalactiae
MKIFMEKLSLLSLSLILLSTFSTSPALPQMISYYRDKGLPSPQVELLFSIPSMAIIFILLITPWLSKKLSEKHMIIFGLLLTALGGGLPVVSQNYLLVFVSRLLLGSGIGFINTRAISVISEYYQGKERRKLLGLRGSFEVLGNAGLTALVGLLLTFGWSKSFMIYFLALPILVLYLVFAPKKVVKDTNDKIKTKGQKIPKADLTYIVALAILAGFVITINTGINLRIPLLVVEFGLGTPAQASLVLSAMMLMGIIAGMSFGQLIAMFHKQLIPICLVLFSLTLLGVGLPSNLMVLTISAMASGFLYSLMVTAVFSLVADRVEYSLVGSATTLVLVFCNIGGASAAILLSCFDHLLGQINAVFYVYAILSLAVGMIYFFKRLFFKKM

SEQ ID NO: 2377 - DNA, 1218 bp, Streptococcus pyogenes
atgtcaacattatcattggacaccacaaataagcgagctttagtggcagctattgcagcttcaggaacggatgacttgaatgtcatgtttcttgccttttccatgtcttccattatgacagacttgggtcttagtggcactcagggtggctggattgcgaccattaccaatttaggaatgttggtgggaggcctcttattcgggttgctggctgataggcaccacaagtttaaggtctttaaatggacgattttactgttttcagtagcaacaggattaatttattttacccagtctttgccctacctgtacctgatgcgatttattgctggcataggagttggaggtgagtacggtgtagccattgccataatggcagggattgtaccaccagaaaaaatgggtcggatgtcttctttaaatggtattgctggccagcttggctctattagttcggctcttttagcagggtggctggctccaagtctaggctggcgtggcctttttctctttggattacttccgattctcttggtgatttggatgactttagccatagatgaccaaaaaatttgggatcattatgggcaagaggaggaagaatgcagtcaaccaattaaaatcaatgaactattcaaaacaaaatccttaacagctcaaacccttgctttaatggtcatgacgactgtgcagattgcgggctattttggaatgatgaattggttgccaaccattattcaaacaagcttaaacctttcagtaaaaagttcgtccttgtggatggtggctactattgtcggcatgtgtttggggatgctgtattttggtcagcttttagattgctttggtccacgtctgatttattccctctttttattagcatcatctatttgtgtttacctttttcaatttgccaattccatggcgagtatggttattggaggtgctattgtcggtttttttgtcaatgggatgtttgctggctacggggctatgattaccagactttatccccatcacattcgatccacggctaataatgttattttgaatgttggccgtgctctaggaggattttcgtccgttgctattggtagtattttagatgcctcaggtatttcaatggtcatgattttcctagcttctctgtatgtgattagttttggagccatgtggtctattggtcagttaaaagcagaacgctaccaacaattgcgt

SEQ ID NO: 2378 - protein, 406 aa, Streptococcus pyogenes
MSTLSLDTTNKRALVAAIAASGTDDLNVMFLAFSMSSIMTDLGLSGTQGGWIATITNLGMLVGGLLFGLLADRHHKFKVFKWTILLFSVATGLIYFTQSLPYLYLMRFIAGIGVGGEYGVAIAIMAGIVPPEKMGRMSSLNGIAGQLGSISSALLAGWLAPSLGWRGLFLFGLLPILLVIWMTLAIDDQKIWDHYGQEEEECSQPIKINELFKTKSLTAQTLALMVMTTVQIAGYFGMMNWLPTIIQTSLNLSVKSSSLWMVATIVGMCLGMLYFGQLLDCFGPRLIYSLFLLASSICVYLFQFANSMASMVIGGAIVGFFVNGMFAGYGAMITRLYPHHIRSTANNVILNVGRALGGFSSVAIGSILDASGISMVMIFLASLYVISFGAMWSIGQLKAERYQQLR

SEQ ID NO: 2379 - DNA, 981 bp, Streptococcus agalactiae
atgattgaaaaatattataattgggcaacgcttggaaccggcgttattgccaacgaattagcccaagcactagaagcacgtggacaaaaattatattctgtagctaatagaacttacgacaaaggacttgaatttgctaccaaatatggtatccaaaaagtttatgatcacatagatcaagtatttgaagaccctgaagtggatatcatttatatctctactccccacaatactcacatctcatttttacgaaaggctttagcaaatggtaagcacgttctttgcgaaaaatctattactttaaacagcactgaacttaaagaagccatagatttagccgaaactaaccatgttgtcttagctgaagccatgactatttttcatatgccaatttatcgccaattaaaaacattagttgatagtggaaaattaggaccgttaaaaatgattcaaatgaatttcggaagttataaagaatatgatatgactaaccgttttttcagtcgtgacctagcaggcggtgctttgctggacattggtgtttatgcactttcttgtattcgctggtttatgtcagaagcacctcacaacattacctctcaagttacatttgcaccaacaggagttgatgaacaagttggtatcctactaaccaatcctgcaaatgagatggcgactgtcagccttagtttacatgcaaaacaacctaaacgagcaactatcgcttacgataaaggctacattgaactttttgaatatccgcgaggacaaaaggcagttattacttatactgaggatgggcatcaagatattctcgaagctggcaaaactgaaaatgccctccaatatgaggtagctgatatggaagaagccgtttcaggaaaaactaaccacatgtacttaaactataccaaagacgttatggatatcatgacacagctacgtcaagaatggggatttacctacccagaagaagaaaaa

SEQ ID NO: 2380 - protein, 327 aa, Streptococcus agalactiae
MIEKYYNWATLGTGVIANELAQALEARGQKLYSVANRTYDKGLEFATKYGIQKVYDHIDQVFEDPEVDIIYISTPHNTHISFLRKALANGKHVLCEKSITLNSTELKEAIDLAETNHVVLAEAMTIFHMPIYRQLKTLVDSGKLGPLKMIQMNFGSYKEYDMTNRFFSRDLAGGALLDIGVYALSCIRWFMSEAPHNITSQVTFAPTGVDEQVGILLTNPANEMATVSLSLHAKQPKRATIAYDKGYIELFEYPRGQKAVITYTEDGHQDILEAGKTENALQYEVADMEEAVSGKTNHMYLNYTKDVMDIMTQLRQEWGFTYPEEEK

SEQ ID NO: 2381 - DNA, 1893 bp, Streptococcus agalactiae
atgataaaatatcaagatgatttttaccaagcggttaatggggagtgggctaagacagctgttattcctgatgacaaaccaaggacaggtggtttttctgatcttgctgatgacattgaagcattaatgctgtcaacgacagataagtggctggctgatgaaaataaaccaagtgatacgattttaaatcattttattgcttttcataaaatgacagctgattatcaaaaacgtgaagaggtaggagtatcaccagtattaccattaattgaagaatataaaggcctacaatctttctctgagtttgcatcaaaagttgcagaatatgaactagagggtaaaccaaatgaatttccatttggtgtggctcctgactttatgaatgctcaattgaatgtactttgggctgaagcgcctgggattattttaccagatacaacttattatagtgaagataatgaaaaaggaaaggaactccttgctttttggcgtaaaagtcaagaagacctactgcctttgtttggcctttcagaacaggaaattaaagatatcttggataaggttttagcattggatgcaaaattggcacaatatgtcttatctcgcgaagagagttcggaatatgttaaactttaccatccttataactgggaagatttcacaaaattagcacctgaacttccattagatgctattttccaaaagatattaggacaaaaaccagataaagttattgttcctgaagaacgtttctggacagaatttgcatctgactattactcagaatctaattgggaattattaaaggcagatcttattttatcagctgcgaatgcctataatgcttacttaactgatgatattcgtatcaaatcgggagtttacagtcgagctttatcaggcacaccacaagcaatggataagaaaaaagcagcttactaccttgcttcaggaccttacaatcaagctctaggtttgtggtatgcaggagaaaaattctctccagaagctaaagctgatgttgagcataagattgcaacgatgattgatgtctataagtcacgcttagaaaaggcggattggcttgcacagtcaacgcgagaaaaagctattatgaaacttaatgttatcacaccacatattggataccctgagaaactaccagagacttatactaaaaaaatcattgatcctaaactatcgcttgtcgaaaatgctactaatttagacaaaatttcaatagcctatggttggagtaaatggaataaaccagttgatagaagtgaatggcatatgcctgcccacatggtcaatgcgtattatgatccacaacaaaaccaaattgtcttcccagcagccattttacaagaaccattttatgctttagagcaaagttcatcagcaaattatgggggaattggtgcagtgattgcacatgaaatatcacacgcttttgacactaatggagcttcatttgatgaacatggaagtttgaataattggtggactgatgaagattttgaagctttcaaaaaacttacagataaagtagttgagcagtttgatggactggaatcttatggcgcaaaagtcaatggtaaactaacagtatcagaaaatgttgcagatttaggtggagttgcttgtgctttagaagctgcgcagcgtgagtcagatttttcagcgagggatttctttattaactttgcgacaatttggcgtatgaaggcacgtgatgagtatatgcaaatgttagctagtgtagatgttcacgccccagcacaatggcgaactaatattacagtaacgaattttgaagaattccataaagagtttgatgttaaagatggtgataacatgtggcgtccagttgaaaaacgtgttattatttgg

SEQ ID NO: 2382 - protein, 631 aa, Streptococcus agalactiae
MIKYQDDFYQAVNGEWAKTAVIPDDKPRTGGFSDLADDIEALMLSTTDKWLADENKPSDTILNHFIAFHKMTADYQKREEVGVSPVLPLIEEYKGLQSFSEFASKVAEYELEGKPNEFPFGVAPDFMNAQLNVLWAEAPGIILPDTTYYSEDNEKGKELLAFWRKSQEDLLPLFGLSEQEIKDILDKVLALDAKLAQYVLSREESSEYVKLYHPYNWEDFTKLAPELPLDAIFQKILGQKPDKVIVPEERFWTEFASDYYSESNWELLKADLILSAANAYNAYLTDDIRIKSGVYSRALSGTPQAMDKKKAAYYLASGPYNQALGLWYAGEKFSPEAKADVEHKIATMIDVYKSRLEKADWLAQSTREKAIMKLNVITPHIGYPEKLPETYTKKIIDPKLSLVENATNLDKISIAYGWSKWNKPVDRSEWHMPAHMVNAYYDPQQNQIVFPAAILQEPFYALEQSSSANYGGIGAVIAHEISHAFDTNGASFDEHGSLNNWWTDEDFEAFKKLTDKVVEQFDGLESYGAKVNGKLTVSENVADLGGVACALEAAQRESDFSARDFFINFATIWRMKARDEYMQMLASVDVHAPAQWRTNITVTNFEEFHKEFDVKDGDNMWRPVEKRVIIW

SEQ ID NO: 2383 - DNA, 1893 bp, Streptococcus pyogenes
atgacaacttatcaagatgatttttaccaggctgtgaatggaaagtgggctgaaacagcagttattccagacgacaagcctcgaacaggtggattttcagacttagcagatgaaattgaggcattaatgctagacactacagatgcttggctagctggagaaaatatccctgatgatgctattttaaaaaattttgtgaaattccatcgtttggtggctgactacgctaaacgtgatgaagttggagtaagtccaattctccctttaattgaagaatatcagtccttaaaatctttttcagaatttgttgctaatatagcgaaatatgaattggcaggtttaccaaatgaatttccctttagtgtggcaccagactttatgaatgctcagctgaatgtgctttgggcagaagcaccaagcattcttttgccagatacaacatactacgaagaaggcaacgaaaaagctgaggaattgcgtggtatttggcgtcagtcgcaagaaaagcttttacctcaatttggtttttcaacagaagaaatcaaggatcttttggataaggtaattgagctagataagcaattggccaagtatgtcttgtctcgtgaggaaggctcagaatatgccaaattataccatccttatgtgtgggctgattttaaaaaactagctccagagcttcctttggatagcatttttgaaaagattttaggccaagtacctgacaaggttattgttcctgaggaacgtttttggacagaatttgcagccacttattactctgaagccaattgggatttactcaaggctaatttgattgtggacgcggctaatgcttacaatgcttacttgacggatgatattcgtgtggaatcaggcgcttattcgcgcgctctttcaggaacacctcaagctatggacaaacaaaaagcagccttttatttggcgcaaggaccgtttagccaagcgcttggcttgtggtatgctggtcaaaaattctccccagaagctaaggctgatgtggaaagtaaggtagcacgcatgattgaggtttataagtctcgtctagaaacggctgattggttagcaccagccacacgtgaaaaagccattactaaattaaatgttatcacgccacatattggttacccagaaaaattaccagaaacctatgctaaaaaagtgattgatgagagcttgtcattggttgaaaatgcacagaacttggctaaaatcacgattgctcacacttggagtaaatggaacaagccagttgaccgtagtgaatggcatatgccagcccacttagtcaatgcttattatgatcttcagcaaaatcagattgtctttcctgcggcaatcttacaagagccattttattctttagatcagagttcttcagccaattatggaggaattggtgcagtcattgcgcatgagatttcacatgcctttgacaccaatggtgcttcctttgatgaacatggtagcctaaatgattggtggacacaagaagactatgctgcctttaaagagcgcacagataagattgtggcgcagtttgacggcttagagtcacatggtgctaaggtcaatggtaaattgacagtttcagaaaacgtcgctgatctaggtggggtagcttgtgctttagaagcggcacaatcagaagaagacttctcagcccgtgacttctttattaactttgcgacgatttggcgtatgaaggcccgtgaggaatacatgcaaatgctagctagcattgatgttcatgctccgggtgaactgcgaacaaatgtcaccttaaccaactttgatgctttccatgagacctttgatattaaagaaggcgatgctatgtggagagctccgaaagaccgtgtgattatttgg

SEQ ID NO: 2384 - protein, 631 aa, Streptococcus pyogenes
MTTYQDDFYQAVNGKWAETAVIPDDKPRTGGFSDLADEIEALMLDTTDAWLAGENIPDDAILKNFVKFHRLVADYAKRDEVGVSPILPLIEEYQSLKSFSEFVANIAKYELAGLPNEFPFSVAPDFMNAQLNVLWAEAPSILLPDTTYYEEGNEKAEELRGIWRQSQEKLLPQFGFSTEEIKDLLDKVIELDKQLAKYVLSREEGSEYAKLYHPYVWADFKKLAPELPLDSIFEKILGQVPDKVIVPEERFWTEFAATYYSEANWDLLKANLIVDAANAYNAYLTDDIRVESGAYSRALSGTPQAMDKQKAAFYLAQGPFSQALGLWYAGQKFSPEAKADVESKVARMIEVYKSRLETADWLAPATREKAITKLNVITPHIGYPEKLPETYAKKVIDESLSLVENAQNLAKITIAHTWSKWNKPVDRSEWHMPAHLVNAYYDLQQNQIVFPAAILQEPFYSLDQSSSANYGGIGAVIAHEISHAFDTNGASFDEHGSLNDWWTQEDYAAFKERTDKIVAQFDGLESHGAKVNGKLTVSENVADLGGVACALEAAQSEEDFSARDFFINFATIWRMKAREEYMQMLASIDVHAPGELRTNVTLTNFDAFHETFDIKEGDAMWRAPKDRVIIW

SEQ ID NO: 2385 - DNA, 828 bp, Streptococcus agalactiae
gtgtcattctctaagcactatctagaaaatgatatcctctattctgcttcgattactagccgtgtagaagatttacatgaagcatttgccgacccttctgttgatgccatattagcaaccattggcggattcaattccaacgagcttttaccatatttagattatgatttaatctctaagaatcccaaaataatttgtggttactcagattcaacggccttccttaatgctatttttgccaaagcaaaaatccaaacttacatgggccctgcttattcttctttcaaaatgaaggaaggtcaaccttaccaaacacaagcttggcttactgccatgacagaaaaccactatgaactttggcctagtgaagaatggtctagtgatccctggtatgatcccagcaaaccacgccaatttttcccaacagaatggaaaatttataatcacggaaaagcttccggtacgattatcggaggtaatctctctacgtttggcctacttcgaggtactccttatgcaccgaaaattgaacgctatgtcctcttgattgaagaggctgaggaaagtaatttttatgaatttgaccgcaaccttgctgcaattttacaagcttatcctcatccacaagctattcttatggggcgctttcctaaagaatgcggcatgactccacaagtctttgaatatatcctttcaaaacatgctattttcaaggaaattcctgttatttatgatatggattttgcgcacacccaacctcttttgacagtgactattggagctgagctaagcgttgacactactacattatctctatctataaaagaa

SEQ ID NO: 2386 - protein, 276 aa, Streptococcus agalactiae
MSFSKHYLENDILYSASITSRVEDLHEAFADPSVDAILATIGGFNSNELLPYLDYDLISKNPKIICGYSDSTAFLNAIFAKAKIQTYMGPAYSSFKMKEGQPYQTQAWLTAMTENHYELWPSEEWSSDPWYDPSKPRQFFPTEWKIYNHGKASGTIIGGNLSTFGLLRGTPYAPKIERYVLLIEEAEESNFYEFDRNLAAILQAYPHPQAILMGRFPKECGMTPQVFEYILSKHAIFKEIPVIYDMDFAHTQPLLTVTIGAELSVDTTTLSLSIKE

SEQ ID NO: 2387 - DNA, 726 bp, Streptococcus pyogenes
gtggatgtcatcatgacttccataggtggctacaattctaattctgtattaaagtatatagactacgatctatttaaacagaaatttcctatctttattggatattctgacacaacagctcttgctttagccttatataaaaagactggatgtataacttacctgtctcagagcgttatctctaattttggagagtttgaaccgtttaatgaattaaattatttctattttgacttcatgcttcagagtaagtgcgaaaccttaatggtacaaataccagatgtttggacggatgagtggataaattgggaaacctatgaaagaaccaaaaaaacaaataaaaatgagtggattatttttaacaaaggtgaatttaatggtactttgatcggaggaaatctcgataccattgtaggaataataggaactgagtatatgccaaaaataacagaggataccatactcttgttagaagatgtatatacggatctaggaagactatataggaatttcacaacgcttgccttacatggtatttttgataaaataggaggacttattatttcaaaatttgaaacaataggggaaaatagcgatgttattaatgatatcattaatgaatttgtagggcatagaaagattcctattttattgaattttgattgtggtcatacccatcctagctgtttaatgcctattggtggtaaaattacgttgagtttaagc

SEQ ID NO: 2388 - protein, 242 aa, Streptococcus pyogenes
VDVIMTSIGGYNSNSVLKYIDYDLFKQKFPIFIGYSDTTALALALYKKTGCITYLSQSVISNFGEFEPFNELNYFYFDFMLQSKCETLMVQIPDVWTDEWINWETYERTKKTNKNEWIIFNKGEFNGTLIGGNLDTIVGIIGTEYMPKITEDTILLLEDVYTDLGRLYRNFTTLALHGIFDKIGGLIISKFETIGENSDVINDIINEFVGHRKIPILLNFDCGHTHPSCLMPIGGKITLSLS

SEQ ID NO: 2389 - DNA, 99 bp, Streptococcus agalactiae
ttggctaataggttagcctcaaaaccacccagacgctcaatggaagaagagggactaagaacacgaatgtggctgccttttgttaattttttcattggt

SEQ ID NO: 2390 - protein, 33 aa, Streptococcus agalactiae
MANRLASKPPRRSMEEEGLRTRMWLPFVNFFIG

SEQ ID NO: 2391 - DNA, 237 bp, Streptococcus agalactiae
atgatgtctcaattatctttggaagaacaattgaatcgactaaaagataaatacctttcttctaaaaatcaagaattttcaaatgttcacttaagtaaagtaaagaagaaaaagaagaaattaataatacttgaaaaagaaagatgtcgctgtcgattggagagagaagatactaaaaaaatcgatgataaaattgagaaattgaagaaagaattgatagatgttatgaaggaggaa

SEQ ID NO: 2392 - protein, 79 aa, Streptococcus agalactiae
MMSQLSLEEQLNRLKDKYLSSKNQEFSNVHLSKVKKKKKKLIILEKERCRCRLEREDTKKIDDKIEKLKKELIDVMKEE

SEQ ID NO: 2393 - DNA, 2067 bp, Streptococcus agalactiae
atggaagaaactattctaatagtcagctttctcctgtttttgattttatctaatgttatcaataggatatttcctaaattaccattaccatttatccagttggtctttgggattctctctggcttagtttttcataagtcacaagtccatatcgatcctgagttattccttgcctttgttattgctcctttgaactttagggaaggtcaagaaagtgatattggtagttttataaagtatcgggctattattctttacttaatcttaccaacggtatttttaacagctattgtcgttggttatgtagcagggcaccttttgccagttagtttaccacttgcggcatgctttgcgcttggagcagccttaggcccaacagatgccgttgcctttatatcgattgctaagaggtttcaatttcctaaacgggcagaaaatatcctcaaattggaaggtcttttaaatgacgctagtggtctagtttccttccagtttgctttaacagcccttgtaacaggttatttctccttagcaaaagctagtctcaagttagcattggccataatgggtggttttttaattggcttgctttttgcttttctaatgaggttatgtctcactgtcctagagaaatttgatgctgctgatgttacaggggctctacttttggaattaaccttaccttttgttgcttatttcgttgctgatttgttgggattttcagctattattgcggtggtagtggcaggagtaatgcaagcaaatcgtttgaaaaaagtgactctctttgatgctcaagtagatcgcgttacctctgttatttgggaaaccttaaattttattttaaatggtttagttttcttaatatttggaagagaactgacacgtatcattggtcctcttttaacaagtaacgcttatagtaattttgatcttattagtattgttgttttagttacttgcacactttttctagttcgctttctagcagtttcttgcttttatgcttggagatctttcaaataccataaatcatttaaaaagtattggagagagattcaactgttgactttttcaggagttaaaggaagtgtttccatagcaacaatactcttattacccaagcactcagtcataggagagttggggtatagtttgattcttttcactgttggtgcagtaacgctaatgagttttttaacgggacttttagtattaccaaagttagcgcctcccttacaggtgaaagatgattatttaatacgtctatcgattttaacaaaagtattatctgtcttagaagaagatggtaagagttctgaaaatcaagcttcattttatgcagttatagataattataatagccgtattcgtcatctcattttagaacaagaatctagtgacattaagaaggacttagctgaattgcaactgatgatgcttagtatagaaagcgatggacttgaagctgcttatcgttatggcaatatttctatcaaagaatatcgtatttaccaacgttatttaaaatacttagaacgccaagttaatcgtagctttgtgtcaaatatcacttatagtttaacgattcttatgcgtgttattcgtggtattgttcatgagtttttaacatttggacaaggaatacgaaatcggaaaaaacatttcaaaaacaggaaacggttgttagcagaagtcaatcgtcagcacttaacagatttgtacttatcaaataatgacctcattttagaaacgctagaagatatggaaggttattataatgcaactttgatagatttcttacaaaatgaacgcattcgagacgcagaattaattaaatcaggtttatttgtagaacgtgtcattgcacgcataacgccagatattttaaatgaaaccctaagaggatattacttggaacgcagaacaatctctgaatttgaaagggacggtttaattagttctaaagagtctcaaattttaagggataatgtcaatgaattagaaagctattcattaagagatagtcaatcttctataccttatcaattattggatttaaaaaaa

SEQ ID NO: 2394 - protein, 689 aa, Streptococcus agalactiae
MEETILIVSFLLFLILSNVINRIFPKLPLPFIQLVFGILSGLVFHKSQVHIDPELFLAFVIAPLNFREGQESDIGSFIKYRAIILYLILPTVFLTAIVVGYVAGHLLPVSLPLAACFALGAALGPTDAVAFISIAKRFQFPKRAENILKLEGLLNDASGLVSFQFALTALVTGYFSLAKASLKLALAIMGGFLIGLLFAFLMRLCLTVLEKFDAADVTGALLLELTLPFVAYFVADLLGFSAIIAVVVAGVMQANRLKKVTLFDAQVDRVTSVIWETLNFILNGLVFLIFGRELTRIIGPLLTSNAYSNFDLISIVVLVTCTLFLVRFLAVSCFYAWRSFKYHKSFKKYWREIQLLTFSGVKGSVSIATILLLPKHSVIGELGYSLILFTVGAVTLMSFLTGLLVLPKLAPPLQVKDDYLIRLSILTKVLSVLEEDGKSSENQASFYAVIDNYNSRIRHLILEQESSDIKKDLAELQLMMLSIESDGLEAAYRYGNISIKEYRIYQRYLKYLERQVNRSFVSNITYSLTILMRVIRGIVHEFLTFGQGIRNRKKHFKNRKRLLAEVNRQHLTDLYLSNNDLILETLEDMEGYYNATLIDFLQNERIRDAELIKSGLFVERVIARITPDILNETLRGYYLERRTISEFERDGLISSKESQILRDNVNELESYSLRDSQSSIPYQLLDLKK

SEQ ID NO: 2395 - DNA, 96 bp, Streptococcus agalactiae
ttggggcgaatttggggcgaaacaaccaaaaaccttgataaaccaaggttttcaaatccgtctaccgccttaaatataaaagattttatccaaaga

SEQ ID NO: 2396 - protein, 32 aa, Streptococcus agalactiae
MGRIWGETTKNLDKPRFSNPSTALNIKDFIQR

SEQ ID NO: 2397 - DNA, 1128 bp, Streptococcus agalactiae
ttgccaatctggcaagtcttttcttgtactcattttatcagaaatgaggtaaaaaaacaaatggcatcatatcgaaaaagagagaacgggctgtgggaataccgcatttcctacaaaaccatagatggaaaatataaacggaaagagaaaggtggttttaagaccaagaagcttgctcaggcggcagcaatcgaaattgaaaagaaattgacccaaaacatcttgacaaatgacgaagtaactctatatgactttgtcaagacctggtcagaagtctataagcgtccgtatgtaaaagataagacttgggaaacctattcaaaaaactttaagcacatcaagaactatttccaagagttgaaggtcaaagatattacaccgctttactaccaaaaaaagttgaatgagtttggcgagaaatatgcccaagaaactcttgagaaatttcactatcaaataaaaggggctatgaaagttgctgtaagggaacaggttgttacctttaattttgcagaaggtgcaaaagtgaaatctcaggtagagcccaaaaatgaagaggaagattttttagaggagcgcgaatataaggctctcttggcccttacaagagagaacatccaatatgtatcctatttcactctttaccttcttgcagtcacaggactgcgtttttctgaggctatggggctaacctggagcgatatagacttcaaaaatggcattttggatataaacaagagttttgattactcgaatactcaagattttgcagatctgaagaatgagtcatcaaaaagaaaagttccaattgattcaaatacaatagatattcttcgagaatataagaaaaatcattggcaagctaatatcaagaatagagtgtgctttggtgtatctaattcagcttgcaataaactgattaagaaaattgtgggtaggaaagtcagaaatcactcattacggcacacatacgcttcgtttttgattttgaacggggttgacattgtgacaatttctaagctccttggacatgaaagtccagatattactctgaaagtttatacacatcagatggaagcactggctgagagaaattttgagaaaatcaaaaatatttttttagtcgca

SEQ ID NO: 2398 - protein, 376 aa, Streptococcus agalactiae
MPIWQVFSCTHFIRNEVKKQMASYRKRENGLWEYRISYKTIDGKYKRKEKGGFKTKKLAQAAAIEIEKKLTQNILTNDEVTLYDFVKTWSEVYKRPYVKDKTWETYSKNFKHIKNYFQELKVKDITPLYYQKKLNEFGEKYAQETLEKFHYQIKGAMKVAVREQVVTFNFAEGAKVKSQVEPKNEEEDFLEEREYKALLALTRENIQYVSYFTLYLLAVTGLRFSEAMGLTWSDIDFKNGILDINKSFDYSNTQDFADLKNESSKRKVPIDSNTIDILREYKKNHWQANIKNRVCFGVSNSACNKLIKKIVGRKVRNHSLRHTYASFLILNGVDIVTISKLLGHESPDITLKVYTHQMEALAERNFEKIKNIFLVA

SEQ ID NO: 2399 - DNA, 402 bp, Streptococcus agalactiae
atggcattatttggtggcaaagacaaagaacctgaagtagaaatttttacagctgagccaaacgagcgagtttttgagtttaagaaatcaaagacgatagtaagaatagatgactactttatcagaattgcaagaaaaagcaacatgtcaaatatgcttctacatggacttgatggcgaaaaatcaattttgttatcagcaataactgcatatcaattaaaagagccaggggcaacggttggatatttacaattggtatatcctggatcagcagatactaaaggtggtgtctttgatgctgttaaggatgagaatacagtcacttttgtcaaagaagataaacaagccatcttagaattgaagatagcaatagaaaccgcattaaaaaataaggttcagaaa

SEQ ID NO: 2400 - protein, 134 aa, Streptococcus agalactiae
MALFGGKDKEPEVEIFTAEPNERVFEFKKSKTIVRIDDYFIRIARKSNMSNMLLHGLDGEKSILLSAITAYQLKEPGATVGYLQLVYPGSADTKGGVFDAVKDENTVTFVKEDKQAILELKIAIETALKNKVQK

SEQ ID NO: 2401 - DNA, 384 bp, Streptococcus agalactiae
ttgcctatgaaactagaccaactctgtaaagagtttggagtggaattgtgcctgttcgatgccagcgactggcatagttcgggattttacaatccaataaccaaggtcttaggggttgatgtgaatctgtctgagcaagaacaaaaacaagtcgccctacatgagttacagcataaaaatcactttccatatcagtatcagctttttagagagagatgtgaactcgacgcaaataggaatatgatccaccatcttttgaaggaagaattggaaatcgctgaggaccacactcaattcaattacctggtctttatggaaaagtacaaattaaagaccatagctgatgaggctatgatcaaggaagagtatttgaatttagttgga

SEQ ID NO: 2402 - protein, 128 aa, Streptococcus agalactiae
MPMKLDQLCKEFGVELCLFDASDWHSSGFYNPITKVLGVDVNLSEQEQKQVALHELQHKNHFPYQYQLFRERCELDANRNMIHHLLKEELEIAEDHTQFNYLVFMEKYKLKTIADEAMIKEEYLNLVG

SEQ ID NO: 2403 - DNA, 360 bp, Streptococcus agalactiae
atgtctgttttaattgataggatacgtgaactcagtaataaaaagggaatgtctcttaatgacttagaagatacacttggctacagtcgtaattctctgtatagcttgaatgaaaattctaagatgggtaaaccaaaggaaattgcacagtattttaatgtctcactagattacctactaggtctaacagataatccacgaattgccagcgatgagacagctatcattgacggtcaagttgtggatctgagagaagcagctgcccataccatgctgtttgatggtaagccacttgatgaagatgatatagattttattacagcagtcctgtctgcacacttcaaaaataaacaaaaggat

SEQ ID NO: 2404 - protein, 120 aa, Streptococcus agalactiae
MSVLIDRIRELSNKKGMSLNDLEDTLGYSRNSLYSLNENSKMGKPKEIAQYFNVSLDYLLGLTDNPRIASDETAIIDGQVVDLREAAAHTMLFDGKPLDEDDIDFITAVLSAHFKNKQKD

SEQ ID NO: 2405 - DNA, 162 bp, Streptococcus agalactiae
atgggaatcggttcaatgacagtgacagttaaagttactaacatggataaatttattgaacttagtaaagagttcaataaaaaagcccgcgagctagaagaactagctcacgaactgaagtcatttgattttgaaggcgaagttgtatcaactgatagcaac

SEQ ID NO: 2406 - protein, 54 aa, Streptococcus agalactiae
MGIGSMTVTVKVTNMDKFIELSKEFNKKARELEELAHELKSFDFEGEVVSTDSN

SEQ ID NO: 2407 - DNA, 486 bp, Streptococcus agalactiae
atgaaaggaggtcaagccatgaatttgaatcaaattcgtatcatagaggcatgccataaatttctaattggcatcacaaatttcgaagaagagttacaagatgacgttctcgtctatcgttacaaaggtaaccttgtcagctttgaaacctatcaagaatatgaacaacggtcatttgtagactataatctaaaatatggctatcttgatgacactagaacttacctagatgacagagctgatttgatagcagctttccctagcgaagagcacttgagagccttgcaaagagttaacgatgctgaacaagctcgtgtgcaaatctttaagctactatctcaggtcaatcttgactctctctccgaaaaaaattccaacatcaaaaaagataattttggatatgatttcttcaattttgcaactaaagaagaataccctgtttatcttttttcagatgatgaatcatttgagctagttgctatcagt

SEQ ID NO: 2408 - protein, 162 aa, Streptococcus agalactiae
MKGGQAMNLNQIRIIEACHKFLIGITNFEEELQDDVLVYRYKGNLVSFETYQEYEQRSFVDYNLKYGYLDDTRTYLDDRADLIAAFPSEEHLRALQRVNDAEQARVQIFKLLSQVNLDSLSEKNSNIKKDNFGYDFFNFATKEEYPVYLFSDDESFELVAIS

SEQ ID NO: 2409 - DNA, 264 bp, Streptococcus agalactiae
ttgacctcctttcataaaagatttcaagtcaattataccaaactagaaaggaaaaatatgagtcaacaacagaaaaaatggattcagctagtgaaagataagctgaatgaagaacagatgacacaaacacatctagctcgttcttgtggtgttgctaaggcaactatctcagaattgctgaaatatggcaaagggagcgacaaactcaaaaataaggtatctgatgtattacacatagatgagagctggacgaggttggaggat

SEQ ID NO: 2410 - protein, 88 aa, Streptococcus agalactiae
MTSFHKRFQVNYTKLERKNMSQQQKKWIQLVKDKLNEEQMTQTHLARSCGVAKATISELLKYGKGSDKLKNKVSDVLHIDESWTRLED

SEQ ID NO: 2411 - DNA, 708 bp, Streptococcus agalactiae
atgaacgaaatttttgtttttcacgggcaggaagtccgtactgtaaccattaacaacgagccttggtttgttgggaaagacgtggctgatattttaggctattcaaaatcacgaaatgcgattgcactccatgttgatgaggatgacgccctaaaacagggcatcacagacaatttaggtcgcatgcaagaaactattatcatcaatgaatctggtctttactcacttatcttatccagtaaattgccacaggtcaaagaattcaaacgttgggtcactagcgaggtattgccacagattcggcaacagggagcttatgtgcctgaaaatctatcagatgaggctttcatcgctctatttactggacagaagaaactgaaagagcaccagttggcattggctcaagatgttgattatctgaaaaatgagcaaccaattcatcctagctttgctcaagccttactgaagaagagaaaagctcgtgttgtctcttgtctaggtggaatggacagtccagcctatgctgataaagtcttcgcacagtcggtctttagacaagctgaggttgattttaaagaccatttcaatatcaatcgctatgacatgttgccaaagaaatttgctgaagcagcattatcttactggatgacatgggaaccaagcacaaataccaaaatgaaaattttggagatgaacgcttatgaactg

SEQ ID NO: 2412 - protein, 236 aa, Streptococcus agalactiae
MNEIFVFHGQEVRTVTINNEPWFVGKDVADILGYSKSRNAIALHVDEDDALKQGITDNLGRMQETIIINESGLYSLILSSKLPQVKEFKRWVTSEVLPQIRQQGAYVPENLSDEAFIALFTGQKKLKEHQLALAQDVDYLKNEQPIHPSFAQALLKKRKARVVSCLGGMDSPAYADKVFAQSVFRQAEVDFKDHFNINRYDMLPKKFAEAALSYWMTWEPSTNTKMKILEMNAYEL

SEQ ID NO: 2413 - DNA, 744 bp, Streptococcus pyogenes
atggaattacaagtatttactaatgaacagtttggagaagtgcgtacagcgacaatcaacaatcaaatttatttcaatcttaacgattgttgtcagattttggaattaagcaatcctcgtaaaacaattgaaagacttaataaagatggtgtaactactagtgacatcatcgacagtcttggtcgaactcaacaagccaacttcatcaacgaaagcaacttctacaagctagtcttccaatctcgcaagccagaagctgaaaagtttgcggactgggtaacatcggaagtcctaccatcaatccgcaaacatggcgcatatatgaccgaacagactttagagcaggcgctgacaagcccagacttcctcatacggcttgccaatgagttaaaagaggaaaaggagcgcagtcgtcagttagaggctgagaagtcaattttgagcgttgagaacatggttatgaagccaaaggctgattattttgatgatttggttgaccgcaatttattgactagtttccgtgaaactgctaaacaattaaaagttaaggaacgacgattcattcaatttctacttgataagaaatacgtttacagagacaagaaaggtaagcttatgccgtttgcagataaaaataacgggttatttgaagtcaaggaaagtgttaacgaaaagaccaactgggcaggaactcaaaccttaataactccaaaaggtcgtgaaacttttagactgttatttatt

SEQ ID NO: 2414 - protein, 248 aa, Streptococcus pyogenes
MELQVFTNEQFGEVRTATINNQIYFNLNDCCQILELSNPRKTIERLNKDGVTTSDIIDSLGRTQQANFINESNFYKLVFQSRKPEAEKFADWVTSEVLPSIRKHGAYMTEQTLEQALTSPDFLIRLANELKEEKERSRQLEAEKSILSVENMVMKPKADYFDDLVDRNLLTSFRETAKQLKVKERRFIQFLLDKKYVYRDKKGKLMPFADKNNGLFEVKESVNEKTNWAGTQTLITPKGRETFRLLFI

SEQ ID NO: 2415 - DNA, 528 bp, Streptococcus agalactiae
atgaacgaagtttggaaagatataccaattgttaaaggatattatcaagtttccaatcttggtcgtgttcggtctattggtagaacagtcaatgcaaaacagagaacaagaaaaacaaaaggacgcatcttaaaacagagcttatcttcaggctatgcaatagtgacactttcagtcaatggattaaggaagtcgataagagttcatagactagtagctgaagcatttataccaaatccaatcaataagcgaacgataaatcatattgatgaaaataaacttaataatagagtagataatttagaatgggcgacagataaggaaaatgctaatcatgggaatagaacaacgaaatcatctttaggtcgttgtaaacctgtagaacaatttacacttgaaggggaattcataaacacgtttgactcaataaaatctgcatcaatgaaaacaggtatctcgtcacaaagaataacagcaacagcaatggggcaccaaaaacagactcacggatataaatggaggtacgca

SEQ ID NO: 2416 - protein, 176 aa, Streptococcus agalactiae
MNEVWKDIPIVKGYYQVSNLGRVRSIGRTVNAKQRTRKTKGRILKQSLSSGYAIVTLSVNGLRKSIRVHRLVAEAFIPNPINKRTINHIDENKLNNRVDNLEWATDKENANHGNRTTKSSLGRCKPVEQFTLEGEFINTFDSIKSASMKTGISSQRITATAMGHQKQTHGYKWRYA

SEQ ID NO: 2417 - DNA, 297 bp, Streptococcus agalactiae
atggaggtacgcataatgaatgatctaatgattcaaatgcttgaccagttcgaagctggtctaatggacagaacgatgaaagtaatgcacgttgtgacagacgaaaagtatagatttcctttagaactcaacaagtctcaatgcgctttaatgctcttaggtactaaagatactgggacatttgatgaacgctttaactgtcataaggattttccgaggattccaaatgctcgtgagaaataccctcgtgatgaagtcattgaatggtatcacaagaattggcaaagaactgttatc

SEQ ID NO: 2418 - protein, 99 aa, Streptococcus agalactiae
MEVRIMNDLMIQMLDQFEAGLMDRTMKVMHVVTDEKYRFPLELNKSQCALMLLGTKDTGTFDERFNCHKDFPRIPNAREKYPRDEVIEWYHKNWQRTVI

SEQ ID NO: 2419 - DNA, 261 bp, Streptococcus agalactiae
ttggcaaagaactgttatctaagaaagaacaaaaggaactatatcatgaacaatttacaaattatcgcagtaggcacacttatttcagtaaccctgattgagtctcttatctcaaatatcaagctcagaaaagctctcaagaacaaacagacagctgggactgtcattgctcaatatatcccacaacgaggcttcattgactacaagactggaagacgtgttgacattgaccctgaaacaaagaaagaagtctttgttgac

SEQ ID NO: 2420 - protein, 87 aa, Streptococcus agalactiae
MAKNCYLRKNKRNYIMNNLQIIAVGTLISVTLIESLISNIKLRKALKNKQTAGTVIAQYIPQRGFIDYKTGRRVDIDPETKKEVFVD

SEQ ID NO: 2421 - DNA, 1329 bp, Streptococcus agalactiae
atggatgaattaaaagtattgcctcacgatatccaggctgagcagtcggttcttggttcaatttttatcaaacctgaaaaaatgattgaggtggctgagtatctgaaaccaaatgacttttacaggccagctcacaagattctatttaaggccatggtgagccttgctgatcgtggcgaggccatcgatattgtcacaatcaagtcaacgctggaaagtacggatgaacttggcatggttggcggtatcagctacatcgctgagattgttaatgcagtgccaaccagctcacacgctgagcattatgccaagattgttgctaaaaaagcacagctacggtctatcattgacaacttgtctgactcaattggcaatgcctatgatgaggacatggatattgatgagattatcgcaaaagctgagcgatcacttatcgaagttagtcaagccagtaacaagagtagtttcagacctatccatgatgtccttttggaaaatcattcaaagattgaggaacgctcaaacaataccagtcaaatcactggtattgaaacaggattttatgactttgacaagctgataacaggcttgcatgaagaccagctaattgtcttagcggcacggccagcgatggggaagacagccctagctcttaacatagctcagaatgtggcaactaagtccaataaggctgtggccgtcttctcgcttgaaatgggggctgaaagccttgttgagcggatgttgtcagctgaaggaacaatcatcaaccatcatattagaacaggaaatttgacggttaatgagtggcaacgtcttatctatgcacagggtcagcttgctgaagctccaatctttatagatgacacagctggagtcaagattactgacatcagagcaagagctaggaggctatctcaagagactgacggacttggattgatagtcattgactatcttcaactcattcaagggtcacggtctgacaaccgacagcaagaggtatctgagatttctaggcagttaaagattattgccaaggaattaaaagtgccagtcattgcactatcacagcttagccgtggggttgagcaaagaaacgacaaaaggcctatcatgtccgacttaagggaatcaggcagcattgagcaagacgctgatattgtcgccttcctctatcgtgatgcttattaccaagacaaaaaagaaggtcagccagaaaacgacatcactgagctgatcatcagaaagaacagacacggaaaccttggcacagtcaagctgtatttccacaaggaatataccaagttttctagcgttgaggaggaa

SEQ ID NO: 2422 - protein, 443 aa, Streptococcus agalactiae
MDELKVLPHDIQAEQSVLGSIFIKPEKMIEVAEYLKPNDFYRPAHKILFKAMVSLADRGEAIDIVTIKSTLESTDELGMVGGISYIAEIVNAVPTSSHAEHYAKIVAKKAQLRSIIDNLSDSIGNAYDEDMDIDEIIAKAERSLIEVSQASNKSSFRPIHDVLLENHSKIEERSNNTSQITGIETGFYDFDKLITGLHEDQLIVLAARPAMGKTALALNIAQNVATKSNKAVAVFSLEMGAESLVERMLSAEGTIINHHIRTGNLTVNEWQRLIYAQGQLAEAPIFIDDTAGVKITDIRARARRLSQETDGLGLIVIDYLQLIQGSRSDNRQQEVSEISRQLKIIAKELKVPVIALSQLSRGVEQRNDKRPIMSDLRESGSIEQDADIVAFLYRDAYYQDKKEGQPENDITELIIRKNRHGNLGTVKLYFHKEYTKFSSVEEE

SEQ ID NO: 2423 - DNA, 1374 bp, Streptococcus pyogenes
ttggaggttatgaggttgcctgaagtagctgaattacgagttcaaccccaagatttactagcagagcaatctgttcttgggtcaatctttatctcacctgataagctgattgcagtgagagaatttatcagtccagacgatttttataagtacgctcataaaattatctttcgggcaatgattaccctcagcgatcgtaatgatgccattgatgcaaccactataagaacaatcctagatgatcaagatgatctgcaaagtattggtggcttatcctatattgttgaactagttaatagtgtcccaactagtgctaatgcagaatattatgctaaaattgtagctgagaaagctatgttgcgtgatattattgctaggttgacagaatctgtcaacctagcttatgatgaaattttaaaaccagaagaggttatcgctggagttgagagagctttaattgaactcaatgaacatagtaatcgtagtgggtttcgcaaaatttcagatgtgctaaaagttaattacgaggctttagaagcacgttctaagcagacttcaaatgttacaggtttaccaactggttttagagaccttgacaagattacaacaggtttacacccagatcaattagttattttagctgctcggccagcagtggggaagactgcctttgttcttaatattgcgcaaaatgtggggactaagcaaaaaaagactgttgctattttttctttggaaatgggtgctgaaagtttagtagatcgtatgcttgcagcagaaggaatggttgattcgcacagtttaagaacagggcaactcacagatcaggattggaataatgtaacaattgctcagggagctttggcagaagcaccgatttatattgacgatacgcccgggattaaaattactgaaatccgcgcaagatcacggaaattgtctcaagaagtggatggtggtttaggtctcattgtaattgactacttacagttgattacaggaactaaacccgaaaatcgtcagcaagaggtttcagatatttcaagacagcttaaaatcctagctaaagaattgaaagtaccagttattgccctaagtcagctttctcgtggcgttgagcaaaggcaagataaacgaccagttttatcagatattcgtgaatcaggatctattgagcaggatgccgatattgtagccttcttataccgggacgattattaccgtaaagaatgtgatgatgctgaagaagctgttgaagataacacaattgaagttatcctcgagaaaaatagagctggggcgcgtggaacagtcaaactgatgttccaaaaagaatacaacaaattctcaagtatagcccagtttgaagaaaga

SEQ ID NO: 2424 - protein, 458 aa, Streptococcus pyogenes
LEVMRLPEVAELRVQPQDLLAEQSVLGSIFISPDKLIAVREFISPDDFYKYAHKIIFRAMITLSDRNDAIDATTIRTILDDQDDLQSIGGLSYIVELVNSVPTSANAEYYAKIVAEKAMLRDIIARLTESVNLAYDEILKPEEVIAGVERALIELNEHSNRSGFRKISDVLKVNYEALEARSKQTSNVTGLPTGFRDLDKITTGLHPDQLVILAARPAVGKTAFVLNIAQNVGTKQKKTVAIFSLEMGAESLVDRMLAAEGMVDSHSLRTGQLTDQDWNNVTIAQGALAEAPIYIDDTPGIKITEIRARSRKLSQEVDGGLGLIVIDYLQLITGTKPENRQQEVSDISRQLKILAKELKVPVIALSQLSRGVEQRQDKRPVLSDIRESGSIEQDADIVAFLYRDDYYRKECDDAEEAVEDNTIEVILEKNRAGARGTVKLMFQKEYNKFSSIAQFEER

SEQ ID NO: 2425 - DNA, 666 bp, Streptococcus agalactiae
ttggcacagtcaagctgtatttccacaaggaatataccaagttttctagcgttgaggaggaatgaaatgaaaaaatttgaccactatttcagcaaccatattgctgtaaaaaacgaatctgatacagtcaccattgttgactattacaatccagaaaagggctatgagtataacttacgttacattttcgatagaaaaaattcatcccttgctatcacaggagactttggggaattagttgcacgaaatttctacaatatgggtgaatgggacacattctacaatcactatactggtcatctggggtattttcttgaaaagttactatgttcaagtaggccagttcattactatgatactgacaaggctaaaagagaaattctcaatgaattctttgatggtgctgattatgatgatttagattttgatgatgaattcctacttgatcaattatttgacaattttgacgaagataaaggatttacttatattcttccagaggcttttgaacgttttagcgaagatatggaagaatatgaggtctatgaatttctatcaagggctggccgatacgtcaatgatgtctttgaactttacttagacgcttataagagagcttatgagtatctaacaaaggaggttgatgatggcacaacgcagaatgtt

SEQ ID NO: 2426 - protein, 222 aa, Streptococcus agalactiae
MAQSSCISTRNIPSFLALRRNEMKKFDHYFSNHIAVKNESDTVTIVDYYNPEKGYEYNLRYIFDRKNSSLAITGDFGELVARNFYNMGEWDTFYNHYTGHLGYFLEKLLCSSRPVHYYDTDKAKREILNEFFDGADYDDLDFDDEFLLDQLFDNFDEDKGFTYILPEAFERFSEDMEEYEVYEFLSRAGRYVNDVFELYLDAYKRAYEYLTKEVDDGTTQNV

SEQ ID NO: 2427 - DNA, 96 bp, Streptococcus agalactiae
ttgaaagcggtcagactggatatagttgtgaatccgccaatgacggataacgactacaccactatcaaagggaatcaagaacccttttgcaatcag

SEQ ID NO: 2428 - protein, 32 aa, Streptococcus agalactiae
MKAVRLDIVVNPPMTDNDYTTIKGNQEPFCNQ

SEQ ID NO: 2429 - DNA, 750 bp, Streptococcus agalactiae
ttgatgatggcacaacgcagaatgtttagtagaaaaatcactgagactgaccgttttttggaaatgccactatcatcccaagctctctatttccatttgaacatgggagctgatgatgagggctttatagataaggcaaagacgattcagagaactattggcgctagtgatgatgatatgaaattactgattgcaaaagggttcttgattccctttgatagtggtgtagtcgttatccgtcattggcggattcacaactatatccagtctgaccgctttcaatcaaccttataccagtcagaaaaggctcagctagagtatgacaagtcaaaaacagctagtcttaaacctattggaaattgtatacaaaatgtatccaaaatggagacacaggttaggttaagtaagggtagcttagataaggatagcttaactacctatcctacagtttcagacaatgaggaagaagatattccatacaaggaaattatttcttacttgaatgaaaaagctaatagaaattacagacctaacattcagaaaaacaaaactcttatcaaggctagatggtcagaaggattcaggttagatgatttcaaacatgtgattgataccacggtcaaggattggtcaggcactaagtatgaaaagtatctcagacctgaaacgctctttggttctaagtttgaaggctatttgaatcaagcaccacgaatcaagacggaaacaattgacggaaggttgggcttt

SEQ ID NO: 2430 - protein, 250 aa, Streptococcus agalactiae
MMMAQRRMFSRKITETDRFLEMPLSSQALYFHLNMGADDEGFIDKAKTIQRTIGASDDDMKLLIAKGFLIPFDSGVVVIRHWRIHNYIQSDRFQSTLYQSEKAQLEYDKSKTASLKPIGNCIQNVSKMETQVRLSKGSLDKDSLTTYPTVSDNEEEDIPYKEIISYLNEKANRNYRPNIQKNKTLIKARWSEGFRLDDFKHVIDTTVKDWSGTKYEKYLRPETLFGSKFEGYLNQAPRIKTETIDGRLGF

SEQ ID NO: 2431 - DNA, 819 bp, Streptococcus agalactiae
atgaatccttttaagaattttgaaactaggcaagtcttggaagaaacctgcgaggttcacggttgccagctctggctgactaaagtaccgattaagggacggcttgaagaactcaagcagtgtccagagtgtaccaaggccgctatcaacatctttgaaaataagttgaacagtcagagcaaaatcaacagcaagcttgctgatacatatgctgtctttgaaagagatagcttggtatcagataagctgagggctaagagtcttgagaactatgaaatcaaggatgaaattgaccagcatgctatcaattatgccaagcgtatggaacagttctaccgacaggatagaacaggcaatgccattattactggcccttctggtgttggcaaaagtcatctgacttacggcttggccaagttcatgaacgaacaattcaaagcctacgaatcaccaaaatcagttctttttatctcactggtgagcctttttaccaaaataaaagaaagcttcaaggttgacaatgggtacagacaggctgacatgattgagctgctaactagggtggactacctctttctggacgatttgggcaaggagagtcgcaaaggcgacagccagaacaatgagtggacacatcagattctctatgagattttggacaatcggagcaacacaatcatcaacactaacctgagtagtaaggagattaaggccttgtatgctgacaattatggcaacggtgctttgtctagtcggattcttgagggtgtgactggaaatagctttgcttatccgaaggatatggaagataggaggtat

SEQ ID NO: 2432 - protein, 273 aa, Streptococcus agalactiae
MNPFKNFETRQVLEETCEVHGCQLWLTKVPIKGRLEELKQCPECTKAAINIFENKLNSQSKINSKLADTYAVFERDSLVSDKLRAKSLENYEIKDEIDQHAINYAKRMEQFYRQDRTGNAIITGPSGVGKSHLTYGLAKFMNEQFKAYESPKSVLFISLVSLFTKIKESFKVDNGYRQADMIELLTRVDYLFLDDLGKESRKGDSQNNEWTHQILYEILDNRSNTIINTNLSSKEIKALYADNYGNGALSSRILEGVTGNSFAYPKDMEDRRY

SEQ ID NO: 2433 - DNA, 1314 bp, Streptococcus agalactiae
ttgatgaaatttttagacctctttgctggcattggtggttttcgccttggaatggagcaagctgggcatgagtgcataggattctgtgaaataaataaatttgctagagctagctacaaagtaatacatgatactgaaggagaaattgaactacatgacatcacaagagtttcagatgagtttattcgaggaatcggaagtgtggacgttatctgtggcggatttccgtgccaggctttctcaattgctggaaatagacgaggttttgaagatacacgaggaactttgttctttgaaattgctaggttcgcatctattctcagacctaagtatctattccttgagaacgttaaaggactcctcaaccacgaagggggggctacattcgagaccatcatcagaaccttggatgaattggggtacaacgtggaatggcaaatctttaacagcaagaattttggagtcccccagaatagggaacgagtgtttattatcggacatcttagaggagaaggtaccagaccaatttttcctttcgaatcaagcatcacagaaaattatcctatccacaccagaaaaataggaaatgttaatccatctggtaatggaatgaatggggaagtgtatgattcggaaggtttatctccaactctaacaacaaataagggagaaggagttaaaatcgctgtaaatgttgtaggcagattacctgggaaatttgaaatgccaaatagagtctacgatccagatggcctagcaccgactatcagaactatgcaaggtggagggttagagccaaaaataattcagcgaggcagaggctataatcagggaggagaatatgaaatttctccaactgtcacatgcaacagttggcaagaaaacaatcttttaaagataaaagaagccactaaaaaaggctattcagaggcagaggctggcgattcagtaaacttatctcacccaaattctgagacaagacgtggacgagttggtaaaggtattgccaatactctcttgactggagaagaacaaggtgtggttgtttatgacttgtacaacagaagaaagaaagatattgttggcactttaacagctagcggtcataacggtaatactactacgggtacttttggtatctctaacggatttagaatcagaaagcttacacctcgtgagtgttggaggctacaaggcttccctgactgggcttttgacaaggcgagtcaggtcaatagcaacagtcaattatataaacaagctggtaatagcgtaacagtaaacgtcattgctgcaattgcaaggagattgcta

SEQ ID NO: 2434 - protein, 438 aa, Streptococcus agalactiae
MMKFLDLFAGIGGFRLGMEQAGHECIGFCEINKFARASYKVIHDTEGEIELHDITRVSDEFIRGIGSVDVICGGFPCQAFSIAGNRRGFEDTRGTLFFEIARFASILRPKYLFLENVKGLLNHEGGATFETIIRTLDELGYNVEWQIFNSKNFGVPQNRERVFIIGHLRGEGTRPIFPFESSITENYPIHTRKIGNVNPSGNGMNGEVYDSEGLSPTLTTNKGEGVKIAVNVVGRLPGKFEMPNRVYDPDGLAPTIRTMQGGGLEPKIIQRGRGYNQGGEYEISPTVTCNSWQENNLLKIKEATKKGYSEAEAGDSVNLSHPNSETRRGRVGKGIANTLLTGEEQGVVVYDLYNRRKKDIVGTLTASGHNGNTTTGTFGISNGFRIRKLTPRECWRLQGFPDWAFDKASQVNSNSQLYKQAGNSVTVNVIAAIARRLL

SEQ ID NO: 2435 - DNA, 330 bp, Streptococcus pyogenes
atgagagatatgaagtttttagatttgtttgcaggaattggaggctttcgattgggtttaattaatcagtgccatgagtgtattggcttttgtgagattgataagtttgcgaggcaatcttacaaagccatctatgagaccgaaggagaaatagaatttcatgacattagacaagtcacagaccaagactttagacaacttagagggcaagtggatatcatctgcggtggtttttcccttgtcaagcattttcactcgcaggcagacgactgggatttgagggcactaggagaactctcttctttgagattactcgagcgaccaaacaga

SEQ ID NO: 2436 - protein, 110 aa, Streptococcus pyogenes
MRDMKFLDLFAGIGGFRLGLINQCHECIGFCEIDKFARQSYKAIYETEGEIEFHDIRQVTDQDFRQLRGQVDIICGGFSLVKHFHSQADDWDLRALGELSSLRLLERPNR

SEQ ID NO: 2437 - DNA, 402 bp, Streptococcus agalactiae
atgacctatgaagctacattcatgctatatggttacaaagctgttccaattggccagtttgaatctaaggagttggctgcccaagcaattattgaccatatcattgagaactctggcatacatagaccaagggtagttgcaacaatgaaaatacggagcaaggaaatcagaattgattatggttctaaaacttgctactacttgattactttaattaaaaaaaaacggaggaaaaacaaaatgagcaataatattgactataagcagggctatcgtgatgctatacagtttgccatctcagaaatcaatgaaagtgcagacaattttcttatcgatgaaaaagaggctgatagaatcaacgaaaatctaaaaacaatattaagaaaggtttatcaaaatgac

SEQ ID NO: 2438 - protein, 134 aa, Streptococcus agalactiae
MTYEATFMLYGYKAVPIGQFESKELAAQAIIDHIIENSGIHRPRVVATMKIRSKEIRIDYGSKTCYYLITLIKKKRRKNKMSNNIDYKQGYRDAIQFAISEINESADNFLIDEKEADRINENLKTILRKVYQND

SEQ ID NO: 2439 - DNA, 489 bp, Streptococcus agalactiae
atgactaaaacaatgacacttgaagagaaggttgaacagtggtttattgaccgtaacttacacgaggcaaatcctgtcaagcagtttcagaagctgattgaggaaactggggagctttactctggtattgcaaagggtaagagtgaaatcatccgtgattcacttggggacatgcaagttgtcctgattggcattgaacaacaaatcaagaacggtgctcagattgaagcaagtccacaagatatggagctgttgctacttgcttcaagtttgggggagatggctcagaaactctacaagcatatcttccacaacgaaacaaaaacaccgcttatccgtccagaacttagcttgcttcactctaatattcattccattgcaatccacaatctgacaacggctgatgattgcttggctattgcctatgaagaaatcaaggacagaaaaggcaagttaatcaatggaatttgggttaaagaggaggatttg

SEQ ID NO: 2440 - protein, 163 aa, Streptococcus agalactiae
MTKTMTLEEKVEQWFIDRNLHEANPVKQFQKLIEETGELYSGIAKGKSEIIRDSLGDMQVVLIGIEQQIKNGAQIEASPQDMELLLLASSLGEMAQKLYKHIFHNETKTPLIRPELSLLHSNIHSIAIHNLTTADDCLAIAYEEIKDRKGKLINGIWVKEEDL

SEQ ID NO: 2441 - DNA, 327 bp, Streptococcus agalactiae
atgaaaaacctgaattgggaagaattcttcaacaatctcaaggcttttgctagtgccatcatcatcactgtatttgtttttggattcaactatctgttttatgatattggctaccagaaaggccatcaggaagctgacagggtgattatctatgtggctgacaatgctggcgctgaaatgtttggcaaaatcactgataaagaaatcattgaaggccgtcacacagttacagctggcgcttatggcaagttcttggttactgaggaacaatacaatgaaattactgttggtgatgacattcctgactatttgaaaggacgtggaaac

SEQ ID NO: 2442 - protein, 109 aa, Streptococcus agalactiae
MKNLNWEEFFNNLKAFASAIIITVFVFGFNYLFYDIGYQKGHQEADRVIIYVADNAGAEMFGKITDKEIIEGRHTVTAGAYGKFLVTEEQYNEITVGDDIPDYLKGRGN

SEQ ID NO: 2443 - DNA, 354 bp, Streptococcus agalactiae
atgacaaaatgtgattttatgacaaaacggctcaatattctaaatgatgaagatgaggaaatgaagaaactcattgaacaaggctacacaaagatagaaagtgagctaggtaagataactggattcagaatcttgcatgacaatgtaaactatcctagccattatcaagggaaatacggtttagagtcaattgatgttctcaggaactttatgacccctgaaatgctcaaaggattttatctaggaaatgccctaaagtaccaactacggtaccgaaagaaaaacggccttgaagacctcaaaaaagcaagaaagaaccttgactggttgattgaagaaatggagaaagagaaa

SEQ ID NO: 2444 - protein, 118 aa, Streptococcus agalactiae
MTKCDFMTKRLNILNDEDEEMKKLIEQGYTKIESELGKITGFRILHDNVNYPSHYQGKYGLESIDVLRNFMTPEMLKGFYLGNALKYQLRYRKKNGLEDLKKARKNLDWLIEEMEKEK

SEQ ID NO: 2445 - DNA, 204 bp, Streptococcus agalactiae
atgaaaaaatcaataggaatccttgaatttaaagaatttgatgcttttgttggtggaaaggttatgcctgtctatcttcatagtgctaacccaaacgtgccaacgactaataaaaatgaggctatgagggttaccaaaaagagatacagaaaagagttctctgacaagtacattttcagaaaggttggtgaggttgatgatcaa

SEQ ID NO: 2446 - protein, 68 aa, Streptococcus agalactiae
MKKSIGILEFKEFDAFVGGKVMPVYLHSANPNVPTTNKNEAMRVTKKRYRKEFSDKYIFRKVGEVDDQ

SEQ ID NO: 2447 - DNA, 426 bp, Streptococcus agalactiae
ttggtgaggttgatgatcaataatgttgtacttattggccgcttgacaagagatgttgagctacgttacacgccgtcaaacatcgcaaacgctacttttaacctagcagtcaatcgaaatttcaagaatgctgctggtgatcgtgaagctgatttcatcaactgtgtgatgtggcgacaacaagctgaaaacttggccaattggacgaaaaaaggaatgctgattggtattactggacgaatccagacaagaagctacgaaaatcagcaaggtcagcgtatctatgtgactgaggttgttgctgacagcttccagattcttgaaaagcgtgataattcaacgaaccaggcaagcatggatgaccaattgccaccatcatttggaaatagtcagcctatggatatttcagatgatgatctaccgttt

SEQ ID NO: 2448 - protein, 142 aa, Streptococcus agalactiae
MVRLMINNVVLIGRLTRDVELRYTPSNIANATFNLAVNRNFKNAAGDREADFINCVMWRQQAENLANWTKKGMLIGITGRIQTRSYENQQGQRIYVTEVVADSFQILEKRDNSTNQASMDDQLPPSFGNSQPMDISDDDLPF

SEQ ID NO: 2449 - DNA, 264 bp, Streptococcus agalactiae
gtgcttatgaacgaatataagaaacccacctacatcgtcattcaagaggcaatggctgagcgtattagatttcttgaagatgaattatataacagagcatacaaagacattgaacggctagaagttgagaatgaccgtctgaaggttagatgccttgatttgcagttggaaaatgctgactatgtctgggatgacatgtgtcgctctgctattgctcgtgcaaaatcagaaaatcgaagaccacacagaagatggaggggaaga

SEQ ID NO: 2450 - protein, 88 aa, Streptococcus agalactiae
MLMNEYKKPTYIVIQEAMAERIRFLEDELYNRAYKDIERLEVENDRLKVRCLDLQLENADYVWDDMCRSAIARAKSENRRPHRRWRGR

SEQ ID NO: 2451 - DNA, 123 bp, Streptococcus agalactiae
ttgatttgcagttggaaaatgctgactatgtctgggatgacatgtgtcgctctgctattgctcgtgcaaaatcagaaaatcgaagaccacacagaagatggaggggaagatgaagttaaggct

SEQ ID NO: 2452 - protein, 41 aa, Streptococcus agalactiae
MICSWKMLTMSGMTCVALLLLVQNQKIEDHTEDGGEDEVKA

SEQ ID NO: 2453 - DNA, 357 bp, Streptococcus agalactiae
atggaggggaagatgaagttaaggcttgaagaactaagaaacaaacttggcctcagtcgcagagatgtgcatgaagccactggcatttctatgaacacgctgctacattatgaaaaaggcggtacaccatctattggtcaggttgaaaatatcgctaaggcttacaatatcaacccagcctggttgcttggttggattgatgaaggccagcaaccacaaccacttgaaaccgttgttgaaaagattatctatgtggaaaaggaaggctgtagattaccgccatattggaacaatgataataatggcagaatcatcaagtggaaagaatcaagaagagcattccaaaggagaacaatt

SEQ ID NO: 2454 - protein, 119 aa, Streptococcus agalactiae
MEGKMKLRLEELRNKLGLSRRDVHEATGISMNTLLHYEKGGTPSIGQVENIAKAYNINPAWLLGWIDEGQQPQPLETVVEKIIYVEKEGCRLPPYWNNDNNGRIIKWKESRRAFQRRTI

SEQ ID NO: 2455 - DNA, 462 bp, Streptococcus agalactiae
ttgacaaagaaaacagcaagtaagacaagacgtgatttccttgagtttgagcttgaggctaagtatctaaaaattgataaacttattgggcagcgccgtcatgaactggaaagaatctatgcagtcaaaaacctgacaatgccaggaatcgatgattcaggagctagtcgcagtggaacttcaactaatacttctgaaaatctagctgttgcttatgccagtgacccaatgattctgaaactggaagagttccaaaatgcgatatcagaattactagaggtacttgaacccgatgataagaaaattttccatctgaggtggggagaacatactggatatgattggattcaagtttggcacatcatggaaaatggcgagacaggttatctttacagacatagcaagcagatttatagaagacgtgaagtcatccttgatacacttgcaaaattattgttcatg

SEQ ID NO: 2456 - protein, 154 aa, Streptococcus agalactiae
MTKKTASKTRRDFLEFELEAKYLKIDKLIGQRRHELERIYAVKNLTMPGIDDSGASRSGTSTNTSENLAVAYASDPMILKLEEFQNAISELLEVLEPDDKKIFHLRWGEHTGYDWIQVWHIMENGETGYLYRHSKQIYRRREVILDTLAKLLFM

SEQ ID NO: 2457 - DNA, 540 bp, Streptococcus agalactiae
atgaatattgttgaaccgctacgagacaaagacgatatacaagccatgaaggactatctatcatcttggaatgaaaagtattacatgctatttcttttgggcatcaatacaggtttccgtgttggagatattctcaagctaaaggtcaaagatgtccaaggctggcacatcaaagttagggaacaaaagactggtaagtataaaagtattaagatgacaaggccactcaaaaacgaattgagggaatttgtcaaagacaaggaacttcatgagtatctatttcagagtcgtgtcggaaagaacaaggcgctcagttataagacggtttactggtttcttaaaagagctgctgaagacctcggcattgacaatgttggaactcatacaatgcgaaaaacctttggctatcattactacaagaagtacaagaacgttgctgacttgatgtcactattcaatcattcaagcccagcagttacactaatctacatttgtgtaaggcaagatgagcttgatactaagatgagtaattttagcctc

SEQ ID NO: 2458 - protein, 180 aa, Streptococcus agalactiae
MNIVEPLRDKDDIQAMKDYLSSWNEKYYMLFLLGINTGFRVGDILKLKVKDVQGWHIKVREQKTGKYKSIKMTRPLKNELREFVKDKELHEYLFQSRVGKNKALSYKTVYWFLKRAAEDLGIDNVGTHTMRKTFGYHYYKKYKNVADLMSLFNHSSPAVTLIYICVRQDELDTKMSNFSL

SEQ ID NO: 2459 - DNA, 285 bp, Streptococcus agalactiae
atgaaagatgaaaatgcatttgatggaattaggcttgaagctggtagcactttagaaatctatctcacgaagaacgacttagaacatattgcaaatggatatgaggtgactttagatattaagcctaacgagactgtaaataaaatcgtaataaagccaagttttgtaaataatattctaaatccgttaatcaactatgacaaaagaatagtgagtgaagcagatttaaagtttagagacatttcaagagaggttgcaagagatagttttgcattggggtcaatg

SEQ ID NO: 2460 - protein, 95 aa, Streptococcus agalactiae
MKDENAFDGIRLEAGSTLEIYLTKNDLEHIANGYEVTLDIKPNETVNKIVIKPSFVNNILNPLINYDKRIVSEADLKFRDISREVARDSFALGSM

SEQ ID NO: 2461 - DNA, 141 bp, Streptococcus agalactiae
atggggggagtccacaaaaattcaaaaataaaaaaatcaaaaataaatttatattccgattatctaaatttaaatttattttactttgaaaagtttttgtgttgtgacattcaagacaaagtaactgacagttctcttcgt

SEQ ID NO: 2462 - protein, 47 aa, Streptococcus agalactiae
MGGVHKNSKIKKSKINLYSDYLNLNLFYFEKFLCCDIQDKVTDSSLR

SEQ ID NO: 2463 - DNA, 111 bp, Streptococcus agalactiae
ttgtatcaattttcgtcaattttgggggagaggtacacaagaggattgacaccgttattattttggcgctgtcaaaattcaaaatggggggagtccacaaaaattcaaaaa

SEQ ID NO: 2464 - protein, 37 aa, Streptococcus agalactiae
MYQFSSILGERYTRGLTPLLFWRCQNSKWGESTKIQK

SEQ ID NO: 2465 - DNA, 501 bp, Streptococcus agalactiae
ttgatacaagaaaggagcatgattttgaaaatcaatgaagttttagaaaagctaggaataagtcgtgctacccttacaaggtatcgaaaaaagctgggcatatttgaagaaactaggtcaaatatcaccaaaagtcagttcaaagagttggaaaagcttgccaatcaacggcaaaagtacacaaggcaggaacgtgttgagctatctcgtaagactttcaagctgattccaaaagaaaaaatgcttgaaatcagtgataatgattcagttgggttgaaaaatctcaaaactcaatacaatcacaatcaaaaagtgattgaaaacttccagcttgaaatcaataaggtcatcaatgacggtgagctacctgataagtacctacttgatggaatggaaaagtatcaaaagcttaacatgcagatcatgtcaacgattgaaaagcaaagtccacagggtgacaggctcaaagaaatgattcaggagaagttagcacgttatggt

SEQ ID NO: 2466 - protein, 167 aa, Streptococcus agalactiae
MIQERSMILKINEVLEKLGISRATLTRYRKKLGIFEETRSNITKSQFKELEKLANQRQKYTRQERVELSRKTFKLIPKEKMLEISDNDSVGLKNLKTQYNHNQKVIENFQLEINKVINDGELPDKYLLDGMEKYQKLNMQIMSTIEKQSPQGDRLKEMIQEKLARYG

SEQ ID NO: 2467 - DNA, 1710 bp, Streptococcus agalactiae
atggttgagatgagatattttgataagtatgctcagctcatctatactggtaagattcgtatttgtaagctcacaatgaaatcaattagacgtgttgagcgatacaaagagcaatacctcttcaaacaggaggaagctgacaaacggattgagttcattgaggaagagtgcagcaatactaaaggccttgctggtaagttacgcttagcattaccacaaaaggtttggttagaaacaacgtggggcttttatcacacggttgaggttactaagaccaatcctgataccttggaagaatacacagattatgaagaaaggcgtctcattcatgaggtgcctattattgtgcctcgtggcacaggtaagactactcttggttctgctattgctgaggttggtcaaatcattgacggtgagtggggtgctgatattcagcttcttgcttacagtcgtgaacaggctggctatttgttcaatgcctcaagggcgatgttgtcgaatgaagaaagcttgctgcactatatgcgtgaggctgacatcctacggtcaaccaagcaaggtatcttgtatgaaacaactaacagtcttatgtctatcaagacttctgactatgaaagccttgacggtactaatgctcactacaatatctttgatgaggtgcacacttatgatgatgacttcatcaaggttgtgaatgatggttccagccgtaagcgtaagaattggataacctggtacatttccacaaatggaacgaagcgtgacaagctctttgataagtattacaacatctgggtagatatccttgatgacaagattatcaatgattctgtcatgccttggatttatcagttggacgatgtgtcagagattcatgaccctgatatgtggcagaaagctatgccattacttggtatcacgacagagaaagaaaccatcgctcgtgatattgagatgagcaagaatgatccagcacaacaagctgagctgatggctaagactttcaatcttcctgtcaacaactatcttgcttacttcagcaatgaagagtgtaaaggttggtcagataagtttgatgagagtttgtttgtcggagatgatgaacggaacgcccgttgtgtgattgggattgacttgtcagatgtcaatgacatctgctctatctcttttatggttgtgcgtggggaagaacggcactatctaaacaagaaattcatgccacggcataccattgagacattgccaaaggaactgcgtgataagtacactgagtgggaattaagtggcatgctgcatgtgcatgaattggactacaatgaccaagcctatatatttgaagagttacggcagtttatgagtgacaacagaattttgcctgtggcagtcggttatgaccgctacaatgcaagggaacttattcgcttgtttaacgactactacggggatatttgtcacgatattccccagacggtcaaatcgttatcaaatccgctcaaggtttacaaggagaaggctaagatgggcaaaatcatctttgatgatcctgtggcgacatggaatcatgccaacgtccgtgtcaaaattgatgccaataacaatatttttccaaacaaggaaaaggcaaaagaaaagattgatgtctttgctagtcagctagatgcctttatctgttatgaaaatttcaaggaagacttgagctactactttgat

SEQ ID NO: 2468 - protein, 570 aa, Streptococcus agalactiae
MVEMRYFDKYAQLIYTGKIRICKLTMKSIRRVERYKEQYLFKQEEADKRIEFIEEECSNTKGLAGKLRLALPQKVWLETTWGFYHTVEVTKTNPDTLEEYTDYEERRLIHEVPIIVPRGTGKTTLGSAIAEVGQIIDGEWGADIQLLAYSREQAGYLFNASRAMLSNEESLLHYMREADILRSTKQGILYETTNSLMSIKTSDYESLDGTNAHYNIFDEVHTYDDDFIKVVNDGSSRKRKNWITWYISTNGTKRDKLFDKYYNIWVDILDDKIINDSVMPWIYQLDDVSEIHDPDMWQKAMPLLGITTEKETIARDIEMSKNDPAQQAELMAKTFNLPVNNYLAYFSNEECKGWSDKFDESLFVGDDERNARCVIGIDLSDVNDICSISFMVVRGEERHYLNKKFMPRHTIETLPKELRDKYTEWELSGMLHVHELDYNDQAYIFEELRQFMSDNRILPVAVGYDRYNARELIRLFNDYYGDICHDIPQTVKSLSNPLKVYKEKAKMGKIIFDDPVATWNHANVRVKIDANNNIFPNKEKAKEKIDVFASQLDAFICYENFKEDLSYYFD

SEQ ID NO: 2469 - DNA, 1140 bp, Streptococcus agalactiae
atgaacaactatttgaaaaatttgaaggaggtttttgctaggattttccgtccaaacaatcggaaatctacaagaacctatcttcaaagaagtatctcctactggcgtaggaactccatctatttggataacatctacaataagatttcaactgacacagctcagttaaggtttaagcatgtcaagattactcgtaacccaggcggtgtcgattcgatggtttggtatgagcatagtgatttggctgaggtgctaacagtttcaccaaatccactagaagtgcctgttgtcttttggtcaaatgtaactagggctatgctgcgtgacggtgtggcggttgttgtaccacgttggaagaatggccgactggttgaaatatggcttgctaagaagacagtgacttggacagcagagagcgtggagcttatgcttgatgatgttgctgttgagcttcctcttactgatgtgtgggtatttgaaaatcctaagttgaatgtcacggctcaactcaatcagattactgagcttattgacattaacttgaatgctttgacagaaaagcttagcgatggcaattctagcttgagaggtttcttaaagctaccaactaaggcagctgatgaacatttgaagcaacaagccagggaccgtgttgatagtatgcttgacttggccaagaacggtggcattgcttatcttgagcaaggcgaagaattccaggaacttagcaaagactattctactgcttctaaggaagaattagagttcttgaaatcacagctttataatgctcatggtatcaatgagaaattatttacctgtgactatactgaggaacaatatagagcctactattctagcgtcatgaagttatatcagcgtgtctattctgaggagattaacagaaaatacttcacgaagacagcacggactcagggcaataagttactggtcttctttgatatggctgacatgatttcatttaaggatttggttgaaggtggcttcaagtccaaatatgctggattgatgaactcaaatgagttccgtgaaacctatcttggtttacctggctatgagggcggtgaagtatttgaaaccaacctgaatgctgttcgtatcggtgcagaagaatctgag

SEQ ID NO: 2470 - protein, 380 aa, Streptococcus agalactiae
MNNYLKNLKEVFARIFRPNNRKSTRTYLQRSISYWRRNSIYLDNIYNKISTDTAQLRFKHVKITRNPGGVDSMVWYEHSDLAEVLTVSPNPLEVPVVFWSNVTRAMLRDGVAVVVPRWKNGRLVEIWLAKKTVTWTAESVELMLDDVAVELPLTDVWVFENPKLNVTAQLNQITELIDINLNALTEKLSDGNSSLRGFLKLPTKAADEHLKQQARDRVDSMLDLAKNGGIAYLEQGEEFQELSKDYSTASKEELEFLKSQLYNAHGINEKLFTCDYTEEQYRAYYSSVMKLYQRVYSEEINRKYFTKTARTQGNKLLVFFDMADMISFKDLVEGGFKSKYAGLMNSNEFRETYLGLPGYEGGEVFETNLNAVRIGAEESE

SEQ ID NO: 2471 - DNA, 540 bp, Streptococcus agalactiae
atggaaaaactaaaaacctttgttgtgaagtcggttgaggatgaatcagctgactttcattttgaggcttacgcttcaacctatgacaatacagacagagaaggcgatgtgatggccaaggggtgttttgataacactctgaaatctaaggctgttgtccctatgtgtcttaatcatgaccgtaactgtgttattggtaagcatgaattgtctgtggatgaaaaaggcttgcgaacacgttcaacgtttaatcttagtgatccagaggctaagaaaacttatgacctcatgaaaatgggggcattggatagcctgagtattgggttctttattaaagattatgagcctattgacgctaagcaaccttatggcggatggattttcaaggaagttgaaatctttgaaatttctgttgtgaccgtgccagctaaccctcaagcaactgttgacaatattaaggaatttgatatgtcggcggttgataagcgaatcgctcaggcgaacatgaggcaagaaatcatgagtaaacttgcaaaaatt

SEQ ID NO: 2472 - protein, 180 aa, Streptococcus agalactiae
MEKLKTFVVKSVEDESADFHFEAYASTYDNTDREGDVMAKGCFDNTLKSKAVVPMCLNHDRNCVIGKHELSVDEKGLRTRSTFNLSDPEAKKTYDLMKMGALDSLSIGFFIKDYEPIDAKQPYGGWIFKEVEIFEISVVTVPANPQATVDNIKEFDMSAVDKRIAQANMRQEIMSKLAKI

SEQ ID NO: 2473 - DNA, 1284 bp, Streptococcus agalactiae
ttgcaaaaatttaaaggagacatgatgaaaaaatcactcattgagcttttggaagctcgtcaaaaagcaactgatgaactggctgaggtaaagcttaaaaaagccactattgaagcaaagatgaaatcttcaaccattgaagacgatgacttggaacagttaaaaactgatgcagaaagtttggtttctcaagcaacagctattaaggaaacaattgctgggctggattctgacattgaagaaactgaagaagaactcagcaaagctgctaaaatcattaaagaaaaacagaaaggtaatacacctatggattatttgaaaaccaaagccgctgctcttgactttgtccgtattctgatggacaacgaaggtagcgcaaacagtgcccgtaaagcgtgggaagctaaccttgttgaaaaaggagtgactaacctcactaagattcttccagaacctgttcttatcgctattcaagatgcctttactaactataatgggatcttgaaccacgtttcaaaagatccacgttatgcggtgcgtgttgctcttcaaactcaagtatctcaagctaaaggacacaaagctggtaagactaagaaagatgaagacttcacattcttggatttcactatcaactctgcgacagtttatatcaaatatgcctttgaatattctgacttgaagaaagatacaacaggcgcttacttcaactatgtgatgaaagaacttgctcaaggcttcatccgaactattgaacgtgctgttgtcattggtgatggaaaatctaacagtgctgaagacaaaatcactgaaatcaaatcaattgctgaagaaactgaagcgaatctctttgaaacacaagaaatcaatgttgctggtgtatttgacaatgctgttcttgaaacgctggttgctggtattgataagatggttccaaatactactccaattcttgtcacttcaaaagccattgctcgtaaattgaaattggtcaaagatgcagaaggtcgctacatcgatcctcaaccatttgctccaattgcaaccaacggaaatgttattgctggttttcaagtttacatctatgactggatggacggtgcaactaacccaatcattgcatttgctgaccaagcttataagatgattggtgatgaggctgccgctgaccgctttgatgattatgatgtaacagtcaaccgccgtcatattgagcttgctagtgttatgggtggtcgtttggctcagtacaaatcagcggttaagtttacaaacccagcaggt

SEQ ID NO: 2474 - protein, 428 aa, Streptococcus agalactiae
MQKFKGDMMKKSLIELLEARQKATDELAEVKLKKATIEAKMKSSTIEDDDLEQLKTDAESLVSQATAIKETIAGLDSDIEETEEELSKAAKIIKEKQKGNTPMDYLKTKAAALDFVRILMDNEGSANSARKAWEANLVEKGVTNLTKILPEPVLIAIQDAFTNYNGILNHVSKDPRYAVRVALQTQVSQAKGHKAGKTKKDEDFTFLDFTINSATVYIKYAFEYSDLKKDTTGAYFNYVMKELAQGFIRTIERAVVIGDGKSNSAEDKITEIKSIAEETEANLFETQEINVAGVFDNAVLETLVAGIDKMVPNTTPILVTSKAIARKLKLVKDAEGRYIDPQPFAPIATNGNVIAGFQVYIYDWMDGATNPIIAFADQAYKMIGDEAAADRFDDYDVTVNRRHIELASVMGGRLAQYKSAVKFTNPAG

SEQ ID NO: 2475 - DNA, 333 bp, Streptococcus agalactiae
atgacaatccttaaaacaatcaaagaaatggtagaagttgacgttgaagaggatatctttgacgtccaacttttacgatatatcaacagtgggatttcatatttacaaagaaatgctattcctgttatccgtatcgataaagaaacggagttagagggatggacagacattaaggaagaagatagggagacagtgcttgactggttacatctgagatgcgttcaacgttttgacaaatctttgatgacaggcagtgctgctactatggaatggattgacggagagatgacaaatcttttgtatcaactcaaggcaatctatgaagtgaagaca

SEQ ID NO: 2476 - protein, 111 aa, Streptococcus agalactiae
MTILKTIKEMVEVDVEEDIFDVQLLRYINSGISYLQRNAIPVIRIDKETELEGWTDIKEEDRETVLDWLHLRCVQRFDKSLMTGSAATMEWIDGEMTNLLYQLKAIYEVKT

SEQ ID NO: 2477 - DNA, 303 bp, Streptococcus agalactiae
atgaaatcttcaagagtagctatcattctttgctatgatgagcgtgttgaggttgaaaaaggtgtctgggagaaaaagaccgtagaaaagaaagtcaaagctgagaaagagaaaatctatcagcgaaggcttgataaagctatggcagacggtcaagttctgactgctaggtttagtgttcgttccaactatgtgactgacactcttgactatgtcaaatataatggcaaagagtacaaggttaacattgggacagaatcagatgatggtcattacactatcatcgaacttggagaactgaaa

SEQ ID NO: 2478 - protein, 101 aa, Streptococcus agalactiae
MKSSRVAIILCYDERVEVEKGVWEKKTVEKKVKAEKEKIYQRRLDKAMADGQVLTARFSVRSNYVTDTLDYVKYNGKEYKVNIGTESDDGHYTIIELGELK

SEQ ID NO: 2479 - DNA, 357 bp, Streptococcus agalactiae
ttgaggtgtttacaaatgggcggtggtagcgtgaagatgacaccgctaaaggtggatatcaagaatcaagttttagagaacattaagaaggctgcccaaagtacagaaaatgacattagaactggaagccctagacgaaacggtgtttacgaaaaaggttggacacacgacatcatagatgacgccgctgttgttcataataatggcaaagaaaaatctctatcccacctattagagaatggtcatgccactaaaaacggtggctttgttgcccctagagagcatatcagaccagcctacctcaagaataaggagaaattccttaatgatatgaaatccattaaaatcacacctaaa

SEQ ID NO: 2480 - protein, 119 aa, Streptococcus agalactiae
MRCLQMGGGSVKMTPLKVDIKNQVLENIKKAAQSTENDIRTGSPRRNGVYEKGWTHDIIDDAAVVHNNGKEKSLSHLLENGHATKNGGFVAPREHIRPAYLKNKEKFLNDMKSIKITPK

SEQ ID NO: 2481 - DNA, 681 bp, Streptococcus agalactiae
atgacttatcaatacgatacaagggaagtcactcacggtaatgcgaatggtttttatgccaaaattgctaaaactgatgctggtgccttagacttgcagaaaccttatccctttacagggctacgaagcacatcctttgaaacttctcaggaatcaaatgcctactatgcagacaatgtggaacatgttcgtttgcaaggtaaaaaatccacagaagggtctattacaacctatcagattcctaaacagtttatgattgatcacttaggtaaaaagcttacgaactctacaccaccagctttgattgatactggtgtcaatactaacttcatttggggttatgctgaaactgttacagatgagtttggagctgagattgaagagttccacatttggacgaacgttaaggcatctgcacctaaaggcagcacatcaactgatgaaacatcagcgacaccaaaagaaattgaaatcccttgtactgcctctccaaataacttcattgtggattctgaaaagaaacctgtatcagaaattgtatggcgtgatgacagcaaaggaaccgtccgtgggaagtttgacaagttgtttgctgacaagtcaccaggcaagctgattgatttcatcaatgaagcgcttggaacaaccactacacctaccacaactgttagcggaggctct

SEQ ID NO: 2482 - protein, 227 aa, Streptococcus agalactiae
MTYQYDTREVTHGNANGFYAKIAKTDAGALDLQKPYPFTGLRSTSFETSQESNAYYADNVEHVRLQGKKSTEGSITTYQIPKQFMIDHLGKKLTNSTPPALIDTGVNTNFIWGYAETVTDEFGAEIEEFHIWTNVKASAPKGSTSTDETSATPKEIEIPCTASPNNFIVDSEKKPVSEIVWRDDSKGTVRGKFDKLFADKSPGKLIDFINEALGTTTTPTTTVSGGS

SEQ ID NO: 2483 - DNA, 474 bp, Streptococcus agalactiae
atgattaaaaaagaactatcattcacagcgtttgatagttacggtgaagaaagagagcacactgaaacagtgcgctttctttactctttaccagctatcaagatgtatgaacagcgaactggtcgtaacttctttgatgacaaccaaaaagcacttacagcatatacacaacttgctcttgcaactggtgtaaactgtaacctatctgatttaactgatgaagagaaaatcaagatgatgcctctacttatggaacctgatttcatgaacttcttgactgaagtcattccttgcctttatggtgaggttgaaaatggacgtttagtacaaaatgagcttaccgctgaaacagcttcattagctccttggtttggtgatttgattgatattggtttcttctcagacctcttctatgaatttaaccgaagcagagcaaaggtgccgcaagataaaaaaaagcctcttcagaagttg

SEQ ID NO: 2484 - protein, 158 aa, Streptococcus agalactiae
MIKKELSFTAFDSYGEEREHTETVRFLYSLPAIKMYEQRTGRNFFDDNQKALTAYTQLALATGVNCNLSDLTDEEKIKMMPLLMEPDFMNFLTEVIPCLYGEVENGRLVQNELTAETASLAPWFGDLIDIGFFSDLFYEFNRSRAKVPQDKKKPLQKL

SEQ ID NO: 2485 - DNA, 126 bp, Streptococcus agalactiae
atggatgttttttgggcagaatcccaacactttaactatttgatgggaacgcttcaccaaatgagcatcaatcaggaagaaaagaaaaccttatccaacgctgatttacttagcgtgatgtcagat

SEQ ID NO: 2486 - protein, 42 aa, Streptococcus agalactiae
MDVFWAESQHFNYLMGTLHQMSINQEEKKTLSNADLLSVMSD

SEQ ID NO: 2487 - DNA, 168 bp, Streptococcus agalactiae
ttggacaaggaactagtaaagctagaccacaaagactgtccagttgagactactgaagaccaaaggccagaaagccaggcagtgaaatttgaccacgctgtggtggcagtcgtgactatgttagtccacaattcagaaagccaggcagcacaagaatcccacgttgac

SEQ ID NO: 2488 - protein, 56 aa, Streptococcus agalactiae
MDKELVKLDHKDCPVETTEDQRPESQAVKFDHAVVAVVTMLVHNSESQAAQESHVD

SEQ ID NO: 2489 - DNA, 2733 bp, Streptococcus agalactiae
atgactgaaacgtttgaaggcttatacgtcaaatttggtgctaatactgttgaatttgataggtctgtaaaaggtatcaacactgccttatctagtttgaaaaaagacttcaataacatcaacagacaattgaagatggatccagacaatgttgacttgttgaatcgtaagttggttaacttgcaagaacaggctcgtgttggtgctataaaaattgctgaactcaaaaagcaacagaaggcactgggagaatctgaagttgggtcagcacagtggaataagcttcaacttgaaattgctaaggttgaatcacagatgaagattgttgataaggcaatggagtcaacaaagaaacacattgaagatgtaggagacccaaagtctattctgaatcttaacaaagaacttgataatgttgctaaagagcttgatattgtcaatcaaaagcttgagctagaccctgacaatgtcgaactagcagagcaaaaaatgaaactacttggcaaacagtcggaattggctggggataaagtccaagaattaaagaaaaaacaagctgcccttggcgatgagaaaataggtacagaagaatggcgtcaacttcaaaatgaaatcggtcaagctgaagttgaagttctaaagattgaccgtgcaatggacattcttggtgagtcaagccgttctgcaactggagacatcaaagaggcaaccagctatttaagagctgatgtcatgatggatgttgcagataaggctggtcagattggccagaaaatggttgacgctgggaaaatgacagtagatgcttggtctgagatagatgaggctctggacaccgtcacaaccaaaactggtctgactggtgatgccttagcagagcttcaggaaattgctaaagacattgctactggtatgcctaccagctttcagaatgctggtgatgccgttggggaattgaatactcagttcggtttgactggggaaaagctgaaatcagcatctgaattacttatcaagtatgctgagattaacgaaacagacatttcaagctctgccatttctgcaaaacaagctattgaagcttacggtttgacagctgaagacttgggaatggtcttagacaatgtgaccaaagccgctcaagatacaggacagtcagttgacacgattgttcaaaaagccattgacggtgctcctcagattaaaggtttgggactttcttttgaagaaggtgctgcactgatcggtaagtttgagaaaagcggtgtggattcatctgctgctctatcctctctatcgaaagctgctgtcatctatgctaaagacggtaagactctgacagatggattgaatgagactgttagtgctattcaaaattctactagtgagacagaggctttaagtattgcctcagaaatctttggtagtaaggctgctcctagaatggtcgatgctattcagcgtggtgcttttagctttgatgacttagctgaagcagctaaaagttcctctggtactgtctccaccacatttgatgagacgcttgacccaatagataagttgactcagtattctaaccaagcaaaagagggaatggcagaacttggcggtaaattgcttgagactgtcatcccagctttagaacctttgatgggtatgcttgaatcttctgtcaattggtttactagcctaaacgaaactgatcaacagactatcgtgattcttggcctagttacaactgctgtgatgatgttgcttggtgcaattgcaccgctggtcatcgccataggggcaataggtgcgcctgtcggaattgtagtggcggcaatagtaggggctattgccgtcataacacttatcatccaagcaatcatgaactggggagccataactgaatggcttcagtcaacgtgggattcttgtgctgcctggctttctgaattgtggactaacatagtcacgactgccaccacagcgtggtcaaatttcactgcctggctttctggcctttggtcttcagtagtctcaactggacagtctttgtggtctagctttactagttccttgtccaatattttctcaagtttgattacaggtgctcagtctctgtggtcaagtttcacttccactctttccaatttgtggtctggactggtctcaactgggtcaaatttgtttaataatttgagtagcacgatttcaggaatttttaatgggatactttcaacagcaagcaatatttggaattccataaaatccactatttccaatgcaatagatggggcgaaaaatgcagtgtccaacggggtcaatgccatcaagaatctgtttaacttccagattaaatggcctcatattccactacctcacttccgtgtgagtggttctgctaaccctctggattggctaaaaggtggcttaccaagtatcggcattgactggtatgccaagggcggtatcatgaccaaaccaaccctatttggcatgaatggaaaccgtgcaatggttggcggtgaggctggcgctgaagccatcttgccattgaataagtcaaccctgggggcaattggtcaaagtattgctaacacgatgaatacatcgaacaatattaacgttaacttctctggcgtcactatcagggaagaagctgaccttaacagactagccaacgtggttggaaatcgtattgctgaagaattgcaacgtaaaactaatttgagaggaggaatggca

SEQ ID NO: 2490 - protein, 911 aa, Streptococcus agalactiae
MTETFEGLYVKFGANTVEFDRSVKGINTALSSLKKDFNNINRQLKMDPDNVDLLNRKLVNLQEQARVGAIKIAELKKQQKALGESEVGSAQWNKLQLEIAKVESQMKIVDKAMESTKKHIEDVGDPKSILNLNKELDNVAKELDIVNQKLELDPDNVELAEQKMKLLGKQSELAGDKVQELKKKQAALGDEKIGTEEWRQLQNEIGQAEVEVLKIDRAMDILGESSRSATGDIKEATSYLRADVMMDVADKAGQIGQKMVDAGKMTVDAWSEIDEALDTVTTKTGLTGDALAELQEIAKDIATGMPTSFQNAGDAVGELNTQFGLTGEKLKSASELLIKYAEINETDISSSAISAKQAIEAYGLTAEDLGMVLDNVTKAAQDTGQSVDTIVQKAIDGAPQIKGLGLSFEEGAALIGKFEKSGVDSSAALSSLSKAAVIYAKDGKTLTDGLNETVSAIQNSTSETEALSIASEIFGSKAAPRMVDAIQRGAFSFDDLAEAAKSSSGTVSTTFDETLDPIDKLTQYSNQAKEGMAELGGKLLETVIPALEPLMGMLESSVNWFTSLNETDQQTIVILGLVTTAVMMLLGAIAPLVIAIGAIGAPVGIVVAAIVGAIAVITLIIQAIMNWGAITEWLQSTWDSCAAWLSELWTNIVTTATTAWSNFTAWLSGLWSSVVSTGQSLWSSFTSSLSNIFSSLITGAQSLWSSFTSTLSNLWSGLVSTGSNLFNNLSSTISGIFNGILSTASNIWNSIKSTISNAIDGAKNAVSNGVNAIKNLFNFQIKWPHIPLPHFRVSGSANPLDWLKGGLPSIGIDWYAKGGIMTKPTLFGMNGNRAMVGGEAGAEAILPLNKSTLGAIGQSIANTMNTSNNINVNFSGVTIREEADLNRLANVVGNRIAEELQRKTNLRGGMA

SEQ ID NO: 2491 - DNA, 3633 bp, Streptococcus pyogenes
atgggagaatcttattctgttgaagcggttttgacagctgttgataaaacctttggcaaaacattacaatcggcaatccgttcaatcgatggcttggaaaagcgttcaaccggtttttcatcggtgtctcaaaaagctagttccatgtttaaatccatgttaggagcgaatttagccggacaagctatctcagcaatgacaaggacagtgtcatcaggccttggctctatgcttggcgagatgaatagttcagcgaaagcgtggaaaacttttgacgccaatttagcggacattgggtttggaaaaaaacaaattttggcagctaaaacggcgatgcaagactatgcaactaaaacaatctactcggcatcagatatggctagcacgtatgcacagttagcggcagttggtgtgaaagataccggaaagctcgtaaaagcttttggcggtttagctgcatctgctgaaaacccgaagcaggccatgaagtctatcagtcaacaaatgacgcaagcagtaggaagaccaacagttgcatggcaagactttaggataatgctggaacaggcgcctgcagggatggctaaagtcgctaaatctatgggtaaaaatcttgatgaactcgtcgccgatatccaggcgggtagggttaaaaccagcgattttttggaagcggtaaaaaaagcaggcaatgataagagtttccaaaagatggcaactgagttcaaaactgttgaccaagccatcgacggtatgcgagaaggcttatccaacaaattgcaaccagcgtttgaaaaagtgaaccaatttggaattagagcgatcgaagcaatcggtaaacaactcgataaagttgatttttctaagtttgctagtaatcttgggaaattccttgaaggaattaatatcgataaaattgtatctaatatttcatcggcgatttcatctgtcacttcaaaggttaaagaattttggggcggtttcaaacaaactggagcaattagtgctttttcaggagctttaaaaagtgtttggggagcgttaaaaaatgtagctagcgctatgagtggaggcagttggaaaaactttggctctattgtaggcggaattgtaaagcatgtgtctaattttgcaaaagctattgctgatgttgtcggtaaaatggaacctggcagattgcaaagctggatagccacttttgcagcagtcgggggagggttaaagttatttgaaaagctaacaggacaaagcgttgttggctcttttttagataaaatcagtacaaaatttggattatttggcaaaaaagctaaagaaggaaccgatcaagcagcgaatggctctcgtaaaagtggtggaatcatcagccaaatctttaatggcttgggtaatatcgttaagtctgctggtacagccatatcaacagctgcaaaaggtatcggtacagggattaaaaccgccttgtctggggcacctcctatcattagttctctaggaaccgcaatatcaacagttgcgcaaggtataggcactgggctagcaatcgcttttagaggtttaggagctgcaatcgctatggtgcctcccaccacttggctagctttaggaacggctattttaatggtaggagcggcttttgccttagcaggaactcaggctgatggcattagtcaaattttaaggactattggcgatgttgttgtacaagttttacaacaggtcactgatagtctagccactttactaactattatcgcaaacgctattggctctatgttgccaattgtagctggagctatctctcagattgtaggcgcagtagcgggcggattatctcagctcattatagccgtttcaacaggggtatctctcgttataggagctttcacaggacttcttggtggtatttctggggttattaactccattagcgctgttatccaatcgctaactggtgtgattaccgcagtattcaatggcatagctactgttatttcatctgtcggttcgactatcaaagatgtattgacgggtctaggaaccgcttttgaaggatttgggaatggtgtaaaatcagctctagaaggtgttggggcagtaattgaatcatttggtagtgcagttaggaatgtccttgacggtgttgcaaatatccttgattctatggggactgcggcacttaatgcaggccgtggcgtcaaagagatggctaaaggtattaagatgcttgttgatttatcccttggagatttggttgctacattagcagctgtggcaagcggtctagggaagatggctagctcagctggcgaaatgacaacattaggttctgctatgagcaaagtagccaatggtatgacacgtctagcaacaagtgctacgatagcaattactggattaacagtctttgccaccaccatggcaactattaagacagcagttgcaactctaccgccagtcctaacgatggcagcgagtgggtttaccacatttactactcaggcggtggcagcagtgactggattggctgcaattaatgctccaatcactatgtttaaagctcaactaatgacaataacaccagctctagcacaagctggcgctggctttgccgcgtttgttgctcaatcatcaacatttagtacaggtttagcatctgccggtcctacaatagcagcattcaatgctaatttgatgagcttatctgcaacaacaggagtgctagttgcatcaatagctggtttatcagctgtgctttctgttgtatcagctggctttagccaaataggggcttctgcgacagcaactgttggtcaaatacaagcttttgcttctagtacaacagttgtttcgtcagcatttgctagcatgcaatctatgattcaatctgccatggctgcaatagtaagcagcattataacatcatttaatcaagcggcctctcaaatgcaatcaatcttatctcgaatgctatctcaggccaggacatttgggtctcaactagagcaacaaatgagacaatcgggacagcgttcaggacaaaatcttgctcgggggctatcttctcaacaaggtgctgttattaatgctatttctagcatggttaatgctgcggtatcaagagccaacgcgggagctggtcctatgcgtcaagctggagcgtacatcggacaagggcttgcgcaaggaatgtattcagcgctaggagctgtaacagctgcagcaaacgcccttgtagcacaagccgagagagcagcaagagccaaggcgatgattcattcgccgtcaaggttgtttgcaaaacgagttggtcaatatatcccgcaaggggtagctatgggtatcgacaaaaacgctgatgtcgttgacgactctgttggcgggttatttgatagcatcaatagctttgattttaatatcgcagatagactgactagcattggagctaaattccaaggtgttgtcaaatcagagagttcgcaatcgttatcgcagcaacaagagtttgtacatacagctcaaccagcgtatataaactttagtttaggcggaaacgaatacgaagcatttgtaagtgacatcactaatcaacaagcaaaaattgaaaaaatcagactaaagagaagcagctgg

SEQ ID NO: 2492 - protein, 1211 aa, Streptococcus pyogenes
MGESYSVEAVLTAVDKTFGKTLQSAIRSIDGLEKRSTGFSSVSQKASSMFKSMLGANLAGQAISAMTRTVSSGLGSMLGEMNSSAKAWKTFDANLADIGFGKKQILAAKTAMQDYATKTIYSASDMASTYAQLAAVGVKDTGKLVKAFGGLAASAENPKQAMKSISQQMTQAVGRPTVAWQDFRIMLEQAPAGMAKVAKSMGKNLDELVADIQAGRVKTSDFLEAVKKAGNDKSFQKMATEFKTVDQAIDGMREGLSNKLQPAFEKVNQFGIRAIEAIGKQLDKVDFSKFASNLGKFLEGINIDKIVSNISSAISSVTSKVKEFWGGFKQTGAISAFSGALKSVWGALKNVASAMSGGSWKNFGSIVGGIVKHVSNFAKAIADVVGKMEPGRLQSWIATFAAVGGGLKLFEKLTGQSVVGSFLDKISTKFGLFGKKAKEGTDQAANGSRKSGGIISQIFNGLGNIVKSAGTAISTAAKGIGTGIKTALSGAPPIISSLGTAISTVAQGIGTGLAIAFRGLGAAIAMVPPTTWLALGTAILMVGAAFALAGTQADGISQILRTIGDVVVQVLQQVTDSLATLLTIIANAIGSMLPIVAGAISQIVGAVAGGLSQLIIAVSTGVSLVIGAFTGLLGGISGVINSISAVIQSLTGVITAVFNGIATVISSVGSTIKDVLTGLGTAFEGFGNGVKSALEGVGAVIESFGSAVRNVLDGVANILDSMGTAALNAGRGVKEMAKGIKMLVDLSLGDLVATLAAVASGLGKMASSAGEMTTLGSAMSKVANGMTRLATSATIAITGLTVFATTMATIKTAVATLPPVLTMAASGFTTFTTQAVAAVTGLAAINAPITMFKAQLMTITPALAQAGAGFAAFVAQSSTFSTGLASAGPTIAAFNANLMSLSATTGVLVASIAGLSAVLSVVSAGFSQIGASATATVGQIQAFASSTTVVSSAFASMQSMIQSAMAAIVSSIITSFNQAASQMQSILSRMLSQARTFGSQLEQQMRQSGQRSGQNLARGLSSQQGAVINAISSMVNAAVSRANAGAGPMRQAGAYIGQGLAQGMYSALGAVTAAANALVAQAERAARAKAMIHSPSRLFAKRVGQYIPQGVAMGIDKNADVVDDSVGGLFDSINSFDFNIADRLTSIGAKFQGVVKSESSQSLSQQQEFVHTAQPAYINFSLGGNEYEAFVSDITNQQAKIEKIRLKRSSW

SEQ ID NO: 2493 - DNA, 243 bp, Streptococcus agalactiae
ttgaaccctcaaaaccccattaccagtcaatgtctggatgtcagtggtcttgaaaaacttggtagggtggcagatgaaggtaacatcgaccacccaggcaccaaattcgtcttttccaatctcaaagctatcaaccttataacaccaaagcctaatagttggttcctgttcattttccaaccaaaacttttcacggttcaaaagagcagaaaagcgataaatttcttcatcgcttggctcaat

SEQ ID NO: 2494 - protein, 81 aa, Streptococcus agalactiae
MNPQNPITSQCLDVSGLEKLGRVADEGNIDHPGTKFVFSNLKAINLITPKPNSWFLFIFQPKLFTVQKSRKAINFFIAWLN

SEQ ID NO: 2495 - DNA, 720 bp, Streptococcus agalactiae
atgacaaaaatcaatgaacttaccattgacggtgtgaaaacatcatcttttaagtgtgatgtattggttgaaactagaccaaatgtcattgtctccagctccaaaacagctctattagagcatgatggtattagtggtgcagttgtgcaatcgaatagacaccgtggactaattgagaagccttatcatatcactttaattgagccaagcgatgaagaaatttatcgcttttctgctcttttgaaccgtgaaaagttttggttggaaaatgaacaggaaccaactattaggctttggtgttataaggttgatagctttgagattggaaaagacgaatttggtgcctgggtggtcgatgttaccttcatctgccaccctaccaagtttttcaagaccactgacatccagacattgactggtaatggggttttgagggttcaagggtcagctcttgcttttccgaagattacagtggttggtcagagcgcttctgagacatcgtttacgataggtaaccaagtgattaagcttgaaaagctctcagaatcgctcgtgatgaccaatgatcctgacaatcctagctttaagacggctagtggaaaactcattaagtgggctggtgattttatcacagttgatactgctaaggggcagaatgtcggtgttgttttaggtgctggcataacatctttgaaatttgaaacagtttgggggtgggca

SEQ ID NO: 2496 - protein, 240 aa, Streptococcus agalactiae
MTKINELTIDGVKTSSFKCDVLVETRPNVIVSSSKTALLEHDGISGAVVQSNRHRGLIEKPYHITLIEPSDEEIYRFSALLNREKFWLENEQEPTIRLWCYKVDSFEIGKDEFGAWVVDVTFICHPTKFFKTTDIQTLTGNGVLRVQGSALAFPKITVVGQSASETSFTIGNQVIKLEKLSESLVMTNDPDNPSFKTASGKLIKWAGDFITVDTAKGQNVGVVLGAGITSLKFETVWGWA

SEQ ID NO: 2497 - DNA, 693 bp, Streptococcus pyogenes
atgatacctaaagttattattgatgattttgacacatcttcaatccctaattgtgttttgaccggttacgatgtgggggatattctatcccctagttttgtcgaaaatgaagcttatggcatgaatggaactagtagggaattggagtcatataatgaatctaaaccaaccataatgtggcatttgagtacttttgatgatgcagttaatctaattaatcatttagacggccttagtaaaaaaatcgaattttggcacatacctaactctatttattactatgattgcttatctgtcaaaatcaatgcggtaaccatgtcatcatggcgtgtgactctcaaacttgctctttatccatttagatacgcaaaaggtgtctcagatgtagtaattgcaggcaacggaaacattaacaatgcaggaaatgttttcagcgaacctaagatagttgttgagggtactggtaaaggaacgctaaccattggcaaacaggtcatggaattaaatttgtcaggtaaagcaacgattgagtgcaaacatggccaacaatgcgtctatgatgctgaaggtaatgtgaaaaactcaatccgaataagaggaagtttttttgaaatacaacctggcacacaaggtattgccgtcagtggaggcattactagaacaataattagtccaaggtggaggtataaggtt

SEQ ID NO: 2498 - protein, 231 aa, Streptococcus pyogenes
MIPKVIIDDFDTSSIPNCVLTGYDVGDILSPSFVENEAYGMNGTSRELESYNESKPTIMWHLSTFDDAVNLINHLDGLSKKIEFWHIPNSIYYYDCLSVKINAVTMSSWRVTLKLALYPFRYAKGVSDVVIAGNGNINNAGNVFSEPKIVVEGTGKGTLTIGKQVMELNLSGKATIECKHGQQCVYDAEGNVKNSIRIRGSFFEIQPGTQGIAVSGGITRTIISPRWRYKV

SEQ ID NO: 2499 - DNA, 3672 bp, Streptococcus agalactiae
ttgctctttttacttgatgcaaatgtaagaacggtcaaatggaatggcattccactacatgaagccagctctgccattgtcaaagaagaaaccaacggtgatttctacctgactgttcgctatcctatcacggattcaggtatctatcagcttatcaaagaggatatgctgattaagtcgcctgtgcctgtgctgggcgctcagctgttccgtatcaagaagcctattgagaatgacgacagcatggacatcactgcctatcatgtctctgatgacatcatgaagcggtctatcactcctgtgagtgtggttggtcaaggctgtgctatggcactgtctcagatggttcaaaatgctaagactgggctaggtgatttctcctttaccagcgatattatggacagccgaacctttaacacgactgaaacggaaacgctctactctgtccttatggacggtaaacacagtattgttggaacgtgggaaggtgagcttgtccgtgataactttgccttatctatcaaacgtagccgtggggctgatcgtggtgttgtcatcacaacacacaagaacctcaaatcctatcaacgaaccaagaactctcagggtgttgtcacaaggattcatgcacggtcaaccttcaaacctgatggagctgaagatgaagtgacgctcagagtgtctgttgacagtccactaataaactcttatccctacatcaatgagaaagagtatgagaacaacaacgctgaaaccgttgaagaccttagaaagtgggctgaggctaagtttacaaatgagggcattgataaggtttctgatgccattgagattgaagcctatgagcttgacggtcaagttgtaaatctgggcgacacggttaacctcaagagtagaaagcacagtgctgacctctacaagaaggccattgcctacgagtttaacgctttaacggaagagtatatctccataacttttgatgataagccaggagttggtggttctggggtgtcaagtggcttgtctaatgttgctgatgctatacttgtagcaagtgccacagctcaggacgttgctgttcaaagggctgtgaaaaatgctaacgctgcctttgatgcagagtttggtaaaacaaaaacaaaaattaatgatgatatcgaaatcgcaaaagccaaagtagaaagctttaaatcggaactatctaatcgcatggataatcagcttcttccccttgcgacagaagctaagaatttagccagtcaggcacaagcagacttgaccagaaaagaaatagagcttagagctgaattaaatagacaagtcacaagcacagaagctgtaaaaatctctctaacaaatcttagtcacaatatggatatcattaagcaaaaagccctaaacgaccttagagacgcagagacaaggctaaaggaagctgatagcgtccaacaacttgcgacaaagcgggttgaggataaactgacaggacttagcacgaaactggagtcattctctgttggtggctataattatgtcattgacggcggagaacctaaagaactaatggctaacttctatggtaagacctatgatattaatccccaactactcgaacgaactagtcaagcgaccttgagttttagctatgaagcagaatcaactagtcgtttagaagttagactttataaaaagatgcacaccggggacactagtaagattacaattattgtcatgcctaactttgacttatctccagggaaaggctttatctctcagagctttgatttaggtggtgttatgcctgaccctagaaaccaagcctggcttgtgatgcgggggacaaatgctaaccccttgacgctctcgaaagttaagctggaacgtggtaccgttgctacagactggaataatcgcgatgaaaccttaaaagctagcttcgccgaatacaagcagaccgttgatgaaaacttagccaaccttagaacaagtacggaaaccttggcaggtcaactgacaagtgctgagtctagcattaggcagacgtcggaatcctttagcaatcgtttagttagtcttgagacctataaagatagtgaaccaaatcgagctagtcgttactttgaagcaagcaagtctgaaaccgctaagcagctatcagccttacgaacagaggttaatggctcttatgtggataagtcaacctatgaggaaaatgcaagaggtttgataagacgctttgaaagtctgtcatcagggacacagaactatgctttggggactgaaagagatgtctatctaaacgtttcagggactaccgtctatgacctttatagcttcggtactaccttagccgtaaaagggattgaaatgggagatactgtaactattgcatttaactattttgcggatagtcggacggcttttggttcttatgaactggagctatacggacatgcaggcaaaatcgaacgggttggtgaggtacagagaacgatatcaaatcgtggtacctataccgcatcttttgtggcaaacaatgccaatttcagggcaaactcccttaaaattagatttacggatagccaacttaagtttagagtgacaacacttcgtgtgactaaggggacaattcctgcggactggagtccatctccagatgacctgaaagcctactcagatactaagcttgaacagacagctaatgagattaaagctagtgtaacaagtcttgatcataaaactcttaagcaaactgatattactatgacttctgaagggattgtcctgagagcaggcaagacgagtaatgatgtggcaagagctattggctcttactttaaggtcactcctgatgctatagctctgtttagctcactgataaaagttagcgggaacatgttggttgatggttctgtaactagtcgtaagttggtaacaggcgctgtcgaaacgggacatgttaaggctggagcaatcacaggagtgcttttagcagctgaagctgtaacggcagaaaaacttaaagtcgaccaagctttctttaacaagttgatggccaacgatgcctacttgaagcaactatttgccaagtcagccttcatcactcaggttcaatccgtgacaatatctgccagtcagatttcgggcggtgttattaaagctttgaataatgccatggaaatccagatgaacagtggtcagatactttactacactgaccaagctgcactgaaacgggttttgagtggctatcctactcagtttgttaagttcgcaactggtacagtatctggtaaaggaaatgctggtgttacggtcattggttctaaccgctacggtacagaatcaaccaatgatggtggatttgttggagtccgtgcatggaacggctcaaacattgactcacttgacttagttggtgatgaaatccgattagcaagctctgcctttgacaattcagatggttgggatgttcggacacttgattcaggcttgaaaatcacaccacacaatagggctgctgaacgcaatagccgaattgaggttggtgatgtctggattttaaaaggaaatggatcctattcttctctcagagatattttgaactcattcaatgagaacttctcaaaaggcccaaatgctgactcttacacttactacccttcagggttc

SEQ ID NO: 2500 - protein, 1224 aa, Streptococcus agalactiae
MLFLLDANVRTVKWNGIPLHEASSAIVKEETNGDFYLTVRYPITDSGIYQLIKEDMLIKSPVPVLGAQLFRIKKPIENDDSMDITAYHVSDDIMKRSITPVSVVGQGCAMALSQMVQNAKTGLGDFSFTSDIMDSRTFNTTETETLYSVLMDGKHSIVGTWEGELVRDNFALSIKRSRGADRGVVITTHKNLKSYQRTKNSQGVVTRIHARSTFKPDGAEDEVTLRVSVDSPLINSYPYINEKEYENNNAETVEDLRKWAEAKFTNEGIDKVSDAIEIEAYELDGQVVNLGDTVNLKSRKHSADLYKKAIAYEFNALTEEYISITFDDKPGVGGSGVSSGLSNVADAILVASATAQDVAVQRAVKNANAAFDAEFGKTKTKINDDIEIAKAKVESFKSELSNRMDNQLLPLATEAKNLASQAQADLTRKEIELRAELNRQVTSTEAVKISLTNLSHNMDIIKQKALNDLRDAETRLKEADSVQQLATKRVEDKLTGLSTKLESFSVGGYNYVIDGGEPKELMANFYGKTYDINPQLLERTSQATLSFSYEAESTSRLEVRLYKKMHTGDTSKITIIVMPNFDLSPGKGFISQSFDLGGVMPDPRNQAWLVMRGTNANPLTLSKVKLERGTVATDWNNRDETLKASFAEYKQTVDENLANLRTSTETLAGQLTSAESSIRQTSESFSNRLVSLETYKDSEPNRASRYFEASKSETAKQLSALRTEVNGSYVDKSTYEENARGLIRRFESLSSGTQNYALGTERDVYLNVSGTTVYDLYSFGTTLAVKGIEMGDTVTIAFNYFADSRTAFGSYELELYGHAGKIERVGEVQRTISNRGTYTASFVANNANFRANSLKIRFTDSQLKFRVTTLRVTKGTIPADWSPSPDDLKAYSDTKLEQTANEIKASVTSLDHKTLKQTDITMTSEGIVLRAGKTSNDVARAIGSYFKVTPDAIALFSSLIKVSGNMLVDGSVTSRKLVTGAVETGHVKAGAITGVLLAAEAVTAEKLKVDQAFFNKLMANDAYLKQLFAKSAFITQVQSVTISASQISGGVIKALNNAMEIQMNSGQILYYTDQAALKRVLSGYPTQFVKFATGTVSGKGNAGVTVIGSNRYGTESTNDGGFVGVRAWNGSNIDSLDLVGDEIRLASSAFDNSDGWDVRTLDSGLKITPHNRAAERNSRIEVGDVWILKGNGSYSSLRDILNSFNENFSKGPNADSYTYYPSGF

SEQ ID NO: 2501 - DNA, 1956 bp, Streptococcus pyogenes
ttgatatcgattaaagatgataatacccctcttgtagcagcctttgaagatgagattacacaggaggccaatagtgattacaaactaaattttaagtatcctgctaaacacgagtatcgccctttaataaaaaaaggaataatcttagaagctgatgatctgcatggttctcagctttttaggatttttgaaattactaagcggcatggctatattaacgtttacgctaatcaggtcgctgatgacttaaatggctatgcaattgacactatcagtgttgatagggtgcaaggcatgacagtaatgtcagagttagcaggtagtatcaagcgtgagcatccttttagcttttttagtgatattgacggtcgtcacacatttaatcaatcagacgtatctgttatggacgctttagctaatggcaagcactcaatcatggggcagtggggtggcgaacttgtacgaaataaataccaaattaacttgctcaaaaaagctggcaaagataccgaaaccttgttcatgtacaagaaaaacctcaaatcttatgaggaaacagatactatcaaagggcttgtctctatccttcatttagttgctgaagtagaagaagaacatgaagtagaaaccagagaagcttcagatggaaacattggtcatagtgaatcaccgaaaaagaaaacaattagggtatctgttgagagcaagctcaaagacactcatccgataattgttgaaaagactatcaaggtgcaggatcaagatgtcaaaacagaagaggacttgcttgcatatggtaagaaatactttgaaaaaactctttgcgacataccaggtaatagtttaaaaattgatgttactaataactacgagggcgctgttaggctatttgacacagcaattgtcttccacgagctctatgacagagacttacgaatgcaaatcactggctatcggttcgcccctatggctaatcggttaaaatccatcatctttggagagattaagaccaacttagcaaaacaaattagcaatcaaattgacaataaggtagctgaatcaactgctcaacatgacgcagcatttgaagcaaaattacaaaagcagattgataatgctaatcgtatttttgacacaaaagaagctaaactccgtgaagagattgaagatggcatcaaaaaagctgaagctaatgcagaggtcaaagttgctgaggttaacgctaaagtgctggaagctgaggagctagccaaggcagtcgatgagcgactcaaaaaatttttatctgatgctgacactaaagagcaagattttgataaaaaacttgaagaatttagaacgtctcttaaagaccttgaagttgatgaaaagcagattgatgatgctttggccaaagccggttttagcaaggatagcttagctgacattaaagctaaactggaagacacgtctgaaactgccacagttacagctaacattgttggatcaactggcggcacgttttacaatcgcaacagactggatggtgatactgacaaagttatcacttttgaacaaggttatattgacattgcccataatggtgaaggttttgaagaaggcaagacatacactatcagctttgaggcaacctgtgagctactgcgtaaagtaggaatcacagtgacacaggctaacatgaaaggtgctcgcttagtgttaacacctaaaaatcccaaattagttgtcgagagttttggcttgactaaggatactgagactatcaatgtctatccgtttagctacacagtgcttgtaaccagcgactggtataaatctaagcagatagatttaaacgcgtcggaggtgcaggaattggctctggagatggattataaagatgttgttgacggtaataatgccacaatcacagggcagtggtcagacagcccacaaattatattagacggaggtaat

SEQ ID NO: 2502 - protein, 652 aa, Streptococcus pyogenes
LISIKDDNTPLVAAFEDEITQEANSDYKLNFKYPAKHEYRPLIKKGIILEADDLHGSQLFRIFEITKRHGYINVYANQVADDLNGYAIDTISVDRVQGMTVMSELAGSIKREHPFSFFSDIDGRHTFNQSDVSVMDALANGKHSIMGQWGGELVRNKYQINLLKKAGKDTETLFMYKKNLKSYEETDTIKGLVSILHLVAEVEEEHEVETREASDGNIGHSESPKKKTIRVSVESKLKDTHPIIVEKTIKVQDQDVKTEEDLLAYGKKYFEKTLCDIPGNSLKIDVTNNYEGAVRLFDTAIVFHELYDRDLRMQITGYRFAPMANRLKSIIFGEIKTNLAKQISNQIDNKVAESTAQHDAAFEAKLQKQIDNANRIFDTKEAKLREEIEDGIKKAEANAEVKVAEVNAKVLEAEELAKAVDERLKKFLSDADTKEQDFDKKLEEFRTSLKDLEVDEKQIDDALAKAGFSKDSLADIKAKLEDTSETATVTANIVGSTGGTFYNRNRLDGDTDKVITFEQGYIDIAHNGEGFEEGKTYTISFEATCELLRKVGITVTQANMKGARLVLTPKNPKLVVESFGLTKDTETINVYPFSYTVLVTSDWYKSKQIDLNASEVQELALEMDYKDVVDGNNATITGQWSDSPQIILDGGN

SEQ ID NO: 2503 - DNA, 228 bp, Streptococcus agalactiae
atgaaccaagaacaacaactcaatcaagcgctacgcttgacggtcaatgaattgacagcccagttggccaatgagtcaaccactaagaacttgctggctatccagctgactgaagttgttcaggagaaacagcaactgactcagcaaaatgctgaacttcaagcaagagtttccgaactagaaggcttgcttgatgaacaaactcaaccagaaatcattgaaggagaa

SEQ ID NO: 2504 - protein, 76 aa, Streptococcus agalactiae
MNQEQQLNQALRLTVNELTAQLANESTTKNLLAIQLTEVVQEKQQLTQQNAELQARVSELEGLLDEQTQPEIIEGE

SEQ ID NO: 2505 - DNA, 336 bp, Streptococcus agalactiae
gtgactacaacagaaaataatttacttgaccttgaaacaatcacagaaccctttgacttggcgacagcactcaagtacatgaaggaaaatggtgagttcatccgttgcaagaatgctgtcaatgacttctacatgtaccgtgacatgcagaaacgtcctgtcatcgtcaatggccgccgtcaattcaaggacgtagaaactgtctgggcatttaaccaatggggcgggacaacacccacaatcaacatagctgatttctttaatcttgaatactacatcatgacctttgatgagaacggaaatcctgactggactgagcctcacttggaggataag

SEQ ID NO: 2506 - protein, 112 aa, Streptococcus agalactiae
MTTTENNLLDLETITEPFDLATALKYMKENGEFIRCKNAVNDFYMYRDMQKRPVIVNGRRQFKDVETVWAFNQWGGTTPTINIADFFNLEYYIMTFDENGNPDWTEPHLEDK

SEQ ID NO: 2507 - DNA, 408 bp, Streptococcus agalactiae
atgccaccatggttaatagatagcactgtggttgtggcgatggtgacggtgctgggcggtctgttcagcactattatcaccacttcagccaatcggaaagaccagctgataaaacatcagtatgaggatatcaaggaagatttgtctggcttgattgacaaggttaagacgattgatcatacaaccacggaaacaaagaaaatttcagaaatcacaaaagacggtacgcttaaaatccagcgttaccgtctttttcacgatttgacaaaggaaatttctcaaggctacacaactattgaacatttcagggagttgagcattctctttgagagttatcaactgcttggcggaaatggggaaattgaagccttgtttgagaaattcaaacagttaccaattgaggaggac

SEQ ID NO: 2508 - protein, 136 aa, Streptococcus agalactiae
MPPWLIDSTVVVAMVTVLGGLFSTIITTSANRKDQLIKHQYEDIKEDLSGLIDKVKTIDHTTTETKKISEITKDGTLKIQRYRLFHDLTKEISQGYTTIEHFRELSILFESYQLLGGNGEIEALFEKFKQLPIEED

SEQ ID NO: 2509 - DNA, 327 bp, Streptococcus agalactiae
atgacacaaattacagatattatcatcagctcagctatgggaattttgaccattttggcaggaattgcagtgcaagctgtcaaggtttatttgattaaaaaaggcggtgaaaaggccgtcttgattacagaaatcttggccaagaacgctgttaatgctgtggagcaagtggccactgaaactggcttcaaaggagctgacaagctaacttctgctaaggctcagattttagctgagttgcaaaaatacaatatccacatgtcagacgatgatctcactttgtttgttgaatcagctgtcaaacaaatgcacgatgcctggaaggag

SEQ ID NO: 2510 - protein, 109 aa, Streptococcus agalactiae
MTQITDIIISSAMGILTILAGIAVQAVKVYLIKKGGEKAVLITEILAKNAVNAVEQVATETGFKGADKLTSAKAQILAELQKYNIHMSDDDLTLFVESAVKQMHDAWKE

SEQ ID NO: 2511 - DNA, 162 bp, Streptococcus agalactiae
ttgcctggatgtctgcacgtcaaggcaaggtcagctattccatggactaccgtgacggccctaacagctatgactgttccagctctgtctattatgctctcaggtcagctggtgcaagctcagcaggttgggcggtcaacactgagtacatgcacgattggc

SEQ ID NO: 2512 - protein, 54 aa, Streptococcus agalactiae
MPGCLHVKARSAIPWTTVTALTAMTVPALSIMLSGQLVQAQQVGRSTLSTCTIG

SEQ ID NO: 2513 - DNA, 1404 bp, Streptococcus agalactiae
atggaaatcaacactgaaatagccattgcctggatgtctgcacgtcaaggcaaggtcagctattccatggactaccgtgacggccctaacagctatgactgttccagctctgtctattatgctctcaggtcagctggtgcaagctcagcaggttgggcggtcaacactgagtacatgcacgattggctgattaaaaacggttatgagcttattgctgaaaacgtggattggaatgctgtccgtggtgatatagcaatttggggcatgcgagggcactcaagcggagctggtggtcatgtagtcatgtttattgaccctgaaaatatcattcactgtaactgggcaaataatggcatcacagtgaacaactacaatcagacagcggctgctagtggctggatgtattgctacgtttaccgtttgaaaagcggagcttctacccaaggaaaaagccttgataccttggtcaaggaaacccttgctggtaactacggtaatggcgaagcacgcaaggcagtgcttggcaatcaatatgaggctgttatgtcagtcatcaatggcaaaactacgactaatcaaaagactgttgaccaacttgttcaagaggtaatcgctggcaaacatggcaacggtgaagctcgtaaaaagtcgcttggtagtcaatatgatgcagttcagaaacgagtgacggaattgctcaaaaaacagccctctgagccgtttaaggctcaagaggtaaacaagcccacggaaaccaaaacaagccaaacagagctaactggacaagccacagccaccaaagaagagggcgacctctctttcaatgggactatcttgaaaaaagcggtgctggacaagattctgggcaactgtaaaaagcatgatattcttccaagttatgcactgactatcctacactatgaaggtctttggggaacttcagcagttgggaaggcagataataactggggcggtatgacctggactggtcaaggcaaccgtccaagcggtgtcactgtcacacaaggttccgcacgtccttcaaatgagggcggtcactatatgcactatgcaagcgtggatgactttctgacagactggttttatcttctaagggctggtggctcttacaaggtgtctggtgctaaaaccttcagtgaggctatcaagggaatgtttaaagttggcggtgctgtctatgattatgctgcaagcggctttgatagctatattgtcggagcttcaagccgcctcaaggctattgaggcagaaaatggttcactggacaagtttgataaagctaccgacattggtgacggtagcaaagacaagattgacattactattgaaggtattgaagttaccatcaacggtatcacttatgaactgactaaaaagccagtt

SEQ ID NO: 2514 - protein, 468 aa, Streptococcus agalactiae
MEINTEIAIAWMSARQGKVSYSMDYRDGPNSYDCSSSVYYALRSAGASSAGWAVNTEYMHDWLIKNGYELIAENVDWNAVRGDIAIWGMRGHSSGAGGHVVMFIDPENIIHCNWANNGITVNNYNQTAAASGWMYCYVYRLKSGASTQGKSLDTLVKETLAGNYGNGEARKAVLGNQYEAVMSVINGKTTTNQKTVDQLVQEVIAGKHGNGEARKKSLGSQYDAVQKRVTELLKKQPSEPFKAQEVNKPTETKTSQTELTGQATATKEEGDLSFNGTILKKAVLDKILGNCKKHDILPSYALTILHYEGLWGTSAVGKADNNWGGMTWTGQGNRPSGVTVTQGSARPSNEGGHYMHYASVDDFLTDWFYLLRAGGSYKVSGAKTFSEAIKGMFKVGGAVYDYAASGFDSYIVGASSRLKAIEAENGSLDKFDKATDIGDGSKDKIDITIEGIEVTINGITYELTKKPV

SEQ ID NO: 2515 - DNA, 129 bp, Streptococcus agalactiae
  misc_feature (1)..(129): n = a, c, g, or t
ttgctatttgattttctcgaagaaaaaataaaactgaaagcatacctgatgaccgccttacttgatgatggagaaattaaccttgatcactttaaaacagaatatgctttgagtgnnnnnttaattaat

SEQ ID NO: 2516 - protein, 43 aa, Streptococcus agalactiae
  MISC_FEATURE (1)..(43): Xaa = Any Amino Acid
MLFDFLEEKIKLKAYLMTALLDDGEINLDHFKTEYALSXXLIN

SEQ ID NO: 2517 - DNA, 240 bp, Streptococcus agalactiae
atggataccattgaaaatctcattattgctattgtgaaacctttgatttcacaaccagatcagttaaccataaaaattcaggatggcccagaatttttagagtaccatcttgatttagatacccaagacatcggtcgtgttatcggcaaaaagggtcgtacaattacagcgataaggtcgattgtctattcggtaccaacacaagggaaaaaagtaagactcatcattgatgagaaagaa

SEQ ID NO: 2518 - protein, 80 aa, Streptococcus agalactiae
MDTIENLIIAIVKPLISQPDQLTIKIQDGPEFLEYHLDLDTQDIGRVIGKKGRTITAIRSIVYSVPTQGKKVRLIIDEKE

SEQ ID NO: 2519 - DNA, 237 bp, Streptococcus pyogenes
atggataccattgaaaatcttattatcgctattgtgaaacctttgatttcacaaccagataatcttaccattaaaattgaagatactcctgactttttagagtatcatcttgacttggatgctcaagacatcggtcgtgttatcggcaaaaaaggtcgaactattactgcgataagatcgattgtctactcggttccaacactaggaaaaaaagttcgcttagttattgatgagaaa

SEQ ID NO: 2520 - protein, 79 aa, Streptococcus pyogenes
MDTIENLIIAIVKPLISQPDNLTIKIEDTPDFLEYHLDLDAQDIGRVIGKKGRTITAIRSIVYSVPTLGKKVRLVIDEK

SEQ ID NO: 2521 - DNA, 270 bp, Streptococcus agalactiae
atggcagtaaaaatccgtttaactcgtatgggttctaagaagaaacctttctaccgtatcaatgttgcagattcacgtgcaccacgtgacggacgttttattgaaactgttggaacatacaacccattagttgcagaaaaccaagttacaatcaaagaagaacgtgttcttgaatggttatcaaaaggtgcacaaccttcagatacagttcgtaaccttctttcaaaagctggagttatgactaaattccacgatcaaaaattctcaaaa

SEQ ID NO: 2522 - protein, 90 aa, Streptococcus agalactiae
MAVKIRLTRMGSKKKPFYRINVADSRAPRDGRFIETVGTYNPLVAENQVTIKEERVLEWLSKGAQPSDTVRNLLSKAGVMTKFHDQKFSK

SEQ ID NO: 2523 - DNA, 270 bp, Streptococcus pyogenes
atggcagtaaaaatccgtttaactcgtatgggttctaagaaaaaacctttctaccgtattaatgttgcagattcacgtgcaccacgtgatggtcgttttatcgaaacagttggaacatacaacccattagtggctgaaaatcaaattactattaaagaggatcgtgttcttgagtggttatctaaaggagcgcagccttctgataccgttcgtaacatcttgtctaaagctggtgttatggctaagttccacgaccaaaaattctctaaa

SEQ ID NO: 2524 - protein, 90 aa, Streptococcus pyogenes
MAVKIRLTRMGSKKKPFYRINVADSRAPRDGRFIETVGTYNPLVAENQITIKEDRVLEWLSKGAQPSDTVRNILSKAGVMAKFHDQKFSK

SEQ ID NO: 2525 - DNA, 1245 bp, Streptococcus agalactiae
atggaaaattggaagtttgccctatcatcgattctagggcacaagatgcgtgcttttctgaccatgttagggatcatcattggggttgcatcagttgtgttaattatggccttaggtaagggcatgaaagattcggttacaaatgagattacaaagtctcagaagaaccttcagatttattataaaacaaaagaagaccaaaaaaatgaggataactttggagctcaaggggctttcatgcaaggtagtgataccaaccgtaaggaaccaattattcaagaatcatggttaaaaaagattgctaaggaagtagatggtgttagtggctactatgtaaccaatcaaacaaatgctccagtagcttaccttgaaaaaaaggcaaagacggttaatataacaggaattaaccgcacttaccttggtatcaaaaagttcaaaattaaaagtggtcgtcaattccaagaggaggattataaccaattctcgagagttattttactagaagaaaaattagctcagagattattccagacaaatgaagcagcgttaaataaggtggtgactgtaaaaaataaatcttacttagtagtgggggtttattcggatccagaagctggttcaggcttatatggaagtaattctgatgggaatgctattttaaccaatacacagttagcttcggagtttggtgctaaagaagcagaaaacatatattttcatcttaatgatgtatcgcaatccaatcgcattggtaaagaaataggcaaacgtttaacagacattagtcatgctaaggatgggtactatgataattttgacatgacatctatagttaaatctatcaatacccaagttggtattatgacaggtgttattggagcgattgcagcaatttctctcctagttggtggtatcggagtgatgaatattatgttagtctctgtaactgagcgcacgagagaaattggccttcgtaaagcccttggggcaactcgacgtaaaattttagctcaatttttaattgaatcaatggtcttaacgattttgggtggattaattgggttattactagcctatggaggtacgatgttaattgctaatgcgcaagataagattactccttctgtgtcacttaacgtggctataggcagtttaattttctcagcatttattggaattatatttggtttattacctgctaataaagccagcaaattaaacccaattgatgctttacgatatgaa

SEQ ID NO: 2526 - protein, 415 aa, Streptococcus agalactiae
MENWKFALSSILGHKMRAFLTMLGIIIGVASVVLIMALGKGMKDSVTNEITKSQKNLQIYYKTKEDQKNEDNFGAQGAFMQGSDTNRKEPIIQESWLKKIAKEVDGVSGYYVTNQTNAPVAYLEKKAKTVNITGINRTYLGIKKFKIKSGRQFQEEDYNQFSRVILLEEKLAQRLFQTNEAALNKVVTVKNKSYLVVGVYSDPEAGSGLYGSNSDGNAILTNTQLASEFGAKEAENIYFHLNDVSQSNRIGKEIGKRLTDISHAKDGYYDNFDMTSIVKSINTQVGIMTGVIGAIAAISLLVGGIGVMNIMLVSVTERTREIGLRKALGATRRKILAQFLIESMVLTILGGLIGLLLAYGGTMLIANAQDKITPSVSLNVAIGSLIFSAFIGIIFGLLPANKASKLNPIDALRYE

SEQ ID NO: 2527 - DNA, 708 bp, Streptococcus agalactiae
gtgacaactaatcgaaaagaactgattagattgcatcagattgttaaaagttatcaaaatggggatcaaaaacttcaagtcttaaagaacattgatttgacggtttatgaaggtgaatttcttgcaatcatggggccatctggttcagggaaatccacactaatgaatattattggcttgttggattctccaacttcaggagattatagtttaaatggtaaacgtgtcgaagaactaagtcaaacaaaattagctcaagttcgaaataaggaaattggttttgtctttcaacaatttttcttgttatctaaactaacggctttacaaaatgttgaattacccttaatttatgcgggtgtacctcctaaaaagcgtaaaaatttagcaaaacaatttttagataaagttgaattaagagagcgtatgaaccatctgccaacagaattatctgggggacagaagcaacgtgtagcaatcgcgcgtgctttggtgaatagcccatctattattctagcagatgagccgactggtgccttggatacaaagacgggtgagcaaattatgcagttcctaacggaattaaatcaagaaggtaaaaccattatcatggtaactcatgaaccagaaatcgccgattatgcgactcgtaaaattgttattcgtgatggcgaaattacagcagatactactgatagtattagaattgat

SEQ ID NO: 2528 - protein, 236 aa, Streptococcus agalactiae
MTTNRKELIRLHQIVKSYQNGDQKLQVLKNIDLTVYEGEFLAIMGPSGSGKSTLMNIIGLLDSPTSGDYSLNGKRVEELSQTKLAQVRNKEIGFVFQQFFLLSKLTALQNVELPLIYAGVPPKKRKNLAKQFLDKVELRERMNHLPTELSGGQKQRVAIARALVNSPSIILADEPTGALDTKTGEQIMQFLTELNQEGKTIIMVTHEPEIADYATRKIVIRDGEITADTTDSIRID

SEQ ID NO: 2529 - DNA, 708 bp, Streptococcus pyogenes
gtgtcgcatgaaaaaaaacaattaatgcaattatcaaatattgtgaagagctatcaaaatggggatcaagttcttaaagttttgaaaggtattaatttaacagtatatgagggtgaatttttagctattatgggtccgtctggttcgggaaaatcaacactaatgaatattattggtttattagatcgtccaacatccggagattacacattacataatactaaaatagaaatccttaatgatcgtgaattagcaaaagtacgaaatgatgaaatcggctttgtctttcaacaattctttctgttagctaaattaactgcattacaaaatgttgaattgcctcttatttatgctggtgtaaacgtctcaaaaagacgtgaacaggctaagcaatttcttgaaaaagtaggacttggacgacgtatcaaacatctaccgtcagaactgtcaggaggtcaaaagcaaagggtggctatcgcacgagctttagtaaatgacccatctattattttagcggatgaaccaacaggtgcactagatactaaaacaggtcagcaaattatggaactcttgacagagttaaacaaagaaggtaaaacaattattatggttactcatgaaccagaaattgctgattttgcaactcggaaaattattattcgtgatggtgatatcacaacggatactacagctagtgttgttattgac

SEQ ID NO: 2530 - protein, 236 aa, Streptococcus pyogenes
VSHEKKQLMQLSNIVKSYQNGDQVLKVLKGINLTVYEGEFLAIMGPSGSGKSTLMNIIGLLDRPTSGDYTLHNTKIEILNDRELAKVRNDEIGFVFQQFFLLAKLTALQNVELPLIYAGVNVSKRREQAKQFLEKVGLGRRIKHLPSELSGGQKQRVAIARALVNDPSIILADEPTGALDTKTGQQIMELLTELNKEGKTIIMVTHEPEIADFATRKIIIRDGDITTDTTASVVID

SEQ ID NO: 2531 - DNA, 1248 bp, Streptococcus agalactiae
atggacatgagtaaacgacaaaatttaggaattagtaaaaaaggagcaattatatcagggctctcagtggcactaattgtagtaataggtggctttttatgggtacaatctcaacctaataagagtgcagtaaaaactaactacaaagtttttaatgttagagaaggaagtgtttcgtcctcaactcttttgacaggaaaagctaaggctaatcaagaacagtatgtgtattttgatgctaataaaggtaatcgagcaactgtcacagttaaagtgggtgataaaatcacagctggtcagcagttagttcaatatgatacaacaactgcacaagcagcctacgacactgctaatcgtcaattaaataaagtagcgcgtcagattaataatctaaagacaacaggaagtcttccagctatggaatcaagtgatcaatcttcttcatcatcacaaggacaagggactcaatcgactagtggtgcgacgaatcgtctacagcaaaattatcaaagtcaagctaatgcttcatacaaccaacaacttcaagatttgaatgatgcttatgcagatgcacaggcagaagtaaataaagcacaaaaagcattgaatgatactgttattacaagtgacgtatcagggacagttgttgaagttaatagtgatattgatccagcttcaaaaactagtcaagtacttgtccatgtagcaactgaaggtaaactccaagtacaaggaacgatgagtgagtatgatttggctaatgttaaaaaagaccaggctgttaaaataaaatctaaggtctatcctgacaaggaatgggaaggtaaaatttcatatatctcaaattatccagaagcagaagcaaacaacaatgactctaataacggctctagtgctgtaaattataaatataaagtagatattactagccctctcgatgcattaaaacaaggttttaccgtatcagttgaagtagttaatggagataagcaccttattgtccctacaagttctgtgataaacaaagataataaacactttgtttgggtatacaatgattctaatcgtaaaatttccaaagttgaagtcaaaattggtaaagctgatgctaagacacaagaaattttatcaggtttgaaagcaggacaaatcgtggttactaatccaagtaaaaccttcaaggatgggcaaaaaattgataatattgaatcaatcgatcttaactctaataagaaatcagaggtgaaa

SEQ ID NO: 2532 - protein, 416 aa, Streptococcus agalactiae
MDMSKRQNLGISKKGAIISGLSVALIVVIGGFLWVQSQPNKSAVKTNYKVFNVREGSVSSSTLLTGKAKANQEQYVYFDANKGNRATVTVKVGDKITAGQQLVQYDTTTAQAAYDTANRQLNKVARQINNLKTTGSLPAMESSDQSSSSSQGQGTQSTSGATNRLQQNYQSQANASYNQQLQDLNDAYADAQAEVNKAQKALNDTVITSDVSGTVVEVNSDIDPASKTSQVLVHVATEGKLQVQGTMSEYDLANVKKDQAVKIKSKVYPDKEWEGKISYISNYPEAEANNNDSNNGSSAVNYKYKVDITSPLDALKQGFTVSVEVVNGDKHLIVPTSSVINKDNKHFVWVYNDSNRKISKVEVKIGKADAKTQEILSGLKAGQIVVTNPSKTFKDGQKIDNIESIDLNSNKKSEVK

SEQ ID NO: 2533 - DNA, 1269 bp, Streptococcus pyogenes
atgtctaaaagaggaaaaattaaaataacaacgaaaacaaagcttattacagctagtgttataacgctagtattaattataactggaatagtcttgtggaaacaacaacgaaatacgctaacagctgatatcgctaaagaaccttactctactgttagtgtaactgaagggagtattgcttcttcgactttactatcaggtactgtaaaggctttatcagaggaatatatttattttgatgctaataaaggaaatgatgcaactgttacagttaaagtaggtgatcaggtaacgcagggccagcaattagttcaatataatacaacaacagctcagtcagcttatgatactgctgttaggagtcttaacaagattggccgacaaattaatcatcttaaaacatacggagttcctgctgttagtacagaaactaatagagatgaagctaccggtgaagagacgacaacaacagttcaaccatcagctcagcaaaatgctaattataaacagcagctgcaagatttaaatgatgcttatgcagatgcacaagcagaagtaaataaagcgcagatagcgttaaatgatacagtagttatcagtagtgtctctggaactgttgtggaagtaaataatgatattgatccttcttcaaagaacagtcaaacacttgttcacgtagcaaccgaaggacagcttcaggtgaaaggaacattgacagagtatgatttagcaaacgttaaggttggtcaatctgtaaaaattaagtctaaagtttattctaatcaagaatggactggaaaaatatcatatgtttcaaactatccaactgagtctaatgcaggttcaacaacgccagcaggtagcactggagcgggaagttctacaggagctacctatgattacaagattgatattataagtcctctcaaccagcttaaacaaggcttcactgtttctgttgaggttgttaatgaagcaaaacaggccttagttcctttaacggctgttattaagaaagataaaaaacactatgtttggacttatgatgatgctactggcaaagccaaaaaagtagaggtgacacttggaaacgcagatgcacaacaacaagaaattcataaaggagtagctgttggtgacattgttattgccaatccagataaaaatatcaaaccggataaaaaactagaaggggttatttcaataggtaccaacacaaaaccggaaaaagattctcaatcaaagaataaaaaatcaggggtggataaa

SEQ ID NO: 2534 - protein, 423 aa, Streptococcus pyogenes
MSKRGKIKITTKTKLITASVITLVLIITGIVLWKQQRNTLTADIAKEPYSTVSVTEGSIASSTLLSGTVKALSEEYIYFDANKGNDATVTVKVGDQVTQGQQLVQYNTTTAQSAYDTAVRSLNKIGRQINHLKTYGVPAVSTETNRDEATGEETTTTVQPSAQQNANYKQQLQDLNDAYADAQAEVNKAQIALNDTVVISSVSGTVVEVNNDIDPSSKNSQTLVHVATEGQLQVKGTLTEYDLANVKVGQSVKIKSKVYSNQEWTGKISYVSNYPTESNAGSTTPAGSTGAGSSTGATYDYKIDIISPLNQLKQGFTVSVEVVNEAKQALVPLTAVIKKDKKHYVWTYDDATGKAKKVEVTLGNADAQQQEIHKGVAVGDIVIANPDKNIKPDKKLEGVISIGTNTKPEKDSQSKNKKSGVDK

SEQ ID NO: 2535 - DNA, 108 bp, Streptococcus agalactiae
ttgtaccaagtcaaactttatccgatgctgctaggcaaacaattcgagatgttgcatttgatgtgtgtcgaaaagcaaacattattggagtatgttactttagtttct

SEQ ID NO: 2536 - protein, 36 aa, Streptococcus agalactiae
MYQVKLYPMLLGKQFEMLHLMCVEKQTLLEYVTLVS

SEQ ID NO: 2537 - DNA, 1596 bp, Streptococcus agalactiae
atgctaaatacaaaggataaacagcctattttgcttattattttcggacagaaaatgaaagaatatgacgatttaattagatcaactgttgagaggttatctaaaagggatagacctgttagtattcttatctcgaaggagctaaaccatgtgattcaccattatgatgcacaatttgaaaatcttgagacgcttgtggggtatataaatacacatgaagatagtttgatttaccccctttgcttagataaaaatcatgagctatttcaagagtttttagcgtggcagagtcattattcaaggcagtatatcagcgataatttatcagaaaaaagtgttcaggcaatagacaataatcaagactttgtgcaagtagattgtttagtaatgagagactctttgaataattgtttatatgtctctgatttagaatatattgaatctaataaaacaactggtaagtctctagcgattgtaccaagtcaaactttatccgatgctgctaggcaaacaattcgagatgttgcatttgatgtgtgtcgaaaagcaaacattattggagtatgttactttagtttcttaatagatttgaacagtttggattatcatataattagtttatcatctggtttgtctcatcaaagcattttatttgagactattacgacctatcctgttttagagatagcaactaaattgacagtgggatatacttttagtcaactgaagcattcttattacccaaatacctctgcctttttagagccgcaattagactatgtagctaccgtatcttttagttttgaaaaagttgactatatcttttttgctcgtaatatagagcaattatttttaaatttactcgaggctagcagtcatgatcattttccatttctgagtgatattagcgaggaagatttgatgtttgctttgattcagaaaaaagaaaatcgtctagcttatcttttggaggcttttagacgtggctttgatttgtatgatttatcctcagttactaaaatcaaccctttttacttagataaatgtttacatattgtagagttgtatgaaaacctgaataaaagccaatataatgtagatatttataaggaagctaaaaggtatggtttttcggatgactatattgctagtagttggcaaatctctttgatagacatgttagaatatcgaaaaaaacatagtgtcgcacctgttctgaagcaagtcgaacaaagttctggtgttctaactggccatcaaattcagtattttcgaagctatgattggcattcagactacatttctagcggttgtcaaaaggctttgataatggtagacaagggttattccctagtaaaattaaatgagttaattaagcaaatcaaacaaactcatttagaattattaattgttaccaatcaacctctcctcatagaacaattaaatgatacatctataatttttgacactataggtattgagaccatattaacaattatgggtatagaagaggtggaagaagtgtatttattgggagaaagtcaagcagacatgttttcaaaaatgaaaaatttttctatctcttgtcagtctatt

SEQ ID NO: 2538 - protein, 532 aa, Streptococcus agalactiae
MLNTKDKQPILLIIFGQKMKEYDDLIRSTVERLSKRDRPVSILISKELNHVIHHYDAQFENLETLVGYINTHEDSLIYPLCLDKNHELFQEFLAWQSHYSRQYISDNLSEKSVQAIDNNQDFVQVDCLVMRDSLNNCLYVSDLEYIESNKTTGKSLAIVPSQTLSDAARQTIRDVAFDVCRKANIIGVCYFSFLIDLNSLDYHIISLSSGLSHQSILFETITTYPVLEIATKLTVGYTFSQLKHSYYPNTSAFLEPQLDYVATVSFSFEKVDYIFFARNIEQLFLNLLEASSHDHFPFLSDISEEDLMFALIQKKENRLAYLLEAFRRGFDLYDLSSVTKINPFYLDKCLHIVELYENLNKSQYNVDIYKEAKRYGFSDDYIASSWQISLIDMLEYRKKHSVAPVLKQVEQSSGVLTGHQIQYFRSYDWHSDYISSGCQKALIMVDKGYSLVKLNELIKQIKQTHLELLIVTNQPLLIEQLNDTSIIFDTIGIETILTIMGIEEVEEVYLLGESQADMFSKMKNFSISCQSI

SEQ ID NO: 2539 - DNA, 1068 bp, Streptococcus agalactiae
atggcaaaaaaattgttaattctagaggatggtacggtttttgaaggactatcctttggttcatctcttgatgtaactggcgaattagttttttgtacggggaataccggctatcaggaaataataacgaatccttcacataatggaaaaattttagtttttacctcaccgctaataggaaattatggtattcatcgcagttactctgaagccattattcccacttgtttaggagttgttgttgcagagtattccagatgtgtaagtagcgatactagcaagatgaatctagatgaatttttgaaaatgaaaaaggttcctgcaatgtcgggggtcgatacaaggtatttgatgcaagttattaaagaaaaaggatttgtaaaagctactttagcagaagcaggtgatgttttatcacatttacaggatcaattaatagcgacagtattaccgacaaataatgtggaacaagtttcgacaaaaacagcttatccgtcgcctgctagcggtcgaaatattgttgtacttgattttggtcttaaacattctattttgagagaattgtctaaacgtcagtgtgacgtgactgtcattccctacaatacgtctttagaaggtattaaaaatctatacccagaaggtatcatattatctaatggtccggggaatccagaaaagcttcaggaaatcttaaacactattaaagaattacaaaaatctgttcctatgttaggtattggtttggggcaccaattaattgccatggcaaatggtgcagaaattatgagactcccagttgctaagaaggggccaaattatcccatgagagatattgctacgggtcgtttagaaacagttagtcagtttaatcattttaccgttaaccggctaaatcttccgcatgatttactggtaacacacgaaggtttgaatgatcaagagattgttgctctaaggcaccgctcatttccagtgatgtccgtgcaattttacccagaggctgctccaggccctcatgatgtgacctatttttttgatgaatttttagaaatgattggatcacgcgct

SEQ ID NO: 2540 - protein, 356 aa, Streptococcus agalactiae
MAKKLLILEDGTVFEGLSFGSSLDVTGELVFCTGNTGYQEIITNPSHNGKILVFTSPLIGNYGIHRSYSEAIIPTCLGVVVAEYSRCVSSDTSKMNLDEFLKMKKVPAMSGVDTRYLMQVIKEKGFVKATLAEAGDVLSHLQDQLIATVLPTNNVEQVSTKTAYPSPASGRNIVVLDFGLKHSILRELSKRQCDVTVIPYNTSLEGIKNLYPEGIILSNGPGNPEKLQEILNTIKELQKSVPMLGIGLGHQLIAMANGAEIMRLPVAKKGPNYPMRDIATGRLETVSQFNHFTVNRLNLPHDLLVTHEGLNDQEIVALRHRSFPVMSVQFYPEAAPGPHDVTYFFDEFLEMIGSRA

SEQ ID NO: 2541 - DNA, 555 bp, Streptococcus agalactiae
ttgaaggggctcttttatcttagagaggatactgcaatgaaaagaaaagaaattattgatgatgtgaccatgaaacgtgctattacacgtattacctacgaaattatagaacgtaacaaaaatttagataatattgtcttagcaggcattaaaacaagaggtgtttttttagccaaacgcattcaagaacgcttgaagcaattagaaaatttagatattcccgttggagaattggatactaaacctttccgtgatgatatgaaagttgaagttgacaccacaactatgccagttgacatcactgataaagatattatattaattgatgatgttctctatacaggtcgcactattcgagctgctattgataatcttgttagtttagggcgtccgagtcgtgtcagtttagctgtattaattgaccgtgggcatcgtgaactacctattcgtgcagattatgtggggaaaaatattccaacaagtcaatttgaagaaattctagttgaagtgatggaacatgatggttacgatcgtgtgagtattattgatccgagt

SEQ ID NO: 2542 - protein, 185 aa, Streptococcus agalactiae
MKGLFYLREDTAMKRKEIIDDVTMKRAITRITYEIIERNKNLDNIVLAGIKTRGVFLAKRIQERLKQLENLDIPVGELDTKPFRDDMKVEVDTTTMPVDITDKDIILIDDVLYTGRTIRAAIDNLVSLGRPSRVSLAVLIDRGHRELPIRADYVGKNIPTSQFEEILVEVMEHDGYDRVSIIDPS

SEQ ID NO: 2543 - DNA, 519 bp, Streptococcus pyogenes
atgaaaactaaggaaattgttgatgacgtgaccatgaaacgcgccattacccgtattacttatgaaattattgaacgtaataaacaattagacaatgtggttttggcaggcatcaaaacgagaggtgtttttctagctcgtcgcattcaagaaagactgcatcaattagaagggttggatttaccaattggtgagttagacatcaagccttttagagatgacatgagagttgaggaagacacaactctgatgtcagtagatattacaggcaaggatgtgattttgattgatgatgtgctttatactggtcgtaccatccgcgcagccatcgataacttagtgagtttaggtcgaccagcccgtgttagtctagctgttttggtggatcgtggccatcgggaattaccgattcgcgcggattacgttgggaaaaatattccaacaagcagtgtagaagaaattgttgttgaggttgtcgaagtcgatggccgtgatcgtgttagcattattgactcaaca

SEQ ID NO: 2544 - protein, 173 aa, Streptococcus pyogenes
MKTKEIVDDVTMKRAITRITYEIIERNKQLDNVVLAGIKTRGVFLARRIQERLHQLEGLDLPIGELDIKPFRDDMRVEEDTTLMSVDITGKDVILIDDVLYTGRTIRAAIDNLVSLGRPARVSLAVLVDRGHRELPIRADYVGKNIPTSSVEEIVVEVVEVDGRDRVSIIDST

SEQ ID NO: 2545 - DNA, 912 bp, Streptococcus agalactiae
ttgcactttggaaagaggaaagtaatggaaatcacaattaaaatagcaggagttaggctagataaagctttagcggataattctgaactgtcgcgtagtcaagctaatgaagaaattaaaaaagggattgtgttagtaaatggacaagtaaaaaaagcgaaatatactgttcaagaaggagatcggattacttttgatattcctaaagaggaagtactagattatcaagctgaaaatatccctttagatattatctatcaagatgatgacgttgctgtggttaataagccgcaagggatggttgttcacccttctgcaggccacagttcgggcaccttagttaacgccttgatgtatcatattaaggatttatcatcaattaatggcgttgttcgcccagggatcgttcatcgtattgataaagatacttctggtttattgatggttgcaaaaaatgatagagctcaccaagtgttggctgaagagttaaaagataaaaaatcgcttcgtaaatatttagcaattgtgcatggtaatttaccaaatgatcgaggtgtgattgaggctccgattggtagaagcgataaagatcgtaagaagcaagccgtgactgctaaaggtaagccagcaataactcgttttcatgttttagaacgttttggtgattataccttagttgaattgtcattggagacaggtcgaacacaccaaattcgggttcatatggcttatattggccatcctctagccggtgatcctgtctacggtccccgtaagactttagggggtaaaggacagtttttgcatgcacaaacactaggttttacgcaccctagtaacggagagaatttgattttttcagtagaggttccggaaatttttcagacaaccttagaaaagttgagaaaaaat

SEQ ID NO: 2546 - protein, 304 aa, Streptococcus agalactiae
MHFGKRKVMEITIKIAGVRLDKALADNSELSRSQANEEIKKGIVLVNGQVKKAKYTVQEGDRITFDIPKEEVLDYQAENIPLDIIYQDDDVAVVNKPQGMVVHPSAGHSSGTLVNALMYHIKDLSSINGVVRPGIVHRIDKDTSGLLMVAKNDRAHQVLAEELKDKKSLRKYLAIVHGNLPNDRGVIEAPIGRSDKDRKKQAVTAKGKPAITRFHVLERFGDYTLVELSLETGRTHQIRVHMAYIGHPLAGDPVYGPRKTLGGKGQFLHAQTLGFTHPSNGENLIFSVEVPEIFQTTLEKLRKN

SEQ ID NO: 2547 - DNA, 888 bp, Streptococcus pyogenes
atggaaattaatgtgataacatcggggcaacgcttggataaggcactagctgatttaagtcccctgtcacgtggtcaagccaatgaccaaattaagcaaggccttgttttagttaatggtcagcaaaaaaaggctaaatatacggttcaagcaggagatgtgatttgttttgaactccctaaagaagaagtcttagagtaccaagctcagaatattcccttggacattatctatgaagatgatgctctcgccattattaacaagccacagggaatggtagttcacccttcggcgggacacccttcaggaacaatggttaatgccttgatgtatcatatcaaggatttgtcctcaatcaatggtgtggttcgtccaggaattgttcatcggattgataaggacacctccggtctcttaatggtagctaaaacagatgcggctcatcaagccttagcagaagaattgaaggctaaaaaatctctcagaaaatacctcgccattgtccatggaaacctaccgaatgatcgcgggatgattgaagctcctataggtcgtagcgaaaaggaccgtaaaaaacaggctgttactgcaaaaggcaaagaagcagtgacacgttttacagtgctagaacgttttggcgattacagtctagtggaattacaactggaaactggtcgaacgcaccaaattcgtgttcatatggcctatattggtcatcctgttgctggggaccctttatatggaccacgtaagacactatcaggtcatggccaatttcttcatgcaaaaacattgggattaacgcatcctatgacaggaaaagaaatgatatttactgttgaagctcccgaaatttttcaaaaggtgttaaagctgctaagaaaaaaa

SEQ ID NO: 2548 - protein, 296 aa, Streptococcus pyogenes
MEINVITSGQRLDKALADLSPLSRGQANDQIKQGLVLVNGQQKKAKYTVQAGDVICFELPKEEVLEYQAQNIPLDIIYEDDALAIINKPQGMVVHPSAGHPSGTMVNALMYHIKDLSSINGVVRPGIVHRIDKDTSGLLMVAKTDAAHQALAEELKAKKSLRKYLAIVHGNLPNDRGMIEAPIGRSEKDRKKQAVTAKGKEAVTRFTVLERFGDYSLVELQLETGRTHQIRVHMAYIGHPVAGDPLYGPRKTLSGHGQFLHAKTLGLTHPMTGKEMIFTVEAPEIFQKVLKLLRKK

SEQ ID NO: 2549 - DNA, 903 bp, Streptococcus agalactiae
atgaatattcaacaactgcgttatgttgttgctatcgcaaatagtggtacttttcgtgaagcagctgcaaaactatttgttagtcagccaagtttatctgttgccgttcgtgatttggaaacagaattagggtttcagatttttacgcgtacaactactggtgcagtgttgaccaatcaaggcatgactttttatgagaatgctttagaagttgtgaaaagctttgattcattcgaaaaacagttttcgcaatctgaagctacagagcaagaattctcaatagcaagtcaacattatgattttctacctcctttaatcacagcgttttcaaaatgtaatgataattttagctatttccgtattttcgaatcaacaacaatacgtatcttagatgaagttgctcaagggaatagcgaaataggtatcatttatatcaatagtcaaaataaaaaaggtctacttcagcggttggacaaattggggttagagtttgtagagcttattccttttaaaactcatatttatcttgggaaagaccatcccttggctagtaaaacatctctgataatgacagatttagaaggattaccaaccgtacgttttacacaggatagagatgattatcggtattactcggagaattttgtggaagtacttgatagttctgttacctataatgttactgatagagcaacattaaatggtattttagaaagaacccaagcttatgcgacgggctcaggattcttggatagccgcagtgtgaatggtatcactgttattccattagaagatcatctagataaccaaatgatttatatcaaacgaaaagatcgtaatttatctcagatggctttaaaatttgttgctgttatggaagagtattttaagggatttaattca

SEQ ID NO: 2550 - protein, 301 aa, Streptococcus agalactiae
MNIQQLRYVVAIANSGTFREAAAKLFVSQPSLSVAVRDLETELGFQIFTRTTTGAVLTNQGMTFYENALEVVKSFDSFEKQFSQSEATEQEFSIASQHYDFLPPLITAFSKCNDNFSYFRIFESTTIRILDEVAQGNSEIGIIYINSQNKKGLLQRLDKLGLEFVELIPFKTHIYLGKDHPLASKTSLIMTDLEGLPTVRFTQDRDDYRYYSENFVEVLDSSVTYNVTDRATLNGILERTQAYATGSGFLDSRSVNGITVIPLEDHLDNQMIYIKRKDRNLSQMALKFVAVMEEYFKGFNS

SEQ ID NO: 2551 - DNA, 912 bp, Streptococcus pyogenes
atgaatattcaacaattacgctatgtggtagccatcgctaataatggaacttttcgagaagctgcctctaaattgtttgtcagtcagcctagcttatcagtttctatcaaagatttagaggcggaattagggtttcaaatttttaatcggactacttcaggaacagtcttgacaagtcaaggactagttttttatgagaaagctttagaagtagtcaagtcttttgattcttttgaaaaaaccttttctcaagctgatctggatcaaaatgaattttctattgctagccaacattatgactttttgccacctcttattacagctttttcgcaacaatacgatggtcatcgtgtctttcgtatctttgaatcaacaactattcaaattttagatgaagttgctcaaggaaacagtgaaattggtattatttacttgaatgtagacaatcaaaaaggtctctttcagcggatggataagctgggcttagaatatgtttctctaattccttttactactcatatttatctttcaaaaacgcatccattggctaatcgcgaagcgctttatttgaacgatattcaaggattacctgcggtaaggtttacccaagaaagggacgagtatttgtattattctgaaaattttgtggatactagtgaatgccctcgtatttataatgtgtcagatagggcaaccttgaacggtattttagagagaaccaatgcctttgcgacaggatcaggttttctcgatcatcggagtgttaatgggattaaagtgatacctctagctgatcatattgacaatcaaatgatttatgtcaaacgaaaagataaaaacctttctgttgctggggccacttttgtgactattttaaaagactattttgataaaagaaggaaggccttaaca

SEQ ID NO: 2552 - protein, 304 aa, Streptococcus pyogenes
MNIQQLRYVVAIANNGTFREAASKLFVSQPSLSVSIKDLEAELGFQIFNRTTSGTVLTSQGLVFYEKALEVVKSFDSFEKTFSQADLDQNEFSIASQHYDFLPPLITAFSQQYDGHRVFRIFESTTIQILDEVAQGNSEIGIIYLNVDNQKGLFQRMDKLGLEYVSLIPFTTHIYLSKTHPLANREALYLNDIQGLPAVRFTQERDEYLYYSENFVDTSECPRIYNVSDRATLNGILERTNAFATGSGFLDHRSVNGIKVIPLADHIDNQMIYVKRKDKNLSVAGATFVTILKDYFDKRRKALT

SEQ ID NO: 2553 - DNA, 291 bp, Streptococcus agalactiae
atgttaaaaatgaatcttgctaacttgcaacttttcgcccacaaaaaaggtggaggttctacatcaaacggacgtgattcacaagcaaaacgtcttggagctaaagcagctgacggacaaacagtatcaggtggatcaattctttaccgtcaacgcggtacacacatctatccaggtgctaacgttggacgtggtggggacgatacactttttgctaaagttgaaggtgttgttcgtttcgaacgtaaaggacgcgataaaaaacaagtgtctgtttacccaatcgcaaaa

SEQ ID NO: 2554 - protein, 97 aa, Streptococcus agalactiae
MLKMNLANLQLFAHKKGGGSTSNGRDSQAKRLGAKAADGQTVSGGSILYRQRGTHIYPGANVGRGGDDTLFAKVEGVVRFERKGRDKKQVSVYPIAK

SEQ ID NO: 2555 - DNA, 291 bp, Streptococcus pyogenes
atgttaaaaatgaatcttgctaacttgcaacttttcgcccacaaaaaaggtggaggttctacatcaaacggacgtgactcacaagctaaacgccttggtgctaaagctgctgacggtcaaactgtttcaggtggatcaatcctttaccgtcaacgtggaactcatatctacccaggtgtaaacgtaggccgtggtggagatgacacactttttgctaaagttgaaggtgttgtacgtttcgaacgtaaaggacgcgataaaaaacaagtttctgtttacccagtagctaaa

SEQ ID NO: 2556 - protein, 97 aa, Streptococcus agalactiae
MLKMNLANLQLFAHKKGGGSTSNGRDSQAKRLGAKAADGQTVSGGSILYRQRGTHIYPGVNVGRGGDDTLFAKVEGVVRFERKGRDKKQVSVYPVAK

SEQ ID NO: 2557 - DNA, 336 bp, Streptococcus agalactiae
atgattaaagcaacttttactcgtaatcaatcaggctatctttatagtgctgaaatcagcggtcatgctggtagtggcgagtacggctttgatgtgatttgtgcagctgttagtactttatcaattaattttattaattcattagaggctttaacaacctgccaagcgcaattgattatcaatgacgttgaaggtggttatatgaagatagatttatcttctataccacaacataaagaggataaggttcaattattatttgagtcttaccttcttggaatgactaatctgtctaaagattcttctgaatttgttagtacagtagtcatgacacac

SEQ ID NO: 2558 - protein, 112 aa, Streptococcus agalactiae
MIKATFTRNQSGYLYSAEISGHAGSGEYGFDVICAAVSTLSINFINSLEALTTCQAQLIINDVEGGYMKIDLSSIPQHKEDKVQLLFESYLLGMTNLSKDSSEFVSTVVMTH

SEQ ID NO: 2559 - DNA, 324 bp, Streptococcus pyogenes
atgattaaagcaatttttactcgccaaaaaaatggtcaactgagcagtgttacactgacaggtcatgctggtagtggtaaacatggctttgatattgtttgtgcctctgttagtactctagccattaactttgttaattctcttgaggtgttagcagattgccaagcattagtagatcttaatgatgttgaaggtgggtatatggctattacaataccaccacatgacaacaaggaggaagttcaattattatttgaatcttttcttctaggaatgactagtttggcgaaggattcttcgaaatttgtcaacactcaggtcatc

SEQ ID NO: 2560 - protein, 108 aa, Streptococcus pyogenes
MIKAIFTRQKNGQLSSVTLTGHAGSGKHGFDIVCASVSTLAINFVNSLEVLADCQALVDLNDVEGGYMAITIPPHDNKEEVQLLFESFLLGMTSLAKDSSKFVNTQVI

SEQ ID NO: 2561 - DNA, 312 bp, Streptococcus agalactiae
atgagcacatacgcaatcatcaaaactggtggtaaacaagttaaagttgaagtaggacaagctatctacgttgaaaaacttgacgttgaagcaggagcagaagttacatttaacgaagttgttcttgttggtggtgaaacaactaaagttggtactccagttgttgaaggagctactgttgttggtactgttgaaaaacaaggcaaacaaaagaaagttgtttcttacaaatacaaacctaaaaaaggtagccaccgtaaacaaggtcaccgtcaaccttatacaaaagttgttatcaacgcaatcaacgct

SEQ ID NO: 2562 - protein, 104 aa, Streptococcus agalactiae
MSTYAIIKTGGKQVKVEVGQAIYVEKLDVEAGAEVTFNEVVLVGGETTKVGTPVVEGATVVGTVEKQGKQKKVVSYKYKPKKGSHRKQGHRQPYTKVVINAINA

SEQ ID NO: 2563 - DNA, 312 bp, Streptococcus pyogenes
atgagcacatacgcaatcatcaaaactggtggaaaacaagttaaagttgaagtaggtcaagcaatctacgttgagaaaattgacgctgaagctggcgcagaagtcacttttaacgaagttgttcttgtaggtggtgacaaaactgtagttggtactccagttgttgaaggagctactgtcgttggaactgttgaaaaacaaggaaaacaaaagaaagttgtaactttcaaatacaaacctaaaaaaggtagccaccgtaaacaaggtcatcgtcaaccttacactaaagttgtcatcaacgcaatcaacgct

SEQ ID NO: 2564 - protein, 104 aa, Streptococcus pyogenes
MSTYAIIKTGGKQVKVEVGQAIYVEKIDAEAGAEVTFNEVVLVGGDKTVVGTPVVEGATVVGTVEKQGKQKKVVTFKYKPKKGSHRKQGHRQPYTKVVINAINA

SEQ ID NO: 2565 - DNA, 1164 bp, Streptococcus agalactiae
atgaagagcgctgctatgactatggaatttgagcgtgcggctgaatatcgagatttgatcgaagcaattagtttgttgcgtactaagcagcgtgttattcatcaagatatgaaggatagagatgtttttggttatttcgttgataagggttggatgtgtgtacaggtcttttttgttcgaaatggaaaattgattcagcgtgacgtgaatatgtttccttattataatgaaccagaggaagattttctaacttacatagggcaattttatcaagatacaaaacattttctacccaaagaagtctttattccacaggatattgatgctaagtcggttgaaacaattgtaggctgtaagattgttaaaccacaacgtggtgaaaagaaacagttagtaaatctggcaataaaaaatgctcgtgtcagtttacaacagaagtttgacttactggaaaaagatattcgtaaaactcatggggcaattgaaaatttaggtaatcttcttaatatccctaaaccagtacgcatagaagcatttgataattccaatattcaagggacaagtccagtagctgctatggtggtatttgtgaatggaaagccaagtaaaaaagactatcgaaagtttaaaattaagactgttatcggaccagatgattatgctagtatgagagaagtcattcatcggcgttatagtagggttttaaaagatggcttgacacctccggacttgattgtaattgatggtggtcaggggcaagtaaatatagcgcgtgatgttattgagaaccaatttggtttagccatacctattgcaggtttgcaaaagaatgataaacaccaaacacatgaattactttttggagatcctttagaagtagtagagctaccgcgtaattcagaagaatttttcttacttcaccgtattcaagatgaggtacatcgttttgctattacttttcatcgtcaattacgctccaaaaattccttttcttcaaaattagatggtatcactgggttgggaccaaaacgtaaacaattgctaatgaaacattttaaaagcttacctaatatccaaaaagctgagattgaggacattattatgtgtggtattcctaggactgttgcagaaagtctccgagattctcttaatgatcctcctaaa

SEQ ID NO: 2566 - protein, 388 aa, Streptococcus agalactiae
MKSAAMTMEFERAAEYRDLIEAISLLRTKQRVIHQDMKDRDVFGYFVDKGWMCVQVFFVRNGKLIQRDVNMFPYYNEPEEDFLTYIGQFYQDTKHFLPKEVFIPQDIDAKSVETIVGCKIVKPQRGEKKQLVNLAIKNARVSLQQKFDLLEKDIRKTHGAIENLGNLLNIPKPVRIEAFDNSNIQGTSPVAAMVVFVNGKPSKKDYRKFKIKTVIGPDDYASMREVIHRRYSRVLKDGLTPPDLIVIDGGQGQVNIARDVIENQFGLAIPIAGLQKNDKHQTHELLFGDPLEVVELPRNSEEFFLLHRIQDEVHRFAITFHRQLRSKNSFSSKLDGITGLGPKRKQLLMKHFKSLPNIQKAEIEDIIMCGIPRTVAESLRDSLNDPPK

SEQ ID NO: 2567 - DNA, 1794 bp, Streptococcus pyogenes
atgaacgaactgattaaacataaactagaactcttaccagacagccctggctgttacttacataaagataaagaaggaactattatctatgtcggtaaggccaagaatttgaaaaaacgcgtccggtcctattttcgtgggagccatgataccaaaacagagttactagtatctgagattgtagatttcgaatatattgtaacagagtcagataccgaagcgcttttgttggaaattaacttgattcaaaaaaatatgcctaagtacaacatcaagttaaaagatgataaatcttatccctttctcaaaatcacaaatgagtcttttcctcggttagtgattacaagatatattaagaaaaatgatggattgtactttgggccctacccagattcttacactgctaatgaagttaaaaagttattagataggatttttccatttaaaaagtgtaaaaatcctatcaataaggtctgtttttattaccatttaggccagtgctgtgctcataccatttgtcatacagacaaggcctattgggatcgtttaattgatgatgttaagcactttttaaatggtaaagatgacaaaattattgaagatcttcgttctaagatgttagcagcttctaaagaaatggcatttgaacgtgccgctgaatatcgagatttgatttcaggtattgccaccatgcgcaccaagcagcgggtgatgagcaaggatttgcaagatagagatatctttggctattatgttgataagggatggatgtgtgtccaagttttctttgtgcgtcaagggaaattaattcagcgtgatgttaacctttttccctattataccgatgcagaagaagatttcttaacttatatggggcaattttaccaagataaacagcatttcatccctaaagaagtctttattccagaagctattgatgaagaactggtagccgctattgtgccaaccaaaatcatcaaacccaaacgcggtgaaaaaaaacaactggtagctttggctactaagaatgctcgtgttagtctgcaacaaaaatttgatttattagaaaaagatatcaaaaaaacgagtggtgctatcgaaaatttaggtcagttacttaggattgacaagcctgtgcgcattgaagcctttgataattctaacattcaagggacaagtccagttgcggctatggttgtttttgttgatggcaaacctagtaagaaagattatcgtaaatttaagattaaaacagtggtgggaccagatgattatgccagtatgagagaagtgctttttcgaaggtacagtcgggtgaaaaaggagggactgcaagctcctaacttgattattgttgatggaggcgttggacaagtcaatgtggccaaagatgtgatagaaaaacaacttggactcactattcctgttgcgggacttcaaaaaaacgataagcaccagacccatgatttgctttttggaaacccacttgaagttgtaccgttgccgcgccgttctgaagagtttttcttactgcatcggattcaagacgaagtgcatcgctttgcagttacatttcatagacaagtgcgacgtaaaaattctttttcatcaacattagatcatatttcagggcttggcccaaagcgaaaacagttattactaagacactttaaaaccataacagcgattgcatcagctacctctgaggagattcaagctttaggtatacctaaaacagtagttgaagcaatacagcaacagataacagacaataaaaatgatagatcgtcccct

SEQ ID NO: 2568 - protein, 598 aa, Streptococcus pyogenes
MNELIKHKLELLPDSPGCYLHKDKEGTIIYVGKAKNLKKRVRSYFRGSHDTKTELLVSEIVDFEYIVTESDTEALLLEINLIQKNMPKYNIKLKDDKSYPFLKITNESFPRLVITRYIKKNDGLYFGPYPDSYTANEVKKLLDRIFPFKKCKNPINKVCFYYHLGQCCAHTICHTDKAYWDRLIDDVKHFLNGKDDKIIEDLRSKMLAASKEMAFERAAEYRDLISGIATMRTKQRVMSKDLQDRDIFGYYVDKGWMCVQVFFVRQGKLIQRDVNLFPYYTDAEEDFLTYMGQFYQDKQHFIPKEVFIPEAIDEELVAAIVPTKIIKPKRGEKKQLVALATKNARVSLQQKFDLLEKDIKKTSGAIENLGQLLRIDKPVRIEAFDNSNIQGTSPVAAMVVFVDGKPSKKDYRKFKIKTVVGPDDYASMREVLFRRYSRVKKEGLQAPNLIIVDGGVGQVNVAKDVIEKQLGLTIPVAGLQKNDKHQTHDLLFGNPLEVVPLPRRSEEFFLLHRIQDEVHRFAVTFHRQVRRKNSFSSTLDHISGLGPKRKQLLLRHFKTITAIASATSEEIQALGIPKTVVEAIQQQITDNKNDRSSP

SEQ ID NO: 2569 - DNA, 96 bp, Streptococcus agalactiae
atgaatgaaaatgtaccagcaacaacagctagtgcaactgttccaattacagatataaataaactggttaaaataattttacttagaagacgccac

SEQ ID NO: 2570 - protein, 32 aa, Streptococcus agalactiae
MNENVPATTASATVPITDINKLVKIILLRRRH

SEQ ID NO: 2571 - DNA, 651 bp, Streptococcus agalactiae
atggatgttatcatgacaaaagatcataaattagtagtcatccatgatgataatctcaaacgactctctggtatgaacaaagatgtttctaaactaactttagatcaagttacaaaaatcccaattcaccaagggcgttttgctagtcacattccatcatttacagaatttatgaagaccgctcagtcactagatcaaaaaatcatgattgaattgaaaccgtataatcaaaacctcgatatctatgcggatgaatttatcaaagaatttaaagagcttcgtctctcaaccaagcataaagtaatgtctctcaacttgacactcattgaaaaagttgagaaaaaattgccacaacttgatacaggttacctaatcccactacattggggaacgcttcaaaatcataacgttgacttttatgggattgaggaattttcatacaatgattggattgcatatctcgcccaagaatataataaacagctctatgtttggactattaaccgtgataaccttatgatacgttatttacaaagcccagttaatggaatcatcacagatgaactcaaccttttcaaggtcattaataaagatatcaaaaatagccctaattattatcaaagagctctccaacttattgatagcgagggt

SEQ ID NO: 2572 - protein, 217 aa, Streptococcus agalactiae
MDVIMTKDHKLVVIHDDNLKRLSGMNKDVSKLTLDQVTKIPIHQGRFASHIPSFTEFMKTAQSLDQKIMIELKPYNQNLDIYADEFIKEFKELRLSTKHKVMSLNLTLIEKVEKKLPQLDTGYLIPLHWGTLQNHNVDFYGIEEFSYNDWIAYLAQEYNKQLYVWTINRDNLMIRYLQSPVNGIITDELNLFKVINKDIKNSPNYYQRALQLIDSEG

SEQ ID NO: 2573 - DNA, 1773 bp, Streptococcus pyogenes
ttgtcaggcaatgagttgtttaaaataaaggagattagttcaatgacatttttatctgatttgatatcattaatgacaaaaatcagattatcttgggtaataaaggcgggtatttttcaattattatttgtaacgattgctaatattgtcttatcagaatttttctattttatattagacgttactggtcaatatcatttagataaagacaatgttgtgacttttttaaaaaatcctatagcacttgctttattaggtgcctatttatttttattagctgcttttattcaccttgagttttttgctctatatcgaattattgcggatcaagaaattagtttctatctttttagaaaacagttttcttattacctaagggggctttggaaaacattttctggttaccaattattactttttttgctttatatcctattgactattccagtcttacatattggtttatcttctgtgattactcaaaagctttatcttccagaatttattgttggggaattatcaaagataactagcacaaagtacttgctttatggcagtcttattcttgtgttttaccttaacctaagattagtatattttttaccattgatagcaatcaaccatcgtacggttgctcaagcatggagagagagttggcaaaagactaaaaagaaacatgtattgttatggatgaaactttttgcaatcaatggtcttacgattgtagtcttatcgctagctatttccatgattcttatttttgttgatatgtttaatcctaaggggaataatattattgttcagctgggagctttgacctttacatgggaactcattttttttactactattttttttaaactctgttcagcaatgattttaaaagaggcaattgaaccacaaaagcaatatgatgagccaagaagaagtaataaggcatatgttgtaatctttatcgtggttacagtaggttttgcttatcaatctcttgaacgtttaactttttttgacacatctcactctaagacagttatcgcgcatagaggacttgtatcagcaggtgtagaaaattctctggaagcccttgaaggtgctaagaaagcaggaagtgattatgtagaactggatctaatcttgactaaggataatcactttgtggtgtctcatgataatcgattgaagcgtttagctggagtaaataagacgattcgcaacttaaccttaaaagaagttgaacatctaacgagtcatcaaggacatttttcagggcgttttgtttcttttgacactttttatcaaaaggctaagaagttgaatatgccattacttattgaactcaagccaattggtacagaacctggaaattatgtcgatttgtttttagaaacttatcatcgacttggtataagcaaagataataaagtcatgtctttagatttagaagtaatagaagctatcaagaaaaaaaatccatcaattacgactggttatatcataccaattcaatttggattttttggagatgaatttgttgatttctatgtcattgaagacttttcttatcggtcttatttgtcgtcccaagctttttggaataataaagaaatttacgtttggactattaatgatcccaagcgcatagagcattatctcctaaagcctattcagggaattattacagaccaaccagctttaactaatcaattgattaaagacttaaaacaagataattcttattttagtcgattagtcagaattattagtagtctttat

SEQ ID NO: 2574 - protein, 591 aa, Streptococcus pyogenes
LSGNELFKIKEISSMTFLSDLISLMTKIRLSWVIKAGIFQLLFVTIANIVLSEFFYFILDVTGQYHLDKDNVVTFLKNPIALALLGAYLFLLAAFIHLEFFALYRIIADQEISFYLFRKQFSYYLRGLWKTFSGYQLLLFLLYILLTIPVLHIGLSSVITQKLYLPEFIVGELSKITSTKYLLYGSLILVFYLNLRLVYFLPLIAINHRTVAQAWRESWQKTKKKHVLLWMKLFAINGLTIVVLSLAISMILIFVDMFNPKGNNIIVQLGALTFTWELIFFTTIFFKLCSAMILKEAIEPQKQYDEPRRSNKAYVVIFIVVTVGFAYQSLERLTFFDTSHSKTVIAHRGLVSAGVENSLEALEGAKKAGSDYVELDLILTKDNHFVVSHDNRLKRLAGVNKTIRNLTLKEVEHLTSHQGHFSGRFVSFDTFYQKAKKLNMPLLIELKPIGTEPGNYVDLFLETYHRLGISKDNKVMSLDLEVIEAIKKKNPSITTGYIIPIQFGFFGDEFVDFYVIEDFSYRSYLSSQAFWNNKEIYVWTINDPKRIEHYLLKPIQGIITDQPALTNQLIKDLKQDNSYFSRLVRIISSLY

SEQ ID NO: 2575 - DNA, 591 bp, Streptococcus agalactiae
gtggtacaatatctaatgactataaaaaaggagctattcatgctacgagcattaaaagaagatttttttctaaccttaacctctttaaaaaatcaattttgggtttacattggaactggtatcttaatccaaactttagttgcttatttagtaaaaggaattctgagttttatctttcgtcggatattgatattgtcaaatactcccgcagtgactaaagacaattggactttactttttaatcatcccttagctttattactctttatactttatatcgtaatcctaattgggttcatctatactgagttcgctatctatactattgccatactgaaaactgaattttctctcagtatcaaaaaatggctaacaatctttcctaaaaaaataaaatcacttttaggaccacagctaatttgggtatcaatctacttacttttgacaattcctctagctaaccttggtctaaggtcaagtatactagagcatcttaaaattcctgactttatttctggcgagttaacaaagacagtctttggaaagataggttactctacccttttactgcttatttgttacttaaacctt

SEQ ID NO: 2576 - protein, 197 aa, Streptococcus agalactiae
MVQYLMTIKKELFMLRALKEDFFLTLTSLKNQFWVYIGTGILIQTLVAYLVKGILSFIFRRILILSNTPAVTKDNWTLLFNHPLALLLFILYIVILIGFIYTEFAIYTIAILKTEFSLSIKKWLTIFPKKIKSLLGPQLIWVSIYLLLTIPLANLGLRSSILEHLKIPDFISGELTKTVFGKIGYSTLLLLICYLNL

SEQ ID NO: 2577 - DNA, 246 bp, Streptococcus agalactiae
ttgaaaactaccataaaaaacaaacaaacttgtggtacaatatctaatgactataaaaaaggagctattcatgctacgagcattaaaagaagatttttttctaaccttaacctctttaaaaaatcaattttgggtttacattggaactggtatcttaatccaaactttagttgcttatttagtaaaaggaattctgagttttatctttcgtcggatattgatattgtcaaatactcccgcagtgac

SEQ ID NO: 2578 - protein, 82 aa, Streptococcus agalactiae
MKTTIKNKQTCGTISNDYKKGAIHATSIKRRFFSNLNLFKKSILGLHWNWYLNPNFSCLFSKRNSEFYLSSDIDIVKYSRSD

SEQ ID NO: 2579 - DNA, 105 bp, Streptococcus agalactiae
ttgttttttatggtagttttcaaaccggtttcacttttttatcaattttgccttcaaaagctgaaacgcattttaaaaagtgatagaatagtagggaaaatcaaa

SEQ ID NO: 2580 - protein, 35 aa, Streptococcus agalactiae
MFFMVVFKPVSLFYQFCLQKLKRILKSDRIVGKIK

SEQ ID NO: 2581 - DNA, 600 bp, Streptococcus agalactiae
atgaaatttctagaattaaataagaagcgccatgctgtgaaacattttaatgataaaccagtcgactttaaagatgttagaactgctattgaaattgcgacattagcgccatctgctaataatattcagccttggaagtttgtcgttgtccaagaaaaaaaatctgctctagcagaaggtttaccggaaagtaattgtaaccaaattaatcaagcgcagtatgttattgctttatttacagatacagatttaggacagagatcacggaaaatagctcgtattggtcgtagatctcttcctgatgatttaattggttattacatggaaactctaccaccacgctatgctttatatagtgaaaaacaaactggagagtatctctctttaaatgcaggtatcgttgctatgaatttagtacttgccttgacagatcaaggtattagttctaatatgattttagggttcgataaagcgattactaatgatgtcttagagatagataaacgttttagaccagaaatattaattactgttggttatagtgatgaaaaggttgaacctagttatcgtttgccagttgatcatattattgaaaaacgt

SEQ ID NO: 2582 - protein, 200 aa, Streptococcus agalactiae
MKFLELNKKRHAVKHFNDKPVDFKDVRTAIEIATLAPSANNIQPWKFVVVQEKKSALAEGLPESNCNQINQAQYVIALFTDTDLGQRSRKIARIGRRSLPDDLIGYYMETLPPRYALYSEKQTGEYLSLNAGIVAMNLVLALTDQGISSNMILGFDKAITNDVLEIDKRFRPEILITVGYSDEKVEPSYRLPVDHIIEKR

SEQ ID NO: 2583 - DNA, 600 bp, Streptococcus pyogenes
atgaaatttctagagttaaacaaaaaacgccatgccattaagacctttaatgaccagccagttgactacgaggatttgcgaacagccattgagattgcaaccttagcacctagtgccaataacattcaaccttggaaatttgtagtcgttcaagagaaaaaagctgagttagcaaaagggttacctctagcaaataaagtgcaggttgaacaggctcaatatgtagtggcgctattttcagacactgatttagctttacgttctcgtaaaattgcccgtatcggtgtcaaatcattaccagacgacttaattggttattatatggagactttgccaccacgttttgctgcttttaatgaggttcaaaccggtgagtacttagctattaatgcaggcattgtggctatgaacttggtgttatccttgacggatcaaaagattgcttccaatattatccttggttttgataagtcaacgaccaatgagattttagacatcgatccgcgttttcgtccagaattattgattactgttggctatagtgacgagaaaccagaaccaagttatcgtttgcctgttgatgaagtcatcgaaagaaga

SEQ ID NO: 2584 - protein, 200 aa, Streptococcus pyogenes
MKFLELNKKRHAIKTFNDQPVDYEDLRTAIEIATLAPSANNIQPWKFVVVQEKKAELAKGLPLANKVQVEQAQYVVALFSDTDLALRSRKIARIGVKSLPDDLIGYYMETLPPRFAAFNEVQTGEYLAINAGIVAMNLVLSLTDQKIASNIILGFDKSTTNEILDIDPRFRPELLITVGYSDEKPEPSYRLPVDEVIERR

SEQ ID NO: 2585 - DNA, 1404 bp, Streptococcus agalactiae
atgacaattgattttagagcagaagtagacaaacgcaaagacgctttgatggacgatttaataaatcttcttcgcattaactcggagcgtgatgattcacaagctgatgcagagcatccatttggtcctggacctgtaaaagccttggaatttttccttgagatggctgagcgagatggctacgaaacaaaaaacgtagataattatgcgggacactttacatttggtcaaggcgaagaagaactaggtatttttgggcatttagatgttgttcctgcaggcagcggttgggatacagacccttatgaaccagttatcaaggataaccgtttatatgctcgaggctcatcagacgataagggaccaacaatggcatgttattatgctctaaaaattattaaagagcttgggctaccaacatctaagaaagttcgttttgttgtaggaactgatgaagaatctggatggggagatatggattactacttcgaacatgttggtcttccaaaacctgattttggtttctctccagatgcagaatttccaattataaatggtgaaaaaggtaatattactgaatatttacatttttcaggagaaaataagggagctgttagactgcatagcttttctggcggacttcgcgaaaacatggttccagaatcagccacagcacgtttcacaagtcatttagatcagacaacacttggggctagtctagctgattttgcaagtaaacataatttgaaagcagaattatctgtagaagatgagcaatatacagcaacagtttatggtaaatctgctcatggttcaacaccacaagaaggtgttaatggggcgacttatttagctctttatctaagtcaatttgattttgaaggtcctgctcgtgctttcttagatgttacagccaacattattcacgaagacttctcaggtgaaaaacttggagtagcttatgaagatgactgtatgggaccattgagcatgaatgcaggtgtcttccagtttgatgaaactaatgatgataatactatcgctcttaatttccgttacccacaagggacagatgctaaaactatccaaactaagcttgagaaacttaacggagttgaaaaagtgactctttctgaccatgaacacacaccacactatgtacctatggacgatgaattagtatcaaccttactagctgtctatgaaaagcaaactggtcttaaaggacatgaacaggttattggtggtgggacatttggtcgcttacttgaacggggtgttgcatacggtgccatgttcccaggagatgaaaacactatgcatcaagctaatgagtacatgcctttagaaaatattttccgttcggctgctatctacgcagaagctatctatgaattaatcaaa

SEQ ID NO: 2586 - protein, 468 aa, Streptococcus agalactiae
MTIDFRAEVDKRKDALMDDLINLLRINSERDDSQADAEHPFGPGPVKALEFFLEMAERDGYETKNVDNYAGHFTFGQGEEELGIFGHLDVVPAGSGWDTDPYEPVIKDNRLYARGSSDDKGPTMACYYALKIIKELGLPTSKKVRFVVGTDEESGWGDMDYYFEHVGLPKPDFGFSPDAEFPIINGEKGNITEYLHFSGENKGAVRLHSFSGGLRENMVPESATARFTSHLDQTTLGASLADFASKHNLKAELSVEDEQYTATVYGKSAHGSTPQEGVNGATYLALYLSQFDFEGPARAFLDVTANIIHEDFSGEKLGVAYEDDCMGPLSMNAGVFQFDETNDDNTIALNFRYPQGTDAKTIQTKLEKLNGVEKVTLSDHEHTPHYVPMDDELVSTLLAVYEKQTGLKGHEQVIGGGTFGRLLERGVAYGAMFPGDENTMHQANEYMPLENIFRSAAIYAEAIYELIK

SEQ ID NO: 2587 - DNA, 1458 bp, Streptococcus pyogenes
ttggcttattttaagttaaacattatccctaaaacgaataaggagagtataatgacaaccattgattttaaagcagaagttgacaaacgtaaaaaagctatgctagcagatttagttgacctattacgcattaattcagaacgcgatgaccaattagctgatgataaacacccatttggcccaggtccagttaaggccttggagcatttcctcgcaatggctgagcgtgatggctacaaaacgcgtaatattgataactatgcaggtgactttgaatttggtcaaggtgatgaagtactaggaatctttggtcaccttgatgttgtgccagctggtagcggttgggatacagacccttatgagccagtgattaaagacgatcgcatctatgcgcgtgggtcttcggatgataaaggaccaaccatggcgtgttactacgctctgaaaatcattaaagaactgggtcttcctgtgtctaaaaaagttcgtttcattgttggtaccgatgaagaatctggctggggggatatggattattactttgctcataatggcttgaaaaatccagattttggtttctcaccagatgctgaatttccaattatcaatggtgagaaaggaaatatcactgaatacctccatttcgctggtgacaacaagggcgcttttgtgcttcatcgcttccaaggtgggttgcgtgaaaacatggtaccagaatctgccacagctgtcattacggcaccgcatgaccttgatgtgctagaagcagctttggagcaatttttatcagaacatggtgttaaaggttctatgaaggctactgatggtaaaattgaagtaactattattggtaagtctgctcacgggtcgactccagaagcgggtgttaatggtgctaccttgttggctaaattcctgaatcaatttacctttgaaggggctgctaaggattatttacatgtggcaggtgaggtgcttcatgaagactttgcggcagaaaaactaggccttgcttatactgatgaccgtatgggagccctgagcatgaacgcaggtgtcttcacctttgatagtcaatcagctgacaataccatcgccttgaatttccgctatcccaaaggaactgatgcggcaaccttaaaagcaggattggaaaaattaccaggattaactaaggtaagcctttctgagcatgaacatacacctcattatgtgccaatggatgatgaattagtagctaccttacttgctgtttacgaaaaacaaacaggtcttaaaggctacgaacaagttatcggcggaggaacctttgggcgcttgctagaacgtggtgtggcctttggagcgatgttcccaggtgatgaaaacactatgcaccaagctaatgagtatatgcctttagaaaatatttatcgctcagcagctatttatgctgaagcaatctacgaattaattaaa

SEQ ID NO: 2588 - protein, 486 aa, Streptococcus pyogenes
LAYFKLNIIPKTNKESIMTTIDFKAEVDKRKKAMLADLVDLLRINSERDDQLADDKHPFGPGPVKALEHFLAMAERDGYKTRNIDNYAGDFEFGQGDEVLGIFGHLDVVPAGSGWDTDPYEPVIKDDRIYARGSSDDKGPTMACYYALKIIKELGLPVSKKVRFIVGTDEESGWGDMDYYFAHNGLKNPDFGFSPDAEFPIINGEKGNITEYLHFAGDNKGAFVLHRFQGGLRENMVPESATAVITAPHDLDVLEAALEQFLSEHGVKGSMKATDGKIEVTIIGKSAHGSTPEAGVNGATLLAKFLNQFTFEGAAKDYLHVAGEVLHEDFAAEKLGLAYTDDRMGALSMNAGVFTFDSQSADNTIALNFRYPKGTDAATLKAGLEKLPGLTKVSLSEHEHTPHYVPMDDELVATLLAVYEKQTGLKGYEQVIGGGTFGRLLERGVAFGAMFPGDENTMHQANEYMPLENIYRSAAIYAEAIYELIK

SEQ ID NO: 2589 - DNA, 582 bp, Streptococcus agalactiae
atgactgacttggaaaaaattattaaagcaataaaaagtgattcacagaatcaaaattatacagaaaatggtattgatcctttgtttgctgctcctaaaacagctaggatcaatattgttggccaagcacctggtttaaaaactcaagaagcaagactctattggaaagataaatctggagatcgtctacgccagtggcttggagttgatgaagagacattttaccattctggaaaatttgctgttttacctttagatttttattacccaggcaaaggaaaatcaggagatttatcccctagaaaaggttttgcggagaaatggcaccctcttattttaaaagaaatgcctaatgttcaattgaccttgctagttggtcagtatactcagaaatattatcttggaagctccgcacataaaaatctaacagaaacagttaaagcttacaaagactatctacccgattatttacccctggttcacccatcaccgcgaaatcaaatttggctaaagaagaatccatggtttgaaaaagatctaatcgttgatttacaaaagatagtagcagatattttaaaagat

SEQ ID NO: 2590 - protein, 194 aa, Streptococcus agalactiae
MTDLEKIIKAIKSDSQNQNYTENGIDPLFAAPKTARINIVGQAPGLKTQEARLYWKDKSGDRLRQWLGVDEETFYHSGKFAVLPLDFYYPGKGKSGDLSPRKGFAEKWHPLILKEMPNVQLTLLVGQYTQKYYLGSSAHKNLTETVKAYKDYLPDYLPLVHPSPRNQIWLKKNPWFEKDLIVDLQKIVADILKD

SEQ ID NO: 2591 - DNA, 573 bp, Streptococcus pyogenes
atggatgatttaaccaaagctattatggcagatgaggctaatctctcctataccgaaagaggtatttttcctttatatgatgctcctcaaacagctaggattattattgttggccaagctcctggaatagtagctcaaggaaccaaactttactggaatgatcgtagtggcatccgcttacgagactggctaggtgtggacaatgacaccttttaccactcaggattgtttggcattatccctatggatttctattatcctggtaagggaaaatccggtgacttaccacctagagaaggttttgcggctaagtggcacccgccattaagagcattgatgccagaagttgaattgacgattttggttggtcgctatgctcaggacttttaccttggtaacaaggcttacaaaaccttaactgaaacagtccgtcactttgaggattacttgccagactattttccacttgttcatccttctccaagaaaccaattgtggttagctaagaacccctggtttgagcaggatttattacctatcttgcaaaaacgtgtggaggcaattctaaccaaa

SEQ ID NO: 2592 - protein, 191 aa, Streptococcus pyogenes
MDDLTKAIMADEANLSYTERGIFPLYDAPQTARIIIVGQAPGIVAQGTKLYWNDRSGIRLRDWLGVDNDTFYHSGLFGIIPMDFYYPGKGKSGDLPPREGFAAKWHPPLRALMPEVELTILVGRYAQDFYLGNKAYKTLTETVRHFEDYLPDYFPLVHPSPRNQLWLAKNPWFEQDLLPILQKRVEAILTK

SEQ ID NO: 2593 - DNA, 252 bp, Streptococcus agalactiae
atgagagataatcatctacacacgtatttttcctatgattgtcaaacggcatttgaggactatattaatggttttacaggtgaatttatcacaacagaacattttgatttatcaaatccttacaccggtcaagacgatgttcctgattatagtgcttattgtcaaaaaatagattatcttaatcagaaatatggaaatcgatttaaaaaggaattgaaatcggttattttaaagatagggaatcagatattt

SEQ ID NO: 2594 - protein, 84 aa, Streptococcus agalactiae
MRDNHLHTYFSYDCQTAFEDYINGFTGEFITTEHFDLSNPYTGQDDVPDYSAYCQKIDYLNQKYGNRFKKELKSVILKIGNQIF

SEQ ID NO: 2595 - DNA, 441 bp, Streptococcus agalactiae
ttgtcaatccatcataatggtaggtatgattatctgcaagaagaagctctgaaagtaccaacaaaggagcttttagcagattactttaatcgtatggaatttgccataggccgtgtggaagcgcacgttttagctcactttgattatggttttcgtaagttaaacttagatgtagaagatttaaaaccgtttgaaacgcaattgaagcgcattttcataaagatgttatctaaggggttagcttttgaactaaataccaaatccctttatctatatgggaatgaaaaactttatcgctatgctttagagatactcaaacagcttggttgtaaacaatactctataggctctgacggtcatattcctgaacatttttgttatgaatttgatagacttcaaggtctgctaaaggactatcaaattgatgaaaatcatttgata

SEQ ID NO: 2596 - protein, 147 aa, Streptococcus agalactiae
MSIHHNGRYDYLQEEALKVPTKELLADYFNRMEFAIGRVEAHVLAHFDYGFRKLNLDVEDLKPFETQLKRIFIKMLSKGLAFELNTKSLYLYGNEKLYRYALEILKQLGCKQYSIGSDGHIPEHFCYEFDRLQGLLKDYQIDENHLI

SEQ ID NO: 2597 - DNA, 3756 bp, Streptococcus agalactiae
atgaaaagaaaagacttatttggtgataaacaaactcaatacacgattagaaagttaagtgttggagtagcttcagttgcaacaggggtatgtatttttcttcatagtccacaggtatttgctgaagaagtaagtgcttctcctgcaaatacagcgattgcagagtcgaatattaatcaggttgacaaccaacaatctactaatttaaaagatgacataaactcaaactctgagacggttgtgacaccctcagatatgccggataccaagcaattagtatcagatgaaactgacactcaaaagggagtgacagagccggataaggcgacaagcctgcttgaagaaaataaaggtcctgtttcagataaaaataccttagatttaaaagtagcaccatctacattgcaaaatactcccgacaaaacttctcaagctataggtgctccaagccctaccttgaaagtagctaatcaagctccacggattgaaaatggttactttaggctacatcttaaagaattgcctcaaggtcatcctgtagaaagcactggactttggatatggggagatgttgatcaaccgtctagtaattggccaaatggtgctatccctatgactgatgctaagaaagatgattacggttattatgttgattttaaattatctgaaaaacaacgaaaacaaatatcttttttaattaataacaaagcagggacaaatttaagcggcgatcatcatattccattattacgacctgagatgaaccaagtttggattgatgaaaagtacggtacacatacttatcaacccctcaaagaagggtatgtccgtattaactatttgagttcctctagtaactatgaccacttatcagcatggctctttaaagatgttgcaaccccctcaacaacttggccagatggtagtaattttgtgaatcaaggactatatggaaggtatattgatgtatcactaaaaactaacgccaaagagattggttttctaatcttagatgaaagtaagacaggagatgcagtgaaagttcaacccaacgactatgtttttagagatttagctaaccataaccaaatttttgtaaaagataaggatccaaaggtttataataatccttattacattgatcaagtgcagctaaaggatgcccaacaaattgatttaacaagtattcaagcaagttttacaactctagatggggtagataaaactgaaattttaaaagaattgaaagtgactgataaaaatcaaaatgctatacaaatttctgatatcactctcgatactagtaaatctcttttaataatcaaaggcgactttaatcctaaacaaggtcatttcaacatatcttataatggtaacaatgtcatgacaaggcaatcttgggaatttaaagaccaactttatgcttatagtggaaatttaggtgcagttctcaatcaagatggttcaaaagttgaagccagcctctggtcaccgagtgctgatagtgtcactatgattatttatgacaaagataaccaaaacagggttgtagcgactaccccccttatgaaaaataataaaggtgtttggcagacgatacttgatactaaattaggtattaaaaactatactggttactattatctttacgaaataaaaagaggtaaggataaggttaagattttagatccttatgcaaagtcattagcagagtgggatagtaatactgttaatgatgatattaaaacggctaaagcagcttttgtaaatccaagtcaacttggacctcaaaatttaagttttgctaaaattgctaattttaaaggaagacaagatgctgttatatacgaagcacatgtaagagacttcacttctgatcgatctttggatggaaaattaaaaaatcaatttggtacctttgcagccttttcagagaaactagattatttacagaaattaggagttacacacattcagcttttaccggtattgagttatttttatgttaatgaaatggataagtcacgctcaacagcttacacttcctcagacaataattacaattggggctatgacccacagagctattttgctctttctgggatgtattcagagaaaccaaaagatccatcagcacgtatcgccgaattaaaacaattaatacatgatattcataaacgtggcatgggggttatacttgatgtcgtctataatcacactgcaaaaacttatctctttgaggatatagaacctaattattatcactttatgaatgaagatggttcaccaagagaaagttttggagggggacgtttaggaaccactcatgcaatgagtcgtcgtgttttggttgattccattaaatatcttacaagtgaatttaaagttgatggtttccgttttgatatgatgggagatcatgatgcggctgcgattgaattagcttataaagaagctaaagctattaatcctaatatgattatgattggtgagggctggagaacattccaaggcgatcaaggtcagccggttaaaccagctgaccaagattggatgaagtcaaccgatacagttggcgtcttttcagatgatattcgtaatagcttgaaatctggttttccaaatgaaggtactccagctttcatcacaggtggcccacaatctttacaaggtatttttaaaaatatcaaagcacaacctgggaattttgaagcagattcgccaggagatgtggtgcagtatattgctgcacatgataaccttaccttgcatgatgtgattgcaaaatcaattaataaagaccctaaggtagctgaagaagagattcatagacgtctgcgtttaggaaatgtaatgattttaacatctcaagggacagcattcattcattctggtcaagagtatggtcgtacgaagcgtttacttaaccctgattacatgacaaaagtttcagatgacaaattgcctaataaagcaacacttattgaagctgttaaagaatacccatattttattcatgattcatatgattcttcagatgccattaatcattttgattgggcagcagccacagataataacaaacacccaatttcaacgaaaacacaggcctatacagcaggtttaatcacattaaggcgttcaacagatgctttccgaaaattgagcaaagcagaaattgatcgtgaggttagcttgattacagaggtaggtcaaggtgatattaaagaaaaagatttggttattgcttaccaaacaatagattctaaaggtgatatttacgcagtatttgttaatgctgatagtaaagctagaaacgttttactaggtgaaaaatataaacaccttttaaaagggcaagtaattgttgatgctgatcaagcggggattaaaccaatctcaactcctagaggtgttcattttgaaaaagatagtttgctgattgatccattaacagcaattgtgattaaagttggcaaagttgctcctagccctaaggaggaattgcaagcagattatcccaaaacacaatctttcaaggaatctaaaacggtagaaaaagtaaatagaatagctaataagacctcaataactcctgtagtttctaagaaggccgattcatatctgacaaatgaagctaatttgccaaaaactggagataagtcatcaaaaatactaagtgtagtaggaataagcattctagcaagtctacttgctctagtaggtctctctttaaagaggaatcgtcacttaaaa

SEQ ID NO: 2598 - protein, 1252 aa, Streptococcus agalactiae
MKRKDLFGDKQTQYTIRKLSVGVASVATGVCIFLHSPQVFAEEVSASPANTAIAESNINQVDNQQSTNLKDDINSNSETVVTPSDMPDTKQLVSDETDTQKGVTEPDKATSLLEENKGPVSDKNTLDLKVAPSTLQNTPDKTSQAIGAPSPTLKVANQAPRIENGYFRLHLKELPQGHPVESTGLWIWGDVDQPSSNWPNGAIPMTDAKKDDYGYYVDFKLSEKQRKQISFLINNKAGTNLSGDHHIPLLRPEMNQVWIDEKYGTHTYQPLKEGYVRINYLSSSSNYDHLSAWLFKDVATPSTTWPDGSNFVNQGLYGRYIDVSLKTNAKEIGFLILDESKTGDAVKVQPNDYVFRDLANHNQIFVKDKDPKVYNNPYYIDQVQLKDAQQIDLTSIQASFTTLDGVDKTEILKELKVTDKNQNAIQISDITLDTSKSLLIIKGDFNPKQGHFNISYNGNNVMTRQSWEFKDQLYAYSGNLGAVLNQDGSKVEASLWSPSADSVTMIIYDKDNQNRVVATTPLMKNNKGVWQTILDTKLGIKNYTGYYYLYEIKRGKDKVKILDPYAKSLAEWDSNTVNDDIKTAKAAFVNPSQLGPQNLSFAKIANFKGRQDAVIYEAHVRDFTSDRSLDGKLKNQFGTFAAFSEKLDYLQKLGVTHIQLLPVLSYFYVNEMDKSRSTAYTSSDNNYNWGYDPQSYFALSGMYSEKPKDPSARIAELKQLIHDIHKRGMGVILDVVYNHTAKTYLFEDIEPNYYHFMNEDGSPRESFGGGRLGTTHAMSRRVLVDSIKYLTSEFKVDGFRFDMMGDHDAAAIELAYKEAKAINPNMIMIGEGWRTFQGDQGQPVKPADQDWMKSTDTVGVFSDDIRNSLKSGFPNEGTPAFITGGPQSLQGIFKNIKAQPGNFEADSPGDVVQYIAAHDNLTLHDVIAKSINKDPKVAEEEIHRRLRLGNVMILTSQGTAFIHSGQEYGRTKRLLNPDYMTKVSDDKLPNKATLIEAVKEYPYFIHDSYDSSDAINHFDWAAATDNNKHPISTKTQAYTAGLITLRRSTDAFRKLSKAEIDREVSLITEVGQGDIKEKDLVIAYQTIDSKGDIYAVFVNADSKARNVLLGEKYKHLLKGQVIVDADQAGIKPISTPRGVHFEKDSLLIDPLTAIVIKVGKVAPSPKEELQADYPKTQSFKESKTVEKVNRIANKTSITPVVSKKADSYLTNEANLPKTGDKSSKILSVVGISILASLLALVGLSLKRNRHLK

SEQ ID NO: 2599 - DNA, 3522 bp, Streptococcus pyogenes
ttgaatgttatactaaatggaggtcttatgaaaaagaaagtcaaccaaggatcaaagcgctatcaatatctgttaaaaaagtgggggataggttttgtaatcgctgcaactgggactgtcgtgttagggtgcacccctagtatcttaacacatcaagttgctgctaaaaccattgttggactagcccgcgatgaagctcaacaaggagatggcaatgctaaatctggtgatggtcttcaatcgtctagcaaggaggcaaaaccagttttagacagctcgtcagctaatcctgctagtattgctgagcatcatttgcgtatgcattttaaaacattgccagctggtgagtcgctaggaagcttgggactttgggtgtggggagatgtggatcaaccttcaaaggattggccaaatggtgctatcaccatgacaaaagcgaaaaaagatgactatggctattatctagatgtgccactagcagctaaacaccgccagcaagtgtcttatctcattaataataaagctggagagaatctttcaaaggaccagcacatctcgcttctcacgccaaaaatgaatgaagtttggatagacgagaattaccatgcgcacgcttatcgacctttgaaaaaaggttaccttcgaatcaactaccacaatcaatcgggacactacgataacttagctgtctggacctttaaagatgtcaaaaccccaacgaccgactggccaaatggacttgacttgtcacataaagggcattatggagcttatgttgatgtccccttaaaagaaggagctaacgaaatcggatttttaatccttgataaaagtaagacaggagatgctattaaagtgcaaccaaaagattatctatttaaagagttagacaatcatactcaggtttttgtcaaagacactgacccaaaagtttacaacaatccttattatattgatcaggttagtctcaaaggagctgaacaaaccacgccaaatgagattaaagccatttttacgaccttagatgggcttgatgaagatgcggtgaaacaaaacatcaagatcactgacaaagcagggaaaactgttgcaattgatgagttgacacttgacagggataagtctgtaatgacattaaagggtgattttaaggcgcaaggtgcagtctacacggttacatttggagaagttagccaagtcgctcgccaatcctggcaattaaaagataaactctatgcttacgatggtgaacttggagctaccctagctaaggatggttctgttgatttagcgctatggtctccaagtgctgatactgttaaggttgtcgtttatgataaacaagatcagacaagggtggttggtcaagctgatttgaccaagtcggacaagggtgtttggagagctcatctaacttctgacagtgtcaagggcattagtgattacacaggctactattacctttatgaaatcacgcgcggtcaggaaaaagtcatggttttggatccttacgccaaatctctcgctgcctggaatgatgcgactgctactgatgacatcaaaacagcaaaagctgcctttattgatccaagcaaactaggaccaacaggccttgattttgccaaaattaacaactttaaaaagcgtgaagacgctattatctatgaagcacatgtgcgagattttacgtcagataaggctctagaaggcaagttaacacacccttttgggactttttcagctttcgttgaacagctagactatctcaaagacttgggggttacccacgttcaattgctaccggttttgagttatttttatgccaatgagctggacaagagccgctcaacagcctacacgtcttcagacaataattacaactggggttatgacccacaacactactttgccctttctggcatgtattcggcaaatcctaatgaccctgctttacgtatcgcagagcttaaaaaccttgtcaatgagattcacaaacgtggtatgggtgttatttttgatgtggtttataaccacacggctagaacctatctctttgaagatttggaacccaactactatcattttatgaatgctgatggtacagctagagagagttttggcggaggtcgtctaggaacgacacatgccatgagtcgtcgtatcttggtggattcgattacttatctgactcgtgaattcaaggtagatggttttcgtttcgacatgatgggtgaccatgatgcggcagctattgagcaagcctttaaggcagccaaagccattaatccaaataccattatgattggcgaaggctggcgtacctaccaaggtgatgaggggaaaaaagaaattgcggcagatcaagattggatgaaagcaaccaatacggtcggtgttttctctgatgatatcagaaataccctcaagtcaggttttccaaatgaaggcacagcagcctttattactggtggcgcaaaaaatctagaaggtttattcaaaacgatcaaagcacagcctggtaactttgaagcagatgccccaggagatgtagtgcagtatattgcagcccatgacaacctgaccttacatgatgtcattgccaaatccatcaataaggatcctaaagtggctgaagaagagattcacaagcgtattcgtctaggaaataccatgattttaactgctcaagggactgcctttatccattctggtcaggaatatggacgaaccaagcagcttctaaatcccgactacaagacaaaggcgtctgatgacaaggtgccaaataaggcgactctgattgatgctgtagcgcaatacccttacttcatccacgattcttatgattcgtctgatgcggtcaatcattttgactgggcaaaggcaacagattccatagctcacccgattagcaaccaaacaaaagcctatacacagggactaattgcgttgcgtcgctcaacagatgcctttacaaaagcaaccaaagctgaggtagatcgggatgtgaccttgatcacccaagcaggacaagatggtattcaacaagaggacctcatcatgggttaccaaacagtggcatcaaatggagatcgctatgctgtctttgtcaatgcagacaacaagacccgcaaggtagttttacctcaagcctaccgctatttgctaggagcccaagtgcttgttgatgctgagcaagctggtgttactgccattgctaagcctaagggagtccagtttaccaaagaaggcttgactattgaaggcctaactgccctggtcctcaaagtatcctcaaaaacggctaatccctctcagcaaaagagtcagacagacaatcatcaaaccaaaacaccagatggctcaaaagacctagacaaatcattaatgactagaccaaaaagagctaaaacaaaccaaaagctcccaaaaacgggtgaagcctcctcaaaaggcttattagcagctggaatagctctgcttttattggctattagcctgttgatgaagcgccaaaaagat

SEQ ID NO: 2600 - protein, 1174 aa, Streptococcus pyogenes
LNVILNGGLMKKKVNQGSKRYQYLLKKWGIGFVIAATGTVVLGCTPSILTHQVAAKTIVGLARDEAQQGDGNAKSGDGLQSSSKEAKPVLDSSSANPASIAEHHLRMHFKTLPAGESLGSLGLWVWGDVDQPSKDWPNGAITMTKAKKDDYGYYLDVPLAAKHRQQVSYLINNKAGENLSKDQHISLLTPKMNEVWIDENYHAHAYRPLKKGYLRINYHNQSGHYDNLAVWTFKDVKTPTTDWPNGLDLSHKGHYGAYVDVPLKEGANEIGFLILDKSKTGDAIKVQPKDYLFKELDNHTQVFVKDTDPKVYNNPYYIDQVSLKGAEQTTPNEIKAIFTTLDGLDEDAVKQNIKITDKAGKTVAIDELTLDRDKSVMTLKGDFKAQGAVYTVTFGEVSQVARQSWQLKDKLYAYDGELGATLAKDGSVDLALWSPSADTVKVVVYDKQDQTRVVGQADLTKSDKGVWRAHLTSDSVKGISDYTGYYYLYEITRGQEKVMVLDPYAKSLAAWNDATATDDIKTAKAAFIDPSKLGPTGLDFAKINNFKKREDAIIYEAHVRDFTSDKALEGKLTHPFGTFSAFVEQLDYLKDLGVTHVQLLPVLSYFYANELDKSRSTAYTSSDNNYNWGYDPQHYFALSGMYSANPNDPALRIAELKNLVNEIHKRGMGVIFDVVYNHTARTYLFEDLEPNYYHFMNADGTARESFGGGRLGTTHAMSRRILVDSITYLTREFKVDGFRFDMMGDHDAAAIEQAFKAAKAINPNTIMIGEGWRTYQGDEGKKEIAADQDWMKATNTVGVFSDDIRNTLKSGFPNEGTAAFITGGAKNLEGLFKTIKAQPGNFEADAPGDVVQYIAAHDNLTLHDVIAKSINKDPKVAEEEIHKRIRLGNTMILTAQGTAFIHSGQEYGRTKQLLNPDYKTKASDDKVPNKATLIDAVAQYPYFIHDSYDSSDAVNHFDWAKATDSIAHPISNQTKAYTQGLIALRRSTDAFTKATKAEVDRDVTLITQAGQDGIQQEDLIMGYQTVASNGDRYAVFVNADNKTRKVVLPQAYRYLLGAQVLVDAEQAGVTAIAKPKGVQFTKEGLTIEGLTALVLKVSSKTANPSQQKSQTDNHQTKTPDGSKDLDKSLMTRPKRAKTNQKLPKTGEASSKGLLAAGIALLLLAISLLMKRQKD

SEQ ID NO: 2601 - DNA, 957 bp, Streptococcus agalactiae
ttgtgttataatagatgtaaacgtttttttatgaggtatatgatgaaaaattgggaaaaaccaccattagtgatggcgggattagtattagggctattagctttggggaaccttctagagggatatggcacctatgttcgctattgtttagggctagtagcacttgttttttggatttttttaatcaaaggaatattaaaaaataaaaaagaaagcaggaaggagttaagcaatcctttgattgcttctgtctttactactttttttatggcaggtatgattttatcaacctatatcttattatttagaagtttaggaatatgggtagcagttctgtcaaaaggtgtatggtggttgtcatttattgcgttaatcattcatatggctattttttcatggaaatatttgagacacttttcgatggctaatctttttccttcttggtctgtcctctatgttggtataggggtagctagcctgacagcaccaattagtggacaatttactattgggaaaatagtcttttggtatggttttattgcaactttagtattattaccatttctattcattaaagcatataaaatcgggctaccttcggcagttaagcctaatataactactatttgcgctccaatgtcgctaatcacagcgggatatgtcaatagttttgtgtcaccaaatagaggtttattactgctattaatcgtaatggcacaatttctttattttttcattctttttcaggtgcctaaattactgattggtgattttacaccaggtttctcagcctttactttcccccttgttatctcagctacctcacttaaattaagtattcagcatctatcattaccagttgatatacaggggctagtccactttgaaattgggacaacaactcttattgttatgatagtaatggtacgttatattttctttttaaggcgaacaatt

SEQ ID NO: 2602 - protein, 319 aa, Streptococcus agalactiae
MCYNRCKRFFMRYMMKNWEKPPLVMAGLVLGLLALGNLLEGYGTYVRYCLGLVALVFWIFLIKGILKNKKESRKELSNPLIASVFTTFFMAGMILSTYILLFRSLGIWVAVLSKGVWWLSFIALIIHMAIFSWKYLRHFSMANLFPSWSVLYVGIGVASLTAPISGQFTIGKIVFWYGFIATLVLLPFLFIKAYKIGLPSAVKPNITTICAPMSLITAGYVNSFVSPNRGLLLLLIVMAQFLYFFILFQVPKLLIGDFTPGFSAFTFPLVISATSLKLSIQHLSLPVDIQGLVHFEIGTTTLIVMIVMVRYIFFLRRTI

SEQ ID NO: 2603 - DNA, 948 bp, Streptococcus pyogenes
atgtcactaaaaatagctgttaataggcagaaaaggacacttatgaaacaccttaaaaccccaccattggtcatgtcaggattggcattaggaacgttgtcatttggcaatttgttggctacttatgtttcgatttttaattatttgggaattctggcagctctttttatctatggtatcttgcttgttggcatggttaggaaccttaacgataccaaaatgcagttacgacaacctctaattgcctctgtttttccaactttttttatgacagggatgttgttgtcttcactctttctcaaagtgacaggagggtgttggttaggctttctcacttggtggctattctttttgggaaatcttgtcctgattgcttattaccagtatcgttttgtcttttctttttcatgggataacgtttttccttcctggtccgtgctttttgttggaattgcaatggcggcattaacagcacctgctagtaggcagtttttattaggacaggtgattttttgggtttgtcttctcttaactgctgtgattttaccttttatggccaaaaagacttatgggattggtctaggtcaagcagtaatgcccaatatttcaacgttttgtgcccctctgtccttactttcagcgtcttatttagcaacctttcctagaccacaagtaggaatggttatctttcttctcgtcagctcacaactgttatatgcttttgtggttgtacagcttcctcgcttactcaatcgtccctttaacccaggtttttcagcttttacctttccgtttgtgattagtgccacttccttaaaaatgaccttatcttttttaggttggcaaggtttaggttggcaggttcttttgctaggagaggtattgttggcgacagctttagtcacttatgtttatggggcttacctgagatttctatttcaaaataag

SEQ ID NO: 2604 - protein, 316 aa, Streptococcus pyogenes
MSLKIAVNRQKRTLMKHLKTPPLVMSGLALGTLSFGNLLATYVSIFNYLGILAALFIYGILLVGMVRNLNDTKMQLRQPLIASVFPTFFMTGMLLSSLFLKVTGGCWLGFLTWWLFFLGNLVLIAYYQYRFVFSFSWDNVFPSWSVLFVGIAMAALTAPASRQFLLGQVIFWVCLLLTAVILPFMAKKTYGIGLGQAVMPNISTFCAPLSLLSASYLATFPRPQVGMVIFLLVSSQLLYAFVVVQLPRLLNRPFNPGFSAFTFPFVISATSLKMTLSFLGWQGLGWQVLLLGEVLLATALVTYVYGAYLRFLFQNK

SEQ ID NO: 2605 - DNA, 174 bp, Streptococcus agalactiae
atggttaaaaaattcgcatttgctaaaggaatagcaacaggagtcgttgcaacagctgctactcttgcaggtgctgcatttgctatcaaaaaaacaattattgaacctgaggaagaaaaaatagcttttatcgaagaaaatcgtaaaaaagctgcacgtaaacgtgtctctcat

SEQ ID NO: 2606 - protein, 58 aa, Streptococcus agalactiae
MVKKFAFAKGIATGVVATAATLAGAAFAIKKTIIEPEEEKIAFIEENRKKAARKRVSH

SEQ ID NO: 2607 - DNA, 174 bp, Streptococcus pyogenes
atggttaagaaatatcaatttgttaaaggtcttgctactggcgtcctagcaactgctgctactgttgctggtgctgtctttgctgtaaaaaaaacaatcattgaccctgaagaagaaaaagctgctttcattgaagaaaaccgcaaaaaagctgcgcgtcgtcgtgtagctcgc

SEQ ID NO: 2608 - protein, 58 aa, Streptococcus pyogenes
MVKKYQFVKGLATGVLATAATVAGAVFAVKKTIIDPEEEKAAFIEENRKKAARRRVAR

SEQ ID NO: 2609 - DNA, 900 bp, Streptococcus agalactiae
ttgagaagtatcatgagaaaaatcaaacttatagcagttgttggtccaactgcggttgggaagacagcattaggaattgaattagctaaaactttcaatggcgaaatcattagtggtgatagtcagcaagtttatcagaagttagatatcggaacggctaaagctagtaaagaagagcaagaacaagcttatcatcacttgattgatgttcgtgaagtaaatgagaactattcggtttatgatttcgtcaaagaggcaaaagtagctattgatacgattatttctaaggggaaaattcctattattgttggaggtactggcctatatttacagagtttgtttgagggctatcatttaggaggcgaagtcaatcaagaaactcttatggcctatcgtgaaaaattagagtctctaagtgatgaagatttatttgaaaagttgacagaacaatccattattataccacaagttaatcgtcgacgtgccattcgtgcattagaattggcgaagtttgggaatgatttgcaaaatagtgaaagtccgtatgatgttttattaattggattgaatgatgatcgtcaggtgctttatgatcgtatcaatagacgagttgatttgatgatggacaatggtctcttagatgaagctaaatggctatacgataactacccgagtgttcaagcaagtaaaggaattggctataaagaattatttccttacttttcaaagcaaataccattagaagaagctgttgataaactaaaacaaaataccagacgttttgcaaaacgccaattaacatggtttagaaaccgtatgaatgtcgaatttattatggttggtgaggaaaattatcaacaaaaaatcaagcgaaaagtcagtgattttttatcatcaaag

SEQ ID NO: 2610 - protein, 300 aa, Streptococcus agalactiae
MRSIMRKIKLIAVVGPTAVGKTALGIELAKTFNGEIISGDSQQVYQKLDIGTAKASKEEQEQAYHHLIDVREVNENYSVYDFVKEAKVAIDTIISKGKIPIIVGGTGLYLQSLFEGYHLGGEVNQETLMAYREKLESLSDEDLFEKLTEQSIIIPQVNRRRAIRALELAKFGNDLQNSESPYDVLLIGLNDDRQVLYDRINRRVDLMMDNGLLDEAKWLYDNYPSVQASKGIGYKELFPYFSKQIPLEEAVDKLKQNTRRFAKRQLTWFRNRMNVEFIMVGEENYQQKIKRKVSDFLSSK

SEQ ID NO: 2611 - DNA, 897 bp, Streptococcus pyogenes
atgacaaaaataaaaatagttgtgattgttggtccgacagcggttggaaaaacagcacttgggattagtttagccaaggcttttaatggagaaattatttcaggagatagccagcaagtttatcgacagttggatattggaacagccaaggccactcaagaagagcaagaagcagcggttcatcacttaattgatattcgtgaggtgacggagtcttattcggcctacgattttgttcaagatgctcaaaaatctatttcagatattgttagtcgtgggaaattaccaattattgtaggtggaactggtctttacttacaaagtttactcgaaggttatcatctaggaggtcaagttgatcaagaggcggtaaaagcctatcggaatgagttggagcaattggacgatcacgacttgtatgaacgcttgcaagtcaataacattaccattgagcaggtgaatcgcagacgggcgatccgagcccttgaattggctcagtttgctgatgaattagagaatgccgagacggcttatgagccgcttattatcggcttgaatgatgaccgccaagtcatctatgaccgtatcaatcagcgcgtgaatcgtatgattgaaaacggcttattggaagaagcaaaatggttatatgagcattacccgactgttcaggctagtcgtggcataggttataaggaattattcccctattttgtaggtgaaatgactttggcagaagctagtgatcaattaaaacaaaacacgagacgttttgccaagcgacagctaacttggttccgcaatcgaatggctgttagcttcactgccataacggctcctgattacccacaggtagtacatgatagggtcagggattttcttggtcagaaagagaagtca

SEQ ID NO: 2612 - protein, 299 aa, Streptococcus pyogenes
MTKIKIVVIVGPTAVGKTALGISLAKAFNGEIISGDSQQVYRQLDIGTAKATQEEQEAAVHHLIDIREVTESYSAYDFVQDAQKSISDIVSRGKLPIIVGGTGLYLQSLLEGYHLGGQVDQEAVKAYRNELEQLDDHDLYERLQVNNITIEQVNRRRAIRALELAQFADELENAETAYEPLIIGLNDDRQVIYDRINQRVNRMIENGLLEEAKWLYEHYPTVQASRGIGYKELFPYFVGEMTLAEASDQLKQNTRRFAKRQLTWFRNRMAVSFTAITAPDYPQVVHDRVRDFLGQKEKS

SEQ ID NO: 2613 - DNA, 1236 bp, Streptococcus agalactiae
gtgatagaaactaaagaagagcaagaacgtgttattttagttggggtagaacttcaagatactgagaattttgaaatgtccatggaagaacttgctagcttagctaagacagcaggagcaaatgttgttaatcattattatcaaaaaagagataaatatgatagtaaatcatttatcggatctggtaaattagaggagataaaagctattgtagaagcagatgagattgataccgttgtggttaataatcgtttgactccgcgacaaaactctaatttggaagctgaacttggtgttaaagttattgaccgtatgcaacttattttagatatctttgctatgcgtgctagaagtcatgaaggaaaattacaggttcatctagcgcaattgaaatatatgttaccacgcttagttggacaaggtattatgcttagtcgtcaagcaggaggaatcggaagccgaggtccaggagaatctcagttagagttgaatcgtcgttccattcgtcatcaaatttctgatatcgaaagacaattgaagattgtagaaaaaaatcgcgagacagttcgagaaagacgtgttgattcgacaacctttaaaattggattaattggatatacaaatgctggcaagtcaactattatgaatgttttaaccgatgataagcaatatgaagccaatgaattatttgcaacgttagacgctacaaccaagcagatctatttacaaaatcaatttcaagtcactttaacagatactgttggttttattcaagatttacctacagagttagttgcggctttcaagtctaccttagaagaaagtcgacatgtcgatttattatttcatgttattgatgctagtgaccctaatcatgaagaacacgaaaaagttgttatggagattcttaaagacttagatatgatagatattcctcgtttagcgatatacaacaagatggatgtcactgagcagctgaatgcaacaacttttccaaatgtgagaattgcagccaaaaaacaagggagtaaggatttattacgccgtcttattgtggatgaaatacgacatatctttgacgaattttcgattagagtgcatcaaaatcaagcatataagctctatgatctcaataaaatagcattgcttgatacctacacctttgaagaagaatacgagaatattacaggctatatttctcctaaacaaaaatggaagctggaagaattttatgat

SEQ ID NO: 2614 - protein, 412 aa, Streptococcus agalactiae
MIETKEEQERVILVGVELQDTENFEMSMEELASLAKTAGANVVNHYYQKRDKYDSKSFIGSGKLEEIKAIVEADEIDTVVVNNRLTPRQNSNLEAELGVKVIDRMQLILDIFAMRARSHEGKLQVHLAQLKYMLPRLVGQGIMLSRQAGGIGSRGPGESQLELNRRSIRHQISDIERQLKIVEKNRETVRERRVDSTTFKIGLIGYTNAGKSTIMNVLTDDKQYEANELFATLDATTKQIYLQNQFQVTLTDTVGFIQDLPTELVAAFKSTLEESRHVDLLFHVIDASDPNHEEHEKVVMEILKDLDMIDIPRLAIYNKMDVTEQLNATTFPNVRIAAKKQGSKDLLRRLIVDEIRHIFDEFSIRVHQNQAYKLYDLNKIALLDTYTFEEEYENITGYISPKQKWKLEEFYD

SEQ ID NO: 2615 - DNA, 1248 bp, Streptococcus pyogenes
ttggtaaaggtgatgattgagacaaagcgtcagcaagaaagagtgattcttttaggagttgagcttcagacaacagaacattttgacatgtccatgacagaattagctaatcttgccaaaacagctggtgtcaaagttatggcaagtttcagccaaaaacgagaacgttacgacagcaaaacctttatcggctcagggaaactggatgagattaaggcgattgtggaagctgatgagattgatgcagttattgtgaacaatcggttgactgctaggcaaaatgctaatctagaagctgttttagaggtaaaagtcattgaccgtatgcagttaatcttagatatttttgccatgcgtgccagaagccatgagggcaaattacaagtacaccttgcccaattgaaatatatgttacctcgtttggttggacagggcatcatgttaagtcgtcaagcaggtggtattgggagccgtggaccaggtgaaagccaactagagttaaatcgccgttcgattcgtcatcagattgctgatattgaacgccaattaactcaggtagagaaaaatcgtcaaacaattagagatcgtcgtgtgggttcagatacctttaaaattggcttgattggctacaccaatgctggcaagtcaaccattatgaacttgttgacagatgacagccactatgaagccaatgaattatttgctaccttagatgcaactacaaagcaactctatttagaaaatcaatttcaagcaaccttaacagacaccgtaggctttattcaagacttgccaacggaattagtggctgcttttaaatcaaccctagaagaaagcaaatatgtggatttgctgttacatgtgattgatgcgagtgatcccaatcatagtgagcaagaaaaagtggttttaaaccttctaaaagagctagacatgcttaatattccgcgtttagctatttataacaaggtggatatagcagaacaattcacagctactgcttttccaaatatcaggatttcagcccgttcaaaggatagcaaaattctcttgagacgtttaatcattgaccaaattcgagaccagtttgttccttttagaatcaaagtgcatcaagacaaggcgtacaagctatatgatttgaatcgagttgctcttttagaccactacacgtttgaccaagaaatagaggatatttcgggctacatttccccaaaacagcaatggagacttgacgatttttatgaa

SEQ ID NO: 2616 - protein, 416 aa, Streptococcus pyogenes
LVKVMIETKRQQERVILLGVELQTTEHFDMSMTELANLAKTAGVKVMASFSQKRERYDSKTFIGSGKLDEIKAIVEADEIDAVIVNNRLTARQNANLEAVLEVKVIDRMQLILDIFAMRARSHEGKLQVHLAQLKYMLPRLVGQGIMLSRQAGGIGSRGPGESQLELNRRSIRHQIADIERQLTQVEKNRQTIRDRRVGSDTFKIGLIGYTNAGKSTIMNLLTDDSHYEANELFATLDATTKQLYLENQFQATLTDTVGFIQDLPTELVAAFKSTLEESKYVDLLLHVIDASDPNHSEQEKVVLNLLKELDMLNIPRLAIYNKVDIAEQFTATAFPNIRISARSKDSKILLRRLIIDQIRDQFVPFRIKVHQDKAYKLYDLNRVALLDHYTFDQEIEDISGYISPKQQWRLDDFYE

SEQ ID NO: 2617 - DNA, 645 bp, Streptococcus agalactiae
atgattgattatattgatttagctttgacttatggtggttttacgagcttagataaagtttatctagagaaaaaactagatggcctctctaagcagcaacgacttgattttatcaccccacctcctagtgtgattaatgcttattttgctgaaatatatcaaaagcaagggccagaagctgcaactgattactattttgatctttccaaagccttgggcttgtttccaaaacatttatcgtttgatgaagaaaaaccttttattcgtttgaatttatcaggaaaatcatttggttttgcttacctaaatgatcaagaagaagcgagtgttttttctgaagttaaagaagtcattacaccgcagttactcttagaaattgcacagatttttcctcaatataaagtctatcgagatcggtctggtatcagaatggcaaaaatagattttgacgaaacagaatctcaaaatattacaccagaaacaagtttactagggaatgtcttacaacttaaaaaagatattattaaaataactagtttcaatcaagaagagctattagagttggttaaaacaaagtcaggtaaatactattattctagtcaaggacgtgagtcagttatttatattgatactaaatctactaat

SEQ ID NO: 2618 - protein, 215 aa, Streptococcus agalactiae
MIDYIDLALTYGGFTSLDKVYLEKKLDGLSKQQRLDFITPPPSVINAYFAEIYQKQGPEAATDYYFDLSKALGLFPKHLSFDEEKPFIRLNLSGKSFGFAYLNDQEEASVFSEVKEVITPQLLLEIAQIFPQYKVYRDRSGIRMAKIDFDETESQNITPETSLLGNVLQLKKDIIKITSFNQEELLELVKTKSGKYYYSSQGRESVIYIDTKSTN

SEQ ID NO: 2619 - DNA, 645 bp, Streptococcus pyogenes
ttgacgatttttatgaataattatattgatttagcaaaaacctatggtggatttactagtctggataccaactacctaaaccatctgttagccagtttgacagaccagcaaaaactagcttttatcacaccaccaccaagtgttattaatgcctactttgctgaaatctaccagaaacagtcaccgcaagctgcaactgattattattttaatctttctaaggctttggggctttttactgaccaaccatcttttgaggaagaaaagccctttgtacgcctcaatttgtctggaaaagcttatggttttgcttaccaaaatgaccaagaagttgcattggtattttctgaaaaagcagagcctaagaaacccgaactcttctttgaattaacacaaattttcccacaatatatggtttatgaggacaaaggccagcttaaaatgcaggctaagcagtttgagcaaggagaatgtgaagacattacacctgatgacacactcttgtcgaagatttaccgtctggcaaacggtatcaccatgcttaaggggtttaatgtagaggagttatgggctcttagccaaacattttctggtcaaaagtattatgattttgcccaacgagaatttatgatttacatcacccaa

SEQ ID NO: 2620 - protein, 215 aa, Streptococcus pyogenes
LTIFMNNYIDLAKTYGGFTSLDTNYLNHLLASLTDQQKLAFITPPPSVINAYFAEIYQKQSPQAATDYYFNLSKALGLFTDQPSFEEEKPFVRLNLSGKAYGFAYQNDQEVALVFSEKAEPKKPELFFELTQIFPQYMVYEDKGQLKMQAKQFEQGECEDITPDDTLLSKIYRLANGITMLKGFNVEELWALSQTFSGQKYYDFAQREFMIYITQ

SEQ ID NO: 2621 - DNA, 927 bp, Streptococcus agalactiae
atggaaattcaatttttaggaactggagctggtcaaccagcgaaagctcgtaatgtttcaagtttagtcttgaaattattagatgaaattaacgaggtttggatgtttgattgtggagagggtacacagcgtcaaattttagaaactacgattaaacctcgtaaagttaaaaaaatttttatcacgcacatgcacggagaccatgtttttggtcttccaggttttttatccagtcgggcttttcaagccaatgaagagcagacagatttagatatttatggaccggttggtataaaaagttttgttatgactgccttaaggacatcaggttcacgtttaccttatcgaatccattttcacgagtttgatgaatcatcactcggaaaaattatggaaacagataaatttaccgtttatgcagaaaagctagatcatactatcttttgtatgggatatcgtgttgtgcaaaaagatcttgagggcactttagatgctgaagcattgaaactagcaggtgttccatttggtcctctttttgggaaagtcaaaaatggtgagaatgttaccttagaagatggtagagaaattattgctaaagattatatttctgaaccgaaaaagggtaaagtaatcactattttgggagatactagaaaaacagatgcaagtattaggttagctttgggcgctgatgttttagttcacgaatctacttatggtaagggtgatgagcgaattgctaaatcgcatgggcattcaaccaatatgcaagcagctgatatcgctaaacaagcaaatgctaaacgactattattaaatcatgttagtgctcgttttatggggcgagattgttggcaaatggaagaagatgcaaagacgattttttcaaatacccatcttgttagagatttggaagaagtaggtata

SEQ ID NO: 2622 - protein, 309 aa, Streptococcus agalactiae
MEIQFLGTGAGQPAKARNVSSLVLKLLDEINEVWMFDCGEGTQRQILETTIKPRKVKKIFITHMHGDHVFGLPGFLSSRAFQANEEQTDLDIYGPVGIKSFVMTALRTSGSRLPYRIHFHEFDESSLGKIMETDKFTVYAEKLDHTIFCMGYRVVQKDLEGTLDAEALKLAGVPFGPLFGKVKNGENVTLEDGREIIAKDYISEPKKGKVITILGDTRKTDASIRLALGADVLVHESTYGKGDERIAKSHGHSTNMQAADIAKQANAKRLLLNHVSARFMGRDCWQMEEDAKTIFSNTHLVRDLEEVGI

SEQ ID NO: 2623 - DNA, 927 bp, Streptococcus pyogenes
atggaattacaatttttaggaactggagctggtcaaccagccaagcagcgcaatgtgtcaagtcttgccttgaaattactagacgaaatcaatgaagtctggatgtttgattgcggtgaaggaacgcaaagacaaattttagaaacgacgattaagccacgaaaaataagaaagattttcattactcatttgcatggagaccacatttttggattaccaggatttttatcaagtcggtcttttcaagctagtgaagaacagacagatcttgatatttatggaccaattggcattaaaacttacgtgttaactagtctaaaagtttctggagcgcgtgtaccttatcagattcattttcatgaatttgatgacaaatcattaggtaaaataatggaaacagataagtttgaggtctatgcagagcgtctggcgcataccattttttgcatgggttatcgagtagttcaaaaagacttagaaggaaccctagacgcagaagccttaaaagcagcgggtgttccttttggaccactctttggcaaaattaaaaatggtcaagacgttgagttggaagacggccgcctgatttgtgccaaagattatatttctgcccctaaaaaaggcaaaatcatcaccattatcggcgatacgcgcaaaacgtctgccagtgttaaactcgctaaagatgcagatgttttggttcatgaatccacctatggtaagggtgacgagcggattgcgagaaatcacgggcattctaccaacatgcaggcagcacaaatcgctcatgaagcaggcgcaaaacgcctcttgctcaatcatgtatcagctcgctttttagggcgtgattgtcgccagatggaaaaagatgccgccactatatttgaaaatgttaaaatggtacaagatttagaggaagtgattatt

SEQ ID NO: 2624 - protein, 309 aa, Streptococcus pyogenes
MELQFLGTGAGQPAKQRNVSSLALKLLDEINEVWMFDCGEGTQRQILETTIKPRKIRKIFITHLHGDHIFGLPGFLSSRSFQASEEQTDLDIYGPIGIKTYVLTSLKVSGARVPYQIHFHEFDDKSLGKIMETDKFEVYAERLAHTIFCMGYRVVQKDLEGTLDAEALKAAGVPFGPLFGKIKNGQDVELEDGRLICAKDYISAPKKGKIITIIGDTRKTSASVKLAKDADVLVHESTYGKGDERIARNHGHSTNMQAAQIAHEAGAKRLLLNHVSARFLGRDCRQMEKDAATIFENVKMVQDLEEVII

SEQ ID NO: 2625 - DNA, 759 bp, Streptococcus agalactiae
atggcaagaacgatactgattacaggagcttctggtggtttagcacaggcaattattaaccaattaccccaagacgaccatttaattgtcacagggagatcaagagaaaaacttgaaaagctttatggaaagagaccaaacaccttatgtttatcactagatataactaatgacaatgctgtaacgaatatgattgaaaaaatttatggtgaatttggtcaaattgatattttaattaataatgctggatttggttcttttaaagaattttgggattatagtgatgaagaagtcaaagacatgtttgctgtgaatacatttgcaacgatgtctatagctcgtcagataggacataagatgtctcttgtaaaatctggtcatatcgttaatattgcaagcatggctggcctcatagcaacaagtaaagctagcgtttatggggctagtaagtttgctgtcgttggattttcgaatgctcttcgtttagaattagcagaaaaaaatgtttatgtgacaagtgtaaaccctggaccaatcaaaacaggattttttgctcaggctgatccaagtggtgattatttagcaagtataggtcgttttgctctaacaccagaaaaagtatctaaaaaagtagtttctattcttggaaaaaataagagagaattaaatcttccttttatattagcttttgcgcataaatattatagtttatttccaaaaacagctgattattttgccagaaaggtattcaattataaa

SEQ ID NO: 2626 - protein, 253 aa, Streptococcus agalactiae
MARTILITGASGGLAQAIINQLPQDDHLIVTGRSREKLEKLYGKRPNTLCLSLDITNDNAVTNMIEKIYGEFGQIDILINNAGFGSFKEFWDYSDEEVKDMFAVNTFATMSIARQIGHKMSLVKSGHIVNIASMAGLIATSKASVYGASKFAVVGFSNALRLELAEKNVYVTSVNPGPIKTGFFAQADPSGDYLASIGRFALTPEKVSKKVVSILGKNKRELNLPFILAFAHKYYSLFPKTADYFARKVFNYK

SEQ ID NO: 2627 - DNA, 762 bp, Streptococcus pyogenes
atggcacaaagaatcattgttatcacgggagcttctggaggactggctcaggcaattgttaagcagttacccaaggaagacagcttgattttattaggacgtaacaaagaacgcctagaacactgttatcagcatattgacaacaaagaatgcctcgagttggatattaccaatccagtagccattgagaaaatggtcgcccagatttaccagcgctatggccgtattgatgtcttgattaataatgctggctacggagctttcaaaggctttgaagagttttctgcccaagaaatagctgatatgtttcaggttaacaccctagcgagcattcactttgcttgcttgattggtcagaaaatggcagagcaggggcaaggtcaccttattaatattgtgtccatggcaggcttgattgcgtcagccaaatcgagcatttattcagccaccaagtttgcccttatcggattttccaatgcccttcgcttagaattagcggataaaggggtttacgtgaccaccgtgaatccaggtcccattgccaccaagttttttgaccaagctgacccgtctggacattatttggaaagcgttggtaaatttactctccaaccaaatcaagtggctaagcgtttggtttctattatcgggaaaaataaacgagaattgaatttgccctttagtttagcggtgacccatcaattttacacccttttccctaaattatctgattatcttgcaagaaaggtatttaattataaa

SEQ ID NO: 2628 - protein, 254 aa, Streptococcus pyogenes
MAQRIIVITGASGGLAQAIVKQLPKEDSLILLGRNKERLEHCYQHIDNKECLELDITNPVAIEKMVAQIYQRYGRIDVLINNAGYGAFKGFEEFSAQEIADMFQVNTLASIHFACLIGQKMAEQGQGHLINIVSMAGLIASAKSSIYSATKFALIGFSNALRLELADKGVYVTTVNPGPIATKFFDQADPSGHYLESVGKFTLQPNQVAKRLVSIIGKNKRELNLPFSLAVTHQFYTLFPKLSDYLARKVFNYK

SEQ ID NO: 2629 - DNA, 2196 bp, Streptococcus agalactiae
atgatatctgctaagtatagttgggtcctcaataaccaaaagccagacgctggcttttttgaggcttcaaaaaaagaaaagataagtgaagcggtggcttccttaatttattcgcgaggtattaagacatcagcggaattacatcattttttacaaactaatttggaaaatctccatgatccttatttgttaaatgatatggataaagctgttaatcgtattagacgagctattgaaaataatgaaactattttagtttatggagactatgatgctgatggaatgacatcagcatcaatcatgaaagaagcattagatatgatgggagctgaagtccaggtttatctcccaaatcgctttacagatggttacggtcccaatcaaagtgtttataaatattttattgaacaacaagatgtttcattaatcattacggttgataatggtgtggcagggcatgaagcaattacatatgctcaaaatcaaggtgtggacgtggtagttactgatcatcacagtatgccagcagatttaccttgtgcttatgctattattcacccagaacatcctgatgctaattatccatttccttatttagcagggtgtggtgttgctttcaaagtagcttgtgctctcttagaaacaatcccgacagaaatgttggatttggttgctattgggacgattgcagatatggttagcctaactgatgaaaatcgtatcatggtaaaagctggacttgaagttatgaaagatagtgaaagaataggcttacaggagctaatatctttatcaaatattgatttaaaaacactaaatgaagaaactattggatttaaaattgctccacaattaaacgctttaggaagacttgatgaccctaatccagctattgaattactaacagggtttgatgatgaagaatctcaagcaatagcccaaatgattgatcaaaaaaatgaagagcgcaaagaaatcgttcaaactatctttgaccaagctatgcaaatgcttgatcaaacaaagcctgtacaagttttagcaaaagaaaattggcatccaggggttttaggtattgtggcgggtcgtattttagagagaactggacaacctgttattgttttgaatattgaagatggtattgctaaaggaagtgccagaagtgtagaagcacttgatatttttcaagcttttgaccagcatcgagaattattcattgcttttggaggtcacagcggagcagcaggcatgactttagaggaaagtaaagtaggtgatctttctcaagttttatgtgactatatctctaaaaaacaattggacatgagtcagaaaaaaactctgacaattgatagtgagctacgttttgacgaacttagtttagacactgttagagattttgaaaagttagcgccatttggaatggataataaaaaaccagtctttttgttaaaagattttaaagtgagtcaagccagagtcatggggcaaaacggtgctcatctgaaattaaaactagaacaagatggacaagcacttgatttggtagcatttaatatggggagtcaactacaagagttccaacaagcacaacatttggagttagctgtcactttatctgttaatcaatggaatggtgccacaaccctacaattaatgttggaggatgcgcgtgtagacggtattcaattatttgatattagaagcaaagcaagtagtttacctcatggagtgccaatcctgtctcaagaagagcagagcaaagaagttattcttttgactgttcccgatcatccacaagaattaaaacaaatgactcaaggtaaacagtttgatgccatctattttaaaaatgagataccaaaaaattattttatatctggttatggtacacgtgatcagtttgctagtttatataaaacaatatatcaattcccagaatttgacgttcgttataagttaaaagagctcagttcctaccttcatatccctgatattttattaattaaaatgattcaaatttttgaagaactacattttgttacgattacagaagggattatgacagtcaataaagaagcagaaaagcgagatatctctgagagtcaaatttatcaagaattaaaagagacagttaagtttcaagaattaatggctttagggacacctaaagaaatatatgattttatgatgagt

SEQ ID NO: 2630 - protein, 732 aa, Streptococcus agalactiae
MISAKYSWVLNNQKPDAGFFEASKKEKISEAVASLIYSRGIKTSAELHHFLQTNLENLHDPYLLNDMDKAVNRIRRAIENNETILVYGDYDADGMTSASIMKEALDMMGAEVQVYLPNRFTDGYGPNQSVYKYFIEQQDVSLIITVDNGVAGHEAITYAQNQGVDVVVTDHHSMPADLPCAYAIIHPEHPDANYPFPYLAGCGVAFKVACALLETIPTEMLDLVAIGTIADMVSLTDENRIMVKAGLEVMKDSERIGLQELISLSNIDLKTLNEETIGFKIAPQLNALGRLDDPNPAIELLTGFDDEESQAIAQMIDQKNEERKEIVQTIFDQAMQMLDQTKPVQVLAKENWHPGVLGIVAGRILERTGQPVIVLNIEDGIAKGSARSVEALDIFQAFDQHRELFIAFGGHSGAAGMTLEESKVGDLSQVLCDYISKKQLDMSQKKTLTIDSELRFDELSLDTVRDFEKLAPFGMDNKKPVFLLKDFKVSQARVMGQNGAHLKLKLEQDGQALDLVAFNMGSQLQEFQQAQHLELAVTLSVNQWNGATTLQLMLEDARVDGIQLFDIRSKASSLPHGVPILSQEEQSKEVILLTVPDHPQELKQMTQGKQFDAIYFKNEIPKNYFISGYGTRDQFASLYKTIYQFPEFDVRYKLKELSSYLHIPDILLIKMIQIFEELHFVTITEGIMTVNKEAEKRDISESQIYQELKETVKFQELMALGTPKEIYDFMMS

SEQ ID NO: 2631 - DNA, 2208 bp, Streptococcus pyogenes
atgattaaatccaaatatagctggaaaataaaagacaagaagccagatgatggcttctttaagctagcaaagacaaaaggtctaacccagaccgccgctcagttgatttatgatcgagggataaggactgaagaagccttagatgagtttttaacagcggacttgtctcaactgcatgatccttacttgctacatgacatggcaaaagctgtgccaagaattcgtcaagctattgaagagggcgaacgaattctcatttacggcgactatgatgctgatggcatgacgtcggcttctattgtcaaagaaaccctagacatgatgggagcagagcctttggtttatcttcccaaccgctttacagatggctatggccccaaccagagcgtctataaatattttattgagcaggaagctgtgtccctaattatcacggttgataatggcgtggccggacatgaagcgattagatatgctcaagaacaggaagttgatgttattgtaactgaccatcatagcctgcctgaagaattgccagaagcctttgccatcattcatcctgagcatcctgatgctgattatccctttaaacacttagctggctgtggcgttgcctttaaattggcaacagctttgctagaaagtttaccaacagactgtctagacttggtagctattggaaccattgccgatatggtaagcttgacaggtgaaaaccgtgttttagtcaaaaatggtctggccatgctcaaacacaccgaaagagtgggcttgcaggagttgatgtccttgtctcctattgatttggaacattttaatgaagacgccattggctttcagattgctccgcaattaaatgctttagggcgcttagatgaccctaatccagccattgagctactgacgggctttgatgaccaagaagctcaagcgattgccttgatgattaagaaaaaaaatgaagagcgtaaggccttagtccaagacatttttgatcaagcgatggctatggttgatcctcaaaaacctgttcaagtcttggcacaagctggctggcatcctggtgttcttgggattgtcgctggtcgtatcatggaaactattggacaaacggtcgtcgttttgaccattgataatggctttgcaaaaggctcggccagaagtttagaagctattaatatttttgaagccttaaatggcaagcgtgagttatttacagcctttgggggacatgctggtgcagcaggaatgaccctgcccgttgacaacttggaagctctttcagactttctttgtcagtttgtgatagaacgtggcttagatcagactgccaaaaatacgttaactattgatgaaagactgtctttggacgaccttagccttgatattttaaagagtttagataaattagccccttatgggatggatcatcaaaagccggtcttttatgtcaaggacataagggttagtcaagcgcgtaccatagggcaagaccagagccatcttaaatttaaagtcagtcagggcaaagcttcctttgacgtactggcttttggtcaaggaagtcaactgcaagagttccgacaagctactggtttagaattagcagttaccttatctgtcaaccattggaatgggaacacgagtctccaattcatgttagtagatgctcgtgttgacggagtgcaacttcttgacttaaggacaaaaacagccaaagttcctgaaggtattccgactattgaagaagacccaaatgccagagtcattctgattaatgacatccctgaagatttcaaaacctggcgcaaccagtttgttcacaaggattttgacgccatctattttaaaaatcagatgaaacatccttattatttaacaggatttggcagcagagagcagtttgccaagctctacaaaaccatctatcagtttcctgaatttgatttacgacataaattgacagagttgagtcactatttaaacatagaaaaacttttactgattaagttgattcaaatttttgaagagttgtcttttgtgacgattgacgatgggctgatgacggttaacccccaagcgcaaaaacgagagatttcagagagccacatttaccaagacttaaaagaattggtgaaatttcaagaaatcatggctttggctagcccgaaagagatgtatgattatttggtgaaatcaaacgatcaa

SEQ ID NO: 2632 - protein, 736 aa, Streptococcus pyogenes
MIKSKYSWKIKDKKPDDGFFKLAKTKGLTQTAAQLIYDRGIRTEEALDEFLTADLSQLHDPYLLHDMAKAVPRIRQAIEEGERILIYGDYDADGMTSASIVKETLDMMGAEPLVYLPNRFTDGYGPNQSVYKYFIEQEAVSLIITVDNGVAGHEAIRYAQEQEVDVIVTDHHSLPEELPEAFAIIHPEHPDADYPFKHLAGCGVAFKLATALLESLPTDCLDLVAIGTIADMVSLTGENRVLVKNGLAMLKHTERVGLQELMSLSPIDLEHFNEDAIGFQIAPQLNALGRLDDPNPAIELLTGFDDQEAQAIALMIKKKNEERKALVQDIFDQAMAMVDPQKPVQVLAQAGWHPGVLGIVAGRIMETIGQTVVVLTIDNGFAKGSARSLEAINIFEALNGKRELFTAFGGHAGAAGMTLPVDNLEALSDFLCQFVIERGLDQTAKNTLTIDERLSLDDLSLDILKSLDKLAPYGMDHQKPVFYVKDIRVSQARTIGQDQSHLKFKVSQGKASFDVLAFGQGSQLQEFRQATGLELAVTLSVNHWNGNTSLQFMLVDARVDGVQLLDLRTKTAKVPEGIPTIEEDPNARVILINDIPEDFKTWRNQFVHKDFDAIYFKNQMKHPYYLTGFGSREQFAKLYKTIYQFPEFDLRHKLTELSHYLNIEKLLLIKLIQIFEELSFVTIDDGLMTVNPQAQKREISESHIYQDLKELVKFQEIMALASPKEMYDYLVKSNDQ

SEQ ID NO: 2633 - DNA, 96 bp, Streptococcus agalactiae
ttgcaaatattattaaaatataataaaattaagaaaataatggaatttttgataaagaatattaaaggcgaggataaaatctatgagacctatcgt

SEQ ID NO: 2634 - protein, 32 aa, Streptococcus agalactiae
MQILLKYNKIKKIMEFLIKNIKGEDKIYETYR

SEQ ID NO: 2635 - DNA, 2562 bp, Streptococcus agalactiae
atgagacctatcgttagaaaaaagatgtacaaaaaaggcaaattttgggtcgttgcaggtatcgttaccattttaggtggtagtgcaattcttggtcaagatgtcaaggcagaacaggcagaagcagtaacttcaacgatctcagagaaaactgatagcagtcagactatttcggatacttccaagttaacgttacctgttaattcctcggaggctatgaaaaatagtgcagagcctttaataaaaacagcctttgctacatctgtttcatctaatcctagagagatagcagctaccccagtcaaaacctttgatgctagctcaaaagttgttgtaaaagctagtactgctgagcactcagcaaatcaaacaaattctaatgttaatcaagtagctaatgatagtgaagttattactcaacaaaattcaacaaagcaattaccaacagtgacttactctgctcatgttcaagatattggatggcaaaagtcggttgataatgcaacagtttcaggaacagtaggacaagaaaagcaggttgaggcaataaaattgtctattaaagcacctgaaggaataacaggaaaacttagctataaaacttatgttaaaggacaaggttggcaaccttcagtagagagtggtcaagttagtggtactgttggtcagagtagacctattgaagcactaagcattaaccttactgataatttacaaaaattatatgatgtctattatcgtgttcatgttcaagatatcgggtggatggcttgggctaaaaatggagcttacgctgggactttgggaatgtcaaagcgccttgaagcttacgaagtaaaatttacccttaaaggacaatctgttttaacaccaactatacctaaggaagagagacctgtcttaaattatcaggttaaggtaggccaaaatggttggcaatctaataaacttgaaggacaaatggcgggaactttaggagaatccaaagccctagatggagtaaaattcactcttagcaccttgaagtatggggacattctctatcgtactcatgtacaagataaaggttggggagaaattttaggtagtcaaacaagtaaggattatcaaggaaaaagactagaagctattcaattggacttaagtgggaatttaaaacaaaattatgatatttattatcgcgctcacgtccaagataaaggttggatggcttggcaaaaaaataatagtgtagcaggtacagtcggagaatcgaaacgtttagaggctttggaggtaaaactagtagctaaagcttcagattttagttcccaaacaaatcattcattcttagaaatgaagcatcctggattaagttatcaaacttatcttcaaaaagatggttggaaaccaacggttttggaaggccaattaggaggtagtattggactttcaaaatctataaaagccatcaaacttaacttaggtagtacagctctaggaaatatagaatatagaacttttcttaatggttcaggttggcaaactgttgttaattcagggagagaaagtaatgtaccaaatgaatctcaacaagtagaagctattcagatgcgattgacaggtctgctatcgaaaacctatagtgtgatgtatcgagttcacatgcaagattatggttggcaggattggacttataacaatgacatcgctggtagtactaaccaaggaaaacgaattgaagcaatcgaaattaaattagttgagactgctaaaataccggtaactgtccaaacgacttataagggaactggaaactataatgtacgagtgacaaatgttattagtcctggggatttaaaaattgctatttggtcagataaaaacaatcaggatgaccttaagtggtataccgtcgcacccaaaaatcatgaagctacattgacatttaatgttacaaatcatagagacaatggtaaatactttatccatgtttatcaggaaaatgcttctaatcaaaaacaattattggtaaaaacttctctacaagtcgcacattcaaattataatactccttactttagccaacgtgatggaaggtgggcaagtcgaagatatggtatggcaactttaggagaaactggttgtgtaccaacttctctagctatgattttgtcttctttgaaaggagaaactgttttaccaacgcaaattgcagattacctttaccataagacagttgaatttaatcgtggtgttcaaggaacaacttctagaggaattttaaaagcagccaaagaatggggtgtaactgcaactgcattaggaactcaagctaaccttgtacaagcgttgaaggatggttatcatgtcctagcggcagtacaaaataatgtttttgttcttcatggaagtcatgaaatcgttctcaaaggatataataacggactgacacatgtctctgacccttacacaccgtccttgtctggttggtatccaatttcacaactttggaaagaacagagctattatagtgaggatagaattgatattggagcaccttttgtcaaggtaacagatgcc

SEQ ID NO: 2636 - protein, 854 aa, Streptococcus agalactiae
MRPIVRKKMYKKGKFWVVAGIVTILGGSAILGQDVKAEQAEAVTSTISEKTDSSQTISDTSKLTLPVNSSEAMKNSAEPLIKTAFATSVSSNPREIAATPVKTFDASSKVVVKASTAEHSANQTNSNVNQVANDSEVITQQNSTKQLPTVTYSAHVQDIGWQKSVDNATVSGTVGQEKQVEAIKLSIKAPEGITGKLSYKTYVKGQGWQPSVESGQVSGTVGQSRPIEALSINLTDNLQKLYDVYYRVHVQDIGWMAWAKNGAYAGTLGMSKRLEAYEVKFTLKGQSVLTPTIPKEERPVLNYQVKVGQNGWQSNKLEGQMAGTLGESKALDGVKFTLSTLKYGDILYRTHVQDKGWGEILGSQTSKDYQGKRLEAIQLDLSGNLKQNYDIYYRAHVQDKGWMAWQKNNSVAGTVGESKRLEALEVKLVAKASDFSSQTNHSFLEMKHPGLSYQTYLQKDGWKPTVLEGQLGGSIGLSKSIKAIKLNLGSTALGNIEYRTFLNGSGWQTVVNSGRESNVPNESQQVEAIQMRLTGLLSKTYSVMYRVHMQDYGWQDWTYNNDIAGSTNQGKRIEAIEIKLVETAKIPVTVQTTYKGTGNYNVRVTNVISPGDLKIAIWSDKNNQDDLKWYTVAPKNHEATLTFNVTNHRDNGKYFIHVYQENASNQKQLLVKTSLQVAHSNYNTPYFSQRDGRWASRRYGMATLGETGCVPTSLAMILSSLKGETVLPTQIADYLYHKTVEFNRGVQGTTSRGILKAAKEWGVTATALGTQANLVQALKDGYHVLAAVQNNVFVLHGSHEIVLKGYNNGLTHVSDPYTPSLSGWYPISQLWKEQSYYSEDRIDIGAPFVKVTDA

SEQ ID NO: 2637 - DNA, 516 bp, Streptococcus agalactiae
atggatttaaataattacatcgcttcaattgaaaactatcctcaagaaggaattactttccgtgatatctccccattaatggctgatggtaaagcatacagctatgctgttcgtgaaattgtacaatatgctgctgataaagatattgatatgattgttggaccagaagctcgtggctttattgttggttgcccagttgcttatgctcttggtattggttttgctccagtccgtaaaccaggtaaattaccacgcgaagttatttcagctgactatgaaaaagaatatggtcttgatacattgacaatgcacgcagatgctattaaaccaggccaacgtgttttaattgttgatgaccttttagctactggtggaacagtaaaagcgacaattgaaatgattgaaaaacttggtggcgttgtcgcaggctgtgctttcctagttgaacttgatggattaaatggtcgtaaagctattgaaggttatgatactaaggtattgatgaactttccagga

SEQ ID NO: 2638 - protein, 172 aa, Streptococcus agalactiae
MDLNNYIASIENYPQEGITFRDISPLMADGKAYSYAVREIVQYAADKDIDMIVGPEARGFIVGCPVAYALGIGFAPVRKPGKLPREVISADYEKEYGLDTLTMHADAIKPGQRVLIVDDLLATGGTVKATIEMIEKLGGVVAGCAFLVELDGLNGRKAIEGYDTKVLMNFPG

SEQ ID NO: 2639 - DNA, 516 bp, Streptococcus pyogenes
atggatttaacaaattacattgcatcgatcaaagattaccctaaagctggtattacgtttcgagatatctcacctttaatggctgacggtaaagcatatagctatgctattcgtgaaatagcacagtacgcttgtgataaagatattgatatggttgttggacctgaagcgcgtggttttatcattggttgtcctgttgcagttgagttaggaattggttttgctcccgttcgtaaaccaggaaaactgccaagagatgttgtctctgccgattacgaaaaagaatatggtcttgatactttaactatgcatgcagatgctattaagcctggacaacgtgttttgattgtcgatgatttactagcgactggcggtacagtaaaagcaactattgaaatgattgaaaaacttggtggtattgtagctggttgtgccttccttattgaattagaaggtttaaatggacgccatgctattaggaactatgactataaagtcttaatgcagtttcctggg

SEQ ID NO: 2640 - protein, 172 aa, Streptococcus pyogenes
MDLTNYIASIKDYPKAGITFRDISPLMADGKAYSYAIREIAQYACDKDIDMVVGPEARGFIIGCPVAVELGIGFAPVRKPGKLPRDVVSADYEKEYGLDTLTMHADAIKPGQRVLIVDDLLATGGTVKATIEMIEKLGGIVAGCAFLIELEGLNGRHAIRNYDYKVLMQFPG

SEQ ID NO: 2641 - DNA, 678 bp, Streptococcus agalactiae
atgacttatttggaacaatatcagtcagggcaattgactctaccaagtgctttattttttcactttaaatctatttttaagacagcagacgattttttagtttggcaatttttctatttacaaaatacaactaatttatccgatctaacaccgagccgtattgcgacatcacttgataaaacagtggcagatatcaatcgttctatatcgaatttaacaagtcaaggtttactagatgtcaaaacaattgagttgaatcatgaaatcgagattatctttgatacaagccctgtgtttgctaaattagataaacttttcgaagaggataatcaagtaataatagacaataaaacctctgattcgaatcgtctgaaagatttagtaggagacttcgaacgtgaattaggtcgcttattaagtccttttgaattagaagatttacaaaagacactgcaagaagatcagacagatcctgatattgttagggcagctcttagagaagcggttttcaatgggaaaacaagttggaattatatcaatgctatccttcgcaactggcggcgtgaaggattgacgacacttcgacaaattgaagagagaaaacaagcacgtgaagataaccaaatgaaagatttagcgatttcggatgattttaaaaatgcaatgaatttatgggaa

SEQ ID NO: 2642 - protein, 226 aa, Streptococcus agalactiae
MTYLEQYQSGQLTLPSALFFHFKSIFKTADDFLVWQFFYLQNTTNLSDLTPSRIATSLDKTVADINRSISNLTSQGLLDVKTIELNHEIEIIFDTSPVFAKLDKLFEEDNQVIIDNKTSDSNRLKDLVGDFERELGRLLSPFELEDLQKTLQEDQTDPDIVRAALREAVFNGKTSWNYINAILRNWRREGLTTLRQIEERKQAREDNQMKDLAISDDFKNAMNLWE

SEQ ID NO: 2643 - DNA, 681 bp, Streptococcus pyogenes
atgagttttttagaacattataagtcaggtaatttggttatcccaagtgccttgctttttcattacaaagatctttttaagagctcagatgattttttggtctggcagtttttctatcttcaaaatacgacaaagcgagacgacttagcacccagtcaaattgctcatgcgcttggaaaatcagttgctgatattaataaaatcatttcatctttgactaatcaagggcttttagatatgcggacaattgaacttactggagaaattgaaattatttttgatgcgagtcctgtgttagccaagttagatcaattgtttgtcagtcaaacggcaactgaaattgacaaacaagaaacaccaaatcatttcaaacgattagttgatgaatttgaacgtgaactaggacgattcttgagtccttttgagttagaagatcttgaaaaaacgcttcgtgatgataaaacagatcctgatttgatacgagaagctttaaaagaagctgtcttcaacggcaaaacaaattggaaatatatccaggctatcttacgtaattggcgaaaagaaggtattgttaatcttcgacaagtagaagaacgtagacgtgttagagaaggcgaagatctttctcaagtgacgatatcagaggattttctatctgcgatgaatttatggagtgattca

SEQ ID NO: 2644 - protein, 227 aa, Streptococcus pyogenes
MSFLEHYKSGNLVIPSALLFHYKDLFKSSDDFLVWQFFYLQNTTKRDDLAPSQIAHALGKSVADINKIISSLTNQGLLDMRTIELTGEIEIIFDASPVLAKLDQLFVSQTATEIDKQETPNHFKRLVDEFERELGRFLSPFELEDLEKTLRDDKTDPDLIREALKEAVFNGKTNWKYIQAILRNWRKEGIVNLRQVEERRRVREGEDLSQVTISEDFLSAMNLWSDS

SEQ ID NO: 2645 - DNA, 681 bp, Streptococcus agalactiae
atggatttacaattatcaaaacgattacaaaaagttgcaaactacgttccaaaaggagctcggttattagatgtaggaagtgatcatgcttacttacctatttttttgttgcagatgggatactgtgattttgccattgctggtgaagtggtgaatggaccgtatcagtctgcgttgaaaaacgtttcagaacatggtctcacttcaaagatagatgttcgcttagcaaatggtttgtcagcttttgaagaagcagataatattgatacgataactatctgtggaatgggtggtcgtttgattgctgatattttgaataacgatatagacaaacttcagcacgttaaaacactagtcttacaacctaataatcgggaagatgatttaagaaaatggttagctgcaaatgattttgaaatagtagcagaagatatcttgactgaaaatgacaaacgctatgaaattttagttgttaagcatggtcatatgaatttaactgctaaagaattgcgatttggtccatttttattatccaataacacaacggtttttaaagaaaaatggcaaaatgagcttaataaattaacttttgctttaaactctattcccaatagtaaaatggaagaacgcgctattttggaagataaaatacaggatataaaggaggttcttgatgaaagc

SEQ ID NO: 2646 - protein, 227 aa, Streptococcus agalactiae
MDLQLSKRLQKVANYVPKGARLLDVGSDHAYLPIFLLQMGYCDFAIAGEVVNGPYQSALKNVSEHGLTSKIDVRLANGLSAFEEADNIDTITICGMGGRLIADILNNDIDKLQHVKTLVLQPNNREDDLRKWLAANDFEIVAEDILTENDKRYEILVVKHGHMNLTAKELRFGPFLLSNNTTVFKEKWQNELNKLTFALNSIPNSKMEERAILEDKIQDIKEVLDES

SEQ ID NO: 2647 - DNA, 684 bp, Streptococcus pyogenes
atggatagtcaattatcaaaccgtttggcccaagttgcggcctatgttccaaaaggtgtcaaattattagatgttggcagtgatcatgcctaccttcccatatttttggtagaaactaatcagatttcagcagccattgctggcgaagtggttaggggtccctacgaatctgctcttaaaaatgtcacacagtctggccttgccgagcatattcaggtgcgcttagccaatggccttgcagcctttgaagaagctgatgatgtgacagccattaccatttgtggcatgggtggccgtttgattgctgatattttagaggcaggtaaggaaaaattgcagggcattgaacgtctggttttacaacccaacaatcgtgaggatgatttacgggcttggttatcggttaacgcttttaaaattgttgcagaaaccatcatggctgaaaatgacaaatattatgaaatcatcgttgctgagcatggtgaaaaggccttatccgcgacagaattgcgttttggtccatacctttctcaggaaaaatcagtcgtttttaaagagaagtggcaacgagaaatggataagttagcttatgccttgtcctgcatcccagaagaaaaaactcaagagcgtcagcttctcttgacaaaaatacaacaaataaaagaggtgattgttcatgaaagc

SEQ ID NO: 2648 - protein, 228 aa, Streptococcus pyogenes
MDSQLSNRLAQVAAYVPKGVKLLDVGSDHAYLPIFLVETNQISAAIAGEVVRGPYESALKNVTQSGLAEHIQVRLANGLAAFEEADDVTAITICGMGGRLIADILEAGKEKLQGIERLVLQPNNREDDLRAWLSVNAFKIVAETIMAENDKYYEIIVAEHGEKALSATELRFGPYLSQEKSVVFKEKWQREMDKLAYALSCIPEEKTQERQLLLTKIQQIKEVIVHES

SEQ ID NO: 2649 - DNA, 789 bp, Streptococcus agalactiae
ttgatgaaagctagagaacttattgatgtatatgaaacttattgtccacaggaattatctatggaaggagatatttcaggtcttcaaattggatctttagataaagaaataaagacagtcatggtagctttagatgttcgagagactacagtagctgaagcaattgaacgtcaagtagatcttcttattgtaaagcatgctcctatttttcgtccattaaaggatttggtagcaacgccgcaaaataagatttatatagaccttcttaaatcagacattgctgtttatgtgagccatactaatatagatatcgttcctaatggacttaacgactggttttgtgaattattagatattcaatatcccgatatattatctgagacaagtaatggttatggtattggtcgcattggtgatattagaccccagagttttgaattttttgcatggaaaattaaagatgtgtttggtttagatagcgttcgtttagtttcatatgataaatctaatcctgaaattcaacgagttgctatttgtgggggtagtgggcaaagtttctacaaagaagctattgcaaaaggagcagatgtttttgtaacgggagatatttattatcatactgcacaagaaatgatcacaaatggtttgcttgcgattgacccaggtcatcatattgaggttttatttgtttctaaaatagctactatgattgagcagtggaaacttgaaaaaggctgggatatttcagttttagagagtaaagctccaacaaatcccttttaccatatg

SEQ ID NO: 2650 - protein, 263 aa, Streptococcus agalactiae
MMKARELIDVYETYCPQELSMEGDISGLQIGSLDKEIKTVMVALDVRETTVAEAIERQVDLLIVKHAPIFRPLKDLVATPQNKIYIDLLKSDIAVYVSHTNIDIVPNGLNDWFCELLDIQYPDILSETSNGYGIGRIGDIRPQSFEFFAWKIKDVFGLDSVRLVSYDKSNPEIQRVAICGGSGQSFYKEAIAKGADVFVTGDIYYHTAQEMITNGLLAIDPGHHIEVLFVSKIATMIEQWKLEKGWDISVLESKAPTNPFYHM

SEQ ID NO: 2651 - DNA, 792 bp, Streptococcus pyogenes
ttgttcatgaaagctaaaaccctaattgatgcctatgaagccttttgcccacttgatttatctatggaaggagacgttaaaggtcttcaaatgggttcattggataaagacattcgtaaggttatgattactttagatatccgagagtcaacagtagcagaagccatcaaaaatgaagttgatctcattataactaagcatgctcccatctttaaaccgcttaaagatctggtttcatcccctcagcgtgatatccttctagatttggtcaagcatgacatttctgtctatgtgagccataccaatattgacattgtaccaggtgggctaaatgattggttttgtgacctgctagaaatcaaggaagcaacttacttgtctgaaaccaaagaaggctttggcattggtcgtattggaacagttaaagaacaagcgttagaagagttagcaagtaaggtcaaaagggtgtttgatttagataccgtgcgacttatccgttacgataaggaaaaccctttgatttcaaagattgctatctgtggcggaagtggtggtgaattttatcaggatgctgtgcaaaaaggcgcagacgtttatattacaggggatatctattaccatacagcacaggagatgctgacagaaggactatttgcggttgacccggggcatcatattgaggtgctttttacggagaaattaaaggagaaactccaagggtggaaagaagagaacggttgggatgtcagcattatttcaagcaaagcctcgaccaatccatttagccattta

SEQ ID NO: 2652 - protein, 264 aa, Streptococcus pyogenes
LFMKAKTLIDAYEAFCPLDLSMEGDVKGLQMGSLDKDIRKVMITLDIRESTVAEAIKNEVDLIITKHAPIFKPLKDLVSSPQRDILLDLVKHDISVYVSHTNIDIVPGGLNDWFCDLLEIKEATYLSETKEGFGIGRIGTVKEQALEELASKVKRVFDLDTVRLIRYDKENPLISKIAICGGSGGEFYQDAVQKGADVYITGDIYYHTAQEMLTEGLFAVDPGHHIEVLFTEKLKEKLQGWKEENGWDVSIISSKASTNPFSHL

SEQ ID NO: 2653 - DNA, 1101 bp, Streptococcus agalactiae
atgaaaaagatagcaattattggtgcaggagcagtcggagcgacactagcctattacttatcaaaagaaaaggatattcaggttactgtttttgattatggagttggacaagcaactaaggctgctgcggggattattagcccatggttttcaaaacgtcgtaataaagcctggtatcgtatggcgaggttgggggctgatttttattcaaagctagtcacggatttacaaaaagatggttttgaaacaaaattttatcagcaaactggtgttttcttattaaaaaaggacgagagtcagttagagtcattgtttgcactagcagataaacgtcgactagaatctcctctaataggtgatttacaaatactaaataaaagtgaagcaaatactcactttcctgagttagatggctatgaacagttactttatgcgagcggaggagcacgagtagaaggggcggacttaacacgaatattgttagaagcaagtggtgttaatgtcatcaaggatgaagttcactttacgataactgataatggctttcgtgttcaaggaattgattttgataaacttgttttagcgagtggagcctggctagctaagatattagatgagcacaactatcaggtagatgttcgccctcaaaaagggcaattgcgagactattattttagcaatattaatacaggaaaatatcctgttgtaatgccagaaggtgagctagatattatcccatttgataatggtaaagtctctgtaggtgcaagtcacgaaaatgatatggcttttgatttaaacattgattttaaagtcttagacaagtttgaagagcaagctattggctattttccgcaattaaaaaaagcagatacgacttctgaacgtgttggaattcgtgcctatacaagtgatttttctccattttttggccctgtcccttgtatggagggtgcatatgctgcaagtggattaggatcaactggcttaacagtgggcccattaattggttatgaattatgtcaattaatcttaaataaagaaaatcagctaaatttagaggattacgatattacaaaatacgtgaaaaagattagtaga

SEQ ID NO: 2654 - protein, 367 aa, Streptococcus agalactiae
MKKIAIIGAGAVGATLAYYLSKEKDIQVTVFDYGVGQATKAAAGIISPWFSKRRNKAWYRMARLGADFYSKLVTDLQKDGFETKFYQQTGVFLLKKDESQLESLFALADKRRLESPLIGDLQILNKSEANTHFPELDGYEQLLYASGGARVEGADLTRILLEASGVNVIKDEVHFTITDNGFRVQGIDFDKLVLASGAWLAKILDEHNYQVDVRPQKGQLRDYYFSNINTGKYPVVMPEGELDIIPFDNGKVSVGASHENDMAFDLNIDFKVLDKFEEQAIGYFPQLKKADTTSERVGIRAYTSDFSPFFGPVPCMEGAYAASGLGSTGLTVGPLIGYELCQLILNKENQLNLEDYDITKYVKKISR

SEQ ID NO: 2655 - DNA, 1104 bp, Streptococcus pyogenes
atgaaaatagccattattggggcggggattgtaggatcaaccgccgcttattatttacaacaaagtggtcaaaaagaagttaccatttttgaccatggtcaaggacaagccactaaggcagctgctggtattattagtccttggttttcaaagcgtcgcaataaagtttggtaccgcatggctcgtttaggagcggacttttatcagcaattaatcaatgacctcaaagaagatggttttgcaacagatttttatcagcaaaatggcatctatgttttaaaaaagcaggaagaaaaactaagagatctttatgaattagcgttagcaagaaaggtagaatcaccgattattggtgagttagccattaaaaatcgtaaagaactggggaatgattttaaaggattgattggctttgataactgtctgtacgcttcaggagctgctagagtggagggagccgctttatgtgagacattactcaaggctagtggttatccagttattcgccaaaaagtcactctgaaacagcaaggaagtggttatgagattgctggtcattattttgatcaggtcattctggcagcaggagcatggctacctgacttattgaggcctttaggctatcaggttgatgtgcgaccacaaaagggacaactcttggattatgacgttcatcacatcatcagcgacacttatccagttgttatgccagaaggtgaaatagatcttattccttttaaccaaggtaagatttctgttggtacgagtcacgaaaatgataaaggttatgatttggagcctgattggcaggttttaaaaaaacttgaaatgcaagctcttacttatttgccgttattaaaagaagctactcaaaaaacgtgtcgtgtaggaataagagcttataccagtgattattctcctttttatggtcaggtttcaggattgaagaacctttatacagctagtggtttagggtcatcgggattaacagttggacctttgattggctatgaattagctcaattattgctaggacacgaaggacttttgacgcctagcgactattctcctgagccttaccttttgcggtctactggtaaagcg

SEQ ID NO: 2656 - protein, 368 aa, Streptococcus pyogenes
MKIAIIGAGIVGSTAAYYLQQSGQKEVTIFDHGQGQATKAAAGIISPWFSKRRNKVWYRMARLGADFYQQLINDLKEDGFATDFYQQNGIYVLKKQEEKLRDLYELALARKVESPIIGELAIKNRKELGNDFKGLIGFDNCLYASGAARVEGAALCETLLKASGYPVIRQKVTLKQQGSGYEIAGHYFDQVILAAGAWLPDLLRPLGYQVDVRPQKGQLLDYDVHHIISDTYPVVMPEGEIDLIPFNQGKISVGTSHENDKGYDLEPDWQVLKKLEMQALTYLPLLKEATQKTCRVGIRAYTSDYSPFYGQVSGLKNLYTASGLGSSGLTVGPLIGYELAQLLLGHEGLLTPSDYSPEPYLLRSTGKA

SEQ ID NO: 2657 - DNA, 867 bp, Streptococcus agalactiae
atgaaaggtattattttagcgggaggttcaggtactcgcttgtacccattaactcgtgctgcatcaaaacaattgatgccaatttatgataaaccaatgatttattatccattgtcagttttgatgttagcaggaataaaagaaatactgattatttctactccacaagatttgcctcgctttgaagatatgcttggagatggttcagaactaggaatctctctttcttatgctgaacaaccaagcccagatgggttagcacaggccttcattatcggtgaagattttattggtgatgatcacgttgctttagtattaggtgataatatttaccatggaccaggtttatctgcaatgctacaacgtgcagctagtaaagaaagtggagcaaccgtctttggctatcaagtaaaagatccagaacgttttggtgttgtcgagtttgatactgatatgaatgccatttctattgaagaaaaaccagcgcaacctaagtctaattatgctgtcacaggtctttatttctatgataacgatgtggttgaaatcgctaaaaatattaagccaagccctcgtggagaacttgaaattactgatgttaacaaagcctaccttgatagaggtgacttatcagttgagttaatgggacgtggatttgcgtggttagacactggaactcacgaaagtcttcttgaagcagcacaatatattgaaacagtacaacgcatgcaaaacgttcaagttgctaaccttgaggaaattgcttaccgcatgggctacatcactcgtgaacaagtccttgagttggcacaaccacttaagaaaaatgagtatggtcaatacctacttcgtttgattggagaagcc

SEQ ID NO: 2658 - protein, 289 aa, Streptococcus agalactiae
MKGIILAGGSGTRLYPLTRAASKQLMPIYDKPMIYYPLSVLMLAGIKEILIISTPQDLPRFEDMLGDGSELGISLSYAEQPSPDGLAQAFIIGEDFIGDDHVALVLGDNIYHGPGLSAMLQRAASKESGATVFGYQVKDPERFGVVEFDTDMNAISIEEKPAQPKSNYAVTGLYFYDNDVVEIAKNIKPSPRGELEITDVNKAYLDRGDLSVELMGRGFAWLDTGTHESLLEAAQYIETVQRMQNVQVANLEEIAYRMGYITREQVLELAQPLKKNEYGQYLLRLIGEA

SEQ ID NO: 2659 - DNA, 867 bp, Streptococcus pyogenes
atgaaaggtattattcttgcaggaggttcagggacacgcttgtatccactgacccgtgccgcatctaaacagttgatgcccatttatgacaaaccaatgatttattacccattgtcaaccttgatgttggcagggattaaagatgttttaatcatttcaactccccaagatcttcctcgtttcgaagaattgctaggagacgggtcagaatttggcattagcttatcctataaggaacaaccaagcccagatggtttagcacaagctttcattattggagaggagtttatcggtgatgaccgtgttgctcttattttaggagataatatttaccacggtaatggcctcactaaaatgcttcaaaaggcagctgccaaagaaaaaggagccaccgtttttggttatcaagtgaaagaccctgagcgctttggagtggtggaatttgatgagaacatgaatgctatctctatcgaagaaaaaccagaagtgcctaagtctcactttgcagtgactggactttatttctatgacaatgacgtggtagagattgctaaaaacattaaaccaagcgcgcgtggtgagttggaaattacagacgtcaacaaggcttacttggaacgtggtgacctctccgttgaattgatggggcgtggttttgcatggttagacactggaacgcatgaaagtctacttgaagcggctcaatatattgaaactgttcaacgcttgcaaaacgctcaagtggcaaatctggaagaaattgcctatcgcatgggctatatcagtaaagaagatgtccataaattggcgcaatctttaaagaaaaacgaatacgggcaatacttgcttcgtttgattggagaagct

SEQ ID NO: 2660 - protein, 289 aa, Streptococcus pyogenes
MKGIILAGGSGTRLYPLTRAASKQLMPIYDKPMIYYPLSTLMLAGIKDVLIISTPQDLPRFEELLGDGSEFGISLSYKEQPSPDGLAQAFIIGEEFIGDDRVALILGDNIYHGNGLTKMLQKAAAKEKGATVFGYQVKDPERFGVVEFDENMNAISIEEKPEVPKSHFAVTGLYFYDNDVVEIAKNIKPSARGELEITDVNKAYLERGDLSVELMGRGFAWLDTGTHESLLEAAQYIETVQRLQNAQVANLEEIAYRMGYISKEDVHKLAQSLKKNEYGQYLLRLIGEA

SEQ ID NO: 2661 - DNA, 90 bp, Streptococcus agalactiae
ttgaagctattcctggattgttggaattcgatattcccgttcgtggagacaaccgaggatggttcaaagagaactttcaaaaagaaaaaa

SEQ ID NO: 2662 - protein, 30 aa, Streptococcus agalactiae
MKLFLDCWNSIFPFVETTEDGSKRTFKKKK

SEQ ID NO: 2663 - DNA, 591 bp, Streptococcus agalactiae
atgactgaacaattttttgataaagaattaacttgtcgcccaattgaagctattcctggattgttggaattcgatattcccgttcgtggagacaaccgaggatggttcaaagagaactttcaaaaagaaaaaatgataccgcttggtttcccagaaagcttctttgaggcagacaaactacaaaataatatttcgtttaacaagaaaaatactttgcgaggtctccatgcagagccttgggataaatatgtttcgatcgctgatgaaggacgtgtgatcggtacttgggttgacctccgtgaaggtgacagttttggtaacgtttaccaaacgattatcgatgcctcaaaaggtatctttgttccacgcggtgttgctaatggtttccaagttctttcagataaagcagcttatacttatctcgttaacgattattgggcacttgaactcaaaccaaaatatgctttcgttaattatgcagatccaaatctaggcattcagtgggaaaaccttgaagaagcagaagtctcagaagcagataagaatcacccacttctcaaagatgtaaaacctttgaagaaggaagatttg

SEQ ID NO: 2664 - protein, 197 aa, Streptococcus agalactiae
MTEQFFDKELTCRPIEAIPGLLEFDIPVRGDNRGWFKENFQKEKMIPLGFPESFFEADKLQNNISFNKKNTLRGLHAEPWDKYVSIADEGRVIGTWVDLREGDSFGNVYQTIIDASKGIFVPRGVANGFQVLSDKAAYTYLVNDYWALELKPKYAFVNYADPNLGIQWENLEEAEVSEADKNHPLLKDVKPLKKEDL

SEQ ID NO: 2665 - DNA, 591 bp, Streptococcus pyogenes
atgacagaaactttttttgacaaaccattggcttgccgagaaatcaaagaaatcccaggcttactagagtttgatattcctgttcgtggggataatcgtggctggtttaaagaaaatttccaaaaagaaaaaatgttgccaattggctttccagaacgtttttttgaggaaggaaaactacaaaacaacgtttctttttcacgtcagcatgtgctgcgtggacttcatgctgaaccttgggataaatacatctcagttgctgatgatggcaaggttttaggagcttgggttgatcttcgtgagggagagacttttggaaacgtctaccagacagtgattgatgcttcaaaaggaatgtttgttcctagaggggttgctaatggctttcaagttctttcagagactgtctcttacagttatcttgtcaatgactactgggctcttgacttgaaacctaagtatgcttttgtaaactatgctgacccaagtcttgggattacttgggaaaatctagcagctgcagaagtttctgaagcagataaaaaccatcctcttcttagtgatgtcaaaccactgaaaccaaaagaccta

SEQ ID NO: 2666 - protein, 197 aa, Streptococcus pyogenes
MTETFFDKPLACREIKEIPGLLEFDIPVRGDNRGWFKENFQKEKMLPIGFPERFFEEGKLQNNVSFSRQHVLRGLHAEPWDKYISVADDGKVLGAWVDLREGETFGNVYQTVIDASKGMFVPRGVANGFQVLSETVSYSYLVNDYWALDLKPKYAFVNYADPSLGITWENLAAAEVSEADKNHPLLSDVKPLKPKDL

SEQ ID NO: 2667 - DNA, 102 bp, Streptococcus agalactiae
ttgcgtcaaacaacattgctaattcgtttttacttgctaaggttaatgccttttaagaagttgaaaattacaaatcttccttcttcaaaggttttacatctt

SEQ ID NO: 2668 - protein, 34 aa, Streptococcus agalactiae
MRQTTLLIRFYLLRLMPFKKLKITNLPSSKVLHL

SEQ ID NO: 2669 - DNA, 126 bp, Streptococcus agalactiae
atgaaaccagctccaccagttacgataatgtttttaaattcagtcattttttctccgaaaaattttttctttttgctatttgaaggatactgttctgttagaagtagttctatggaatgtcatgcc

SEQ ID NO: 2670 - protein, 42 aa, Streptococcus agalactiae
MKPAPPVTIMFLNSVIFSPKNFFFLLFEGYCSVRSSSMECHA

SEQ ID NO: 2671 - DNA, 930 bp, Streptococcus agalactiae
ttgacatatgcaggtaaccgtgctaacattgaagccattcttggtgatcgtgttgagttagttgttggtgacatcgctgacgctgaattggtagacaagttggctgccaaagcagatgctattgttcactatgcggctgagagccacaatgacaactcacttaacgatccaagtccatttatccatacaaactttatcggaacttacactttgcttgaagcagctcgtaaatacgatatccgtttccaccacgtgtcaactgatgaagtttatggagatctgccacttcgtgaagaccttccaggaaatggtgaaggaccaggtgaaaaattcactgctgaaacaaaatacaatccatcatcaccttactcatcaactaaggcagcttctgaccttatcgttaaggcatgggtacgttccttcggcgtaaaagcgaccatttcgaactgttcaaataactatggaccataccaacacatcgaaaaattcattccacgtcaaattacaaatatcttggcaggaatcaaaccgaaactttatggtgaaggtaaaaacgtccgtgactggatccacacaaatgatcattcaacaggtgtctgggctattttgactaagggtcgtattggtgaaacataccttattggtgccgacggtgagaaaaacaacaaggaagttcttgaacttatccttgagaaaatgggtcaaccaaaagacgcttacgatcacgtaactgaccgtgctggacacgaccttcgttacgctatcgattctacaaaattgcgtgaagaacttggttgggaaccacaattcacaaacttctcagaaggtttggaagaaacaatcaactggtacactgaaaaccaagattggtggaaagcagagaaagaagcagttgaagctaactacgctaaaacgcaagaagtcattaac

SEQ ID NO: 2672 - protein, 310 aa, Streptococcus agalactiae
MTYAGNRANIEAILGDRVELVVGDIADAELVDKLAAKADAIVHYAAESHNDNSLNDPSPFIHTNFIGTYTLLEAARKYDIRFHHVSTDEVYGDLPLREDLPGNGEGPGEKFTAETKYNPSSPYSSTKAASDLIVKAWVRSFGVKATISNCSNNYGPYQHIEKFIPRQITNILAGIKPKLYGEGKNVRDWIHTNDHSTGVWAILTKGRIGETYLIGADGEKNNKEVLELILEKMGQPKDAYDHVTDRAGHDLRYAIDSTKLREELGWEPQFTNFSEGLEETINWYTENQDWWKAEKEAVEANYAKTQEVIN

SEQ ID NO: 2673 - DNA, 1038 bp, Streptococcus pyogenes
atgtataaaaatattatcgtaactggtggagctggtttcatcggatctaactttgtgcactatgtctacaataaccacccagatgttcatgtaactgtccttgataaattgacatatgcaggtaaccgtgctaacattgaagctattcttggtgatcgtgttgagttagttgttggtgatatcgctgacgctgaattggtagataaattggctgccaaaacggatgctattgttcactatgcggctgagagccacaacgataactcattggaagatccaagtccatttatccatacaaactttatcggaacttacactttgcttgaagcagctcgtaaatacgatatccgtttccaccacgtgtcaactgatgaagtttatggagatcttccacttcgtgaagaccttccaggacagggtgaaggaccaggtgaaaaattcactgctgaaacaaaatacaatccatcatcaccttactcatcaactaaggcagcttctgaccttatcgttaaggcatgggtacgttccttcggtgtgaaagcgaccatttcgaactgttcaaataactatggaccataccaacacatcgaaaaattcattccacgtcaaattacaaatatcttggcaggaatcaaaccaaaactttatggtgaaggtaaaaacgtccgtgactggattcatactaatgatcattctacaggagtatgggctattttgactaagggtcgtatcggtgaaacataccttattggtgccgacggcgagaaaaacaacaaggaagttcttgagcttatccttgagaaaatgggtcaaccaaaagacgcttatgatcacgtaactgaccgtgctggtcacgatcttcgttacgctattgattctacaaaattgcgtgaagaactcggctgggaaccacaatttacaaacttttcagaaggtttggaagaaactattaagtggtacacagaaaatgagacatggtggaaagcagaaaaagatgctgtagaagccaagtatgctaaaactcaagaagtgattaaa

SEQ ID NO: 2674 - protein, 346 aa, Streptococcus pyogenes
MYKNIIVTGGAGFIGSNFVHYVYNNHPDVHVTVLDKLTYAGNRANIEAILGDRVELVVGDIADAELVDKLAAKTDAIVHYAAESHNDNSLEDPSPFIHTNFIGTYTLLEAARKYDIRFHHVSTDEVYGDLPLREDLPGQGEGPGEKFTAETKYNPSSPYSSTKAASDLIVKAWVRSFGVKATISNCSNNYGPYQHIEKFIPRQITNILAGIKPKLYGEGKNVRDWIHTNDHSTGVWAILTKGRIGETYLIGADGEKNNKEVLELILEKMGQPKDAYDHVTDRAGHDLRYAIDSTKLREELGWEPQFTNFSEGLEETIKWYTENETWWKAEKDAVEAKYAKTQEVIK

SEQ ID NO: 2675 - DNA, 123 bp, Streptococcus agalactiae
ttggttatatcttctttaaaaatagcactattgatattgaacgcaaagagcaaacaggtacttggaacagcattaatcgtacttctaaaaatacctcaatcgttagcaatccttttatcacta

SEQ ID NO: 2676 - protein, 41 aa, Streptococcus agalactiae
MVISSLKIALLILNAKSKQVLGTALIVLLKIPQSLAILLSL

SEQ ID NO: 2677 - DNA, 165 bp, Streptococcus agalactiae
atgatgaaaatacacgtggttggtataccggagatggtatgttctatctttataatagtgatcaatctcattatagtaatcatttttggccaaccgtcaatccttataaaatggctggaacaactgaaaaagatgctaagcgtgaagatacgactaaggatttca

SEQ ID NO: 2678 - protein, 55 aa, Streptococcus agalactiae
MMKIHVVGIPEMVCSIFIIVINLIIVIIFGQPSILIKWLEQLKKMLSVKIRLRIS

SEQ ID NO: 2679 - DNA, 120 bp, Streptococcus agalactiae
ttgatcccactaaaaaatatgaggtcaagtttgatattgaaacaagtaacaaggctggacaagctttccttcgtattatggagaaaaaagataacaatacgcgactttggctttctgaga

SEQ ID NO: 2680 - protein, 40 aa, Streptococcus agalactiae
MIPLKNMRSSLILKQVTRLDKLSFVLWRKKITIRDFGFLR

SEQ ID NO: 2681 - DNA, 3216 bp, Streptococcus agalactiae
atggaaatcaaaaagaaacatcgtattatgctttattcagcccttattttaggaacaatattggttaacaatagttaccaagctaaagctgaagagcttaccaaaactacctcaacgtcacaaataagagatactcaaactaataatgttgaagctccccagactgaaagtaccactgtcaaagagactagcaccacaaccacacaacaagatttgtctaactccacagcttcaaccgcaactgcaacagccactcctagcacaatgaaacaagtagtagataatcaaactcaaaataaggagctggtgaaaaacggagattttaatcaaactaaccctgtatctggaagctggtcacatacaggcgctagggaatggtctgcttggattgataaagaaaatactgctgataaatcacctattatccaacgtaccgaacaaggccaagtaagtctatccagcgacaaaggctttagaggtgctgtaacacaaaaagtgaacattgatcccactaaaaaatatgaggtcaagtttgatattgaaacaagtaacaaggctggacaagctttccttcgtattatggagaaaaaagataacaatacgcgactttggctttctgagatgaccagcggtactactaacaaacataccttaacaaagatatataacccaaagttagatgtctccgaggtgacacttgaactttattatgaaaaaggaacaggttctgttacttttgataatatatcaatgaaagcaaaaggccctaaagactcagagcatccacaacccgtcacaacacaaattgaaaaaagcgttaatacggctttaaacaaaaattacgtttttaataaagctgactaccaatacactctaaccaatccgtctcttgggaaaattgttggtggaatattgtatccaaacgctactggttcaacaactgttaaaatatctgataaatctggcaaaataattaaagaagtaccgttatcagttacagcttcaacagaagataactttacaaaactcctcgacaaatggaacgacgtgactattggtaatcatgtttacgatactaatgattcgaacatgcaaaagcttaatcagaaattagatgaaactaacgccaaaaacatcgaagctatcaaactggattctaatcgcactttcctttggaaagatttagataatctcaataattcagcacagttaaccgctacttatcgtcgtttggaagatttagctaaacaaatcaccaatccacactctactatttacaaaaatgaaaaagctattcgtactgtaaaagagagtctggcttggcttcatcaaaacttctacaatgttaataaagatatagaaggctctgccaattggtgggattttgaaatcggtgttcctcgctcaattacaggtaccctagctctcatgtataactacttcactgacgctgaaataaaaacttataccgacccaattgaacattttgttcctgatgcaggatttttccgtaaaacgcttgtcaatccatttaaagcccttggtggtaatctagtcgatatggggcgcgttaaaatcattgaaggtttacttcgtaaagacaatactattatcgaaaaaacttctcattctctaaaaaatctttttactactgctactaaagctgaaggcttctatgctgacggttcttacatcgaccatacgaatgttgcttatactggcgcctatggtaatgttctgatagatggtttgacacaattgctgcctatcattcaagaaactgactataaaatctctaatcaagaacttgatatggtttataaatggattaatcaatcatttttacctttaattgtaaaaggtgagttaatggatatgagtcgtggacgctcaattagtagagaggctgcttcttctcatgcggctgcagttgaagttctcagaggtttcctcagattggctaacatgtctaatgaagagcgaaacttagacctcaaatcaactattaaaacgattatcacttcaaataaattctacaacgtcttcaataacctcaaatcgtattccgatattgccaacatgaataagctgcttaatgacagtacagtcgctactaaacctttaaaaagtaatttatcaacctttaatagcatggaccgcttagcttattataatgccgagaaagactttggtttcgcactttcattacattctaaacgtaccctcaactatgaaggaatgaatgatgaaaatacacgtggttggtataccggagatggtatgttctatctttataatagtgatcaatctcattatagtaatcatttttggccaaccgtcaatccttataaaatggctggaacaactgaaaaagatgctaagcgtgaagatacgactaaggatttcatgagcaaacatagcaaagacgctaaagaaaaaaccggtcaagttacaggagcatctgactttgttggttccgtcaaacttaatgatcactttgctcttgccgctatggactttactaactgggatcgcaccttaacagcacaaaaaggttgggttatcttaaatgataagattgtctttttaggtagcaacatcaagaatactaacggcattggaaatgtttctacaacaattgatcaacgaaaagacgattctaaaacaccttatactacatacgtcaatggaaaaactgttgatttaaagcaagcaagttctcaacaatttacagatacaaagagtgtctttttagaatcaaaagaacctggtcgcaatattggttatatcttctttaaaaatagcactattgatattgaacgcaaagagcaaacaggtacttggaacagcattaatcgtacttctaaaaatacctcaatcgttagcaatccttttatcactataagccaaaagcatgacaacaaaggtgatagctatgattacatgatggttccaaacattgatcgcacaagttttgataaattagccaatagcaaagaagtagaattactagaaaacagttcaaaacaacaagttatctatgataaaaacagtcaaacttgggctgttatcaaacacgataatcaagagagtctcattaacaatcaattcaaaatgaataaagcgggactttacctagtacaaaaagttggtaatgactatcaaaatgtctattaccaacctcaaagcatgacaaaaacagaccaattagctatc

SEQ ID NO: 2682 - protein, 1072 aa, Streptococcus agalactiae
MEIKKKHRIMLYSALILGTILVNNSYQAKAEELTKTTSTSQIRDTQTNNVEAPQTESTTVKETSTTTTQQDLSNSTASTATATATPSTMKQVVDNQTQNKELVKNGDFNQTNPVSGSWSHTGAREWSAWIDKENTADKSPIIQRTEQGQVSLSSDKGFRGAVTQKVNIDPTKKYEVKFDIETSNKAGQAFLRIMEKKDNNTRLWLSEMTSGTTNKHTLTKIYNPKLDVSEVTLELYYEKGTGSVTFDNISMKAKGPKDSEHPQPVTTQIEKSVNTALNKNYVFNKADYQYTLTNPSLGKIVGGILYPNATGSTTVKISDKSGKIIKEVPLSVTASTEDNFTKLLDKWNDVTIGNHVYDTNDSNMQKLNQKLDETNAKNIEAIKLDSNRTFLWKDLDNLNNSAQLTATYRRLEDLAKQITNPHSTIYKNEKAIRTVKESLAWLHQNFYNVNKDIEGSANWWDFEIGVPRSITGTLALMYNYFTDAEIKTYTDPIEHFVPDAGFFRKTLVNPFKALGGNLVDMGRVKIIEGLLRKDNTIIEKTSHSLKNLFTTATKAEGFYADGSYIDHTNVAYTGAYGNVLIDGLTQLLPIIQETDYKISNQELDMVYKWINQSFLPLIVKGELMDMSRGRSISREAASSHAAAVEVLRGFLRLANMSNEERNLDLKSTIKTIITSNKFYNVFNNLKSYSDIANMNKLLNDSTVATKPLKSNLSTFNSMDRLAYYNAEKDFGFALSLHSKRTLNYEGMNDENTRGWYTGDGMFYLYNSDQSHYSNHFWPTVNPYKMAGTTEKDAKREDTTKDFMSKHSKDAKEKTGQVTGASDFVGSVKLNDHFALAAMDFTNWDRTLTAQKGWVILNDKIVFLGSNIKNTNGIGNVSTTIDQRKDDSKTPYTTYVNGKTVDLKQASSQQFTDTKSVFLESKEPGRNIGYIFFKNSTIDIERKEQTGTWNSINRTSKNTSIVSNPFITISQKHDNKGDSYDYMMVPNIDRTSFDKLANSKEVELLENSSKQQVIYDKNSQTWAVIKHDNQESLINNQFKMNKAGLYLVQKVGNDYQNVYYQPQSMTKTDQLAI

SEQ ID NO: 2683 - DNA, 2484 bp, Streptococcus pyogenes
gtggtatatttttacttagtaaatcaatttacttttattatctcatttttatattggaggaatttatcagtgaatacttatttttgcacacaccataaacaattactactttattcaaacctattccttagctttgctatgatgggccaaggaactgccatttatgccgatacactgacttcaaattcagaacctaataatacttactttcaaacgcaaacgctcactactacagatagcgaaaaaaaggtagtacagccacaacaaaaagactactatactgaattgttagaccaatggaacagtattatcgcaggcaacgatgcttatgataaaaccaatcctgacatggtcacttttcataataaagctgaaaaggatgctcaaaacattattaaaagctatcaagggcctgaccacgaaaatagaacttacctttgggaacatgcaaaggattattccgcttctgctaatatcacgaaaacttaccgcaatattgaaaaaatagcaaaacagatcactaatcctgaatcatgctattatcaagatagtaaagctattgctattgtaaaagacggtatggccttcatgtatgaacacgcttataatctagatcgtgaaaatcatcaaacaactggaaaagaaaacaaagaaaattggtgggtttatgaaattggaactcctcgtgctattaataataccttatccttgatgtatccttattttactcaagaagaaattcttaaatacacagctccaatcgaaaaatttgtgcctgaccctactcgttttagggttcgcgctgccaatttttcaccttttgaagccaatagcggaaatttaattgatatggggcgtgttaaactcatttccggtattcttcgtaaagatgatctcgaaattagtgatacaatcaaagcaattgagaaagttttcacgctagttgatgaaggaaatggtttttaccaagacggttctttaattgatcacgtggttactaacgctcaaagtccactttataaaaaaggcattgcttacactggagcttacggtaatgtgcttatagatggcttatcgcaattaattcctattattcaaaaaacaaagtctcctataaaagcggataaaatggctactatctatcattggattaaccattcttttttccctatcatcgttcgtggagaaatgatggatatgactcgagggcgttctatcagtcgttttaatgcccaatctcatgttgctggcattgaagcacttcgtgctattttacgtattgctgacatgtctgaagagcctcaccgtttggcacttaaaacacgtataaaaacactcgtcacacaagggaatgctttttacaatgtctatgataatttgaaaacctatcacgatatcaaacttatgaaagaactactaagtgatacttctgttccagtccaaaaacttgatagttacgtagctagtttcaatagtatggataaattggcactatataataataaacacgattttgcttttggcctatcaatgttttcgaatcgaactcaaaattatgaagctatgaataatgaaaatcttcatggctggtttacttctgatggaatgttttacctatacaataacgatttaggacactacagtgaaaactattgggcaacggtaaatccctaccgcttacctggaaccacagaaactgagcaaaaaccactagagggaactcctgagaatattaaaacgaactatcaacaagttggcatgactggtctctctgatgacgcttttgttgcaagtaaaaaacttaataacacaagtgctctagctgctatgaccttcactaattggaataaaagcctcaccctcaataaagggtggtttatcttaggaaacaaaataatctttgttggtagcaatatcaaaaaccaatcatctcacaaggcgtatacaactattgaacaacgaaaagaaaatcaaaagtacccttactgttcttatgttaacaatcaacccgttgacttgaataatcagctagttgattttacaaacactaaaagtattttccttgaaagtgatgatcccgctcaaaatattggttactacttcttcaagccaacaacacttagcataagtaaggcacttcaaacagggaaatggcaaaacataaaagctgatgacaaatcaccagaagccatcaaagaagtttcaaatacctttatcactatcatgcaaaaccatactcaagatggcgatcgttatgcctatatgatgcttccaaatatgactcgtcaagaatttgaaacctatattagcaagcttgatatcgacttattagaaaacaatgacaaactggccgctgtctacgatcatgatagtcaacagatgcacgtcattcactatggaaaaaaagcaacgatgttttcaaatcataatctttctcatcaaggcttttatagttttcctcatcctgtcaggcaaaatcaacaa

SEQ ID NO: 2684 - protein, 828 aa, Streptococcus pyogenes
VVYFYLVNQFTFIISFLYWRNLSVNTYFCTHHKQLLLYSNLFLSFAMMGQGTAIYADTLTSNSEPNNTYFQTQTLTTTDSEKKVVQPQQKDYYTELLDQWNSIIAGNDAYDKTNPDMVTFHNKAEKDAQNIIKSYQGPDHENRTYLWEHAKDYSASANITKTYRNIEKIAKQITNPESCYYQDSKAIAIVKDGMAFMYEHAYNLDRENHQTTGKENKENWWVYEIGTPRAINNTLSLMYPYFTQEEILKYTAPIEKFVPDPTRFRVRAANFSPFEANSGNLIDMGRVKLISGILRKDDLEISDTIKAIEKVFTLVDEGNGFYQDGSLIDHVVTNAQSPLYKKGIAYTGAYGNVLIDGLSQLIPIIQKTKSPIKADKMATIYHWINHSFFPIIVRGEMMDMTRGRSISRFNAQSHVAGIEALRAILRIADMSEEPHRLALKTRIKTLVTQGNAFYNVYDNLKTYHDIKLMKELLSDTSVPVQKLDSYVASFNSMDKLALYNNKHDFAFGLSMFSNRTQNYEAMNNENLHGWFTSDGMFYLYNNDLGHYSENYWATVNPYRLPGTTETEQKPLEGTPENIKTNYQQVGMTGLSDDAFVASKKLNNTSALAAMTFTNWNKSLTLNKGWFILGNKIIFVGSNIKNQSSHKAYTTIEQRKENQKYPYCSYVNNQPVDLNNQLVDFTNTKSIFLESDDPAQNIGYYFFKPTTLSISKALQTGKWQNIKADDKSPEAIKEVSNTFITIMQNHTQDGDRYAYMMLPNMTRQEFETYISKLDIDLLENNDKLAAVYDHDSQQMHVIHYGKKATMFSNHNLSHQGFYSFPHPVRQNQQ

SEQ ID NO: 2685 - DNA, 480 bp, Streptococcus agalactiae
atgactaaattagcaacaatttgttacattgacaatggcaaggaattacttctattgcaccgcaacaaaaaagagaatgatgttcatgagggaaagtggatctcggtaggtggtaaactggaggcaggtgaaactcctgatgaatgtgctaagcgtgaaattctagaagaaacccatttaacggtaaaaaaaatggattttaaaggagtcatcacttttcctgaatttacgccaggtcatgattggtatacctatgtctttaaagtaacagattatgaaggagagttaatttcagatgatgaatcacgagaaggaactttagaatgggtaccatatgatcaagttctttctaagccaacgtggcaaggagattacgaaatttttaaatggattttagaagatgttcctttcttttctgctaagtttgtttatgatgaacaccaaaatttaattgaaaagacggttaatttttatgaaaaa

SEQ ID NO: 2686 - protein, 160 aa, Streptococcus agalactiae
MTKLATICYIDNGKELLLLHRNKKENDVHEGKWISVGGKLEAGETPDECAKREILEETHLTVKKMDFKGVITFPEFTPGHDWYTYVFKVTDYEGELISDDESREGTLEWVPYDQVLSKPTWQGDYEIFKWILEDVPFFSAKFVYDEHQNLIEKTVNFYEK

SEQ ID NO: 2687 - DNA, 474 bp, Streptococcus pyogenes
atgactcaattagcaaccatttgttacattgataatggcgattctttgctattattacaccgcaataaaaaagaaaatgatgtccacaaaggcaagtggatttcagttgggggtaagctcgaggctggtgagaccccagatgagtgtgcccgtcgtgagattttagaggaaacccatttgactgttacagagatggcctttaaaggaatcattacttttccagaatttacccctggtcatgactggtatacctatgtttttaaagtaacaggatttgaaggagacctcatttcagatgaagagtcacgagaaggaaccttggaatgggtaccttacgatcaagtgttggaaaagccaacttgggaaggtgattatgacatttttaaatggattttagaagaccgttcttttttctctgccaaatttacctatgaccaaaacaaccaactcatggataaatctgtgaccttttat

SEQ ID NO: 2688 - protein, 158 aa, Streptococcus pyogenes
MTQLATICYIDNGDSLLLLHRNKKENDVHKGKWISVGGKLEAGETPDECARREILEETHLTVTEMAFKGIITFPEFTPGHDWYTYVFKVTGFEGDLISDEESREGTLEWVPYDQVLEKPTWEGDYDIFKWILEDRSFFSAKFTYDQNNQLMDKSVTFY

SEQ ID NO: 2689 - DNA, 480 bp, Streptococcus agalactiae
ttgaaaagacggttaatttttatgaaaaatagagattttagggttagagaacagctcgaaacattcggagtcagagtttctgctttaatcatagaaaatcaaaaactgctattaatatatgctcctcatctcgataaatactatttgccaggtggggcgcttcaagttggagaagatagcaataaggctgttgcgagagaagtacttgaggaaataggtcttcacagccaagttggtgatttagcctatattattgagaatcagtttaatattaagagacatcattatcactcagttgaatttttatattttgttaatctcttgggtcaggcgccagaatctatcaaagaaggaacgcataagcgacattttgtatggcttccaataaaagaattaacaaaaattgattgtaatcctaattttttagcacaggatttgatagaatggccaggtcatgttgtgcataaaattgttcaaaat

SEQ ID NO: 2690 - protein, 160 aa, Streptococcus agalactiae
MKRRLIFMKNRDFRVREQLETFGVRVSALIIENQKLLLIYAPHLDKYYLPGGALQVGEDSNKAVAREVLEEIGLHSQVGDLAYIIENQFNIKRHHYHSVEFLYFVNLLGQAPESIKEGTHKRHFVWLPIKELTKIDCNPNFLAQDLIEWPGHVVHKIVQN

SEQ ID NO: 2691 - DNA, 315 bp, Streptococcus pyogenes
ttgattgttagaaatggtaagaattttttaactagagatgcagatgaccaatattacaccattggtggtacaagtttggtaggtgaaaaaacgcatgaaactgttttacgtgaaaccttagaggaagttggtattcgagctaaggttaatcaactggcttttatggttgagaatcattttgatatcgatgatgttttctggcataatattgaatttcattatttggtaagccccttagaagaccctaaactagaaatgatagagaatgcaagcgacaggtttgtgaatggattccaatcaatcaactggatcaaa

SEQ ID NO: 2692 - protein, 105 aa, Streptococcus pyogenes
LIVRNGKNFLTRDADDQYYTIGGTSLVGEKTHETVLRETLEEVGIRAKVNQLAFMVENHFDIDDVFWHNIEFHYLVSPLEDPKLEMIENASDRFVNGFQSINWIK

SEQ ID NO: 2693 - DNA, 1188 bp, Streptococcus agalactiae
atgaatcgaccatcagaaaaagaatttaaaaatagtttgttttttaaatggatcttaaataatcaagcagttattgctctcatgattacctttttggtatttttaacgatttttatttttaccaaaatctcttttatgtttaaacctgtgtttgattttcttgctgtgctgatattgccgcttgtaatttctggcttgctttattacctattaaaacctatggttacatttttagagaagcggggaattaagcgtgtaacagcgatattatcagtttttactattataatccttctgttaatttgggcaatgtctagttttattcccatgatgagtaatcaattacgccattttatggaagatctcccttcatatgtgaataaagtgcaaatggaaacaagttcgtttatagatcacaacccttggttaaaatcttataaaggggaaatatcgagcatgttatctaatatcagtagccaagcggtctcttatgctgaaaaattttcaaagaatattttagattgggcaggaaatttagctagtacagttgcacgtgtgacagtagcaacaatcatggctccctttattttgttttatcttttaagagatagtcgcaacatgaagaatggtttcttaatggttttaccaaccaaactacgccaaccaactgatcgtattttgcgagaaatgaatagtcaaatgtcagggtatgtgcaaggacaaatcattgttgctattactgttggtgttattttttcaataatgtatagtattataggccttagatatggcgtgacattagggattattgccggtgtgttaaatatggttccctatttgggaagttttgtcgcccaaattccagtgtttatcttagcgcttgtcgcaggacctgttatggttgttaaagttgcgattgtttttgttattgagcaaactctagaaggacgctttgtctcacccttggttttaggtaataaacttagcattcatccaattacaattatgtttattttattaacctctggagcgatgtttggtgtttggggagtattcctcagtattccgatttatgcatctatcaaagttgttgttaaagaattgtttgattggtacaaagctgtcagtgggctatatacagtagatgttgttactgaagaaagaagtgaagaagttaaaaatgttgaa

SEQ ID NO: 2694 - protein, 396 aa, Streptococcus agalactiae
MNRPSEKEFKNSLFFKWILNNQAVIALMITFLVFLTIFIFTKISFMFKPVFDFLAVLILPLVISGLLYYLLKPMVTFLEKRGIKRVTAILSVFTIIILLLIWAMSSFIPMMSNQLRHFMEDLPSYVNKVQMETSSFIDHNPWLKSYKGEISSMLSNISSQAVSYAEKFSKNILDWAGNLASTVARVTVATIMAPFILFYLLRDSRNMKNGFLMVLPTKLRQPTDRILREMNSQMSGYVQGQIIVAITVGVIFSIMYSIIGLRYGVTLGIIAGVLNMVPYLGSFVAQIPVFILALVAGPVMVVKVAIVFVIEQTLEGRFVSPLVLGNKLSIHPITIMFILLTSGAMFGVWGVFLSIPIYASIKVVVKELFDWYKAVSGLYTVDVVTEERSEEVKNVE

SEQ ID NO: 2695 - DNA, 1179 bp, Streptococcus pyogenes
atgcccttaatacctgaaaagtctagaacagatagcttattttacaaatggtttttaaataatcaagctaccatggctttagtaataacacttttagcctttttaacgatttttgtttttactaaaatctcttttttatttatgccagtgatttctttttttgcggtcatcatgttgcccttggttatttcgaccattctgtattatctgaccaaacccttagttgaccttattaatcacttgggcccgaatcgtaccacctctatttttattgtttttggtttgattaccttactttttgtctgggcgatttcaggctttgttcccatggtacagacccaacttaccagttttattgaggatctgcccaaatacgtgggcaaggtcaatgaagaagccaataaacttcttgaaaatgaatggttagtcagctataagccccaactccaagacatgcttacccatacaagtcaaaaggctttggattacgcgcaaagtttttcaaaaaatgctattgactgggctggtaattttgctggtgccattgctcggattaccgtggctattattatttcgccctttattctcttttattttttacgagacagtagccacatgaaaaatggccttgtgaatgtcttacctctcaaattacgggtgcctatggttcgagtcttgggagatattaacaagcaattatcaggctatgtgcaagggcaggttacggttgcaattgttgtcggctttatgttttctatcatgtttagccttgtgggactgaaatatgccatcacttttgggattattgctggctttcttaacatgataccttacttaggaagtttccttgccatgatacctgttgtgattatggctatggtacaaggcccatttatgttggttaaggtgcttgttatctttatgattgagcaaaccatcgaagggcgttttgtagcaccgcttgttttgggaaataagctgagcattcatcctattaccattatgttcttgttattgactgcaggctctatgtttggtgtctggggtgttttccttgtcatcccaatctacgcttctgtcaaagttgtgattaaagaattatttgactggtacaaaaaagttagcggtttgtatgacgaagaagtattggtgattgaggaggttaaggaccatgttaaa

SEQ ID NO: 2696 - protein, 393 aa, Streptococcus pyogenes
MPLIPEKSRTDSLFYKWFLNNQATMALVITLLAFLTIFVFTKISFLFMPVISFFAVIMLPLVISTILYYLTKPLVDLINHLGPNRTTSIFIVFGLITLLFVWAISGFVPMVQTQLTSFIEDLPKYVGKVNEEANKLLENEWLVSYKPQLQDMLTHTSQKALDYAQSFSKNAIDWAGNFAGAIARITVAIIISPFILFYFLRDSSHMKNGLVNVLPLKLRVPMVRVLGDINKQLSGYVQGQVTVAIVVGFMFSIMFSLVGLKYAITFGIIAGFLNMIPYLGSFLAMIPVVIMAMVQGPFMLVKVLVIFMIEQTIEGRFVAPLVLGNKLSIHPITIMFLLLTAGSMFGVWGVFLVIPIYASVKVVIKELFDWYKKVSGLYDEEVLVIEEVKDHVK

SEQ ID NO: 2697 - DNA, 1260 bp, Streptococcus agalactiae
atgttgttactgaagaaagaagtgaagaagttaaaaatgttgaatagtgaaaaaatgattgtttctatccaaaatcaggatttagaacatgctaacaagtatttcgaaaaagcgttgaaaaatgatcctgaggaagtcttgttggaactaggagcttatttggagagtattggttttttaccccaagcaaaacgtctctatgatcaaatccgaccaaattatccagaagttgctatcaatttagctcaaattgttgccgaagatggagatattgaacaagcattcttatacttagattatatctcagaagatagtcaagagtatgtttcagccctccttgttatggctgacttatatgatatggaaggcttgactgatgttgcgcgtgaaaagcttttgctagccagcaaacttagcgatgacccattggttacatttggtttagctgaaatgaaccttagtttggaacattatcaagaagcgatagaaggatatgcctcacttgacaatcgagaaatcttagaaacgactggagtttcaacttatcagcgtattggtaaatcctacgctattatggggaaatttgatgcagctatcgaatttttagaaaaagccgttgacattgagtatgatgatttaacagtttttgagttagcaacaatcctttatgatcaagaagaatatcaaaaagctaacctttattttaaacagttggatactattaatccagactttgctggctatgaatatatctatggtttatctcttcgtgaggagcataaatctgaagaagctttacgtctagttcagcaaggtattcgtaaaaatagttttgatggtcaacttctcttactagcctcacaattatcgtatgaattacatgatgttcattcgtcggagtcttatttgaaacaagctgaaaaagtttctgaaaatcaagatgaaattgttatgagattgtcaaatttgtatcttgaagaagagcggtttgaggaagtcttggaattagacaatgataatttagaaaatatccttgcaaaatggaatatcgctaaagcacacaaggctttagaaatggatgatagtgtagactattatcaatctttgtataatgatttaaaagataatccagaatttttacaagattatgcttacattttgagagaatttggttaccttgataaggcacaagaagtaggaaaggcttatttaaaattagttccagatgatatagagatgtcagaatgggtgaataacatt

SEQ ID NO: 2698 - protein, 420 aa, Streptococcus agalactiae
MLLLKKEVKKLKMLNSEKMIVSIQNQDLEHANKYFEKALKNDPEEVLLELGAYLESIGFLPQAKRLYDQIRPNYPEVAINLAQIVAEDGDIEQAFLYLDYISEDSQEYVSALLVMADLYDMEGLTDVAREKLLLASKLSDDPLVTFGLAEMNLSLEHYQEAIEGYASLDNREILETTGVSTYQRIGKSYAIMGKFDAAIEFLEKAVDIEYDDLTVFELATILYDQEEYQKANLYFKQLDTINPDFAGYEYIYGLSLREEHKSEEALRLVQQGIRKNSFDGQLLLLASQLSYELHDVHSSESYLKQAEKVSENQDEIVMRLSNLYLEEERFEEVLELDNDNLENILAKWNIAKAHKALEMDDSVDYYQSLYNDLKDNPEFLQDYAYILREFGYLDKAQEVGKAYLKLVPDDIEMSEWVNNI

SEQ ID NO: 2699 - DNA, 1263 bp, Streptococcus pyogenes
ttgaggaggttaaggaccatgttaaatagtgaaaaaatgattgcttccttggatcagcaagacctagcgcacgctgaaaaatatttccaaaaagctttaaaagaagatgatgcagatagtttaatcgccttaggagaatacttagaaagtataggttttttgccacatgccaagcgtatttatttgcagttagctgatgattacccagaactcaatataaatttagctcagattgcagcagaagacgacgccattgaagaagctttcttgtatttggataaggtttcaaaagatagccccaattatttgtcagctctcttagtaatggctgacctctatgacatggaaggactgacagaggtggcgcgtgaaaaattgcttcaagcagtgggcatcagcccagagccattggtcatttttggtttggcagaaattgacatgtccttgcagcattttaaagaagctattgattactatgcacagttagacaatcgtcaaatccttgaattgacaggtatttccacttatcaacgcattggacgagcctatgctagcttagggaaatttgaggcagccatcgaattcttggaaaaggccgtggccattgaatacgaagatgaaactgtttttgaattggcgaccctcatgtatgaccaagaaaattatcaaaaagccaatctttactttaaacagttggaaaccatcaatccagattatccaggttatgaatatggttatgctttgagtcttcatgaagagcataagacgtcagaagctttgcgcttggttcaacagggcctacgtaaaaatgcatttgacagtcaattattattactagcatcgcagctttcttatgaattacacgataggcagaatgctgaaaattacctgcttcaagcaaaggaagtagctgttgatgacgaagagattctcatgcgtttagtgaccctttattttgatgccgagcgttttgaggaggttattgctcttaatcgtgagacgattgataatgtcttaaccaaatggaccattgcaaaggcttaccacgccttggaacaagaagaagttgccttggctctttataatgagatttcggctgatttggcagaaaatccagagtttttacaggattatgcctatttattaagggagtttggccagtttcacaaggctatccaaatggctaccgcttacctcagacaagtgcctgatgatgtgaatatgcaagactttcttgaccatatcaagcaccaacaatcagaa

SEQ ID NO: 2700 - protein, 421 aa, Streptococcus pyogenes
LRRLRTMLNSEKMIASLDQQDLAHAEKYFQKALKEDDADSLIALGEYLESIGFLPHAKRIYLQLADDYPELNINLAQIAAEDDAIEEAFLYLDKVSKDSPNYLSALLVMADLYDMEGLTEVAREKLLQAVGISPEPLVIFGLAEIDMSLQHFKEAIDYYAQLDNRQILELTGISTYQRIGRAYASLGKFEAAIEFLEKAVAIEYEDETVFELATLMYDQENYQKANLYFKQLETINPDYPGYEYGYALSLHEEHKTSEALRLVQQGLRKNAFDSQLLLLASQLSYELHDRQNAENYLLQAKEVAVDDEEILMRLVTLYFDAERFEEVIALNRETIDNVLTKWTIAKAYHALEQEEVALALYNEISADLAENPEFLQDYAYLLREFGQFHKAIQMATAYLRQVPDDVNMQDFLDHIKHQQSE

SEQ ID NO: 2701 - DNA, 1680 bp, Streptococcus agalactiae
atgacagaatcacataatcaatatggggctgacttaattgtcgatagcctcattaatcatgatgtcaaatatgtttttggtatcccaggagctaagattgaccgcgtatttgacactctagaagataaaggtccagagttaattgttgctcgtcatgagcagaacgcgacttttatggctcaggctgtcgggcgtattacgggagaaccaggagttgttattgcaactagtggacctgggatctcgaacttggcaacagggttagttactgcgacagatgaaggtgatgctgttctagcaattggtggacaggttaagcgaggagatttattgaaacgtgctcatcaatcaatgaataacgttgctatgctggaacctattacaaaatattctgctgaggttcatgaccctaatactttgtcagaaactgttgcaaacgcctatcgtcttgctaaatctggtaaaccaggagcaagttttatctctattcctcaagacgttacagacagtccagtctcagtaaaagcaatcaaacctcttagtgcacctaaattgggttcggcatctgttttagatattaattatttagcgcaagctattaacaatgctgttttaccggtactgttattaggaaatggcgcatcttcagagggagtaactgctgccgtacgtcgacttcttgatgctgttaaactaccagtagtagaaactttccaaggtgcgggtattgtgtcacgtgagctcgaggatgaaacattctttggtcgtgtaggcctcttccgtaatcaacctggagatatgcttttgaagcgtgcagacctagttattgctatcgggtatgaccctattgaatatgaggcgcgtaactggaatgctgaaatttctgctcgtattattgttattgacgttgaacaagcagaaattgatacgtatttccaacccgagcgagaactgattggagacatggcacatacacttgatttacttttaccagctattaaaggatatgaattgccagaaggttcaaaagagtatttgaaaggtcttcgtaataatattgaaaacgttagcgatgttaaatttgatcgtgactcagctcatggacttgttcatcctcttgatctcattgatgtactccaagaaaataccaccgatgacatgactgttacagttgatgtgggaagccattatatttggatggctcgctactttaaatcatatgaagcgcgtcacttgcttttctcaaacggaatgcaaacattaggagttgctctaccttgggcaatttctgcggctcttttgcgtcccaacacaaaagttatttcagtttctggtgatggtggcttcttattctcagctcaagagttagaaactgcagttcgtcttcatctaccaattgttcacattatttggaacgatggaaaatataacatggttgaattccaagaagaaatgaagtatgggcgttcttcaggtgttgactttggaccagttgattttgtaaaatacgctgaaagtttcggtgctaaaggttaccgtgtagacagcaaagacagttttgaagaaacactcaaacaagctctaatcgatgctgaaaatggaccagtgttgattgatgtgcctattgactataaagataacgtgacactaggtgaaacaatcttacctgacgagttctac

SEQ ID NO: 2702 - protein, 560 aa, Streptococcus agalactiae
MTESHNQYGADLIVDSLINHDVKYVFGIPGAKIDRVFDTLEDKGPELIVARHEQNATFMAQAVGRITGEPGVVIATSGPGISNLATGLVTATDEGDAVLAIGGQVKRGDLLKRAHQSMNNVAMLEPITKYSAEVHDPNTLSETVANAYRLAKSGKPGASFISIPQDVTDSPVSVKAIKPLSAPKLGSASVLDINYLAQAINNAVLPVLLLGNGASSEGVTAAVRRLLDAVKLPVVETFQGAGIVSRELEDETFFGRVGLFRNQPGDMLLKRADLVIAIGYDPIEYEARNWNAEISARIIVIDVEQAEIDTYFQPERELIGDMAHTLDLLLPAIKGYELPEGSKEYLKGLRNNIENVSDVKFDRDSAHGLVHPLDLIDVLQENTTDDMTVTVDVGSHYIWMARYFKSYEARHLLFSNGMQTLGVALPWAISAALLRPNTKVISVSGDGGFLFSAQELETAVRLHLPIVHIIWNDGKYNMVEFQEEMKYGRSSGVDFGPVDFVKYAESFGAKGYRVDSKDSFEETLKQALIDAENGPVLIDVPIDYKDNVTLGETILPDEFY

SEQ ID NO: 2703 - DNA, 762 bp, Streptococcus agalactiae
gtgaaacaatcttacctgacgagttctactaagacgaggtctaatatgtcagaaacagttaaattatttcaatacagtaccttgagttcactgatggcaggattgtacaaaggcagtctaactatcggagaattattaactcacggtgacttaggaatcggtactgttcatatgattgatggtgaattgattgtattggatgggaaagcttatcaagctattggtacagatggtaaagcagagattatccaattatcagatgatgtgacagtaccctatgcagcggttttaccacaccatatccaaaaacaatttgatatcaatgctgagatagataataaggatttggaagagatgattctaaaaaactttgaaggtcaaaatctctttaagtctttaaaaatcaaaggaacgttttcaagaatgcacgttcgtatgattccaaaatctccacaacataaacgttttgcagatattgcatctaatcagccagaatttaccagagagaatgtatctggtacgttggttgggatttggacgccggaattatttcatggtgtgggggtaaaagggttccatgtccactttatttcagacgatttaactttcggtgggcatgttatggattactcgctcacacaaggaaaagttgaaattggaaaggttgaccaacttgaccaatgtttcccaactcaagatcaagaatttttgaaagctaactttgacctacaaaagcttagagaagatattgatttaagtgaa

SEQ ID NO: 2704 - protein, 254 aa, Streptococcus agalactiae
MKQSYLTSSTKTRSNMSETVKLFQYSTLSSLMAGLYKGSLTIGELLTHGDLGIGTVHMIDGELIVLDGKAYQAIGTDGKAEIIQLSDDVTVPYAAVLPHHIQKQFDINAEIDNKDLEEMILKNFEGQNLFKSLKIKGTFSRMHVRMIPKSPQHKRFADIASNQPEFTRENVSGTLVGIWTPELFHGVGVKGFHVHFISDDLTFGGHVMDYSLTQGKVEIGKVDQLDQCFPTQDQEFLKANFDLQKLREDIDLSE

SEQ ID NO: 2705 - DNA, 1653 bp, Streptococcus agalactiae
atgtcttttgatggattttttttacatcacctcacaaatgaattacaagaacagattgaaaaaggacgtatccaaaaagttaaccaaccttttgaccatgaattggtattaacaatacgcaacaatcgtcgcaactataaactactcctatctgctcatcctgtatttggacgtatccaaactaccgaagcaaatttccaaaatcctcaaaatccaaatacttttacaatgatcatgagaaagtatttgcaaggtgcagtgattgaaaccattcaacaaattgaaaatgaccgtatattagaaatcgtcgtgtctaataaaaacgaaatcggtgatcacattaaagcaacacttgttgttgaaatcatgggaaaacacagtaacattatcttgattgataaaaatgaacataaaattattgaatcaattaagcatgttggtttctcacaaaactcctatcgtactatccttcctggttcgacttacattgccccacccaaaacaaaagcaatcaatccttttgatatttctgatcaaaccctatttgagctgcttcaaaccaatgatctaagccctaaaaacctccaacagctcctccaaggtttaggacgcgatactgcgctagaattatctcactgtttgaaagacaataaacttaacgattttcgtcaattcttttcgagagaatattatcccagcctaacagaaaaatccttttccgctgtccaattctcaagcagtcacgaaacatttcagtctcttggacaattgttagattattactaccaagagaaggctgaaaaagatcgcatagcacagcaagctagtgacctcatccaccgtgttcaaagtgagttagagaaaaatatcaaaaaactagctaagcaacaagacgaacttctagctactgaaaatgcagaggagtttcgccaaaaaggagagcttctaactacctatctctctatggtaccaaataatcaagatgtcgttgtgcttgataattattacaccaaccaaaccattgagatttcacttgatcgagctttaacacccaaccaaaatgcccaacgctactttaaaaaatatcaaaaattaaaagaagctgtaaaacatttaaaaggaattatttcagatacggaaaatacaatcacctaccttgaatctgttgaaacatcgctaaatcatgcttctatggaagatatcaatgatattcgtgaagaacttgttgaaactggatttattaagcgacgcgcacatgataaacaacataagcgtaaaaaacctgaacaatatttagcatccgatggcaagactattattatggtgggacgtaataatctccaaaatgacgagttaacatttaaaatggctcgtaaaggggagttgtggtttcatgccaaggatatccccggaagccatgtgttaattcgggataacctcaatccaagtgacgaggttaagacagatgccgccgagttagctgcttattactctaaagctcgtctctccaatcttgttcaagtagacatgattgaagcaaaaaaactcaataaaccaagtggtactaagccaggttttgtaacttacactggtcaaaaaaccttacgagtcactcccacacaagaaaaaatagatagccttaaactaaaaaaa

SEQ ID NO: 2706 - protein, 551 aa, Streptococcus agalactiae
MSFDGFFLHHLTNELQEQIEKGRIQKVNQPFDHELVLTIRNNRRNYKLLLSAHPVFGRIQTTEANFQNPQNPNTFTMIMRKYLQGAVIETIQQIENDRILEIVVSNKNEIGDHIKATLVVEIMGKHSNIILIDKNEHKIIESIKHVGFSQNSYRTILPGSTYIAPPKTKAINPFDISDQTLFELLQTNDLSPKNLQQLLQGLGRDTALELSHCLKDNKLNDFRQFFSREYYPSLTEKSFSAVQFSSSHETFQSLGQLLDYYYQEKAEKDRIAQQASDLIHRVQSELEKNIKKLAKQQDELLATENAEEFRQKGELLTTYLSMVPNNQDVVVLDNYYTNQTIEISLDRALTPNQNAQRYFKKYQKLKEAVKHLKGIISDTENTITYLESVETSLNHASMEDINDIREELVETGFIKRRAHDKQHKRKKPEQYLASDGKTIIMVGRNNLQNDELTFKMARKGELWFHAKDIPGSHVLIRDNLNPSDEVKTDAAELAAYYSKARLSNLVQVDMIEAKKLNKPSGTKPGFVTYTGQKTLRVTPTQEKIDSLKLKK

SEQ ID NO: 2707 - DNA, 1728 bp, Streptococcus pyogenes
ttgcaagctctttcgtccatatttttagtcaagtatttgtggtataatgaagagattagaattcagaaaggagaaaccatgtcttttgacggctttttcttacaccatttaaccaacgaattaaaagagaacttgctttacggtcgtatccaaaaggtcaatcaaccctttgaacgggaacttgtcttaaccattcgtaaccatcgcaagaattataaattgctattgtctgcccatcctgtttttggaagggtacaaatcacccaagcagactttcaaaatcctcaggtacctaatacctttaccatgattatgcgtaaatacctccagggtgcagtcattgagcagttagaacagattgataatgaccgcattatcgaaatcaaggtatctaataaaaatgaaatcggagatgctattcaggcaaccctaatcattgaaatcatggggaagcacagtaatatcatcttggtggaccgtgcagaaaataaaatcatcgaatccattaaacatgttggtttttcacaaaactcttaccgcaccattttacctggctctacctacattgagcctcctaaaacagctgctgttaatccttttacaattacagatgtgcctctatttgaaatcctccaaacacaagaactaacagttaaaagcttgcaacagcattttcaaggtttggggcgagacaccgcaaaagagttggccgagcttctgaccacagacaaattaaaacggttccgtgagttttttgctagacctactcaggcaaatctgaccacagcttcttttgcgcctgttcttttctcagatagtcatgcgacgtttgagactttgtctgacatgcttgaccacttttatcaagacaaggctgagcgtgaccgtatcaatcagcaagccagtgatttgatccaccgtgtgcaaactgaactggacaaaaatcgcaacaagctaagtaagcaagaagctgagctgctagccactgaaaatgctgagttgttccgtcaaaaaggagaattattgaccacctacctcagtctggtcccaaacaaccaagactctgtgattttagacaattattatacaggggaaaaaattgagattgccttagacaaggctctgacaccaaatcaaaatgctcaacgttattttaaaaaataccaaaagctaaaagaagctgtcaaacacttatctggattgattgccgataccaagcaaagtattacttactttgagagcgtagactacaatttatctcaagcaagtatcgacgacatcgaagatattcgcgaagaattatatcaggctggctttttgaaaagtcgccaaagagacaaacgccataaacgtaaaaagcctgagcagtacctggcttcagatggaacaaccattctcatggtgggacgcaataacttgcaaaatgaagaactcacctttaaaatggctaaaaaaggagaactctggttccatgctaaggatatccctggaagtcatgtcatcatcaaagacaatcttgacccaagtgacgaggttaaaactgatgctgccgaactagctgcttattattcgaaagctaggttatcaaatctcgttcaggtcgatatgattgaagctaaaaaattacacaaacctagtggcgccaagccaggatttgtgacttatactggtcaaaaaactttacgggttactcctgaccaagccaaaattctctctatgaaattatcc

SEQ ID NO: 2708 - protein, 576 aa, Streptococcus pyogenes
LQALSSIFLVKYLWYNEEIRIQKGETMSFDGFFLHHLTNELKENLLYGRIQKVNQPFERELVLTIRNHRKNYKLLLSAHPVFGRVQITQADFQNPQVPNTFTMIMRKYLQGAVIEQLEQIDNDRIIEIKVSNKNEIGDAIQATLIIEIMGKHSNIILVDRAENKIIESIKHVGFSQNSYRTILPGSTYIEPPKTAAVNPFTITDVPLFEILQTQELTVKSLQQHFQGLGRDTAKELAELLTTDKLKRFREFFARPTQANLTTASFAPVLFSDSHATFETLSDMLDHFYQDKAERDRINQQASDLIHRVQTELDKNRNKLSKQEAELLATENAELFRQKGELLTTYLSLVPNNQDSVILDNYYTGEKIEIALDKALTPNQNAQRYFKKYQKLKEAVKHLSGLIADTKQSITYFESVDYNLSQASIDDIEDIREELYQAGFLKSRQRDKRHKRKKPEQYLASDGTTILMVGRNNLQNEELTFKMAKKGELWFHAKDIPGSHVIIKDNLDPSDEVKTDAAELAAYYSKARLSNLVQVDMIEAKKLHKPSGAKPGFVTYTGQKTLRVTPDQAKILSMKLS

SEQ ID NO: 2709 - DNA, 1002 bp, Streptococcus agalactiae
atgaaaaataaagggctgatagctacgctaattctattgactatattagtggttggagaattattttataacaaatcagaaaaacgtcttaatttatcagaaaagcaagttgttaaaattggtattttacagtatgtaacccatgatgctttggatgctattgaaaagggagttgaagatggtctagctcaagaaggatataaagggaaaaaagttaaattaaccgttttaaacgccgaagctgatcaaagtaaaattcaagcgatgagtaaacaattagttaatcatcacaatgatattttgattggaattgcgacaccatcagcacaaggtttagcagcttcgactaaggacactcctataatcatgggagctgtttctgatcctttaggggccaagttagtaacgaatatgaagaaaccaacaactaatgttacaggattatcaaacgttgttccgaccaagcaaactgtgcaattaatcaaggatataactcccaatattaaacgtataggaattctttatgctagtagcgaagataattctgtatcacaagtaactgagtttacaaaatatgctcaaaaagcagggctagaagttcttaaatattctgtaccatctacaaatgaaattaagacaagtatgtcagtcatgaccaaaaaagtagacgctgtctttgttccacaagataatactattgcgagtgcttttagaacagttatcgtagcagcaaaccaagctaatatacctgtgtattccagtgttgataccatggttgaacaaggaagtatagcatcagtagcgcagagtcaatatggcttagggttagaaactgcaaaacaggccattaaagtcctaagagggaagccggttaaagatgtaccagtcaaagttattgatacagggaagccaagcctcaatttgaaagcagccaaacacttaggaattaaaattcctaagaagattatgaaacaggcagaaattaccgttaaggttgacgat

SEQ ID NO: 2710 - protein, 334 aa, Streptococcus agalactiae
MKNKGLIATLILLTILVVGELFYNKSEKRLNLSEKQVVKIGILQYVTHDALDAIEKGVEDGLAQEGYKGKKVKLTVLNAEADQSKIQAMSKQLVNHHNDILIGIATPSAQGLAASTKDTPIIMGAVSDPLGAKLVTNMKKPTTNVTGLSNVVPTKQTVQLIKDITPNIKRIGILYASSEDNSVSQVTEFTKYAQKAGLEVLKYSVPSTNEIKTSMSVMTKKVDAVFVPQDNTIASAFRTVIVAANQANIPVYSSVDTMVEQGSIASVAQSQYGLGLETAKQAIKVLRGKPVKDVPVKVIDTGKPSLNLKAAKHLGIKIPKKIMKQAEITVKVDD

SEQ ID NO: 2711 - DNA, 996 bp, Streptococcus pyogenes
atgaaaaacaagagtttaatagctaccctccttgttttaactgtaatagtgataggctctctattatcaaaaggagtatcaaaggaaaaccgtgatttggctaaccaacaaaacattacaattggcatcttacaattcgttactcatgaggctcttgatgatattaagcgaggtattgaagatcaactcaaaaagcagatgcctcaaaaacaaaatgtagtgattaaggttatgaatgctgagggggatcagagtaaaatccaaacaatgagtaggcaattagtgcaatcaggaagtgatatcgtgattggtatcgcaaccccggcggcgcaaggcttagcagccaccagcaaggatatcccagttgtcatgtcagcagtatctgatccagtaggatctagattagtgatgcaattggatcaacctgaagctaatgtaactggtctatctaataaagtgcctgttaaacagacaattgatttaatgaaaaagctgacaccacatgtcaaaacagttggaattttatatgcaagtaatgaggataattccttatctcaagttaaagagtttaggcggttagctcgcaaaaagggctaccaagttatttcatacgcggttccttctactaatgaagttcctgccacgatgtcagttatgttaggtaaagtagacgcggtatttatcccccaagacaatactatagcaagtgcattttcatcagtcatgacaaccagcaaggctgcaaagattcctgtctacactagcgttgatcgaatggttgaaaaaggtggtttggcagctatttctcaaaatcagtacgatttgggagttcaaacagctaatcaggtgttaaaattaatcaaaggaaagcgtgttgtagatgttcctgtcaaagttgtggatattggtcaaccgctaattaataagaatgtagcagcagaattaggtattgctattaaaaaagaagattttccttcagcttcttttattgagaat

SEQ ID NO: 2712 - protein, 332 aa, Streptococcus pyogenes
MKNKSLIATLLVLTVIVIGSLLSKGVSKENRDLANQQNITIGILQFVTHEALDDIKRGIEDQLKKQMPQKQNVVIKVMNAEGDQSKIQTMSRQLVQSGSDIVIGIATPAAQGLAATSKDIPVVMSAVSDPVGSRLVMQLDQPEANVTGLSNKVPVKQTIDLMKKLTPHVKTVGILYASNEDNSLSQVKEFRRLARKKGYQVISYAVPSTNEVPATMSVMLGKVDAVFIPQDNTIASAFSSVMTTSKAAKIPVYTSVDRMVEKGGLAAISQNQYDLGVQTANQVLKLIKGKRVVDVPVKVVDIGQPLINKNVAAELGIAIKKEDFPSASFIEN

SEQ ID NO: 2713 - DNA, 861 bp, Streptococcus agalactiae
atgattatttcatcagtttcacaaggtttattatgggggatattaggattagggatatacttaacctttagaatcttaaaatttccagacatgacaacagagggctccttccctctagggggagcggtttgtgttaccttaatgaatcaaggggttaatcctattttggcgacgattctaggcatgctatcagggatgttagcgggatttgttactggtttactttatactaaaggaaagataccgacgattttagcagggattttagtaatgacctcatgccactctattatgctaatggttatgaaaagagcaaatctaggtttaaatgagattcaaacattgaaagattttcttccgttttcaaatgatttaaatcttctcgtattaggcttgatagctattctcttggtgatttctgccttaatttattttctctatacacgcttggggcaagcttatattgcaacaggagataaccctgatatggcaaagagcttcggcattgataccgacaaaatggaaatgcttggcttaattgtatcaaatggcttaattgctttatcaggagctttagtaagtcaacaagatggatatgctgatgtatcaaaaggtataggtgttattgttattgggttagctagtattattattggagaggtactttactctactggtttaactctctttgaacgtttaattgctatagtggtgggttctattctttatcaatttttaataacggcagtaatcgccttaggatttaatacgaattacctaaaattatttagtgcaatagtgcttggaatttgtttaatggttcctgtcctaaaaacgaagattttgaaaggagtacgctta

SEQ ID NO: 2714 - protein, 287 aa, Streptococcus agalactiae
MIISSVSQGLLWGILGLGIYLTFRILKFPDMTTEGSFPLGGAVCVTLMNQGVNPILATILGMLSGMLAGFVTGLLYTKGKIPTILAGILVMTSCHSIMLMVMKRANLGLNEIQTLKDFLPFSNDLNLLVLGLIAILLVISALIYFLYTRLGQAYIATGDNPDMAKSFGIDTDKMEMLGLIVSNGLIALSGALVSQQDGYADVSKGIGVIVIGLASIIIGEVLYSTGLTLFERLIAIVVGSILYQFLITAVIALGFNTNYLKLFSAIVLGICLMVPVLKTKILKGVRL

SEQ ID NO: 2715 - DNA, 879 bp, Streptococcus pyogenes
atgaggaaaaatatgattatttcatcagtttcacaaggccttatatggggagttttaggattaggaatctacctgacctttaggattttaaacttccctgacatgactacagaaggttcttttcctttaggaggagctgttgcggtcaccgctattagcttagggtggaatccatttctatcaaccttacttggtatgttatcaggtgctttagcaggttttttaacagggctgttatatacgaaaggaaaaatgccaacacttttagcgggaattttggtgatgacgtcatgtaactccattatgctaatggtaatgggaagagcaaacttgggtttacatgatcataaacgtattcaggattgtttacctttttcaattgatttaaatagccttttaacaggtctgataactgttgtgattgttattagcgttttgatctatttcctttacactaatctaggtcaagcttatatcgctacgggagacaataaagatatggctaagagttttggtattaacacggattggatggaagttatgggacttgtggtttctaatagtttaatagctttatcaggtgctctagtgagccaacaagatggctatgcagatgtctcaaaagggattggagttattgttattggtttggcgagcataattgttggtgaagtactatactcaactggactgactcttttagaacgtttgattgctattgtaataggctcgattctttatcaatttttaatttcagtagttattacgctaggttttaatacaagttatttgaaattaattagtgctcttgttttagcactgtgcctcatgataccagtggtaaaagagcgcttctttaagggagtgaggttaacacga

SEQ ID NO: 2716 - protein, 293 aa, Streptococcus pyogenes
MRKNMIISSVSQGLIWGVLGLGIYLTFRILNFPDMTTEGSFPLGGAVAVTAISLGWNPFLSTLLGMLSGALAGFLTGLLYTKGKMPTLLAGILVMTSCNSIMLMVMGRANLGLHDHKRIQDCLPFSIDLNSLLTGLITVVIVISVLIYFLYTNLGQAYIATGDNKDMAKSFGINTDWMEVMGLVVSNSLIALSGALVSQQDGYADVSKGIGVIVIGLASIIVGEVLYSTGLTLLERLIAIVIGSILYQFLISVVITLGFNTSYLKLISALVLALCLMIPVVKERFFKGVRLTR

SEQ ID NO: 2717 - DNA, 813 bp, Streptococcus agalactiae
ttgtttaatggttcctgtcctaaaaacgaagattttgaaaggagtacgcttataatggtgatgaaaatcatagagttaaaagaagcaaccgtacaagtcagtaatggtttagcagaaatgaaaacgatattagatcatgttaatttgagtatttatgaacatgacttcattacaatattgggtggaaatggagctggaaaatcaacgctttttaatgtaattgcaggtaccttgatgttaagcagtggaaatatttacatcatgggacaagatgttactaatttatcagcagaaaaacgagctaaatatttatcacgggtatttcaagatccgaaaatgggaacagcacctaggatgacagttgctgaaaatttattagttgctaaatttcgaggtgaaaagagaccgctagttcctagaaagattattaactatacggaagaatttcaaaaattgattgctagaactggtaatggacttgatcgccatttagagacacctacaggtttattatcaggtggacaaagacaagcgcttagtttattaatggcaactttgaaaaaaccaaatctgttattattggacgaacacacagcagcgcttgatcctagaacaagtgtttcgcttatgggcttgactgatgagtttatcaaacaagattcgttgactgccttaatgattacacatcatatggaagatgctctcaaatatggaaatcgtgtattagtaatgaaagatggcaagattgtcagagatttaaatcaggcacaaaaaaacaagatggctatagctgactattatcaattatttgat

SEQ ID NO: 2718 - protein, 271 aa, Streptococcus agalactiae
MFNGSCPKNEDFERSTLIMVMKIIELKEATVQVSNGLAEMKTILDHVNLSIYEHDFITILGGNGAGKSTLFNVIAGTLMLSSGNIYIMGQDVTNLSAEKRAKYLSRVFQDPKMGTAPRMTVAENLLVAKFRGEKRPLVPRKIINYTEEFQKLIARTGNGLDRHLETPTGLLSGGQRQALSLLMATLKKPNLLLLDEHTAALDPRTSVSLMGLTDEFIKQDSLTALMITHHMEDALKYGNRVLVMKDGKIVRDLNQAQKNKMAIADYYQLFD

SEQ ID NO: 2719 - DNA, 756 bp, Streptococcus pyogenes
atgacaaaaattattgaattgatcaatgcaacagttgacgtagataatggttttgaagatgctaaaacaatattggacaatgtgacactaactatctatgaacatgattttttaactattttaggaggaaatggagctggaaaatcaaccctttttaatgtaattgcaggaacgctaagtttgacacgggggcaaattaggattcttggtcaggatgtgacgcattggccagcagaaaaaagagctctttacctatcgcgagtctttcaagattccaaaatgggaacagcccctcggatgacagtggctgaaaatctcttaatcgcacgtcaaagaggaggaaaacgctccttggcttctcgaaaaataacagagcacttagctagttttgaggatttggttaaacgaacaggaaatggcctagaaaagcatttagaaacaccagcaggtcttttgtctggtggacaaagacaagctttaagtttattaatggcaacgttgaaaaagccagctctcttattattagatgaacatacggctgctcttgaccctaagacgagtcaatctttaatgcaattgacagatgagtttgtgacaaaagatggcttaacagctttgatgattacccaccatatggaagatgcattaacttatgggaatcgtctgattgtaatgaaagatggaaacattattaaagatttaaatcaaatggaaaaagaacaactgacgattactgactattaccaactatttgat

SEQ ID NO: 2720 - protein, 252 aa, Streptococcus pyogenes
MTKIIELINATVDVDNGFEDAKTILDNVTLTIYEHDFLTILGGNGAGKSTLFNVIAGTLSLTRGQIRILGQDVTHWPAEKRALYLSRVFQDSKMGTAPRMTVAENLLIARQRGGKRSLASRKITEHLASFEDLVKRTGNGLEKHLETPAGLLSGGQRQALSLLMATLKKPALLLLDEHTAALDPKTSQSLMQLTDEFVTKDGLTALMITHHMEDALTYGNRLIVMKDGNIIKDLNQMEKEQLTITDYYQLFD

SEQ ID NO: 2721 - DNA, 1659 bp, Streptococcus agalactiae
atgagcgacataaaaatcatggctcttggaggtgttcgtgaaaacggaaaaaacctatatgtagtagaagtcaatgattctatctttgttttggatgctggactcaaatatcctgaaaatgaacaactgggtgttgatgttgttattccaaatcttgattacttaattgaaaataaaaaacgtgttcaggggattttcttaacccatggacatgcggatgctattggtgcattgccttatattatcgccgaagtcaaagcacctgtgtttggctcacctctcacaattgaattagctaagttattcgttaaaaatagtacagcagtcaagaaattcaataatttccatgtgattgatagtgaaacggaaattgaatttcaagatgcggtgatttcgttctttaaaacgactcattcaattccagagtcaatgggaattgttattgggacaaaagagggaaatatcgtttacacaggtgactttaaatttgatcaagctgcaaggaaatattaccaaacagatctggcgcgtttagctgaaattggtcgtgatggtgttttagcacttttatcagattctgcaaatgctacaagcaatgagcaagttgctagcgaatatgaggtcggtgatgaaattaagagcgttattgaagacgcagaaggtagagtcatcgtagcggcagttgcaagtaatctcattcgtattcaacaagtctttgatgcagcggcagaaaacggtcgtcgagtagttttaacgggttttgatattgaaaatattgttcgtacggccattcgtatgaaacgcattcatattgctgatgaaaatatgattatcaaacctaaagatatgacacgttacgaagataacgaattattaatccttgaaactggacgtatgggagagccgataaatggtctccaaaaaatggcgatcggacgtcatcgttatgttcaaattaaagatggtgatttagtatttatcgtaacaacaccaagtattgcaaaagaggcagttgtagcgcgtgttgaaaatctgatttataaagctggtggctcagttaaattgataacacagaatttgcgcgtatcaggtcatgcaaatggtcgcgaattacaattattaatgaatctattgaaacctaaataccttttcccaattcaaggagagtatagggatttgtcagcacatgcgggcttagctcaagaggtaggaatgtcagcagatgatatttatattgtgaagcgtggtgacatcatggttcttgaaaaagatggcttcttccatagtggatctgttcctgctggagatgttatgattgatggaaatgctattggtgacgttggtaatattgtacttcgtgaccgcaaggtattatctgaagatggaatttttattgttgttataactgtcagcaaaaaagaaaagaaaattatttctaaagctcgtgttaatacgcgtggttttgtgtatgtgaaaaaaagcagagatattttgcgtgagagcgcagaattagttaatacaacggtagaagattacttaagtaaagatacatttgactggggtgaacttaaagggaaagtgcgtgatgaggtcagcaagttcttatttgaccaaacgaaacgtcgcccagcaatccttcctgtggttatggaagttcgt

SEQ ID NO: 2722 - protein, 553 aa, Streptococcus agalactiae
MSDIKIMALGGVRENGKNLYVVEVNDSIFVLDAGLKYPENEQLGVDVVIPNLDYLIENKKRVQGIFLTHGHADAIGALPYIIAEVKAPVFGSPLTIELAKLFVKNSTAVKKFNNFHVIDSETEIEFQDAVISFFKTTHSIPESMGIVIGTKEGNIVYTGDFKFDQAARKYYQTDLARLAEIGRDGVLALLSDSANATSNEQVASEYEVGDEIKSVIEDAEGRVIVAAVASNLIRIQQVFDAAAENGRRVVLTGFDIENIVRTAIRMKRIHIADENMIIKPKDMTRYEDNELLILETGRMGEPINGLQKMAIGRHRYVQIKDGDLVFIVTTPSIAKEAVVARVENLIYKAGGSVKLITQNLRVSGHANGRELQLLMNLLKPKYLFPIQGEYRDLSAHAGLAQEVGMSADDIYIVKRGDIMVLEKDGFFHSGSVPAGDVMIDGNAIGDVGNIVLRDRKVLSEDGIFIVVITVSKKEKKIISKARVNTRGFVYVKKSRDILRESAELVNTTVEDYLSKDTFDWGELKGKVRDEVSKFLFDQTKRRPAILPVVMEVR

SEQ ID NO: 2723 - DNA, 1659 bp, Streptococcus pyogenes
atgactgatattaaaatgattgccttgggaggggtccgtgaatacggaaaaaacttctatttggtagaaattaacgattctatgtttattttagacgcagggctcaagtaccctgaaaatgagcaacttggggtagatttagtcatccccaatttagattatgtaattgaaaacaaaggtaaagtacaagggattttcttgagtcatggccatgctgacgccattggagcccttccttatttgttagctgaagtatcagctcctgtatttggatctgaattgactattgaattagccaagctatttgtgaaaagtaataacagcactaagaaatttaataattttcatgtggtagacagtgatactgaaattgaatttaaagatggcctagtttcgttctttagaacaacgcattcaatcccagaaagtatgggtattgttattggaacagataaaggaaacattatttataccggtgacttcaaatttgatcaagcagcaagagaaggttatcagacggatttgctacgtttagctgagattgggaaagaaggggttctagctcttttatcagattcagtcaatgcgacaagcaacgatcagattgccagcgaatctgaagttggtgaagaaatggacagtgttatctctgatgctgatggccgtgtcattgtagctgcagtagcctcaaatcttgttcggattcagcaagtatttgattccgccactgcccatgggcgtcgtgttgttttaaccggaacagatgcagaaaatattgtcagaacagctttacgtctagaaaaattaatgattacggatgagcgtcttttaattaaacctaaggatatgtctaaattcgaagaccatgaattaatcatccttgaagctggtcgtatgggtgagccaattaatagcttacaaaaaatggcagcgggacgtcaccgttatgttcaaatcaaagaaggagaccttgtttatattgtaacaacaccaagtacggctaaagaagctatggtggcgcgtgttgaaaacttgatttacaaggccggtggttctgttaaattaatcactcaaaacttacgtgtttcaggccatgctaatgggcgtgatttgcaactattgatgaatttgttaaaaccccagtatctttttccagtacaaggagaatatcgtgatttagctgcccatgcaaagctagctgaagaagttggtatttttccagagaatattcatattctgaagcgtggcgatatcatggtgcttaatgacgaaggttttctccatgaaggaggtgtacctgccagtgatgtcatgattgacggtaatgctatcggtgatgtgggtaatatcgttttacgagaccgtaaagtcttgtcagaagatggtattttcattgttgctattactgtttctaaaaaagaaaaacgcattatttctaaggctaaagttaatacgcgtggatttgtgtatgtcaagaaaagtcatgatattttaagagaaagtgcagaattagttaatacaactgttggcaattacttaaaaaaagatacctttgactggggcgaattaaaagggaatgtcagagatgatttgtctaaattcttatttgaacaaaccaaaaggcgcccagcgattctgccggttgtgatggaagttcgt

SEQ ID NO: 2724 - protein, 553 aa, Streptococcus pyogenes
MTDIKMIALGGVREYGKNFYLVEINDSMFILDAGLKYPENEQLGVDLVIPNLDYVIENKGKVQGIFLSHGHADAIGALPYLLAEVSAPVFGSELTIELAKLFVKSNNSTKKFNNFHVVDSDTEIEFKDGLVSFFRTTHSIPESMGIVIGTDKGNIIYTGDFKFDQAAREGYQTDLLRLAEIGKEGVLALLSDSVNATSNDQIASESEVGEEMDSVISDADGRVIVAAVASNLVRIQQVFDSATAHGRRVVLTGTDAENIVRTALRLEKLMITDERLLIKPKDMSKFEDHELIILEAGRMGEPINSLQKMAAGRHRYVQIKEGDLVYIVTTPSTAKEAMVARVENLIYKAGGSVKLITQNLRVSGHANGRDLQLLMNLLKPQYLFPVQGEYRDLAAHAKLAEEVGIFPENIHILKRGDIMVLNDEGFLHEGGVPASDVMIDGNAIGDVGNIVLRDRKVLSEDGIFIVAITVSKKEKRIISKAKVNTRGFVYVKKSHDILRESAELVNTTVGNYLKKDTFDWGELKGNVRDDLSKFLFEQTKRRPAILPVVMEVR

SEQ ID NO: 2725 - DNA, 846 bp, Streptococcus agalactiae
ttgatagtgttaagaggttaccaaattttggtagcctttcttgctagaatggaggtttttatggcattttttaatattgaatatcactctaaggtactaggaacggaacgtcaagtcaatgttatttacccagatgcttttgagatgtctgatgataaaattgatgattgtgacattcctgttttgtatcttctccatggaatggggggaaatgagaattcttggcaaaaacgcacaaatatagagcgtcttttacgtcatactaatcttatcgtcgtgatgccatcaacagacttagcatggtataccaacacaaagtatgggttggattattttgatgcaatagctatcgagttaccaaaagttttgaaacgtttctttcctaatatgtctgataagagagagaaaaatttcattgccggattatctatggggggatatggagcatataaaatagctctactgactaatcgtttttctcatgctgcctctttgtcaggtgcactttcttttgactttgatttattattcaataatggcaacaataacattaactattggtcgggaatttttggcgatttgaataacactgataacatagagcgtcattcactaaggcgttacgttgagtcttttgatatgaagactaaattttatgcatggtgtggttatgaagattttctttttgaagctaatgaagtcgcaattgatgaacttcgtcaattaggtttaactattgactatttcaatgatcatggtaaacatgaatggtattactggaatcaacaattagaaaaagtcttagaatggctccctgttgattatgtcaaagaagagcgcctttct

SEQ ID NO: 2726 - protein, 282 aa, Streptococcus agalactiae
MIVLRGYQILVAFLARMEVFMAFFNIEYHSKVLGTERQVNVIYPDAFEMSDDKIDDCDIPVLYLLHGMGGNENSWQKRTNIERLLRHTNLIVVMPSTDLAWYTNTKYGLDYFDAIAIELPKVLKRFFPNMSDKREKNFIAGLSMGGYGAYKIALLTNRFSHAASLSGALSFDFDLLFNNGNNNINYWSGIFGDLNNTDNIERHSLRRYVESFDMKTKFYAWCGYEDFLFEANEVAIDELRQLGLTIDYFNDHGKHEWYYWNQQLEKVLEWLPVDYVKEERLS

SEQ ID NO: 2727 - DNA, 783 bp, Streptococcus pyogenes
atggcaagtattgcaattgaataccattcggtagttttaggaatggagcgtaaggtaaatgtgatttatcctgaccagtctgaaatccctaaaaaagatcaaggggataaggatattcctgttttatatttgttacatggtatgggaggcaatgaaaactcttggcaaaaacgaacagctattgaacgcttgttgcggcataccaatttgatagtcgttatgccttcgacagacctaggttggtatacagacacggcttatggacttaactattatcgggcgttgtcacaagagttaccgcaggtcttagcagctttctttcctaatatgacccagaaacgagaaaaaacctttgttgctgggctctctatgggtggctatggtgcctttaagtgggcactcaaaagcaatcggttttcttatgcggcatcgttttcaggcgctttggatttttctcctgagaccttgcttgagggaaaactgggagaattagcctattggcagggcgtttttggccagtttgatgaccctgaccttgacaagcattaccttaaaaatatggtggcagaaagtgatggaaaaaccaaattttatgcttggtgtggctatgaggattttctttttgccactaatgaaaaagctattgctgattttcaggctcaaggtcttgacattgattatcataaaggtcatggtaaacatgagtggtactattggaaccagcaattagaagtcctgttagagtggttaccgataaactaccaaaaagaagaaaggttgtct

SEQ ID NO: 2728 - protein, 261 aa, Streptococcus pyogenes
MASIAIEYHSVVLGMERKVNVIYPDQSEIPKKDQGDKDIPVLYLLHGMGGNENSWQKRTAIERLLRHTNLIVVMPSTDLGWYTDTAYGLNYYRALSQELPQVLAAFFPNMTQKREKTFVAGLSMGGYGAFKWALKSNRFSYAASFSGALDFSPETLLEGKLGELAYWQGVFGQFDDPDLDKHYLKNMVAESDGKTKFYAWCGYEDFLFATNEKAIADFQAQGLDIDYHKGHGKHEWYYWNQQLEVLLEWLPINYQKEERLS

SEQ ID NO: 2729 - DNA, 708 bp, Streptococcus agalactiae
atgagaacactatttagaatgatatttgctattccaaagtttatctttagattgatttggaatatcatttggggaatattcaagacagttcttgttattgcgattattttatttggcttgtattactatgcgaatcacagtcaatcagaatttgctaatcaacttagtgacattattcagacaggaaaaacatttttaaattttgctgacactaatcagctcaaaaattcctttactaatctagctacggataatgttcatcattcagaaaataccagatgggataaaaatcaggcaactatctatatagcaactagagattctgagttggtctctgcttacaagcaagcaatctccaattggaatgcaacaggtgcttttgtgttacaaacaacagataatcctaatgctgatattattgctaaggattactcagatgctaaaacacaagctgcgggtgtagctgaaaccgagaaaaatgctttaactaatcgtatttcaaaggtaacagttgaattaaacacattttaccttaagaataaacagtttggttatgaccatactaggattgttaatacggccgaacatgaattaggacatgcgttaggtctaggacataatgatcaacaacattccgttatgcagtcaaaaggttcgcattatggcattcaagaagttgatattcaaacgctaaaaaacttatatgca

SEQ ID NO: 2730 - protein, 236 aa, Streptococcus agalactiae
MRTLFRMIFAIPKFIFRLIWNIIWGIFKTVLVIAIILFGLYYYANHSQSEFANQLSDIIQTGKTFLNFADTNQLKNSFTNLATDNVHHSENTRWDKNQATIYIATRDSELVSAYKQAISNWNATGAFVLQTTDNPNADIIAKDYSDAKTQAAGVAETEKNALTNRISKVTVELNTFYLKNKQFGYDHTRIVNTAEHELGHALGLGHNDQQHSVMQSKGSHYGIQEVDIQTLKNLYA

SEQ ID NO: 2731 - DNA, 324 bp, Streptococcus pyogenes
atgaaacaattactggcgatcattttgtggctgcctaagctaatagtgaaaatgttttggcaccttatcaaagggtttttacaaactatcttattagtaacgattattattatagggctgatgtactattctaatcacagtgattccgttttagccaataagatctcgatagttactgagcaagtggtgcaaatttttgatatcttaacacaaaagccatctgcaaagacgcgtcatgggagtggtaatagtcattccactttccttgttagcgctaaagaaggtaatcaacgacttaaaaagagttcgatttcttttggaaac

SEQ ID NO: 2732 - protein, 108 aa, Streptococcus pyogenes
MKQLLAIILWLPKLIVKMFWHLIKGFLQTILLVTIIIIGLMYYSNHSDSVLANKISIVTEQVVQIFDILTQKPSAKTRHGSGNSHSTFLVSAKEGNQRLKKSSISFGN

SEQ ID NO: 2733 - DNA, 669 bp, Streptococcus agalactiae
atggacgaactaaaaaaacttgctggagtgaccgctgcaaaatacgttaaaaacggtatgattgtaggtttagggacaggttctacagcatatttttttgttgaagaaattggacgccgtgtcaaagaagagggattgcaagtcgtaggcgttacaacgtcaaaccgtacgactgagcaggcaagaggattaggtattccgttgaaatcagcagatgatattgatgtcattgatgtcactgtggatggagcagatgaagtagaccctgattttaatggtatcaagggtggcggtggtgcgctgctcatggaaaaaatagtagctactccaactaaagaatatatctgggttgtcgatgagagcaaacttgttgaaacgttaggtgcatttaaattgcctgttgaggttgttagatatggttctgagcgtctttttcgggtttttaaatcaaaaggttattgtccttctttccgtgaaacagaaggtgaccgctttatcactgatatggggaactacattatcgacctagatttgaaaaaaatagaggatccaaagcagttagcgaatgaacttgaccatacagttggtgttgttgaacatggtttatttaatggtatggttaataaagttatagtagcaggcaaaaacggtcttgacatacttgaaaaa

SEQ ID NO: 2734 - protein, 223 aa, Streptococcus agalactiae
MDELKKLAGVTAAKYVKNGMIVGLGTGSTAYFFVEEIGRRVKEEGLQVVGVTTSNRTTEQARGLGIPLKSADDIDVIDVTVDGADEVDPDFNGIKGGGGALLMEKIVATPTKEYIWVVDESKLVETLGAFKLPVEVVRYGSERLFRVFKSKGYCPSFRETEGDRFITDMGNYIIDLDLKKIEDPKQLANELDHTVGVVEHGLFNGMVNKVIVAGKNGLDILEK

SEQ ID NO: 2735 - DNA, 681 bp, Streptococcus pyogenes
atggaagcactcaaaaaaattgccggtgttaccgctgcgcaatatgtgactgatggcatgaccattgggcttggaactgggtcaacggcttactattttgttgaggaaattggccgtcgcgtaaagcaagaaggactgcaagtggttggtgtgactacgtcaagtgtgactagcaagcaagcagaagtcttgggcattcctttaaaatcgatagatgatattgatagcattgacctcaccgtagatggtgctgatgaagtggataagaatttcaatggaatcaagggtggcggcgcagccttactaatggaaaaaattgttgcaacaccaacaaaagaatacatctgggttgttgatgcttctaaaatggtagagcatctgggtgcctttaagttaccagtcgaagtcgttcaatatggtgctgatcgtttgttccgtgtctttgaaaaagctggttacaaaccgtcttttcgtatgaaaggtgatagtcgtttggtgacagacatgcaaaactatattattgatcttgatttgggttgtattaaagatcctgttgcttttggtcacctgctagatggaacagttggtgttgtggaacacggtctctttaatggtatggttgataaggtgattgttgctagtaaagacggcgttactgttttagaagcgcctacagcaggc

SEQ ID NO: 2736 - protein, 227 aa, Streptococcus pyogenes
MEALKKIAGVTAAQYVTDGMTIGLGTGSTAYYFVEEIGRRVKQEGLQVVGVTTSSVTSKQAEVLGIPLKSIDDIDSIDLTVDGADEVDKNFNGIKGGGAALLMEKIVATPTKEYIWVVDASKMVEHLGAFKLPVEVVQYGADRLFRVFEKAGYKPSFRMKGDSRLVTDMQNYIIDLDLGCIKDPVAFGHLLDGTVGVVEHGLFNGMVDKVIVASKDGVTVLEAPTAG

SEQ ID NO: 2737 - DNA, 1209 bp, Streptococcus agalactiae
atgtcacaatttgatcgcattcacttagttgtcttagattcagtggggattggagcggcaccagatgccaatgattttgtcaatgcaggagttcctgatggtgcttcagacacgcttggccacatttcaaaaacagttggacttgcggtgccaaacatggctaaaatcggacttggtaatattcctcgtccccaagcgcttaagaccgtccctgcagaagaaaatccaagtggctacgcgacgaagttacaagaagtatcacttggtaaagatacaatgacagggcattgggagatcatgggcttaaatattacagagccatttgatactttctggaatggttttccagaagatattattacaaagattgaggatttttcaggacgtaaagttattcgtgaagcgaataaaccttattcagggacagctgttattgatgacttcggaccacgccaaatggaaactggtgagctcatcatctatacctcagctgatccagtcctacaaattgcagctcatgaggatatcattcctctagaagaactctaccgtatttgtgaatatgctcgtagtatcacaatggagcgtccagctctccttggtcgtattatcgctcgtccatatgtaggtgaaccaggcaactttacgcgtacagccaaccgtcacgactatgcagtatcaccatttgaagataccgtattaaataaactagatcaagctggcatcgatacttatgctgttggtaaaatcaatgatattttcaatggttcaggcattaatcatgatatgggacataacaaatcaaatagtcatggtattgatactttgataaaaacaatggggttatcagagtttgaaaaaggcttctcctttactaatttggttgactttgatgctctctatggtcaccgtcgtgatcctcatggttatcgtgattgtcttcatgagtttgatgagcgtcttccagagatcatttcagcgatgcgtgacaaagacttacttttgatcactgccgatcatggtaatgacccaacttatgcaggtacagaccatacaagagaatacattcctctcttagcctatagcccatctttcacaggaaacggccttatcccagtagggcatttcgcagatatttcagcaacagttgcggataactttggtgttgatactgcgatgattggagagagcttcttgcaggacttggta

SEQ ID NO: 2738 - protein, 403 aa, Streptococcus agalactiae
MSQFDRIHLVVLDSVGIGAAPDANDFVNAGVPDGASDTLGHISKTVGLAVPNMAKIGLGNIPRPQALKTVPAEENPSGYATKLQEVSLGKDTMTGHWEIMGLNITEPFDTFWNGFPEDIITKIEDFSGRKVIREANKPYSGTAVIDDFGPRQMETGELIIYTSADPVLQIAAHEDIIPLEELYRICEYARSITMERPALLGRIIARPYVGEPGNFTRTANRHDYAVSPFEDTVLNKLDQAGIDTYAVGKINDIFNGSGINHDMGHNKSNSHGIDTLIKTMGLSEFEKGFSFTNLVDFDALYGHRRDPHGYRDCLHEFDERLPEIISAMRDKDLLLITADHGNDPTYAGTDHTREYIPLLAYSPSFTGNGLIPVGHFADISATVADNFGVDTAMIGESFLQDLV

SEQ ID NO: 2739 - DNA, 1209 bp, Streptococcus pyogenes
atgtcaaaatttaatcgtattcacttggttgttttagactctgtcggtattggtgcagcaccagatgctgacaaattctttaatgctggtgtagctgatacagattctgacaccctcggtcatatttcagaagcagcaggcttatcggttccaaatatggcaaaaattggacttggaaacatttctcgtccaataccactaaaaactgttccaacagaagacaatcctactggttacgtgaccaaattggaagaagtatctcttggaaaagataccatgacaggccattgggaaattatgggcttgaacattacggaaccttttgacactttctggaatggtttcccagaagagattttaactaagattgaagaattctcaggccgcaaaatcattcgcgaggccaacaaaccttattcaggaactgcggttattgatgattttggtccgcgtcaaatggaaacaggtgagttgattgtttacacctcagcagacccagtgcttcaaattgcagcccatgaagacattattcctgtggaagagctttacaagatttgtgaatatgctcgctccatcacgcttgaacgccctgcccttttaggccgtattattgcgcgtccttatgtaggcgacccaggaaactttacacgtacggctaaccgtcatgactatgcagtgtctcctttccaagataccgttttgaacaaactggctgacgcaggtgtcccaacttatgccgttggtaagattaatgacatctttaatggttcaggtattacaaacgacatgggacataataagtcgaacagccatggtattgacacgcttattaagactcttcaattacctgagtttactaagggattctcctttactaacctcgttgattttgatgccaactttggtcatcgtcgtgacccagagggttatcgcgactgcttgcatgaatttgacaatcgcctacctgaaatcatcgcaaatatgaaagaagacgatttgcttctcatcactgctgaccatggtaatgacccaacctatgcaggcaccgaccacactcgtgaatacattccattgcttgcctactctgtatcctttactggaaatggtcttattccacaagggcattttgcggatatttcagcaactgttgcagaaaattttggagttgatacagccatgattggggagtcattccttagtcacttaaaa

SEQ ID NO: 2740 - protein, 403 aa, Streptococcus pyogenes
MSKFNRIHLVVLDSVGIGAAPDADKFFNAGVADTDSDTLGHISEAAGLSVPNMAKIGLGNISRPIPLKTVPTEDNPTGYVTKLEEVSLGKDTMTGHWEIMGLNITEPFDTFWNGFPEEILTKIEEFSGRKIIREANKPYSGTAVIDDFGPRQMETGELIVYTSADPVLQIAAHEDIIPVEELYKICEYARSITLERPALLGRIIARPYVGDPGNFTRTANRHDYAVSPFQDTVLNKLADAGVPTYAVGKINDIFNGSGITNDMGHNKSNSHGIDTLIKTLQLPEFTKGFSFTNLVDFDANFGHRRDPEGYRDCLHEFDNRLPEIIANMKEDDLLLITADHGNDPTYAGTDHTREYIPLLAYSVSFTGNGLIPQGHFADISATVAENFGVDTAMIGESFLSHLK

SEQ ID NO: 2741 - DNA, 807 bp, Streptococcus agalactiae
atgacattattagaaaaaattaatgagactagagactttttgcaagcaaaaggcgtcacagcaccagaatttggccttattttaggctctggtttaggagaattagctgaagaaatcgaaaatcccattgttgtggattatgcagacatcccaaattggggacagtcaacagtagttggtcatgctggaaaattagtgtatggggatttatcaggccgtaaggtattagcacttcaaggtcgttttcacttttatgaaggaaatacaatggaagtcgttactttcccagtacgtatcatgagagcattggcttgccacagtgtgcttgtgactaatgcagcgggtgggattggatacggaccaggaactttaatgctgatcaaagaccacatcaatatgattgggactaaccctctcataggtgagaaccttgaagaatttggaccacgtttcccagacatgtcggatgcttatacagcaacatatcgacaaaaagctcaccaaattgctgaaaaacagaatatcaaactcgaagaaggtgtgtacttgggtgtatcaggacccacttatgaaacacctgcagaaattcgtgcattccaaacaatgggcgcacaggcggtaggtatgtccacggttccagaggtgatcgttgcagctcactcagggcttaaagtgttaggaatttcagcaattactaactttgccgctggcttccaatctgagctcaatcatgaggaggtcgttgaagttactcagcgtattaaagaagatttcaagggattagttaaatcattagttgctgaactt

SEQ ID NO: 2742 - protein, 269 aa, Streptococcus agalactiae
MTLLEKINETRDFLQAKGVTAPEFGLILGSGLGELAEEIENPIVVDYADIPNWGQSTVVGHAGKLVYGDLSGRKVLALQGRFHFYEGNTMEVVTFPVRIMRALACHSVLVTNAAGGIGYGPGTLMLIKDHINMIGTNPLIGENLEEFGPRFPDMSDAYTATYRQKAHQIAEKQNIKLEEGVYLGVSGPTYETPAEIRAFQTMGAQAVGMSTVPEVIVAAHSGLKVLGISAITNFAAGFQSELNHEEVVEVTQRIKEDFKGLVKSLVAEL

SEQ ID NO: 2743 - DNA, 807 bp, Streptococcus pyogenes
atgtcattgatgactaaaattaacgaaacaaaagactttttagttactaaaggaattgaaactccagaatttggattaattctgggttcaggccttggtgaacttgctgaagaagtagaaaatgctattgttattgattatgcagatattccaaactggggcaagtcaacggttgttggccatgctggaaagttagtttacggagatttagctggccgtaaagtgctcgccttacaaggacgtttccatttttacgaaggaaatccgcttgaagtggtgactttccctgttcgtgtcatgaaagctctgggatgtgaaggcgttcttgtcacaaatgcagctggtggtatcggctacggcccaggtaccttgatggcaatcacagaccatatcaatatgaccggaaataacccactaatcggtgaaaacttggacgagtttggtccacgctttcctgatatgtctgatgcctatactaaggtttatcgcaataaggcacatgaagtggctgaaaaaatgaacatcaaactagaagatggtgtttatatgggcttgactggtccaacttatgaaacaccagcagaaatccgtgctttcaaagtattaggagcagatgctgttggcatgtcaactgtaccggaagttattgtggctgctcattctggacttaaagtgcttggtatttcagctattacaaactttgcagctggtttccaatcagaattgaaccatgaagaagttgtggaagtgacccaacatatcaaagaagatttcaaaggtcttgttaaagctattttagcggagttg

SEQ ID NO: 2744 - protein, 269 aa, Streptococcus pyogenes
MSLMTKINETKDFLVTKGIETPEFGLILGSGLGELAEEVENAIVIDYADIPNWGKSTVVGHAGKLVYGDLAGRKVLALQGRFHFYEGNPLEVVTFPVRVMKALGCEGVLVTNAAGGIGYGPGTLMAITDHINMTGNNPLIGENLDEFGPRFPDMSDAYTKVYRNKAHEVAEKMNIKLEDGVYMGLTGPTYETPAEIRAFKVLGADAVGMSTVPEVIVAAHSGLKVLGISAITNFAAGFQSELNHEEVVEVTQHIKEDFKGLVKAILAEL

SEQ ID NO: 2745 - DNA, 1269 bp, Streptococcus agalactiae
ttgctgaactttaaaatggtttctcgattatactatgctgtcaagtttatgatagccgttctatttatgacagttatggcaggagttggagctatcttaatgcactatgtattaatgtttacagagtggttagcatttggtgatagtagagaaaatactctgtctttgttaaatagtgtcacaccaattaaaagagtgttatcacttactttagtctcctttttagcatcccttagttggtattacttacaaatcaaaccaaagcaaataactagtattaaacaacaggttgtttttaaggatttttctgtaaaaaaatcaccttactggctacatataggtcacgcatttttgcaattgatttatgtaggaactggtggccctattggaaaagaaggagcgccacgagagtttggagccataaatgctgggaaaatatcggatttattagcacttaaagtgctggataaacgtttattaatcattagtggtgcagctgcaggtttgtcagcagtttatcaagtccccctagctagtgtattctttgcttttgaaactttagctttaggaatctcactgaaaaatattgtgacattgctagcctctacttttggtgcagctagtattgctcaattagttatttcgacagcccctctttatcatatttcaaagatgagtctgaattcacagtcattagcttttatgttcttgatcgttttatgtgtaactccgattgcgattagctttagatatttaaatcaaaaagtgacagagagacgtattaaaaatataaaaatattgttaagtttgccagtagtgtcattgatagtatctgttttatcaatcgtctatccccagattttaggaaatggtaatgccctagttcaagaagtctttaaagggaccacagttagcttaatcgctattttagttgttctcaagatgatagcaacattatccactctttacgctggtgcttatggcggtatactgacaccatctttttccattggtgcttgtttaggttttttgttagctagtatttctattcctttacttccccacatatcgatagtaaccagtatgttggttggtgcagctatttttttagctattacaatgagagcgccactgacagctgtcggtttagtcatatcttttactggtcaatctgttataactattgttcccctaactatagcagtactttttgctactgcctatgattattttataagaaaaatgaggagtttatatgtcaatccatat

SEQ ID NO: 2746 - protein, 423 aa, Streptococcus agalactiae
MLNFKMVSRLYYAVKFMIAVLFMTVMAGVGAILMHYVLMFTEWLAFGDSRENTLSLLNSVTPIKRVLSLTLVSFLASLSWYYLQIKPKQITSIKQQVVFKDFSVKKSPYWLHIGHAFLQLIYVGTGGPIGKEGAPREFGAINAGKISDLLALKVLDKRLLIISGAAAGLSAVYQVPLASVFFAFETLALGISLKNIVTLLASTFGAASIAQLVISTAPLYHISKMSLNSQSLAFMFLIVLCVTPIAISFRYLNQKVTERRIKNIKILLSLPVVSLIVSVLSIVYPQILGNGNALVQEVFKGTTVSLIAILVVLKMIATLSTLYAGAYGGILTPSFSIGACLGFLLASISIPLLPHISIVTSMLVGAAIFLAITMRAPLTAVGLVISFTGQSVITIVPLTIAVLFATAYDYFIRKMRSLYVNPY

SEQ ID NO: 2747 - DNA, 1311 bp, Streptococcus pyogenes
atgacgattataattatggactctaatagtgctcacgagactgataatctatcagtctcttttcttaacttttgttataatagtcttatgaaacgacactttttactcttgaccttttacctctttttaacaggtttaacagctggccttgttgcttttatcttaacaaaagccattcacctgattcagtccctcagttttggattcagtcaaggttcttttagcactatgattgctagtgttccaccacaaagacgagctctttcactcctctttgctggacttcttgcaggtcttgggtggcacctattggctaaaaaaggaaaggacattcaatctattcagcaaatcattcaagatgacatctcatttagtccctggacacagttttggcatggttggctccaattaacgaccgtatctatgggagctcctgtcggccgagaaggagcttcacgggaagtcgctgttaccttgacgtctctttggagccaaagatgcaacttgtcaaaagccgatcaaaaacttttattagcctgcgcttctggcgctgcccttggtgctgtctacaatgctcccttagccactattttatttatcttagaagctattcttaaccgttggtcccttaaaaatatatacgctgcctgcctaacgagctatgtggctgtggaaacagttgctttattacaaggccgacatgagattcaatacctaatgcctcagcaacattggacgctaggaacccttattgggtccgtcctggctggtcttatcctttccctctttgctcacgcttacaaacatcttttgaaacaccttcctaaggctgatgccaaaagtcagtggtttattccgaaagttctcatcgcttttagccttatcgcaggactcagcattttcttcccagagattttaggaaatggcaaagctggattactcttttttctccatgaagaaccacatctgagctatattagctggctacttgttgccaaagctgtcgctatctctttagtttttgcttctggagcaaaagggggtaaaattgctccttctatgatgcttggaggtgctagtggcttactactagctatccttagtcagtaccttattcccttgtctctatcaaatacgttagccattatggttggtgcaacaatctttttaggtgtgatcaataagatacccttggcggcaccagtttttctggttgaaattacaggccaatcgttactaatgattatccctttagcattagctaacctcattttttattttagctatcagttttatcgtttcatccttaaa

SEQ ID NO: 2748 - protein, 437 aa, Streptococcus pyogenes
MTIIIMDSNSAHETDNLSVSFLNFCYNSLMKRHFLLLTFYLFLTGLTAGLVAFILTKAIHLIQSLSFGFSQGSFSTMIASVPPQRRALSLLFAGLLAGLGWHLLAKKGKDIQSIQQIIQDDISFSPWTQFWHGWLQLTTVSMGAPVGREGASREVAVTLTSLWSQRCNLSKADQKLLLACASGAALGAVYNAPLATILFILEAILNRWSLKNIYAACLTSYVAVETVALLQGRHEIQYLMPQQHWTLGTLIGSVLAGLILSLFAHAYKHLLKHLPKADAKSQWFIPKVLIAFSLIAGLSIFFPEILGNGKAGLLFFLHEEPHLSYISWLLVAKAVAISLVFASGAKGGKIAPSMMLGGASGLLLAILSQYLIPLSLSNTLAIMVGATIFLGVINKIPLAAPVFLVEITGQSLLMIIPLALANLIFYFSYQFYRFILK

SEQ ID NO: 2749 - DNA, 708 bp, Streptococcus agalactiae
atgtcaatccatattgaagcaaaacaaggtgaaattgcagataaaattttacttccaggagatccactccgtgcgaaatttattgccgagaattttttagaagatgcggtgtgttttaacacagttcgcaatatgtttggttatacaggtacctataaaggacatcgtgtttctgttatgggaactggtatgggtatgccttcaatttcaatttatgctcgcgaactaattgttgattatggggttaaaacattgattcgcgtaggaacagcaggtgctattaatcctgatatccatgttcgtgaacttgttttggcacaagcagcagcaacaaattctaatattatccgtaatgattggcctgaatttgattttccgcaaattgctgattttaaacttttggataaagcttatcacatcgcaaaggaaatggatattacaactcatgtaggcagtgtattatcttcagacgtgttttattcaaaccaaccagatcgtaatatggccttgggtaaactaggtgttcatgctattgagatggaagcagcagctctctactatcttgcagctcaacacaatgttaatgctcttgctatgatgacgatttcagataacttgaataatccagaagaagatacaagtgcagaagagcgtcaaacaacatttactgatatgatgaaagttgggctcgaaacacttatttctgaa

SEQ ID NO: 2750 - protein, 236 aa, Streptococcus agalactiae
MSIHIEAKQGEIADKILLPGDPLRAKFIAENFLEDAVCFNTVRNMFGYTGTYKGHRVSVMGTGMGMPSISIYARELIVDYGVKTLIRVGTAGAINPDIHVRELVLAQAAATNSNIIRNDWPEFDFPQIADFKLLDKAYHIAKEMDITTHVGSVLSSDVFYSNQPDRNMALGKLGVHAIEMEAAALYYLAAQHNVNALAMMTISDNLNNPEEDTSAEERQTTFTDMMKVGLETLISE

SEQ ID NO: 2751 - DNA, 711 bp, Streptococcus pyogenes
atgtctatccatatttctgccaaaaaaggcgatattgctgataaaattcttctacctggagatcctttgcgcgcgaaatttatcgctgaaaatttcctagaagatgcagtgtgttttaacgaagtgcgtaacatgtttggctacacaggaacttacaaagggcaccgcgtttctgtcatgggaactggtatggggatgccttcgatctctatctatgctcgtgaattaatcgttgattacggtgtcaaaacattgatccgtgttggtactgcgggtgcgattgacccagaagttcatgtgcgtgaattggtgcttgcccaagcagcagcaaccaactcaaatattatccgtaatgacttcccagaatttgatttcccacaaattgctgattttggtttacttgacaaggcttaccatatcgccagagaaatgggagtaacaactcacgttgggaatgtgctttcttctgatgtcttttacactaacatgcctgagcgtaatatggctcttggtaaattgggtgttaaagccatcgaaatggaagcagcagctctttactatttagctgctcagcaccatgtcaaagcccttggaatcatgacgatctcagataacttgaatgatccaaccgaagatactacagctgaagagcgccaaacaactttcactgatatgatgaaggtcggcttggaaaccttaattgccaatgac

SEQ ID NO: 2752 - protein, 237 aa, Streptococcus pyogenes
MSIHISAKKGDIADKILLPGDPLRAKFIAENFLEDAVCFNEVRNMFGYTGTYKGHRVSVMGTGMGMPSISIYARELIVDYGVKTLIRVGTAGAIDPEVHVRELVLAQAAATNSNIIRNDFPEFDFPQIADFGLLDKAYHIAREMGVTTHVGNVLSSDVFYTNMPERNMALGKLGVKAIEMEAAALYYLAAQHHVKALGIMTISDNLNDPTEDTTAEERQTTFTDMMKVGLETLIAND

SEQ ID NO: 2753 - DNA, 777 bp, Streptococcus agalactiae
atgaggatagaaatgacagatttttcaactgctcttaaagtattagtggatcagtattcttatcataatgctttcttattattacaaaaacatggtcctttaaactcagatttattatttttattggaaatgatgaaagagcgtcgagagttaaacattgattttctttttgctcatcaagaacaagttgttatattacaagaaaaatacaatataaagcttttgcataacccgtatgatttagagttgctggcaaattacatcatggatttagaagcaaaagtaaaaaacggattaatcatagattttgtccgtagtgttagtcctattttatatcgtctatttatgattttacttgcacaagaagtacctcacttgcatgattacatccataatgcaagagatgatcactacgatacttggaagtttaaagaattaaaggagtcaaaccacccagtccttttggcattctctgaaaggtggcacgatagtcgcttgacttctaaaagcctggcagaatgtttacaattaaccgaccttgatgaagaagtgaaatcgaccatcattcaattaagacagttcgaaaaatcagtcagaaatcctttggctcacctgattaaaccttttgatgagcaagaactatatcgtacaactcaattttcttctcaagcatttttagaccagattatcttcttggcaaaggtaattggtgttgagtatgatactgttaattttcactacgatacggttaacaagcttattataaatatacttgag

SEQ ID NO: 2754 - protein, 259 aa, Streptococcus agalactiae
MRIEMTDFSTALKVLVDQYSYHNAFLLLQKHGPLNSDLLFLLEMMKERRELNIDFLFAHQEQVVILQEKYNIKLLHNPYDLELLANYIMDLEAKVKNGLIIDFVRSVSPILYRLFMILLAQEVPHLHDYIHNARDDHYDTWKFKELKESNHPVLLAFSERWHDSRLTSKSLAECLQLTDLDEEVKSTIIQLRQFEKSVRNPLAHLIKPFDEQELYRTTQFSSQAFLDQIIFLAKVIGVEYDTVNFHYDTVNKLIINILE

SEQ ID NO: 2755 - DNA, 792 bp, Streptococcus pyogenes
ttgccaatgactaataatcaaacactagacatccttttggatgtctatgcttataatcacgcctttagaattgctaaagccttgccaaatatccctaaaactgccctctatttactagagatgttaaaagagcgcagagaattgaaccttgcctttctagcggaacatgcagcagagaatcggaccattgaagaccagtatcactgttcattatggcttaaccaatcgcttgaagatgagcagattgccaattacattttggatttagaagttaaagtaaaaaacggtgctattattgatttcgtcaggtcagtgtcgcctattctttaccgactttttctcagactaatcacgtcagaaattccaaacttcaaggcttatatttttgatacaaagaatgaccaatatgatacctggcattttcaggccatgttggaatctgatcacgaggttttcaaggcttacctgtctcaaaagcagtctcgcaatgtgacgaccaaaagcttagcagacatgttgacgttgacctccttacctcaggaaatcaaggacttggtttttttgttacgacattttgaaaaggctgtccgtaatcctctggctcatttgattaagccttttgatgaagaggaactgcatcgcaccactcatttttcttctcaggcttttttggaaaacattatcaccttggcgactttttctggtgtaatctaccgacgtgagcctttttactttgatgacatgaatgccattattaaaaaggagttgagcctttggagacaatctattgtc

SEQ ID NO: 2756 - protein, 264 aa, Streptococcus pyogenes
LPMTNNQTLDILLDVYAYNHAFRIAKALPNIPKTALYLLEMLKERRELNLAFLAEHAAENRTIEDQYHCSLWLNQSLEDEQIANYILDLEVKVKNGAIIDFVRSVSPILYRLFLRLITSEIPNFKAYIFDTKNDQYDTWHFQAMLESDHEVFKAYLSQKQSRNVTTKSLADMLTLTSLPQEIKDLVFLLRHFEKAVRNPLAHLIKPFDEEELHRTTHFSSQAFLENIITLATFSGVIYRREPFYFDDMNAIIKKELSLWRQSIV

SEQ ID NO: 2757 - DNA, 921 bp, Streptococcus agalactiae
atgagaattcaacaattacaatatgttattaagattgtagaaactggtagcatgaatgaagccgctaaacaactctacattacccaaccttcactttcaaacgctgttaggaaccttgagactgagatgggtatccaaatttttattcgaaatccaaaaggaataacgttaacaaaagatggtatggaatttctgtcatatgcgcgacaaattctagaacaaacagcacttcttgaagagcgttataagggtgataatacaagtcgtgagctgttcagcgtttcttcacaacactatgcatttgtggttaacgcttttgtagctctctttaatggcacagacatgacccaatacgaactttttttacgtgaaactaggacttgggaaattattgatgatgttaaaaatttccgttcagagattggtgttctgtttcttaatagctataatagagatgtattaaccaaattattcgacgataattccttaattgccacaactctttttactactacacctcatattttcgtgagcaaatccaatcccttagctaatagaaaaaaattaaatatgaaagatttagaagattatccttatctgagttatgatcaaggcctgcataattctttctacttttctgaggaaatgatgtctcaaattcctcacccaaaatccattgttgtcagtgatagagcaactctgtttaatttaatgattggattagatggttatacagtggcaactggtatcctcaactcaaaattgaacggtgacgaaattgtcgcaatccctcttgacgtggatgatgttattgatattgtctatatccgacacgacaaagcaaacctttcaaaaatgggacaaaaatttattgactatttattagaggaagtttcgtttaatcataaaaataaacagtcc

SEQ ID NO: 2758 - protein, 307 aa, Streptococcus agalactiae
MRIQQLQYVIKIVETGSMNEAAKQLYITQPSLSNAVRNLETEMGIQIFIRNPKGITLTKDGMEFLSYARQILEQTALLEERYKGDNTSRELFSVSSQHYAFVVNAFVALFNGTDMTQYELFLRETRTWEIIDDVKNFRSEIGVLFLNSYNRDVLTKLFDDNSLIATTLFTTTPHIFVSKSNPLANRKKLNMKDLEDYPYLSYDQGLHNSFYFSEEMMSQIPHPKSIVVSDRATLFNLMIGLDGYTVATGILNSKLNGDEIVAIPLDVDDVIDIVYIRHDKANLSKMGQKFIDYLLEEVSFNHKNKQS

SEQ ID NO: 2759 - DNA, 903 bp, Streptococcus pyogenes
atgagaattcaacaactgcattatattatcaaaattgttgagtgcggctctatgaatgaagctgctaagcaattatttatcacacaaccaagtctatccaatgcggtcaaggatttggaaatggagatgggcattaccattttcaaccgaaatcctaaagggatcaccttgacaaaagatggggtggaatttttatcttatgctcgccaaattatagagcaaacatcactgttagaagaccgctataaaaaccacaatactggccgagagctctttagcgtttcatctcaacattatgccttcgtagtcaatgcatttgtctcactcctcaagcggaccgacatgactcggtatgaactctttttgcgcgagacaagaacttgggaaatcattgatgatgtcaaaaactttcgatctgaaattggtgttctctttatcaacgactataaccgagatgtcttgaccaaattatttgatgacaatcatttgaccgcctctccattatttaaggcacagcctcatatttttgtcagcaaatcaaatcctctagcaactaaaagcctattaagcatggacgacttgagagattttccttacctgagctatgaccaagggattcacaactccttttatttttcagaagagatgatgtcccagatgccccacaacaaatcaattgtggtcagtgaccgtgccaccctctttaacttaatgattggtttagatggctacaccgttgccagtggtattctaaatagcaatctaaatggtgaccagattgtggctatcccgctagatgtccctgacgaaattgacattgtttttatcaagcatgaaaaagccaacttgtccaaaatgggggaacgttttatcgaataccttctcgaagaagtaacctttgat

SEQ ID NO: 2760 - protein, 301 aa, Streptococcus pyogenes
MRIQQLHYIIKIVECGSMNEAAKQLFITQPSLSNAVKDLEMEMGITIFNRNPKGITLTKDGVEFLSYARQIIEQTSLLEDRYKNHNTGRELFSVSSQHYAFVVNAFVSLLKRTDMTRYELFLRETRTWEIIDDVKNFRSEIGVLFINDYNRDVLTKLFDDNHLTASPLFKAQPHIFVSKSNPLATKSLLSMDDLRDFPYLSYDQGIHNSFYFSEEMMSQMPHNKSIVVSDRATLFNLMIGLDGYTVASGILNSNLNGDQIVAIPLDVPDEIDIVFIKHEKANLSKMGERFIEYLLEEVTFD

SEQ ID NO: 2761 - DNA, 1455 bp, Streptococcus agalactiae
atgtctaatcattcgcgccgtcaccaaaagaaacactcacatacacctctacgggtgattaatttatttcttttggtgatttttattttgttaagtgtagtctcattatttcttatgtatcgtcaccattttttggcatttagacacctgaacgtcatttatggagttgtaattgttttaatcattttagtaagtttatttctttgtattaagaataaagctagaatttttacaactataattttagtattagcttctattttcgttgctactactttatatggatttaagtcaaccattgatttgacaaataatctaaataaaactgcttcatactctgaaattgagatgagtgtagttgtaccaaaagattctaaaataaccaatatagaagctgtcagcaaattagccgcaccagttaaaaacgatacttcaaatattactgatttgatagaacatataaaatcagaaaaaggaatctctattacaccacaaaaaacagattcttaccaggatgcatacaatagaattaaaagtggtgatagtcaggctatggttttaaataatgcttatgttagcttaattgaacttagcacccctgattttaaatcgcagataaaaacgatttatacttacaaaattaagaaaaaaattaatcgtaaaaatactaatcataaagaaggggtatttaatatctatattagcggtattgatacttttggctctatatcaacagtatcaagatctgatgtaaatattattatgacggttaataccaatacccacaaagtattgttaacgacaacaccacgagatgcctatgtaaaaattccagatggtgggggcaatcaatatgataaattaacccatgcaggtttgtatggcgttgagacatcaatgaaaacacttgaaaacctttacgacatcaaccttgattattatgctagaattaatttttcatcatttttaaaattaatagacctcttgggaggagtgacagtttataacgatcaagcttttacaagtaaacatggtaattttgacttccctgttggtcaagtaacattgaattctgagcaggctttgggctttgttagagaacgttattctctacaaggaggcgataacgatagaggtagaaatcaagaaaaagtgattgcagctattataaataagttagcttctagtcagtcagtaacaaaattaaatagcattacctcacagctccaaacgtccgttcaaactaatatgactattgataacattaatgatttgattaacaatcaattgtcaactggacaacgcttcactgtcgagtcacaagcattaactggtcatggttcaacgggtgaactcccttcatatgcaatgccaggagctcaactttatatgatgtcaattgatcaatctagcttatctaatgcaaaatcaaaaattaagaacacaatggaggaa

SEQ ID NO: 2762 - protein, 485 aa, Streptococcus agalactiae
MSNHSRRHQKKHSHTPLRVINLFLLVIFILLSVVSLFLMYRHHFLAFRHLNVIYGVVIVLIILVSLFLCIKNKARIFTTIILVLASIFVATTLYGFKSTIDLTNNLNKTASYSEIEMSVVVPKDSKITNIEAVSKLAAPVKNDTSNITDLIEHIKSEKGISITPQKTDSYQDAYNRIKSGDSQAMVLNNAYVSLIELSTPDFKSQIKTIYTYKIKKKINRKNTNHKEGVFNIYISGIDTFGSISTVSRSDVNIIMTVNTNTHKVLLTTTPRDAYVKIPDGGGNQYDKLTHAGLYGVETSMKTLENLYDINLDYYARINFSSFLKLIDLLGGVTVYNDQAFTSKHGNFDFPVGQVTLNSEQALGFVRERYSLQGGDNDRGRNQEKVIAAIINKLASSQSVTKLNSITSQLQTSVQTNMTIDNINDLINNQLSTGQRFTVESQALTGHGSTGELPSYAMPGAQLYMMSIDQSSLSNAKSKIKNTMEE

SEQ ID NO: 2763 - DNA, 1272 bp, Streptococcus pyogenes
atgaaaattggaaaaaaaatagttttaatgttcacagctattgtgttaacaactgtcttggcattaggtgtctatctaactagtgcttataccttctcaacaggagaattatcaaagacctttaaagatttttcgacatcttcaaacaaaagtgatgccattaaacaaacaagagctttttctatcttgttgatgggtgttgatacaggctcttcagagcgtgcctccaagtgggaaggaaacagtgattcgatgattttggttacggttaatccaaagaccaagaaaacaactatgactagtttagaacgagataccttaaccacgttatctggacccaaaaataatgaaatgaatggtgttgaagctaagcttaacgctgcttatgcagcaggtggcgctcagatggctattatgaccgtgcaagatcttttgaatatcaccattgataactatgttcaaattaatatgcaaggccttattgatcttgtgaatgcagttggagggattacagttacaaatgagtttgattttcctatctcgattgctgaaaacgaacctgaatatcaagctactgttgcgcctggaacacacaaaattaacggtgaacaagctttggtttatgctcgtatgcgttatgatgatcctgagggagattatggtcgacaaaagcgtcaacgtgaagtcattcaaaaggtattgaaaaaaatccttgctcttgatagcattagctcttatcggaagattttatctgctgtaagtagtaatatgcaaacgaatatcgaaatctcttctcgcactatccctagtctattaggttatcgtgacgcacttagaactattaagacttatcaactaaaaggagaagatgccactttatcagatggtggatcataccaaattgttacctctaatcatttgttagaaatccaaaatcgtatccgaacagaattaggacttcataaggttaatcaattaaaaacaaatgctactgtttatgaaaatttgtatgggtcaactaagtctcagacagtaaacaacaactatgactcttcaggccaggctccatcttattctgatagtcatagctcttacgctaattattcaagtggagtagataccggccagagtgctagtacagaccaggactctactgcttcaagccataggccagctacgccgtcttcttcatcagatgctttagcagctgatgagtctagctcatcagggtctggatcattagttcctcctgctaatatcaaccctcagacc

SEQ ID NO: 2764 - protein, 424 aa, Streptococcus pyogenes
MKIGKKIVLMFTAIVLTTVLALGVYLTSAYTFSTGELSKTFKDFSTSSNKSDAIKQTRAFSILLMGVDTGSSERASKWEGNSDSMILVTVNPKTKKTTMTSLERDTLTTLSGPKNNEMNGVEAKLNAAYAAGGAQMAIMTVQDLLNITIDNYVQINMQGLIDLVNAVGGITVTNEFDFPISIAENEPEYQATVAPGTHKINGEQALVYARMRYDDPEGDYGRQKRQREVIQKVLKKILALDSISSYRKILSAVSSNMQTNIEISSRTIPSLLGYRDALRTIKTYQLKGEDATLSDGGSYQIVTSNHLLEIQNRIRTELGLHKVNQLKTNATVYENLYGSTKSQTVNNNYDSSGQAPSYSDSHSSYANYSSGVDTGQSASTDQDSTASSHRPATPSSSSDALAADESSSSGSGSLVPPANINPQT

SEQ ID NO: 2765 - DNA, 729 bp, Streptococcus agalactiae
atgattgatattcattctcatatcgtttttgatgtagatgatgggcctaaaacgcttgaagagagtttatctttaatagaagaaagttatcgacaaggtgttagaataattgtttcgacatcacatagaagaaaaggtatgtttgaaacacctgaagatattatcttcaaaaacttttctatagttaaacacgaagcggaaaaaagatttgaacatcttcaaatcttatatggtggagaattgtactatacaagtgatatgttagaaaaactgaagttaaagcaaattccaactttaaacaatacgaaatttgctttaattgaattttctatgcaaacttcttggaaagatattcatacagctttgtcaaatgttttaatgcttggtattacaccagtcgttgcgcatatagagaggtataacgctttagagaatcaaaaagaacgggtgaaggaaattattaatatggggtgttacacacaaataaatagttcccatattttgaaacaaaaactttttaatgataagcataaacgctttaagaaaagagcccgttattttttagaggaaaatttagtgcattttgtagcgagtgatatgcataaccttgatgttagaccgccatttttagcagaagcttataagattatctgtagagatttcggtaaagaacgtgctaaccaactttttattgaaaatgctcaatctatattaaaaaaccattacatt

SEQ ID NO: 2766 - protein, 243 aa, Streptococcus agalactiae
MIDIHSHIVFDVDDGPKTLEESLSLIEESYRQGVRIIVSTSHRRKGMFETPEDIIFKNFSIVKHEAEKRFEHLQILYGGELYYTSDMLEKLKLKQIPTLNNTKFALIEFSMQTSWKDIHTALSNVLMLGITPVVAHIERYNALENQKERVKEIINMGCYTQINSSHILKQKLFNDKHKRFKKRARYFLEENLVHFVASDMHNLDVRPPFLAEAYKIICRDFGKERANQLFIENAQSILKNHYI

SEQ ID NO: 2767 - DNA, 690 bp, Streptococcus agalactiae
atgaataaaatagctaatacagaagttgaaataaatatattcaaccttttaaaaaaattgtggaaaaagaaatttttaatcacatttgttgccattgcatttgcaacagctggacttttctatagtctttttattgttacgccacaatatacttcttcaacaaggatatatgtcattaaccctaatacccctaataatagtattactgcacaagatctacaagcggggagttttcttgcaaatgactataaggagattattacgtctactgacgttctagaaaaagttatttcttctgaaaaattgaattatccttcgtctcagttgttgcaaaaaataacagtttctattttaaaagatacacgtgttatttcaatatcggtcgaagatgctaatccaaaaatgtctcaaaaattagcaaattcagttagagaagcagcagtttcaaaaatcaaggcagttactcaagtagaggatatcactactcttgagaagggaaatttacctaaagcaccatcttctcctaatattaaaaagaatgtactaatcgggtttattgttggtgcaggattatcaactattgttttagttattatgggtattttggatgatcgtgttaatactgaagaagatattgaaaaggtcctaggacttacttctttaggtatagtaccagatttgaataaactt

SEQ ID NO: 2768 - protein, 230 aa, Streptococcus agalactiae
MNKIANTEVEINIFNLLKKLWKKKFLITFVAIAFATAGLFYSLFIVTPQYTSSTRIYVINPNTPNNSITAQDLQAGSFLANDYKEIITSTDVLEKVISSEKLNYPSSQLLQKITVSILKDTRVISISVEDANPKMSQKLANSVREAAVSKIKAVTQVEDITTLEKGNLPKAPSSPNIKKNVLIGFIVGAGLSTIVLVIMGILDDRVNTEEDIEKVLGLTSLGIVPDLNKL

SEQ ID NO: 2769 - DNA, 687 bp, Streptococcus agalactiae
atgactcgtttagaaatagttgatagcaagttaagacaagcaaaaaaaacagaagaatacttcaatgcgatccgtacaaacatacagtttagtggaaaggaaaataaaattcttgcaattacctctgttagggaaggggaaggaaaatccactgcttcaacaagtttagctttatctttagctcaagcaggatttaaaacattattaattgatgcggatactaggaactctgttatgtctggaacctttaaagcaactggaactattaaaggcttgacgaattatttatcaggtaatgcagatcttggagatattatctgtgaaaccaatgttcctagactgatggtcgttccttcagggaaagtaccaccaaatccaacagcattacttcagaacgcttattttaataagatgattgaagctattaaaaatatatttgattatattatcatcgatactccacctattggtttagttgttgatgccgcaataatcgctaatgcttgcgatggttttattttagtaacccaagcaggcagaataaaacgtaattatgttgaaaaagcaaaagaacagatggaacaaagtggttcaaagttcttaggtattattcttaataaagttaatgaatctgttgctacttacggcgattatggaaattacggaaaaagggatagaaaaaggaag

SEQ ID NO: 2770 - protein, 229 aa, Streptococcus agalactiae
MTRLEIVDSKLRQAKKTEEYFNAIRTNIQFSGKENKILAITSVREGEGKSTASTSLALSLAQAGFKTLLIDADTRNSVMSGTFKATGTIKGLTNYLSGNADLGDIICETNVPRLMVVPSGKVPPNPTALLQNAYFNKMIEAIKNIFDYIIIDTPPIGLVVDAAIIANACDGFILVTQAGRIKRNYVEKAKEQMEQSGSKFLGIILNKVNESVATYGDYGNYGKRDRKRK

SEQ ID NO: 2771 - DNA, 1386 bp, Streptococcus agalactiae
ttgaaagaaaaagaaaatatacaaaagattattatagcgatgattcaaacagttgtggtttatttttctgcaagtttgacattaacattaattactcccaattttaaaagcaataaagatttattgtttgttctattgatacattatattgtcttttatctttctgatttttacagagacttttggagtcgtggctatcttgaagagtttaaaatggtattgaaatacagcttttactatattttcatatcaagttcattattttttatttttaaaaactcttttacaacgacacgactttccttttttacttttattgctatgaattcgattttattatatctattgaattcatttttaaaatattatcgaaaatattcttacgctaagttttcacgagataccaaagttgttttgataacgaataaggattctttatcaaaaatgacctttaggaataaatacgaccataattatatcgctgtctgtatcttggattcctctgaaaaggattgttatgatttgaaacataactcgttaaggataataaacaaagatgctcttacttcagagttaacctgcttaactgttgatcaagcttttattaacatacccattgaattatttggtaaataccaaatacaagatattattaatgacattgaagcaatgggagtgattgtcaatgttaatgtagaggcacttagctttgataatataggagaaaagcgaatccaaacttttgaaggatatagtgttattacatattctatgaaattctataaatatagtcaccttatagcaaaacgatttttggatatcacgggtgctattataggtttgctcatatgtggcattgtggcaatttttctagttccacaaatcagaaaagatggtggaccggctatcttttctcaaaatagagtaggtcgtaatggtaggatttttagattctataaattcagatcaatgcgagtagatgcagaacaaattaagaaagatttattagttcacaatcaaatgacagggctaatgtttaagttagacgatgatcctagaattactaaaataggaaaatttattcgaaaaacaagcatagatgagttgcctcaattctataatgttttaaagggtgatatgagtttagtaggaacacgccctcccacagttgatgaatatgaaaagtataattcaacgcagaagcgacgccttagttttaagccaggaatcactggtttgtggcaaatatctggtagaaataatattactgattttgatgaaatcgtaaagttagatgttcaatatatcaatgaatggtctatttggtcagatattaagattattctcctaacactaaaggtagttttactcgggacaggagctaag

SEQ ID NO: 2772 - protein, 462 aa, Streptococcus agalactiae
MKEKENIQKIIIAMIQTVVVYFSASLTLTLITPNFKSNKDLLFVLLIHYIVFYLSDFYRDFWSRGYLEEFKMVLKYSFYYIFISSSLFFIFKNSFTTTRLSFFTFIAMNSILLYLLNSFLKYYRKYSYAKFSRDTKVVLITNKDSLSKMTFRNKYDHNYIAVCILDSSEKDCYDLKHNSLRIINKDALTSELTCLTVDQAFINIPIELFGKYQIQDIINDIEAMGVIVNVNVEALSFDNIGEKRIQTFEGYSVITYSMKFYKYSHLIAKRFLDITGAIIGLLICGIVAIFLVPQIRKDGGPAIFSQNRVGRNGRIFRFYKFRSMRVDAEQIKKDLLVHNQMTGLMFKLDDDPRITKIGKFIRKTSIDELPQFYNVLKGDMSLVGTRPPTVDEYEKYNSTQKRRLSFKPGITGLWQISGRNNITDFDEIVKLDVQYINEWSIWSDIKIILLTLKVVLLGTGAK

SEQ ID NO: 2773 - DNA, 447 bp, Streptococcus agalactiae
atgaaaatttgtctggttggttcaagtggtggtcatctagcacacttgaaccttttgaaacccatttgggaaaaagaagataggttttgggtaacctttgataaagaagatgctaggagtattctaagagaagagattgtatatcattgcttctttccaacaaaccgtaatgtcaaaaacttggtaaaaaatactattctagcttttaaggtccttagaaaagaaagaccagatgttatcatatcatctggtgccgctgtagcagtaccattcttttatattggtaagttatttggttgtaagaccgtttacatagaggttttcgacaggatggataaaccaactttgacaggaaaattagtgtatcctgtaacagataaatttattgttcagtgggaagaaatgaaaaaagtttatcctaaggcaattaatttaggaggaattttt

SEQ ID NO: 2774 - protein, 149 aa, Streptococcus agalactiae
MKICLVGSSGGHLAHLNLLKPIWEKEDRFWVTFDKEDARSILREEIVYHCFFPTNRNVKNLVKNTILAFKVLRKERPDVIISSGAAVAVPFFYIGKLFGCKTVYIEVFDRMDKPTLTGKLVYPVTDKFIVQWEEMKKVYPKAINLGGIF

SEQ ID NO: 2775 - DNA, 489 bp, Streptococcus agalactiae
atgatttttgtcacagtggggacacatgaacagcagttcaaccgtcttattaaagaagttgatagattaaaagggacaggtgctattgatcaagaagtgttcattcaaacgggttactcagactttgaacctcagaattgtcagtggtcaaaatttctctcatatgatgatatgaactcttacatgaaagaagctgagattgttatcacacatggcggcccagcgacgtttatgaatgcagtttctaaaggaaaaaaaactattgtggttcctagacaagaacagtttggagagcatgtgaataatcatcaggtggactttgttaataaggtaaaaacaatgtataattttgatatcgttgtagatattgaaaggttacaaaatgtagtctatgagggaatgatgaatcgtccgtttttagaaactaatagtagtaattttattgaagaatttaaggtaatattaaaggagttgtgcgatgaaaatcaa

SEQ ID NO: 2776 - protein, 163 aa, Streptococcus agalactiae
MIFVTVGTHEQQFNRLIKEVDRLKGTGAIDQEVFIQTGYSDFEPQNCQWSKFLSYDDMNSYMKEAEIVITHGGPATFMNAVSKGKKTIVVPRQEQFGEHVNNHQVDFVNKVKTMYNFDIVVDIERLQNVVYEGMMNRPFLETNSSNFIEEFKVILKELCDENQ

SEQ ID NO: 2777 - DNA, 1092 bp, Streptococcus agalactiae
atgaaaatcaataaaaactctttattttatattgcaatatttttagttaatttttttaaatcactgggtttaggcgagggaaactcagcttacaaaatagtgatgttagttgcaattttactgtgtggaataaaatttttattagatagcctttattttgaaagaagaaaactcgtgatcatctttttattatttatcgcgaccattttgaatttattctttgttcataaggttacttttatattaactttaattttttttctagcattaaaggacatctctctaaaaaaagctttctctataataataggatcgcgtattttgggagttctattaaatcaaatttttgtgaaattagatttaatagaaattaagtatgtcaatttttatagggatggacaatttattctgagaagtgacttaggttttggtcatcctaactttattcataatttttttgctctaactattttcttgtatattgtactcaattataaacgactaaagcctgttgtgatggttttatttttaacattaaattatttattgtaccaatatactttttcaaggacagggtattatatcgtaattttatttattgtactcatttatgtgacaaagaatagcttaataaaaagagtatttatgaaattagcaccctatgtacaattttttttattagtatttacctttttgagttctacaattttttttaattcaaattttgttcaaaaattagatgttcttttaacaggtagattacactatgctcatttacaacttgtagatggtttaactccttttggaaatagttttaaggaaacaagtgtcctatttgataatagctactctatgttattgagtatgtatggtgtagtacttaccatgttttgtatgataatctattatatctatagtaaaaagataatcataattgaacttcaactactcctatttataatgtctataatattatttactgaaagtttttatcccagtgtggtaatgaatattagttggctagtttttggtaaaatattttgtgatggtatcgaacctataaaaaaggaatttactattgtgaataatata

SEQ ID NO: 2778 - protein, 364 aa, Streptococcus agalactiae
MKINKNSLFYIAIFLVNFFKSLGLGEGNSAYKIVMLVAILLCGIKFLLDSLYFERRKLVIIFLLFIATILNLFFVHKVTFILTLIFFLALKDISLKKAFSIIIGSRILGVLLNQIFVKLDLIEIKYVNFYRDGQFILRSDLGFGHPNFIHNFFALTIFLYIVLNYKRLKPVVMVLFLTLNYLLYQYTFSRTGYYIVILFIVLIYVTKNSLIKRVFMKLAPYVQFFLLVFTFLSSTIFFNSNFVQKLDVLLTGRLHYAHLQLVDGLTPFGNSFKETSVLFDNSYSMLLSMYGVVLTMFCMIIYYIYSKKIIIIELQLLLFIMSIILFTESFYPSVVMNISWLVFGKIFCDGIEPIKKEFTIVNNI

SEQ ID NO: 2779 - DNA, 723 bp, Streptococcus agalactiae
atgatacctaaagttatacattattgttggtttggaggaaatcccttaccagataatttaaagaaatatataaaaacttggagagaacaatgtccggattatgaaattattgaatggaatgagcataattatgatgttagtaaaaatgtttttatgagagaagcatatactaagaagaattttgcttatgtttctgactatgcaagattggatattatttatacttatggggggttctatctagatactgatgtggagcttttaaaaagtttagatcctttgaggattcatgagtgttttctagcaagggagattagttgtgatgtgaatacaggattaataattggcgctgttaaaggacatcactttttaaaatcaaatatgtctatatatgacaaaagtgatttaacttctcttaataagacatgtgtagaggttacaactaatttattgataaacagagggcttaagaataagaatattattcaaaagattgatgatataacaatatatccgagaaattattttaatccaaagaatttattaacaggtaaggttgattgtctgactagtgttacctattctatacatcattacgaaggaagttggaaaagttcttcatttatttcagattctctaaagattagagtaaggctcataattgattttttatttggatatggtacttatagaatgcttctaaggtttctaaagttaaagaaa

SEQ ID NO: 2780 - protein, 241 aa, Streptococcus agalactiae
MIPKVIHYCWFGGNPLPDNLKKYIKTWREQCPDYEIIEWNEHNYDVSKNVFMREAYTKKNFAYVSDYARLDIIYTYGGFYLDTDVELLKSLDPLRIHECFLAREISCDVNTGLIIGAVKGHHFLKSNMSIYDKSDLTSLNKTCVEVTTNLLINRGLKNKNIIQKIDDITIYPRNYFNPKNLLTGKVDCLTSVTYSIHHYEGSWKSSSFISDSLKIRVRLIIDFLFGYGTYRMLLRFLKLKK

SEQ ID NO: 2781 - DNA, 885 bp, Streptococcus agalactiae
atgttatatatttttactcctacatttaacagaggctaccgattatcctatctgtatgattctctatgtaatcagacaaataaaaattttatatggttgattgttgatgatggttctgaggacagtactaaggaaattgtaagtaattatataaaagagaataaagttagtattgtatatctgtataaacgtaatggcggtaagcattcagcctataatctagcaatgagatatatgcaaccaagtgattatcatgtatgtgtagatagtgatgattggttattagaagatgcagttgaaattatttttaaagatttagagagcctaacgttgtctaatagatatgtaggccttgtttatcctcgatattcattaaaccaaggtaataattggttgaatcccaaaatattagaagttaatattcctgatttaaaatataaatatcacttaaaaattgaaacttgtattgttattaataatgcttatttagtagatttcgaatttccttgtttcgaaggggagaatttcttatcagaagaaataatgtatatatatttatcaaaaaagggatacttttgtccccaaaataggaaaatctattgttttgactacttagaagatggtttgacttctaatatttttaaattatggagaaaaaatttcaaagggactattttttcattagaaaattcatatatgtatgtaatgtcttttcctaatatatttgatcgctggtggtcagctataaagataaaaatgaacatacaggctttgaaaatgactactttaggggtaatacctacactaaagagtgaagaggctgggtggaaaattttgttgggttttagctatctttggaaggtagcaaggtttaaaaagagcgag

SEQ ID NO: 2782 - protein, 295 aa, Streptococcus agalactiae
MLYIFTPTFNRGYRLSYLYDSLCNQTNKNFIWLIVDDGSEDSTKEIVSNYIKENKVSIVYLYKRNGGKHSAYNLAMRYMQPSDYHVCVDSDDWLLEDAVEIIFKDLESLTLSNRYVGLVYPRYSLNQGNNWLNPKILEVNIPDLKYKYHLKIETCIVINNAYLVDFEFPCFEGENFLSEEIMYIYLSKKGYFCPQNRKIYCFDYLEDGLTSNIFKLWRKNFKGTIFSLENSYMYVMSFPNIFDRWWSAIKIKMNIQALKMTTLGVIPTLKSEEAGWKILLGFSYLWKVARFKKSE

SEQ ID NO: 2783 - DNA, 981 bp, Streptococcus agalactiae
atggaattaatttcaataatagtgcctgtatataatggagaaatatatattgggagatgtctagatagtattcttgagcaaacttatcagaatttagagattatcataattgatgatggctctagtgatcgcacaggggatatttgcgaaaagtattttttggaagacaggcgaataaaatatttctatcaagaaaacagaggccaatcagttgcacgtaacaacggagtacttaggtgtacaggagattggattgcttttttagacagtgatgatgtttatcttccttattcaattgaggttatgtacaacatacagaaagctaccaatgccgatattgttttaactagtattggtaacttcaacaatacttacaatactagtattaattcacagtatttaaaagagattaaactttatactttagaggtggcgttggaagaaatgtattatgggaaaacttatggagtttccccgttagcaaaattatatccgagaagtaatttattgagtaatccatatccagaaggaaaaattcatgaagatatggatacaacttttaagcttatatcttgcgcttcaaaaatagcagtttgtgatattgtcactgcagtggtgtattttagcgataatagtactactaggacaaaattcaatgagagaatgttgtatttttttgaggcaattcaaaataatattgtatttataaatctaaattttccacataatacatctttaatctctgctgtaatatataatgaagtatttggtggaatagatatatgtgggaagatgattgattttaaattatatgatacagttgattattacagaaaaaaatatagaaaatattttaagactattctctttaataataggattagtgtgaaggagaaggttaaatatatattatttatttcctctataagatatttcactattgtaagaaaaatatataatttgaggttatcaaggaatgga

SEQ ID NO: 2784 - protein, 327 aa, Streptococcus agalactiae
MELISIIVPVYNGEIYIGRCLDSILEQTYQNLEIIIIDDGSSDRTGDICEKYFLEDRRIKYFYQENRGQSVARNNGVLRCTGDWIAFLDSDDVYLPYSIEVMYNIQKATNADIVLTSIGNFNNTYNTSINSQYLKEIKLYTLEVALEEMYYGKTYGVSPLAKLYPRSNLLSNPYPEGKIHEDMDTTFKLISCASKIAVCDIVTAVVYFSDNSTTRTKFNERMLYFFEAIQNNIVFINLNFPHNTSLISAVIYNEVFGGIDICGKMIDFKLYDTVDYYRKKYRKYFKTILFNNRISVKEKVKYILFISSIRYFTIVRKIYNLRLSRNG

SEQ ID NO: 2785 - DNA, 963 bp, Streptococcus agalactiae
atggataaagttagtatcattatcccagtttataacgttcaatctttcctaaacgagtgtatagaaagtgttttagctcaaacttattcaaatttagaaattattctagttaacgatggctctacagataattccggggatatctgtgattattattcagaaatagatgggcgtatattcgtttttcacaaaaataatggtggtttatcagatgctcgtaattatggaattagtagagctactggcgattatatttatttacttgattcggatgattatctatataaagaagatgcaatcgagagaatggttgaatttagcgagaaatataattcagaaattgttttagggtgttatgttgaaaaaagagaacaacatattataaatatcgttttagaagatgaaatgatagaaactattagtccagtacaagcaatacaaaatatttataattatgatgcctatagagctatttttactgtagcacataataaattatataagagagaattattttctacgctgtgctatccagtagggaagttacacgaagatgaatttttaacctataaattatatttgaaagccaaaaatataattttctttagatataatacttatgcatatcgtattagagaaaatagcataatgactggttcctacaatattaaaaggctacatgctgtagaagcacttaaggaaagaatttatttattagaaaagtatccagacttagtatttcaaagtgagagagctttaattaaaactatggaagtaaatttgatagagttatataaaaataatttttataaggaatttcatactctgaaaactgaatataaaaaaactatttttgattttataaaaaaacaacgtatgctactaaaaataaagtattatttaaagtattgtgtagtgcattttaaaatattaaattgtaaaagaaagaaaaagataaataaa

SEQ ID NO: 2786 - protein, 321 aa, Streptococcus agalactiae
MDKVSIIIPVYNVQSFLNECIESVLAQTYSNLEIILVNDGSTDNSGDICDYYSEIDGRIFVFHKNNGGLSDARNYGISRATGDYIYLLDSDDYLYKEDAIERMVEFSEKYNSEIVLGCYVEKREQHIINIVLEDEMIETISPVQAIQNIYNYDAYRAIFTVAHNKLYKRELFSTLCYPVGKLHEDEFLTYKLYLKAKNIIFFRYNTYAYRIRENSIMTGSYNIKRLHAVEALKERIYLLEKYPDLVFQSERALIKTMEVNLIELYKNNFYKEFHTLKTEYKKTIFDFIKKQRMLLKIKYYLKYCVVHFKILNCKRKKKINK

SEQ ID NO: 2787 - DNA, 1005 bp, Streptococcus agalactiae
atgtataaagtttcaattatttgcaccaattataacaaagctccttggatatctgatgcacttgacagttttttaagccaagtgacagattttgaggttgaaattattgttattgatgatgcttctacagatgactcacgagagattttaaagagttatcaaaaaaagtcttcaggaaaaattaaattactctttaacgaaactaatattggaataacaaagacttggataaaagcatgcctttatgcaaaaggcaaatatattgctagatgtgatggtgatgattactggacggatagttttaaactccaaaaacaagttgatgtcttagaagcttccaaacggtcacgatggtgtaatactgattttgactttgtaaatagtcaaggcgacttattatatgctaatgctttttcatctggtcatacacctttgacagatacttacgaaaaagttttagccttaaaagggatgacgatggcatcgacatggttagttgatgctgatttaatgagacaagtaaaccaaaaaatcaatgtagatacaccagacgatacttttgatattcaactagagttatttcaactgactcaactgacctatattaaagactcaacgacgatttatcgcatgacaaccgattctgattcaagacctactgatacaccaaaaatgatttatcgtattcaaaaactacttgatactcagttaaattacttaaaaaagtataatcaggtagatacaaaagaagtgtctgaactattattacaacaagatgctaagcaagaaatacgaattcatgagttgagttgctttattcaagaattacaacaaactatcgtagataaaacaaagcagcaagaaacacgtgaagtggagttgcaaaatgtcatagaagaacaaaaaaatcaactatctgaattaagacaacaataccatgccattattaattcacgtcaatggaaatacacgtctaagctcattgcttttattaggagaaaaaaa

SEQ ID NO: 2788 - protein, 335 aa, Streptococcus agalactiae
MYKVSIICTNYNKAPWISDALDSFLSQVTDFEVEIIVIDDASTDDSREILKSYQKKSSGKIKLLFNETNIGITKTWIKACLYAKGKYIARCDGDDYWTDSFKLQKQVDVLEASKRSRWCNTDFDFVNSQGDLLYANAFSSGHTPLTDTYEKVLALKGMTMASTWLVDADLMRQVNQKINVDTPDDTFDIQLELFQLTQLTYIKDSTTIYRMTTDSDSRPTDTPKMIYRIQKLLDTQLNYLKKYNQVDTKEVSELLLQQDAKQEIRIHELSCFIQELQQTIVDKTKQQETREVELQNVIEEQKNQLSELRQQYHAIINSRQWKYTSKLIAFIRRKK

SEQ ID NO: 2789 - DNA, 954 bp, Streptococcus pyogenes
atgaataattttgtgtgtcatactttataccatttactgattactataataaagttaaaagataaagaaaatactagaatatttatttgtgacactatcacgaattatgaaacttgggtaaaaacattaaatgaacagggaataaggacggaagcagttaaagagtttgcttatcgggagcagttacaaagtaaaaatattgaagaagtgatggagcttgtagattcagacttaaatcactactttgagagagtagatacacaagtctatctatttaatgatgatactttaataggtcgctatatggtgtatttgggtaaaaattatcatctaattgaagatggttataactgttttcaagccaagttattcttgggtggttctgtcgtaaaacgagtaattaaaacttacttatttaaaaagtatgttccgtatggtttttcaaaatattgtctctcaattgaggttaattctttagtggggctacctcatgacataaggagtaagaaatataaagaactaccgagaaaaaaattatttgatagtcttaacaaagagcaaaaatcactgattttcaaaatatttaaaacaaaaccattaactataactccaaagtcagtattattgttgacacagccacttgcacaagataaatgttataaaacacctacagagaggtttcaaagtattcaagagcaatacgattattttgacgatattgtccaggaatatagaacgttagggtacaatgtttatttaaaagttcatcctagagatgtagtagattattccaaattgccggtagagctattaccatcaaatatccctatggaaattatagagttgatgttaacaggacggttcgaatttgggataacacattcgtccaccgcgctggattttttaacttgtgttgataaaaaaataactttagtagatctgaaggatattaaa

SEQ ID NO: 2790 - protein, 318 aa, Streptococcus pyogenes
MNNFVCHTLYHLLITIIKLKDKENTRIFICDTITNYETWVKTLNEQGIRTEAVKEFAYREQLQSKNIEEVMELVDSDLNHYFERVDTQVYLFNDDTLIGRYMVYLGKNYHLIEDGYNCFQAKLFLGGSVVKRVIKTYLFKKYVPYGFSKYCLSIEVNSLVGLPHDIRSKKYKELPRKKLFDSLNKEQKSLIFKIFKTKPLTITPKSVLLLTQPLAQDKCYKTPTERFQSIQEQYDYFDDIVQEYRTLGYNVYLKVHPRDVVDYSKLPVELLPSNIPMEIIELMLTGRFEFGITHSSTALDFLTCVDKKITLVDLKDIK

SEQ ID NO: 2791 - DNA, 141 bp, Streptococcus agalactiae
atgaaaaatcaaaggaatagacacagtgacaatgaaccgaaaatacttaggattgtaaaaagatttgctatgataataaatataagcaaaggcaactattccagttattatagtaggaacaaaagctccaaaaaccctaga

SEQ ID NO: 2792 - protein, 47 aa, Streptococcus agalactiae
MKNQRNRHSDNEPKILRIVKRFAMIINISKGNYSSYYSRNKSSKNPR

SEQ ID NO: 2793 - DNA, 1398 bp, Streptococcus agalactiae
atgaatactaagaaattacttcaatctggttttatttatacactcgggaatttattggtgcaaggattagcctttatcacacttcccatctacactcgagtcatctcaacagaagtttatggccaatatagtttatatgttgcttggatgggaattattactctgtttattggtcttcagacgagcggttctttaagttcggctcgagtcaaatatggagaagagtttaaaagctactctgggagtgccttttctgtaggtaatatatggtttcttattgtacttttgatagcttttctatttagaagttttcttgcaccattagttggtttttctgaatctatttttttattaatggtgtgtcaaagttacgctaactatgtggtgactttctttggtcagtattttatacaacaacagaggagcttggctaatttaatactatccttagccaatgcagtttcatctgttgcactatctctatttttaatttttcattggtccgatgactttttatctagggtttttggagcttttgttcctactataataactggaatagttgcctttgcttatatttattatcatagcaaatctttttacaatcctaagtattttcggttcattgtcactgtgtctattcctttgatttttcatttgttaggacatcagttattaaatcaattagataggattatgctagctcgcttatatagtactaaagaagttgcaatgtatagtttcggttattcgcttggaatgattattcagattgttttgaatagtattaatatggcttggattccatggttttttgatgctagaaaagaaaaattactgcaactttcaacttatattagccgttatctctatttaggagttttcttaacattaggttatttgactgtttttcctgagttagctcaaataatgggaggagacaagtatagtagtagtgttcaatttatttctttaattattgtcagctattttttagtctttctctatacatttcctgtaaatatccaattcttctatgctaatacgacatggattcctattgggacattattagctgctggtgtaaattggttactaaaccttgtattaattcctcattatgcagcctatggcgctgctatggctacaataatatcttatttagccttgttgatttttcatcatattgtttcgaaagttaaataccattattcagatgtctcagttaggcagtacattattttaagtggtatagtatttagttatgctatgttaatgaacatgttcctaggtaatatcgttattagatggagtttaggaataattattcttatagtatatagcattgtttttcaaaaagtcattttagacttattgggtaaaaaaagaaggagaaga

SEQ ID NO: 2794 - protein, 466 aa, Streptococcus agalactiae
MNTKKLLQSGFIYTLGNLLVQGLAFITLPIYTRVISTEVYGQYSLYVAWMGIITLFIGLQTSGSLSSARVKYGEEFKSYSGSAFSVGNIWFLIVLLIAFLFRSFLAPLVGFSESIFLLMVCQSYANYVVTFFGQYFIQQQRSLANLILSLANAVSSVALSLFLIFHWSDDFLSRVFGAFVPTIITGIVAFAYIYYHSKSFYNPKYFRFIVTVSIPLIFHLLGHQLLNQLDRIMLARLYSTKEVAMYSFGYSLGMIIQIVLNSINMAWIPWFFDARKEKLLQLSTYISRYLYLGVFLTLGYLTVFPELAQIMGGDKYSSSVQFISLIIVSYFLVFLYTFPVNIQFFYANTTWIPIGTLLAAGVNWLLNLVLIPHYAAYGAAMATIISYLALLIFHHIVSKVKYHYSDVSVRQYIILSGIVFSYAMLMNMFLGNIVIRWSLGIIILIVYSIVFQKVILDLLGKKRRRR

SEQ ID NO: 2795 - DNA, 1023 bp, Streptococcus agalactiae
atggtttatattattgcagagattggttgcaatcataatggagatattaatcttgcgaaaaaaatggtagatgttgccgtgtcttgtggtgttgatgctgttaaatttcagacttttaaagctgagaaacttatttctaaatttgctcccaaagctgaatatcaaaaagcaactacaggaacagcagacagtcaacttgagatgacgaaacgtttagagttaagctttgaagaatacttagaaatgcgtgattatgcaatttcaaaaggtgtggagaccttttcaacaccttttgatgaagagtcattagagttcttaatttctacagatatgccaatttacaaaattccatcaggagaaatcactaatttaccttacttagaaaagattggcaagcaacaaaagaaagttattctttcgacgggtatggcggtaatggaagagatccatcaagcggtgaatattttacgtcagaatggtacaaccgacatttctattttacattgtacaacagagtacccaacaccttacccctctctaaatttaaacgttattcatactttgaaagatgaatttaaagatttaacgataggttattcggatcattcaattggatcagaagtacctatcgcagcagcagcaatgggtgcagaagttattgaaaaacactttactttagatactaatatggaaggtccggatcataaagccagtgcaacacctgatattttagctgctttagttaaaggggttcgcattgttgaacaagccttaggtagatttgaaaaaatcccagatccagtagaagaaaaaaataagattgttgctcgtaaatcagtcgttgctttaaaaccaattaaaaaaggcgatatttattcaatagaaaatattacggtgaagcgcccaggtaatggtatttctcctatgaactggtatgacatcttgggacaagaagcgcaagatgatttcgaagaggatgaagttattcgtgattcacgctttgaaaatcaattgcccgagtta

SEQ ID NO: 2796 - protein, 341 aa, Streptococcus agalactiae
MVYIIAEIGCNHNGDINLAKKMVDVAVSCGVDAVKFQTFKAEKLISKFAPKAEYQKATTGTADSQLEMTKRLELSFEEYLEMRDYAISKGVETFSTPFDEESLEFLISTDMPIYKIPSGEITNLPYLEKIGKQQKKVILSTGMAVMEEIHQAVNILRQNGTTDISILHCTTEYPTPYPSLNLNVIHTLKDEFKDLTIGYSDHSIGSEVPIAAAAMGAEVIEKHFTLDTNMEGPDHKASATPDILAALVKGVRIVEQALGRFEKIPDPVEEKNKIVARKSVVALKPIKKGDIYSIENITVKRPGNGISPMNWYDILGQEAQDDFEEDEVIRDSRFENQLPEL

SEQ ID NO: 2797 - DNA, 1152 bp, Streptococcus agalactiae
atgaaaaaaatttgtttagtaaccggatcgcgtgctgaatacggaataatgaagccattgattcaaagattgtcaaaagataaagaagtcaacttacaaattattgcaacagcaatgcatctggaagaaaagtacggctatacttatcgtcaaattgaagaagacggttttgatattgcttataaagttcccttacatctttatgatactgacagaagaactgtatctactgcaatggcgcatttacaactaggattgaccaaaatttttgacaaggaagactatgatctagtcatcattttaggggatcgttatgaaatgttaccagttgtgaatgtagcgttgatttataatgtcccagtatgccaccttcatggaggggagacctcattaggcaattttgatgagtatattcgccatgcaattactaagatgagtcacctacacttagtctctacagaggactttcgtcaacgtgtgattcagatgggagaacaacctcaatttgtaattaacacaggagctctcggagtggaaaatgctctatcaatcccttctctaaccaaagaagcaatagaaaagcaattaggtattgcactagaggaatcctattttgttgttctctatcatcctgttacttttgaacaaggaaaaagtgctggagagcagatgaaagcggtactatcagccctttctaagtttggtgtccagtgtctatttataggatccaattcagatactggttctgatgatattgcaaaggctatcaatacttatttgacaaatcatgaaaatagtcattgctttgcttctttatcaacccaactttatcattccttaattcgtcattcactaggactgattggtaattcgtcttctggtttaatagaagttccttctttgatgaaacctactcttaatattggtgatcgccaaaaaggtaggctacatggagaaagtgtagtaagtgtaccagtcgaaacctcctctgtattggagggattatcaaaattgaatgaagtgaccaactttgacaatccctactacaaagagaatgcttcatctattgcatatgaagcaataaagctgtatttgaaagatgaaccttcaatttcccaaccattttatgatttaaaggagaataatctaaaa

SEQ ID NO: 2798 - protein, 384 aa, Streptococcus agalactiae
MKKICLVTGSRAEYGIMKPLIQRLSKDKEVNLQIIATAMHLEEKYGYTYRQIEEDGFDIAYKVPLHLYDTDRRTVSTAMAHLQLGLTKIFDKEDYDLVIILGDRYEMLPVVNVALIYNVPVCHLHGGETSLGNFDEYIRHAITKMSHLHLVSTEDFRQRVIQMGEQPQFVINTGALGVENALSIPSLTKEAIEKQLGIALEESYFVVLYHPVTFEQGKSAGEQMKAVLSALSKFGVQCLFIGSNSDTGSDDIAKAINTYLTNHENSHCFASLSTQLYHSLIRHSLGLIGNSSSGLIEVPSLMKPTLNIGDRQKGRLHGESVVSVPVETSSVLEGLSKLNEVTNFDNPYYKENASSIAYEAIKLYLKDEPSISQPFYDLKENNLK

SEQ ID NO: 2799 - DNA, 627 bp, Streptococcus agalactiae
atgaaaaaaaagttggcatttttaggcgcaggaagtcatgctgatgcgattgctccggttattgatcctcttgtgtatgatttcgtaggtttttttgatgataaagatattacggagcatgatggttatcctgttcttggaaaactttatgatgtgctaccttaccttgaagatggctcaatagatgcagtatttattacaataggtgataatgctaaaaggaaagaactatttgaatatgtagcaaaggattattatgactttattattaacatcattagtcccaatgctttagtattgacaccagatagtatttgtggacgtggtatctttattggttttggggcttttataggttctaaagtgaagctgtttgataacaatgttgttaatacaggagcgctcattgaacatcatactgttgtagaatcacactgtaatatagcacctaatgctaccataaatggtctttgttatattagagaagaagtttatgtaggtagtgccagtgttattattcaaaccttggatatttcatcatgtacgacaattggagcaggagctgttgttgtaaaagatattatagaacctggaacctatgtaggggttccagccaaaaaaataaaa

SEQ ID NO: 2800 - protein, 209 aa, Streptococcus agalactiae
MKKKLAFLGAGSHADAIAPVIDPLVYDFVGFFDDKDITEHDGYPVLGKLYDVLPYLEDGSIDAVFITIGDNAKRKELFEYVAKDYYDFIINIISPNALVLTPDSICGRGIFIGFGAFIGSKVKLFDNNVVNTGALIEHHTVVESHCNIAPNATINGLCYIREEVYVGSASVIIQTLDISSCTTIGAGAVVVKDIIEPGTYVGVPAKKIK

SEQ ID NO: 2801 - DNA, 1239 bp, Streptococcus agalactiae
atgaagccaatttgtattattcctgcgcgatcagggtcaaaaggattaccagataagaatatgttattcctatctggtaaacccatgattttccatactatagatgctgcaattgaatctggaatgtttgataagaaagatatttttgttagtacagattcagaattgtacagagagatttgtttagaacgcggtatttcagtggtgatgagaaaaccggaactttcaactgatcaggcaacttcgtatgatatgttaaaagattttttatctgactatgaagataatcaggagtttgtgttacttcaagtaacttctccactaagaaaatcatggcatataaaggaagcaatggagtattattcttcacatgatgttgacaatgttgtaagtttttctgaagttgagaaacaccctagtctgtttacaacattatctgatgaaggctatgctatagatatggtgggagcagataaaggttatcgtcgccaagatttacaacctttatactatccgaacggcgctatttttatttctaataaagaaacttacttaagggaaaaaagctttttcacctctaggacatatgcttatcaaatggcaaaggaattttcattagatgttgatacgagagatgattttatccacgtcatcggtcacctctttttcgattatgccattagggaaaaagagaataaagttttttataaagaaggctatagtcgtttgttcaatagagaagcttcaaagataattttaggtgattcaaaaacgatatctacctcactagaaagttaccataattattcccaaggtggtgtaacattagcaacgatgttggaaaacttacctaactttttgacagctaatgtaacagaggcttttgtttctataggggtaaatgatctcattacaggttatagtgtggaagaaatattcagcaatttccaaaaactctactcattattagctgagaataaaataaagatgagattgacaactattgcttacaccctttttagagaaactgtcaataatgcagatattgagaaaatcaatcaatggctaacagaattttgttatcaaaatcagattccactgttagatattaatagatttttatcaaaggatggtaatctaaattatcatttaactagtgatggattgcattttactcaagaggctaatgatttgttacaaagtcaatatcaattatttgtagacgaagttaaaacctta

SEQ ID NO: 2802 - protein, 413 aa, Streptococcus agalactiae
MKPICIIPARSGSKGLPDKNMLFLSGKPMIFHTIDAAIESGMFDKKDIFVSTDSELYREICLERGISVVMRKPELSTDQATSYDMLKDFLSDYEDNQEFVLLQVTSPLRKSWHIKEAMEYYSSHDVDNVVSFSEVEKHPSLFTTLSDEGYAIDMVGADKGYRRQDLQPLYYPNGAIFISNKETYLREKSFFTSRTYAYQMAKEFSLDVDTRDDFIHVIGHLFFDYAIREKENKVFYKEGYSRLFNREASKIILGDSKTISTSLESYHNYSQGGVTLATMLENLPNFLTANVTEAFVSIGVNDLITGYSVEEIFSNFQKLYSLLAENKIKMRLTTIAYTLFRETVNNADIEKINQWLTEFCYQNQIPLLDINRFLSKDGNLNYHLTSDGLHFTQEANDLLQSQYQLFVDEVKTL

SEQ ID NO: 2803 - DNA, 489 bp, Streptococcus agalactiae
ttgagtatgagagaaactgaaacacacgatcaccaagcgctaattcaaaaattgttagtcagtattcattatttaaccttgtttcgtgatgaaattatattagtagaaaaaaccccatctttactggggaaacatttttctattgctattgtgcagaatgaactaggtgagatactttctaaaatagaagctttgagtaagcaaaaaaaactgattcgttctatttattggtatgatgaatcgtcatttaaagttatgaataaggctctggctattgtagaagaatggattaagggcttagataatcttttagaattctgtcaatcacagacggtttttcaagcaattttaggtgatgaacgtgcacatgtatttggaatccttattgatgtttatacttctttaaacattataaatacttctttgaaagaagaaaattctagaccagtgtccttatctgatttggctctaggtcttaaggacgaagat

SEQ ID NO: 2804 - protein, 163 aa, Streptococcus agalactiae
MSMRETETHDHQALIQKLLVSIHYLTLFRDEIILVEKTPSLLGKHFSIAIVQNELGEILSKIEALSKQKKLIRSIYWYDESSFKVMNKALAIVEEWIKGLDNLLEFCQSQTVFQAILGDERAHVFGILIDVYTSLNIINTSLKEENSRPVSLSDLALGLKDED

SEQ ID NO: 2805 - DNA, 534 bp, Streptococcus pyogenes
gtgaatgttactgaacaaaatagtcatcaaatcttaatccaaaagttattggtcagtatccactatttgactctttttcgagatgaactgaagcttgtagaacgaactccttctatacttggaggggaatttccagctcatttagtacagtctgagttgggagatattgttgcggccattgataccttggatatgcagcaacgcttgattgagtctaccttttggtatgaagaatcagcttttaagttgatgaacaaaactttggatattgtcgataattggattaaaggagtggatcatctgatagatttatgccagtccaaagaagtctttcaaattattattggagataaacgcattcgagtttttggggtcttaagtgatgttttttcatctttaaaagtgagtgctttgtcacttaaggaagctcctattccggatgtgctctatgaacatatccagagggttaatcttgaagaagaagcttttataaaatattaccaaagccctaaggtacccacaggtgagtttgaa

SEQ ID NO: 2806 - protein, 178 aa, Streptococcus pyogenes
VNVTEQNSHQILIQKLLVSIHYLTLFRDELKLVERTPSILGGEFPAHLVQSELGDIVAAIDTLDMQQRLIESTFWYEESAFKLMNKTLDIVDNWIKGVDHLIDLCQSKEVFQIIIGDKRIRVFGVLSDVFSSLKVSALSLKEAPIPDVLYEHIQRVNLEEEAFIKYYQSPKVPTGEFE

SEQ ID NO: 2807 - DNA, 651 bp, Streptococcus agalactiae
atgaaacattctagttggcatgatttaataaaaagagaactacccaatcattactacaataaaattaatacatttatggatgcagtttacgaaagcggaatcgtttatcctccaagagataaggtgttcaatgccatacagataacaccactagaaaacgtaaaagtagtgattattggccaagatccttaccatggacctcaacaagctcaaggactctcattttctgttccagacaatttaccagctcctccttcacttcaaaatattctaaaagaattagcagaagatatcgggtcacgttcacatcatgacttaacatcatgggcgcaacaaggagtgctgctattaaatgcttgtttaacagttccagaacaccaagctaatggtcatgctgggcttatatgggaaccttttactgatgctgtcatcaaagtggttaaccaaaaggaaacaccagtagtctttattctgtggggtggctatgctcgaaagaaaaagtcgctaattgataatcctattcatcatattattgagagtcctcatccgagtcccttatctgcttatcgtggcttctttggtagcagacctttttctagaacaaatcatttcttagaagaagaaggaataaatgagattgattggttaaat

SEQ ID NO: 2808 - protein, 217 aa, Streptococcus agalactiae
MKHSSWHDLIKRELPNHYYNKINTFMDAVYESGIVYPPRDKVFNAIQITPLENVKVVIIGQDPYHGPQQAQGLSFSVPDNLPAPPSLQNILKELAEDIGSRSHHDLTSWAQQGVLLLNACLTVPEHQANGHAGLIWEPFTDAVIKVVNQKETPVVFILWGGYARKKKSLIDNPIHHIIESPHPSPLSAYRGFFGSRPFSRTNHFLEEEGINEIDWLN

SEQ ID NO: 2809 - DNA, 651 bp, Streptococcus pyogenes
atggctcattcaatttggcatgagaaaatcaaatcatttttgccggagcattactacggtcgcatcaatcactttttagatgaagcctatgcttccggtcttgtctatcctccacgagaaaatgtctttaaagccttacaagtcactcctttggaagaaaccaaagtgttgattttaggacaagacccttatcatggccccaaacaggcccagggcttatcattttcagttccagaagagatttctgctccgccatcccttattaatattttaaaagaattagcagatgacattggtcctcgtgaccatcatgatttaagcacttgggctagtcaaggggttctgcttttgaatgcttgcttaacagtgccagcaggccaggctaatgggcatgcaggcttaatatgggagccatttacagatgctgttattaaagtgctgaatgagaaagacagccctgtagttttcattttgtggggagcttatgcaaggaagaaaaaagccttcattactaatccaaagcaccacatcatcgagagccctcatccaagccctttgtcatcttatcgtggcttttttggcagcaaacccttttcaagaaccaatgctattttagaaaaagagggcatgactggcgtagattggctaaaa

SEQ ID NO: 2810 - protein, 217 aa, Streptococcus pyogenes
MAHSIWHEKIKSFLPEHYYGRINHFLDEAYASGLVYPPRENVFKALQVTPLEETKVLILGQDPYHGPKQAQGLSFSVPEEISAPPSLINILKELADDIGPRDHHDLSTWASQGVLLLNACLTVPAGQANGHAGLIWEPFTDAVIKVLNEKDSPVVFILWGAYARKKKAFITNPKHHIIESPHPSPLSSYRGFFGSKPFSRTNAILEKEGMTGVDWLK

SEQ ID NO: 2811 - DNA, 636 bp, Streptococcus agalactiae
atgaatattataattatgattatcattgcctatctgttaggctctatccaaactggactttggattggtaaatatttttaccaagtcaatcttcgtcaacacggtagtggtaatactggcaccacgaataccttccgtattttaggtgtaaaagctggcattgtcactttgactattgacattttaaaagggactctagcaacacttattcctatcatattaggtataacgacagtatctccattttttatcggtttttttgctattataggtcacactttccctatttttgcacaattcaaaggtgggaaagccgttgctacaagcgctggggttttgctaggatttgcaccttcttttttcctttacttattagttatctttttattaacgctttatctttttagcatgatttccctatccagtattacagtagctgttgtaggtattcttagtgtcttaatttttccattagtaggctttatattaacggactacgactggatatttaccactgtggttatcttaatggccctaacgattattatccgacatcaggataatatcaaacgtattcgaaaaaggcaagaaaatttggttccgtttggcttaaacctaagtaaacaaaaaaataaa

SEQ ID NO: 2812 - protein, 212 aa, Streptococcus agalactiae
MNIIIMIIIAYLLGSIQTGLWIGKYFYQVNLRQHGSGNTGTTNTFRILGVKAGIVTLTIDILKGTLATLIPIILGITTVSPFFIGFFAIIGHTFPIFAQFKGGKAVATSAGVLLGFAPSFFLYLLVIFLLTLYLFSMISLSSITVAVVGILSVLIFPLVGFILTDYDWIFTTVVILMALTIIIRHQDNIKRIRKRQENLVPFGLNLSKQKNK

SEQ ID NO: 2813 - DNA, 720 bp, Streptococcus pyogenes
ttgcaaaataatttgctaattttttccgaattcttttccagatctagttctccaatctatgaatatgttataataaggattatgaaattactactttttattaccattgcctatttacttggttctattccaactggactatggattggacagtacttttaccacatcaacttacgagagcatggatcaggaaatactggaaccacaaatacttttcggattttaggtgtcaaggcaggaacagctaccttagctattgatatgtttaaagggacactttcaatattgttaccaattatttttggtatgacttcaatttcatccattgctatcggctttttcgcagttttagggcatacttttcctatttttgccaactttaaaggtggtaaggccgtagcaacaagtgctggtgtattgctaggctttgctccgttatatctcttttttttagcatctatctttgttttagttctctatttatttagtatgatatctttagctagtgtggtttcagctatcgttggtgtgttatctgttttaacatttcctgccattcattttcttttaccaaattatgactactttttaacttttattgtgatattacttgcgttcattattattataagacacaaagataacattagtcgtatcaaacatcatactgaaaatctaataccttgggggctaaatttaagcaaacaagtgcctaaaaaa

SEQ ID NO: 2814 - protein, 240 aa, Streptococcus pyogenes
LQNNLLIFSEFFSRSSSPIYEYVIIRIMKLLLFITIAYLLGSIPTGLWIGQYFYHINLREHGSGNTGTTNTFRILGVKAGTATLAIDMFKGTLSILLPIIFGMTSISSIAIGFFAVLGHTFPIFANFKGGKAVATSAGVLLGFAPLYLFFLASIFVLVLYLFSMISLASVVSAIVGVLSVLTFPAIHFLLPNYDYFLTFIVILLAFIIIIRHKDNISRIKHHTENLIPWGLNLSKQVPKK

SEQ ID NO: 2815 - DNA, 102 bp, Streptococcus agalactiae
gtgacctccaaattttttcatcttttttatattacaagttttttgctgtttttgcaaaattatttttttaaaaatagcaaaaagacttttatgcttatgtta

SEQ ID NO: 2816 - protein, 34 aa, Streptococcus agalactiae
MTSKFFHLFYITSFLLFLQNYFFKNSKKTFMLML

SEQ ID NO: 2817 - DNA, 1959 bp, Streptococcus agalactiae
ttggaggtcactttggctaaacaagatataacagtgacgaattatggcgacgatgctattcaagtcttagaaggattagatgctgttcgtaagcgtccagggatgtatatcggttccacagatggaactggtttacatcatttagtgtgggaaattgtagataatgcagttgatgaagctctatcaggttttggaaatcgcattgatgttattattaacaaagatgggagtataactgttacagaccatggacgcggtatgccaactggaatgcatgctatgggaaaacctactgttgaagtcatcttcacggtgcttcatgcaggtggaaaatttggacaaggtggttataaaacatcaggtggtctccatggtgttggatcatctgtagttaatgctttgtcttcttggttagaagttgaaatcattcgcgacggagctatttacagacaacgttttgaaaatggtggtaagcccgttacaactctgaaaaaaattggcacggcaccaaaatcaaaatctggaacttctgtcagctttatgccagatcaatcagtattttcaacgatagattttaagtttaatacaattgcagagcgcttaaaggaatctgcttttctcttaaaaaatgttactttaaccttaacagataatcgttcagaagaagcagagcatctagaatttcattatgaaaacggtgttcaagattttgtagagtatttaaatgaagataaagaaacgttgacaccaatcatgtttttcgaaggtgaagaacaagaatttcatatcgaagttgctttgcagtataatgatggtttttcagataatatcctttcttttgtcaataatgttcgtactaaagatggtggaacacatgaaactggcttgaaatcagctattacaaagtctatgaatgactatgcacgtaaaacaggacttcttaaagaaaaagataaaaaccttgaaggttctgattatcgtgaggggctatcagccattttatctattcttgtacctgaggagcacttgcaatttgaaggtcaaactaaagataaactaggaagtcccttagcacgaccaattgttgatggtattgtttctgaaaagttaacttactttcttatggaaaatggagatttagcatctaatttaatccgtaaggcaataaaagcacgtgatgcgcgtgaagctgcacgtaaagcacgtgatgaaagtaggaatgggaaaaagtcgaaaaaagataaaggtctactttctggaaaattaacccctgcacaatcaaaaaatgctaagaaaaatgaactctatttagtcgaaggagactctgcaggtggctctgctaagcaaggtcgtgatagaaagtttcaagctattttaccgttgcgaggaaaagtattgaatacagctaaggcaaagatggctgatattataaaaaacgaagaaattaatacaatgatccataccattggtgcaggtgttggtcctgattttaatcttgacgatattaattatgataaaattatcattatgaccgatgctgatactgacggagctcatattcagacactattattaactttcttttatcgctatatgagacctcttgttgaagagggacatgtctatattgctttgccacctttgtataaaatgtcaaaaggaaaaggtaagaaagaaattgttgagtatgcttggacggatatagagttagaagaattacgacaaaaatttggtaaaggctcactattacaacgatataaagggcttggggaaatgaatgccgatcaattgtgggaaaccactatgaaccctgagacaaggacattaattcgtgtaacaattgaagatttagcaagagcagaacgtcgagttaatgtcttgatgggtgataaagttcctccaagacgccaatggattgaagataatgtcaagtttactttagaagagaatacagtattt

SEQ ID NO: 2818 - protein, 653 aa, Streptococcus agalactiae
MEVTLAKQDITVTNYGDDAIQVLEGLDAVRKRPGMYIGSTDGTGLHHLVWEIVDNAVDEALSGFGNRIDVIINKDGSITVTDHGRGMPTGMHAMGKPTVEVIFTVLHAGGKFGQGGYKTSGGLHGVGSSVVNALSSWLEVEIIRDGAIYRQRFENGGKPVTTLKKIGTAPKSKSGTSVSFMPDQSVFSTIDFKFNTIAERLKESAFLLKNVTLTLTDNRSEEAEHLEFHYENGVQDFVEYLNEDKETLTPIMFFEGEEQEFHIEVALQYNDGFSDNILSFVNNVRTKDGGTHETGLKSAITKSMNDYARKTGLLKEKDKNLEGSDYREGLSAILSILVPEEHLQFEGQTKDKLGSPLARPIVDGIVSEKLTYFLMENGDLASNLIRKAIKARDAREAARKARDESRNGKKSKKDKGLLSGKLTPAQSKNAKKNELYLVEGDSAGGSAKQGRDRKFQAILPLRGKVLNTAKAKMADIIKNEEINTMIHTIGAGVGPDFNLDDINYDKIIIMTDADTDGAHIQTLLLTFFYRYMRPLVEEGHVYIALPPLYKMSKGKGKKEIVEYAWTDIELEELRQKFGKGSLLQRYKGLGEMNADQLWETTMNPETRTLIRVTIEDLARAERRVNVLMGDKVPPRRQWIEDNVKFTLEENTVF

SEQ ID NO: 2819 - DNA, 1950 bp, Streptococcus pyogenes
gtgttgactaagaaagaaattacaattaataattataatgacgatgctatccaagtcctagaagggttagatgctgttcgcaagcgtccagggatgtatatcggttcaacagatgctacgggattgcaccacctgatttgggaaattgttgataatgctgtcgatgaggccttgtctggttttggagatgatattaaggttgttatcaataaagatggctcggtcagtgtggcagatagcggacgtggaatgccaacaggccagcatgccatggggattcccaccgttcaagttatttttacgattcttcatgcaggtggtaaatttggtcagggtggctacaaaacgtcaggtggtttgcacggtgttggctcctctgttgtcaatgctttgtctgcctggttagaagtcgaaatcacaagagacgggtcagtgtatcgtcagcgctttgaaaatggtgggaaacctgttacaacccttaaaaaagttggcacagctcctaagtctaaatcaggaacggttgtaacctttatgcctgatgataagattttttcaactattgactttaagttcaataccatttcagaacgattgaaagaatctgcttttcttttgaaaaatgtcaagatgagcttgacagatcttcgtggagatgacccgattattgaagagtttcattatgaaaatggggttcaagatttcgtcgaatacctcaatgaagataaggaaaccttgacacctgttatttacatggaaggtcaagaccaagactttcaagtcgaggttgctttgcagtataacgatggtttctccgacaatatcttatcctttgtaaacaatgtgcgcaccaaagatggtggaagccatgaaacgggactaaagtcagctattaccaaagcgatgaatgactatgctcgtaaaaccaatctcttaaaagaaaaggataaaaatctagagggctcagattatcgagaaggactctcagcagtattatctatcttagttcctgagcagcacttgcaatttgaaggacagaccaaagacaaattgggaagtcccttagctagacctattgtagagagcattgtttctgaaaaattaaccttctttttactcgaaaatggagaagtagcttctcatctagttcgcaaagccattaaagctagagatgctcgcgaagctgctcgaaaagcgcgtgatgactcacgtaatggtaagaaaaacaaaaaagacaaaggcttgttgtcgggaaaactaaccccagctcagtccaaaaatgccaagaaaaatgaattgtatctggtcgaaggagattctgcgggaggttcagccaaacaaggacgagaccgcaaatttcaggctattttaccattacgtggcaaagttttaaataccgaaaaagctaagatggctgacatcttgaaaaatgaagaaattaacactatggtttataccattggagctggagtgggagctgactttaacctcgaggatatcaactatgataagattattatcatgaccgatgctgataccgatggggctcatattcagactcttttgctgactttcttttaccgttatatgcgaccgttggtggaagcaggtcacgtttatattgcgcttcccccgctttacaaaatgtcaaaaggtaaaggcaaaactgaaaaaattgcttatgcttggactgatggtgaattggaagatctgcgcagagaatttggcaagggggctattcttcaacgctataaaggactgggtgaaatgaatgctaaccaattatgggaaaccactatggaccctgaaaccagaacccttattcgtgttactattgacgacttggcaagagcagagcgacgtgtttctgtgttgatgggtgacaaagcagccccacgccgtcagtggatcgaggataacgtcaagtttaccttagaagaaaatacggtgttt

SEQ ID NO: 2820 - protein, 650 aa, Streptococcus pyogenes
VLTKKEITINNYNDDAIQVLEGLDAVRKRPGMYIGSTDATGLHHLIWEIVDNAVDEALSGFGDDIKVVINKDGSVSVADSGRGMPTGQHAMGIPTVQVIFTILHAGGKFGQGGYKTSGGLHGVGSSVVNALSAWLEVEITRDGSVYRQRFENGGKPVTTLKKVGTAPKSKSGTVVTFMPDDKIFSTIDFKFNTISERLKESAFLLKNVKMSLTDLRGDDPIIEEFHYENGVQDFVEYLNEDKETLTPVIYMEGQDQDFQVEVALQYNDGFSDNILSFVNNVRTKDGGSHETGLKSAITKAMNDYARKTNLLKEKDKNLEGSDYREGLSAVLSILVPEQHLQFEGQTKDKLGSPLARPIVESIVSEKLTFFLLENGEVASHLVRKAIKARDAREAARKARDDSRNGKKNKKDKGLLSGKLTPAQSKNAKKNELYLVEGDSAGGSAKQGRDRKFQAILPLRGKVLNTEKAKMADILKNEEINTMVYTIGAGVGADFNLEDINYDKIIIMTDADTDGAHIQTLLLTFFYRYMRPLVEAGHVYIALPPLYKMSKGKGKTEKIAYAWTDGELEDLRREFGKGAILQRYKGLGEMNANQLWETTMDPETRTLIRVTIDDLARAERRVSVLMGDKAAPRRQWIEDNVKFTLEENTVF

SEQ ID NO: 2821 - DNA, 2457 bp, Streptococcus agalactiae
atgtctaatattcaaaatatgtcccttgaggacattatgggagagcgttttgggcgctattctaagtatatcattcaagaacgggcgttgccggatattcgtgatggcttaaaacctgttcaacgtcgaatcctttattcaatgaataaagatggtaatacttttgaaaagggatttcgcaaatctgcaaaatcagtcggtaatgttatggggaatttccatcctcatggggattcctctatctatgacgcgatggttcgtatgtctcaagattggaaaaatcgtgagacattgattgaaatgcacggaaataatggttctatggatggagatcctgcggcggctatgcgttatacggaagcccgtctatcagaaattgctggttatcttcttcaagatattgataagaataccgtaccctttgcgtggaattttgatgatacagagaaagaaccaactgttttaccagctgcctttcccaatcttttagtcaacggagcaacaggaatatctgcaggctatgcgacagatattccaccacataatctagcagaagtcattgatgctgtcgtgtacatgattgatcaccctaaagctaaattagataaattaatggaatttctacctggtccagattttccaactggcgctatcattcaaggaaaagatgaaattcgtaaggcatatgagactggtaaggggagagtagcggttcgctcgcgaactgctattgaaaccttaaaaggtggtaagaaacaaattattgttactgaaattccttatgaagttaataagtcagttttagtaaaacgaatcgatgatgttcgtgttaataataaagttccaggaatagcagaggtgcgtgatgagtctgatagagatggtcttcgtatcgctattgagctcaaaaaagaagccgatgaaacaattgtcttaaattatctttttaaatatacagacctacaagttaattataatttcaatatggttgctattgatgactacacccctaagcaggtgggtctatcaagaatattaactagctatatcgctcaccgaagagaaattattattgctcgttcaaaatttgataaagaaaaagccgaaaaacgtctccatattgttgagggactgattagggttctttctattttggatgaagtgattgcattaattcgtgcttctgagaataaagctgatgcgaaagagaatttgaaggtcagctatgagttttcagaagctcaagcagaggctatcgtcacattgcaattatatcgtctcacaaatactgatattgtgacgttgagagaagaagaagaagaacttcgtcaacaaatcacaatgcttaaggcaattattagtgatgaacgtacgatgtataacgtaatgaaacgtgagttacgtgaggtcaaaaagaaatttgccaatactagacgttctgaacttcaagaattagctgaaactattgaaatcgatactgcaagtttaattatcgaagaggacacatacgtcagtgttactagaggcggatatgtaaaacgcaccagccctcgctctttcaatgcatcaactgttgatgaacttggtaagcgagaagatgacgaattgatatttgtgagcaatgcaaagactacccaacatttattgatgtttactaaccttggtaatcttgcttatcgtccagttcatgaattagctgatattcgatggaaagacgttggtgaacatttatcacaaaatcttgttaactttgcttcaaatgaagaaattatttatgctgaattagtagatgattttactaaagaaacttattttgctgtcactagcttagggcaaataaagcgttttgaacgtcaagaaatcagtccatggcggacatataagtcaaaaacagctaaatatgctaagttaaaaagtgtagaggattatgttgtgactgttgcccctatccaattagaggatgttatacttgtcacttataatggttatgcgttgagatttagtataaatgatgtaccagtcgtcggtagtaaagccgcaggtgtaaaagcgatgaatttaaaagatcgtgatcacatcgtatctgcatttatagctaacaccacaagtttatatttattaactcatagaggaagtcttaaacgaatggccattgatgttatccccacaactagtcgtgctaatcgaggacttcaagttcttcgtgaattgaaatccaaaccgcatcgcgtttttaaagcaggacctgtatatttagaggattcatcttttgaatttgatttatttagttcagtatcgaatcatgaaggagatactttcgtacttgagattatgtctaaaacaggaaaagtttacgatgttgatttaagtcaatggagtttttctgaacgtacaagtaatggctcttttgtatctgataagatttctgacgaagaagtattctcagttaaaattaag

SEQ ID NO: 2822 - protein, 819 aa, Streptococcus agalactiae
MSNIQNMSLEDIMGERFGRYSKYIIQERALPDIRDGLKPVQRRILYSMNKDGNTFEKGFRKSAKSVGNVMGNFHPHGDSSIYDAMVRMSQDWKNRETLIEMHGNNGSMDGDPAAAMRYTEARLSEIAGYLLQDIDKNTVPFAWNFDDTEKEPTVLPAAFPNLLVNGATGISAGYATDIPPHNLAEVIDAVVYMIDHPKAKLDKLMEFLPGPDFPTGAIIQGKDEIRKAYETGKGRVAVRSRTAIETLKGGKKQIIVTEIPYEVNKSVLVKRIDDVRVNNKVPGIAEVRDESDRDGLRIAIELKKEADETIVLNYLFKYTDLQVNYNFNMVAIDDYTPKQVGLSRILTSYIAHRREIIIARSKFDKEKAEKRLHIVEGLIRVLSILDEVIALIRASENKADAKENLKVSYEFSEAQAEAIVTLQLYRLTNTDIVTLREEEEELRQQITMLKAIISDERTMYNVMKRELREVKKKFANTRRSELQELAETIEIDTASLIIEEDTYVSVTRGGYVKRTSPRSFNASTVDELGKREDDELIFVSNAKTTQHLLMFTNLGNLAYRPVHELADIRWKDVGEHLSQNLVNFASNEEIIYAELVDDFTKETYFAVTSLGQIKRFERQEISPWRTYKSKTAKYAKLKSVEDYVVTVAPIQLEDVILVTYNGYALRFSINDVPVVGSKAAGVKAMNLKDRDHIVSAFIANTTSLYLLTHRGSLKRMAIDVIPTTSRANRGLQVLRELKSKPHRVFKAGPVYLEDSSFEFDLFSSVSNHEGDTFVLEIMSKTGKVYDVDLSQWSFSERTSNGSFVSDKISDEEVFSVKIK

SEQ ID NO: 2823 - DNA, 2463 bp, Streptococcus pyogenes
ttgaatatgtcaaacattcaaaacatgtcccttgaggatattatgggagaacgcttcggccgttattccaagtatattattcaggaacgggcacttcctgatattcgagatggattgaaacccgttcagcgtcggattctttattcgatgaataaggatggcaatacttttgaaaaaggttaccgtaaatcagccaaatcagttggtaatattatggggaatttccacccacatggggattcctctatttatgatgccatggtacggatgagtcaagattggaagaaccgtgaaatccttgttgaaatgcacggaaataatggttcaatggatggtgatccgcctgcggctatgcgttatacagaagctcgcttgtctgaaattgcgggttatcttcttcaagacattgagaaaaatacggtctcttttgcttggaactttgatgacacagaaaaagaacccaccgttttaccagcagcttttcctaacttacttgtcaatgggtcttctggtatttccgcaggctatgcgacagatattccaccgcacaatttgtcagaagtgattgatgctgttgtgtatatgattgatcatcccaaagctagtttagagaaattaatggagtttttaccaggaccagatttcccgacaggaggcattatccaaggagctgacgaaatcaaaaaagcctacgaaacaggtaagggacgtgtcgttgttcgctctaggacagaaatcgaggaacttaaaggtggtaaacaacaaattattgtcactgagattccttatgaagttaacaaagcagtcttggtcaaaaagattgacgatgtgcgtgttaacaataaagtcccaggcatcgtagaagtacgcgatgaatctgatcgcacaggtcttcgcatagctattgagttgaaaaaagaggctgatagccaaaccattctaaattatttgttgaaatacacagaccttcaagttaattataattttaacatggttgctattgaccacttcacaccacgtcaagtaggacttcaaaaaatactatcaagctatatcagtcaccgtaaagatattattattgagcggtctaaattcgataaagccaaagctgaaaaacgcctccacattgttgaaggattgattcgtgtcttgtccatcttagatgagattattgctttgattagatcgtctgacaataaggctgatgctaaagaaaatctgaaagtcagctatgatttctctgaggaacaagcagaagcgattgtaaccttgcagctttatcgtttaactaataccgatattgttactctccaaaatgaagaaaatgatttaagagacttaatcacgaccctttccgctattatcggtgacgaagcaaccatgtataacgtcatgaaacgtgaattaagagaggtgaaaaagaaattcgccaatcctcgtttatcagagttacaagcagaaagtcaaatcattgagattgacactgccagcttgattgcagaggaagaaacttttgttagtgtgacacggggcggatacctcaaaagaaccagcccacgatccttcaatgcgtctagtttggaagaagttggcaagagagatgatgacgaactcatcttcgttaaacaggccaaaacaacagaacaccttttgttatttacaactttaggcaatgtcatttaccggccaatccatgaattgaccgatttacgttggaaggatatcggtgaacatttatcacaaaccatttcaaacttcgcgacagaagaagagattctctacgctgatattgtgacttcctttgaccagggcttgtatgtggctgtcacacaaaatggttttatcaaacgctttgatcgtaaagaactaagtccttggcgaacttataaatctaaatcaaccaaatatgtgaagctaaaggatgacaaagaccgcgtggttaccttgtcaccagttattatggaagacctcctattagtgactaaaaatggttatgctttgcgattctccagtcaggaagtgcctattcaagggttgaaatctgctggtgttaaaggcattaacttgaaaaacgatgacagccttgcctcagcctttgctgtgacaagtaactctttctttgtcttaactcagaggggttctctcaaacggatggctgtcgatgatattcctcagacaagtcgtgccaatcgtggactattggtcctacgagagttaaaaaccaaacctcatagagtttttctggccggaggcgttcaatcagatacttcagctgagcagtttgatttgttcactgatatacctgaagaagaaactaatcaacaaatgcttgaagtcattagtaagactggtcaaacctacgagattgctttagaaacgctttcgttatcggaaagaatcagcaacggctcctttatttcagacactatttcggatcaagaagtactggtagctagaacacgt

SEQ ID NO: 2824 - protein, 821 aa, Streptococcus pyogenes
LNMSNIQNMSLEDIMGERFGRYSKYIIQERALPDIRDGLKPVQRRILYSMNKDGNTFEKGYRKSAKSVGNIMGNFHPHGDSSIYDAMVRMSQDWKNREILVEMHGNNGSMDGDPPAAMRYTEARLSEIAGYLLQDIEKNTVSFAWNFDDTEKEPTVLPAAFPNLLVNGSSGISAGYATDIPPHNLSEVIDAVVYMIDHPKASLEKLMEFLPGPDFPTGGIIQGADEIKKAYETGKGRVVVRSRTEIEELKGGKQQIIVTEIPYEVNKAVLVKKIDDVRVNNKVPGIVEVRDESDRTGLRIAIELKKEADSQTILNYLLKYTDLQVNYNFNMVAIDHFTPRQVGLQKILSSYISHRKDIIIERSKFDKAKAEKRLHIVEGLIRVLSILDEIIALIRSSDNKADAKENLKVSYDFSEEQAEAIVTLQLYRLTNTDIVTLQNEENDLRDLITTLSAIIGDEATMYNVMKRELREVKKKFANPRLSELQAESQIIEIDTASLIAEEETFVSVTRGGYLKRTSPRSFNASSLEEVGKRDDDELIFVKQAKTTEHLLLFTTLGNVIYRPIHELTDLRWKDIGEHLSQTISNFATEEEILYADIVTSFDQGLYVAVTQNGFIKRFDRKELSPWRTYKSKSTKYVKLKDDKDRVVTLSPVIMEDLLLVTKNGYALRFSSQEVPIQGLKSAGVKGINLKNDDSLASAFAVTSNSFFVLTQRGSLKRMAVDDIPQTSRANRGLLVLRELKTKPHRVFLAGGVQSDTSAEQFDLFTDIPEEETNQQMLEVISKTGQTYEIALETLSLSERISNGSFISDTISDQEVLVARTR

SEQ ID NO: 2825 - DNA, 1020 bp, Streptococcus agalactiae
atgacagtaaatttagattgggataatttaggttttgcttacagaaaattaccattccgatacatttcgcattttaaagatgggaaatgggatgatggcaagttgacagatgatgcaacgctacatatttcagaaagttcacctgctctccattatgggcaacaagcttttgaaggattgaaagcttatagaactaaagatggctctattcagttatttcgtccagatcaaaatgcagaacgacttcaaagaacagcagatcgtcttttaatgccacatgttccgacagacaaatttattgcagcggttaaatctgttgtacgcgctaatgaggagtttgttccaccgtatggtacaggggcaacattatacattcgtcccttattaattggtgtgggagatattattggagttaaacctgctgaagaatatatttttacggtatttgcaatgccagtaggtagttattttaaaggtggtttaacaccaactaactttattgtttccaaagaatatgatagagcagcaccgaatggtacaggagctgcaaaagttggtggtaactatgctgctagtcttcttcctgggaaatatgctcatgagaaacaattttcagatgttatctatcttgatccagcgacacatactaaaattgaagaggttggagcagctaatttctttggaattactaaagataatcagtttatcacccctttgagtccttcaattttaccttcaattactaaatattcattgctttaccttgctaaagaaaggtttggtatggaagcgattgaaggagatgtctttgtcgacgaattagataaattcacagaagctggcgcatgtggtacagccgcagttatttcaccaattggaggaattcaaaacggagatgacttccatgtcttctacagtgagacagaagttggtccagcgacacgcaaactatatgatgagttagtagggatccagtttggtgatgttgaagcaccagaagggtggatttataaagtagat

SEQ ID NO: 2826 - protein, 340 aa, Streptococcus agalactiae
MTVNLDWDNLGFAYRKLPFRYISHFKDGKWDDGKLTDDATLHISESSPALHYGQQAFEGLKAYRTKDGSIQLFRPDQNAERLQRTADRLLMPHVPTDKFIAAVKSVVRANEEFVPPYGTGATLYIRPLLIGVGDIIGVKPAEEYIFTVFAMPVGSYFKGGLTPTNFIVSKEYDRAAPNGTGAAKVGGNYAASLLPGKYAHEKQFSDVIYLDPATHTKIEEVGAANFFGITKDNQFITPLSPSILPSITKYSLLYLAKERFGMEAIEGDVFVDELDKFTEAGACGTAAVISPIGGIQNGDDFHVFYSETEVGPATRKLYDELVGIQFGDVEAPEGWIYKVD

SEQ ID NO: 2827 - DNA, 1065 bp, Streptococcus pyogenes
ttgaaaaaaagttacaatagaaaaaagcagaaaagaggtacgatgatgacaatagcaattgattgggacaacctaggatttgaatatcataagttgccatttcgttacatttcttattacaaaaatggtcaatgggataaaggtcaattaacagaagatgccaccttacatatctcagaaagcgctccagcgcttcattatggacaacaagcttttgaaggcttaaaggcttatcgcaccaaagatggctctattcaactatttagaccagaccgtaatgcagtgcgtttacaagccacagcagaccgcttgttgatgccacaagtatcaacagagcaatttattgatgcagctaagcaagtggttaaagccaatgaagactttgtaccaccttacggaacaggtgcaacgctttacctgagaccgttattaattggagttggagatattattggggttaaaccagccgaagaatatattttcaccatttttgccatgccagtaggaaactatttcaaaggtggacttgctccaactaattttattgtttctgaagcgtttgaccgcgccgctccttacggaacaggtgctgctaaggtgggaggaaactatgcaggaagtttgctaccaggtaaggccgctaaatcagcaggcttttctgatgtgatttacttagatccagcaacccatactaaaattgaagaagtcggagctgcaaacttttttggcattactgcaaataatgaatttgttacgccacttagtccatccatcttgccatctattacgaagtattcactcttacaactagctgaagaaagacttggtatgacagtaattgagggtgatgttccaattaatgaattggataaatttgtggaagcaggagcttgtggaacagcagctgttatctctccaattggcggtatccagtacaaggataacttacatgtcttttacagtgaaacagaagttggtcctgtgacacgccgtttatacgatgagttggtcggcattcaatttggggatattgaagcaccagaaggttggattgtaaaagtagat

SEQ ID NO: 2828 - protein, 355 aa, Streptococcus pyogenes
LKKSYNRKKQKRGTMMTIAIDWDNLGFEYHKLPFRYISYYKNGQWDKGQLTEDATLHISESAPALHYGQQAFEGLKAYRTKDGSIQLFRPDRNAVRLQATADRLLMPQVSTEQFIDAAKQVVKANEDFVPPYGTGATLYLRPLLIGVGDIIGVKPAEEYIFTIFAMPVGNYFKGGLAPTNFIVSEAFDRAAPYGTGAAKVGGNYAGSLLPGKAAKSAGFSDVIYLDPATHTKIEEVGAANFFGITANNEFVTPLSPSILPSITKYSLLQLAEERLGMTVIEGDVPINELDKFVEAGACGTAAVISPIGGIQYKDNLHVFYSETEVGPVTRRLYDELVGIQFGDIEAPEGWIVKVD

SEQ ID NO: 2829 - DNA, 117 bp, Streptococcus agalactiae
ttggagttaatagtgagtaaaaaagataagaaaattgaaattcaaatttcagacgctcaagtaacagttaatggaactaaggttgatggataccaactcgttatggaaaaaaaattg

SEQ ID NO: 2830 - protein, 39 aa, Streptococcus agalactiae
MELIVSKKDKKIEIQISDAQVTVNGTKVDGYQLVMEKKL

SEQ ID NO: 2831 - DNA, 231 bp, Streptococcus pyogenes
gtgatgagtaaaaaagataaaaaaattgaaatccaactgattgatcacaaagttatggttaatgagactaagattgatggctatcaattacaaattggtaaacgtgtggttggagaaattgcagaacttgatgagaaatttgctgtcttaaaaaatgatggagtagattgcttcttcaaaacgctcgaacaagcggttgaaaatatcattgaaaactacaatttgaaccat

SEQ ID NO: 2832 - protein, 77 aa, Streptococcus pyogenes
VMSKKDKKIEIQLIDHKVMVNETKIDGYQLQIGKRVVGEIAELDEKFAVLKNDGVDCFFKTLEQAVENIIENYNLNH

SEQ ID NO: 2833 - DNA, 300 bp, Streptococcus agalactiae
ttgtcacgtgcatttaatttagctgaaaaagttactcattctgtattggtggactcttcattgtttgaaaataatcaagagaaggcgctatatcaagctattttgtcacttgaactgactgaggatatgcatgacaacttagataagcttttcgcacttagtccaattattaatgatttctttgataatacaatggtaatgacagatgatgaaaaaatgaaacaaaatcgtctggctatactcaatagccttgttgcaaaggcaagaacagtcgctgcttttaacttattaaacacaaaa

SEQ ID NO: 2834 - protein, 100 aa, Streptococcus agalactiae
MSRAFNLAEKVTHSVLVDSSLFENNQEKALYQAILSLELTEDMHDNLDKLFALSPIINDFFDNTMVMTDDEKMKQNRLAILNSLVAKARTVAAFNLLNTK

SEQ ID NO: 2835 - DNA, 2037 bp, Streptococcus pyogenes
atgagtaaaaatctactaatcgaacttggtctggaagaacttccagcctacgtggtcacaccaagtgaaaaacaactgggagagcgcttggcgactttcttaacagaaaatcgtctctcttttgaagatatacaaaccttttcaactccacgccgtttggcagtgcgtgtgtctggattagctgatcagcaaacggatttgactgaggactttaaagggcctgctaagaaaattgcccttgatgctgatgggaatttctcaaaagctgctcaaggatttgttcgtggcaaaggcttgaccacagatgctatcgaattccgcgaagtcaaaggagaagaatacgtttatgtgaccaaacacgaagctggaaaacctgctaaggaagtgcttctaggcgttactgaagtgttatcagcaatgaccttcccagtcagcatgcactgggctaacaatagttttgaatacattcgtcctgttcacaccttgacagttctgttgaatgatgaggccttggaacttgacttcttggatattcattctggacgcgtcagccgtggtcaccgttttttaggtactgaaaccactatcacaagtgctgattcttatgaggctgatttacgcagccagtttgttatcgctgatgctaaagagcgtcaagagatgattgtggagcaaatcaagacgcttgaagtggagcagggtgtgcaagttgacattgacgaagacttgcttaatgaagttttgaacttggtcgagtttccaacagctttcatgggaagttttgaggctaaataccttgatgtcccagaagaagtattggtaacatcaatgaaaaaccaccaacgttattttgtagtacgtgatcaggctggtcacttgatgccaaactttgtatcagttcgtaatgggaatgatcaagccattgaaaatgttattaaagggaacgaaaaagttttggtagctcgcttagaagatggtgaattcttctggcgtgaggatcagaaattgcaaattgctgatttggttgccaaattgaccaatgtgaccttccatgaaaaaatcggctctcttgctgaacacatggatcgtacgcgtgtcattgccgcatcacttgctaaggaagccaacctatctgctgaggaagtcacagctgttgaccgtgctgcccaaatttacaaatttgacctgttaacaggtatggtgggtgaatttgatgagctgcaagggattatgggtgaaaaatatgcccttctagctggtgaagatgctgctgtggcaacagcaatccgtgaacactacttacctgatgctgcaggaggtgcgctacctgaaaccaaagttggcgctgtcctggccttggcagctaaattggatactctcttgtcattcttttctgttggcttgattccatctggctctaatgatccttatgctctacgtcgtgcaacccaagggattgtccgtattcttgatcattttggatggcgcatcccaatggataagctggtagatagcttatatgacttgtcctttgatagtttgacctatgccaataaggcggatgtgatgaactttatccgtgctcgtgtggataagatgatgggcaaagccgcaccaaaagacattcgggaagctattctagcaagttcaacctttgtggttccagaaatgttggccgcagctgaagctcttgtcaaagccagtcatacggaaaattacaaaccagcagttgaatctttgtcacgtgcttttaatttggcagaaaaagcggacgcttctgttcaggtggaccctagcctctttgaaaatgagcaagaaaacactttgtttgcagctattcaaggcttgactctagcaggcagtgctgcccagcagttagaacaggtctttgcccttagcccagtgattaatgatttctttgataacacaatggttatggcaggagatcaagcccttaaaaacaaccgtttagctattttatcagatttagtaagcaaagctaagaccattgttgcttttaaccaactaaacaccaag

SEQ ID NO: 2836 - protein, 679 aa, Streptococcus pyogenes
MSKNLLIELGLEELPAYVVTPSEKQLGERLATFLTENRLSFEDIQTFSTPRRLAVRVSGLADQQTDLTEDFKGPAKKIALDADGNFSKAAQGFVRGKGLTTDAIEFREVKGEEYVYVTKHEAGKPAKEVLLGVTEVLSAMTFPVSMHWANNSFEYIRPVHTLTVLLNDEALELDFLDIHSGRVSRGHRFLGTETTITSADSYEADLRSQFVIADAKERQEMIVEQIKTLEVEQGVQVDIDEDLLNEVLNLVEFPTAFMGSFEAKYLDVPEEVLVTSMKNHQRYFVVRDQAGHLMPNFVSVRNGNDQAIENVIKGNEKVLVARLEDGEFFWREDQKLQIADLVAKLTNVTFHEKIGSLAEHMDRTRVIAASLAKEANLSAEEVTAVDRAAQIYKFDLLTGMVGEFDELQGIMGEKYALLAGEDAAVATAIREHYLPDAAGGALPETKVGAVLALAAKLDTLLSFFSVGLIPSGSNDPYALRRATQGIVRILDHFGWRIPMDKLVDSLYDLSFDSLTYANKADVMNFIRARVDKMMGKAAPKDIREAILASSTFVVPEMLAAAEALVKASHTENYKPAVESLSRAFNLAEKADASVQVDPSLFENEQENTLFAAIQGLTLAGSAAQQLEQVFALSPVINDFFDNTMVMAGDQALKNNRLAILSDLVSKAKTIVAFNQLNTK

SEQ ID NO: 2837 - DNA, 255 bp, Streptococcus agalactiae
atggatcctaaaaaaattgctcgtattaacgagctttcaaaaaagaaaaaaacagttggattgaccggagaagagaaggttgaacaagcaaagctccgtgaagagtatattgaaggtttccgccgatcagtccgtcaccacgttgaaggaattaaattagtggatgatgagggcaatgatgttaccccggaaaaacttcgtcaagtccagagagaaaaaggactacatggtcgtagtttggatgatccaaattct

SEQ ID NO: 2838 - protein, 85 aa, Streptococcus agalactiae
MDPKKIARINELSKKKKTVGLTGEEKVEQAKLREEYIEGFRRSVRHHVEGIKLVDDEGNDVTPEKLRQVQREKGLHGRSLDDPNS

SEQ ID NO: 2839 - DNA, 255 bp, Streptococcus pyogenes
atggatcctaaaaaaattgctcgtatcaatgagctggctaaaaagaaaaaaacggtaggcttgactggacctgaaaaagtggaacaggcaaaactccgtgaagaatacattgaaggctatcgtcgctctgtcagacaccatatcgaaggcatcaaattggtggacgaagaaggaaacgacgtgacccctgaaaaattaagacaggtgcaacgtgaaaaaggcttgcacggccgttcattagatgacccaaaatca

SEQ ID NO: 2840 - protein, 85 aa, Streptococcus pyogenes
MDPKKIARINELAKKKKTVGLTGPEKVEQAKLREEYIEGYRRSVRHHIEGIKLVDEEGNDVTPEKLRQVQREKGLHGRSLDDPKS

SEQ ID NO: 2841 - DNA, 1506 bp, Streptococcus agalactiae
atgtcttcagaagaaaaatacattatggcgattgaccagggaacaacaagctctcgagcaattatttttaataaaaaaggtgaaaaaattgcgagtagccaaaaagaatttccccaaatttttcctcaagcaggctgggtagagcataatgctaatcagatttggaattctgttcaatctgtcattgctggagcttttattgaatcaagcatcaaacctggacagatagaggctattgggattaccaatcaacgtgaaacaactgttgtttgggataaaaaaacaggtcttccaatttataatgctattgtatggcaatcgcgacaaacagccccgattgctgatcaattgaagcaagaaggtcatactaacatgattcatgaaaaaactggtcttgtcattgatgcttacttctcagcaacaaaagttcgttggattttagaccacgttcctggagcacaggaacgtgctgaaaaaggagagttgctttttggaacaattgatacttggttagtttggaagttaactgatggtctcgtccatgttacagactattcaaatgctgctcgtacgatgctttataatattaaagaacttaaatgggatgatgaaattttagagttactaaatattcctaaagcaatgttaccagaagtaaaatctaattctgaagtttatgggaaaactactccattccatttttacggtggagaggtgccaatttctggtatggctggtgaccaacaggcagcattatttggacagttggcctttgaacctggtatggtaaaaaacacttatggtacaggttccttcattatcatgaatacgggcgaagagatgcaactgtctcaaaataatctattaacaacgattggttacggcattaatggtaaggttcattatgcacttgaaggatcaatcttcattgcaggaagcgctattcaatggttacgtgatggtcttagaatgattgaaacgtcaagtgagtcagaaggccttgctcaatcatcaacaagtgacgatgaggtttatgtggttccagcttttacaggtttgggtgcaccgtattgggattcaaatgctagagggtcagtatttggattaactcgtgggacaagtaaagaagattttgttaaagctacacttcagtcaattgcttatcaagtacgagacgttattgacactatgcaagttgattcaggaattgatatccaacaacttcgtgtagatggtggagctgcaatgaataatttattaatgcaattccaagcggatattttagggattgatattgctcgtgcgaagaaccttgaaactactgccttgggtgcagctttcttagccggactttcagttggctattgggaaagtatggatgaactaaaagaactgaacgcaacaggacaacttttccaagcaacaatgaatgagtctcgaaaagaaaaactgtataaagggtggagaaaagctgtcaaagcgacacaagtatttgctcaagaggat

SEQ ID NO: 2842 - protein, 502 aa, Streptococcus agalactiae
MSSEEKYIMAIDQGTTSSRAIIFNKKGEKIASSQKEFPQIFPQAGWVEHNANQIWNSVQSVIAGAFIESSIKPGQIEAIGITNQRETTVVWDKKTGLPIYNAIVWQSRQTAPIADQLKQEGHTNMIHEKTGLVIDAYFSATKVRWILDHVPGAQERAEKGELLFGTIDTWLVWKLTDGLVHVTDYSNAARTMLYNIKELKWDDEILELLNIPKAMLPEVKSNSEVYGKTTPFHFYGGEVPISGMAGDQQAALFGQLAFEPGMVKNTYGTGSFIIMNTGEEMQLSQNNLLTTIGYGINGKVHYALEGSIFIAGSAIQWLRDGLRMIETSSESEGLAQSSTSDDEVYVVPAFTGLGAPYWDSNARGSVFGLTRGTSKEDFVKATLQSIAYQVRDVIDTMQVDSGIDIQQLRVDGGAAMNNLLMQFQADILGIDIARAKNLETTALGAAFLAGLSVGYWESMDELKELNATGQLFQATMNESRKEKLYKGWRKAVKATQVFAQED

SEQ ID NO: 2843 - DNA, 1524 bp, Streptococcus pyogenes
atgtcgcaagaaaagtatatcatggctattgatcagggaacaacaagttcacgagcgattattttcaatcaaaaaggggaaaaggttagcagtagccaaaaagaattccctcagattttcccacacgctggttgggtagagcacaatgctaatcagatttggaattcggttcagtctgttattgcgggtgcttttattgagtctagcatcaaaccaagccaaattgaagcaatcggaattaccaaccaacgtgagaccacagtggtttgggacaaaaaaacgggtgtacctatttataatgctattgtgtggcaatcacggcagacggcaccaattgctgagcaactcaaacaagatggccatacaaaaatgatccatgaaaagacaggccttgttattgatgcttacttttctgcaaccaagatccgttggattttggaccatgttcctggtgctcaagaacgagctgaaaaaggcgagttactttttggaaccattgatacttggctggtttggaaattgacagatggtgctgttcatgtgacggattattccaatgcggctcgtaccatgctctataatattaaagacttaacatgggatgatgagattttagagcttttaaatattccaaaagatatgcttccagaggttaaatccaattctgaaatttatggcaaaacagctgcctttcatttttatgggggcgaagtgcctatttcaggtatggcgggtgaccaacaggcagctttgtttggccaactagcttttgagcctggtatggtgaaaaacacttatggcacaggttctttcattatcatgaatactggtgatgagatgcagttatcgagtaataatcttttgaccaccattggttacgggattaatgggaaggttcactatgccttggaaggttccatctttattgcaggctctgccattcaatggttgcgagatggtcttaaaatgattgagacttcaccagaatctgaacagttcgctctagcatcaactagtgacgatgaagtttatgttgtgcctgcttttaccggtttaggagctccttactgggattctaatgcgcgtggatctgtctttggcttgacacgtggtaccagcaaagaagactttgtcaaagcaaccttacaatctatcgcctatcaagtgcgagatgttattgataccatgcaggtggattcaggtattgacattcaacagctccgtgtggatggcggtgcagccatgaataatatgctcatgcaatttcaggctgatattttaggaattgatattgcccgtgctaaaaatttagaaacaacagctctaggagcagctttcttagcagggcttgctgtggggtattgggaagatatggatgctttgaaagaattaaatgccacaggccagctctttaaggctagcatgaatgaatcgcgcaaagaaaaattatacaagggttggaagcgcgctgttaaagcaactcaagttttcacccaagaagaagatgcagatgacgatgcaaaa

SEQ ID NO: 2844 - protein, 508 aa, Streptococcus pyogenes
MSQEKYIMAIDQGTTSSRAIIFNQKGEKVSSSQKEFPQIFPHAGWVEHNANQIWNSVQSVIAGAFIESSIKPSQIEAIGITNQRETTVVWDKKTGVPIYNAIVWQSRQTAPIAEQLKQDGHTKMIHEKTGLVIDAYFSATKIRWILDHVPGAQERAEKGELLFGTIDTWLVWKLTDGAVHVTDYSNAARTMLYNIKDLTWDDEILELLNIPKDMLPEVKSNSEIYGKTAAFHFYGGEVPISGMAGDQQAALFGQLAFEPGMVKNTYGTGSFIIMNTGDEMQLSSNNLLTTIGYGINGKVHYALEGSIFIAGSAIQWLRDGLKMIETSPESEQFALASTSDDEVYVVPAFTGLGAPYWDSNARGSVFGLTRGTSKEDFVKATLQSIAYQVRDVIDTMQVDSGIDIQQLRVDGGAAMNNMLMQFQADILGIDIARAKNLETTALGAAFLAGLAVGYWEDMDALKELNATGQLFKASMNESRKEKLYKGWKRAVKATQVFTQEEDADDDAK

SEQ ID NO: 2845 - DNA, 153 bp, Streptococcus agalactiae
ttgatgaatttgtttaccttcattggagaagttgcgaacggtgtcactccaaggtccagttgtattaataacaagcctagcttttatatcgataacttggtcagtcaacaaatcacgcgcacgtactcctataatttgattgttgtcatcaaa

SEQ ID NO: 2846 - protein, 51 aa, Streptococcus agalactiae
MMNLFTFIGEVANGVTPRSSCINNKPSFYIDNLVSQQITRTYSYNLIVVIK

SEQ ID NO: 2847 - DNA, 1827 bp, Streptococcus agalactiae
atggaattttcacgagaaacacgacgtttagccttacaaagaatgcaagatcgtactctggatttacttatcataggtgggggtatcacaggcgctggtgtcgctttacaagcagcagctagtggattagatactggacttattgaaatgcaagattttgcagaagggacaagtagtcgctcaacaaaattggtccatggtggtcttcgttacttgaagcaatttgatgtagaagttgtttctgatacagtatcagagcgtgcagtcgtgcagcaaattgcaccacacattcctaagccagatccaatgcttttaccggtttacgatgagccgggttctacttttagtatgtttcgccttaaagtggctatggatttatatgatttattagcaggtgtgacaaacacacccgcagccaataaagttttaagcgcagaagatgttcttaagcgtgagcctgatttacaaaaagaaggtttgctaggcggaggggtctatttagatttccgtaataacgatgcacgcctagtgattgaaaatattaaacgcgctaatagggatggagcttatattgccagtcatgtcaaagctgaggacttcttatttgatgacaacaatcaaattataggagtacgtgcgcgtgatttgttgactgaccaagttatcgatataaaagctaggcttgttattaatacaactggaccttggagtgacaccgttcgcaacttctccaatgaaggtaaacaaattcatcaattacgtccaactaagggagttcacttagttgtagatcgccaaaaattaaatatttctcaacctgtttatgttgatacaggcctgaatgatggtcgtatgatttttgttttgccacgtgaagataagacttattttggaactacagatactgattaccatggagacttagaacatcctacggtaactaaagaagatgttgactacctccttaatattgtaaacaaacgcttcccagaagcagagcttactattgatgatattgagagttcatgggcaggtttgcgtccactactatcagggaatagtgcctctgactataatggaggcaatagtggaaaactaagcgatgaaagttttgaagaattaattgattccgttaaagattatattgcacataaaaatcatcgtgaggatgttgaaaaagctatttctcatgtagaatctagtacttctgaaaaagaattggacccatcagctgtttctcgaggatcaagttttgagcgtgatgataatggcctattaacacttgctggtggtaaaattactgattatcgaaaaatggcagaaggtgccatggaaactattattaacattttggataaagaatataatcgcaagtttaaactaatcaattctaaaacctatcctgtttcaggaggagagattaacccatctaatgttgattctgaaattgaagcttatgctcaattgggcacactaagtggtttaagtattgaggatgcacgttatattgctaacctttatgggtcaaatgcaccaaaattatttgcattgacacgccaaattacagaagcagaaggtctgagcttggtagaaacgttgtcacttcactatgctatggattatgaaatggcgcttagcccaacggatttcttcttaagacgtacgaaccatatgcttttcatgagagataatttagattctttgattcagcctgttattgatgagatggctaaacattatcaatggtctgatcaagacaaaactttctatgaagaagaattacatgagactctaaaagacaatgacttggcagctttgaaggataat

SEQ ID NO: 2848 - protein, 609 aa, Streptococcus agalactiae
MEFSRETRRLALQRMQDRTLDLLIIGGGITGAGVALQAAASGLDTGLIEMQDFAEGTSSRSTKLVHGGLRYLKQFDVEVVSDTVSERAVVQQIAPHIPKPDPMLLPVYDEPGSTFSMFRLKVAMDLYDLLAGVTNTPAANKVLSAEDVLKREPDLQKEGLLGGGVYLDFRNNDARLVIENIKRANRDGAYIASHVKAEDFLFDDNNQIIGVRARDLLTDQVIDIKARLVINTTGPWSDTVRNFSNEGKQIHQLRPTKGVHLVVDRQKLNISQPVYVDTGLNDGRMIFVLPREDKTYFGTTDTDYHGDLEHPTVTKEDVDYLLNIVNKRFPEAELTIDDIESSWAGLRPLLSGNSASDYNGGNSGKLSDESFEELIDSVKDYIAHKNHREDVEKAISHVESSTSEKELDPSAVSRGSSFERDDNGLLTLAGGKITDYRKMAEGAMETIINILDKEYNRKFKLINSKTYPVSGGEINPSNVDSEIEAYAQLGTLSGLSIEDARYIANLYGSNAPKLFALTRQITEAEGLSLVETLSLHYAMDYEMALSPTDFFLRRTNHMLFMRDNLDSLIQPVIDEMAKHYQWSDQDKTFYEEELHETLKDNDLAALKDN

SEQ ID NO: 2849 - DNA, 123 bp, Streptococcus agalactiae
ttgatcgcaaaagctaatgacacagctggattcaagtgggcagggctaatattgccagataccaacgctgcaatagctacagcaagtccccatccaaatgtgataacaatccatccagaatta

SEQ ID NO: 2850 - protein, 41 aa, Streptococcus agalactiae
MIAKANDTAGFKWAGLILPDTNAAIATASPHPNVITIHPEL

SEQ ID NO: 2851 - DNA, 711 bp, Streptococcus agalactiae
ttgaaggagataataatggatatttttggagaattcttaggaacagctctcttagtcttacttggtaatggtgttgtagcaggtgttgttttgcctaaaacgaagaatcataattctggatggattgttatcacatttggatggggacttgctgtagctattgcagcgttggtatctggcaatattagccctgcccacttgaatccagctgtgtcattagcttttgcgatcaaaggtgatttagcttggggaacagctattctttatatgattgcacagattattggtgcaatgctaggttcacttcttgtttatttgcaatttagaccccattatgaggctgcagaaaatagagcagacatccttggaacttttgcaactggtccggctttgaaggataatttttccaattttttaagtgaagtattgggaacacttgttcttgtacttactatttttgccatcggaaaatacaatatgcctccaggagttggtacgatgagtgttggtatgttagtggttgggattggtctatcgctcggtggaacaacaggttatgctattaatcctgcacgtgattttggtcctcgtttattgcatgccttgttaccgatgaagaacaaaggtgattctgattggacttattcatggattccgatagtaggacctatggtaggagctattttagcagccttaatatttgctatgatg

SEQ ID NO: 2852 - protein, 237 aa, Streptococcus agalactiae
MKEIIMDIFGEFLGTALLVLLGNGVVAGVVLPKTKNHNSGWIVITFGWGLAVAIAALVSGNISPAHLNPAVSLAFAIKGDLAWGTAILYMIAQIIGAMLGSLLVYLQFRPHYEAAENRADILGTFATGPALKDNFSNFLSEVLGTLVLVLTIFAIGKYNMPPGVGTMSVGMLVVGIGLSLGGTTGYAINPARDFGPRLLHALLPMKNKGDSDWTYSWIPIVGPMVGAILAALIFAMM

SEQ ID NO: 2853 - DNA, 699 bp, Streptococcus pyogenes
atggatatctttggcgaatttttgggtacagccttattggttttactaggaaatggtgtggtagcaggggttgtcttgcccaaaacgaaaacccatgcttctggctggatcgtgattgcgactggctggggaattgcagttgctgtggcagtctttatcagtggcaaagttgcccctgcccacctcaatccagctgttagccttgcttttgccatgagtggaaccattgcctggtcaacagccattgcctatagccttgcccaactattgggagctatggttggttcaactctggtattccttcagttcaggccacattatctggctgctgagagtcaggctgatattttagggacatttgcgacaggtcctgctattcgagatactagctcaaacctattgagtgaaatctttgggacctttgtcttgatgcttggtattttggcatttggcttatatgatatgccagcaggactaggaaccctctgtgtaggtaccttggttattgggattgggttatccttaggaggaacgacaggttacgccattaacccagcacgtgatttaggacctcgtctagttcatgctattctaccactcaacaacaagggagattctgattggtcttatgcttggatacctgttgtaggaccaattattggagcggtcttagcagttttgcttttccaagtcatgtcc

SEQ ID NO: 2854 - protein, 233 aa, Streptococcus pyogenes
MDIFGEFLGTALLVLLGNGVVAGVVLPKTKTHASGWIVIATGWGIAVAVAVFISGKVAPAHLNPAVSLAFAMSGTIAWSTAIAYSLAQLLGAMVGSTLVFLQFRPHYLAAESQADILGTFATGPAIRDTSSNLLSEIFGTFVLMLGILAFGLYDMPAGLGTLCVGTLVIGIGLSLGGTTGYAINPARDLGPRLVHAILPLNNKGDSDWSYAWIPVVGPIIGAVLAVLLFQVMS

SEQ ID NO: 2855 - DNA, 1335 bp, Streptococcus agalactiae
atgacagaaaaatatgtaaataaagtaattgtcattttaggagcttcttttgctggtatgacttgtgcgcagaaattacgccaattaaatcctaattgggatatcgttttgattgataaagaaattcatccagattatgttccaaatggcttaaattggtattatcgtcacgaaattagtggtttaaatcaggccatgtggcagacagaagaagagcaacggttgcagaatatacgctgtctatttggtctaaaagttgagaaaattaataaagaagatagggaattaatgttatcagatggttcttctgtctattatgatcaattgatttgtgccatgggctcccaagcagaatcaacttatattgatggggctgatgcgcaaggtgttttaacaacaaaaacttatgcaactagtcaaaatgctaagcaggtattagataaaagtcataaggtagcagttgttggggcaggtatcatcggtttagatattgcttatagtttacatgaatcagggaaggcggtcactttgttagaagctcaagaaagaccagacttcaggcatacagatcctgatatgtcccttcctttacttgatgcgatggctgaatcaaaactacattttttccaaaatcaaaaggttgagaaaattactgtaacccgagaagaaaaactttgtttgcgaacgctaacaggagacacctttacagttgatgctgtcatattagctgttaattttcgtccggatagtcgtcttttaactgggttggttgatttaagtgttgataatagtgttgttgtaaatgattatttccaaacgagtgaccctaatatctatgctattggcgatttgatttggtcgtattttaaaggtcttaatagtgcttattatatgcccttaattaaccaagcaatccgttcggcacaaatgttggcataccatttatcgggacatgctgttccaaaattaaaaataacacgcgctacaggatctaaacactttggctattatagagctaacattggattaactgaattggaagctggtttttacgaggataccgttagtgttacttatttccctaaagaacagtatgatttaaggataaaattgattgctaaccaaaaaacgggccatttattgggggctcaattaatctcaaaggaaaattgtttggctactgccaatcagcttgttcaagctatatcgtgtgatatgacagattttgatctggcttttcaagatttcatttatacagctagagaatctgagatggcttatatgttgcatcaagcagctatcaacctttatgaaaagaggattgggctatgcgaa

SEQ ID NO: 2856 - protein, 445 aa, Streptococcus agalactiae
MTEKYVNKVIVILGASFAGMTCAQKLRQLNPNWDIVLIDKEIHPDYVPNGLNWYYRHEISGLNQAMWQTEEEQRLQNIRCLFGLKVEKINKEDRELMLSDGSSVYYDQLICAMGSQAESTYIDGADAQGVLTTKTYATSQNAKQVLDKSHKVAVVGAGIIGLDIAYSLHESGKAVTLLEAQERPDFRHTDPDMSLPLLDAMAESKLHFFQNQKVEKITVTREEKLCLRTLTGDTFTVDAVILAVNFRPDSRLLTGLVDLSVDNSVVVNDYFQTSDPNIYAIGDLIWSYFKGLNSAYYMPLINQAIRSAQMLAYHLSGHAVPKLKITRATGSKHFGYYRANIGLTELEAGFYEDTVSVTYFPKEQYDLRIKLIANQKTGHLLGAQLISKENCLATANQLVQAISCDMTDFDLAFQDFIYTARESEMAYMLHQAAINLYEKRIGLCE

SEQ ID NO: 2857 - DNA, 1344 bp, Streptococcus pyogenes
atgacattaacgacaaagaccatacatgttatcggggcatcctttgctggtctagcctttgttgataaatataaggacctcaatccagattcccaaatcattctcattgataaggaaagctgtcccaattatattccaaatggtatcaaccaattattcagaggagacattcaagacctgtctgatgctatgtggggaagagcctgcctagcagcacaaatagagtctaaccatcggtttattcaagcagaagtgttagctatcgaagctccctcaaacaccttgcttctcaaagacagtcaaggacgagtttttgaagaaggttatgaaacgcttgtttgtgccatgggtgctagcccccagtctcattatattgagacgtcacagaccaacaaagttttggtaaccaaatattatgaagaaagccaagctagtttaaaactgattgaggctagccaagaggtcttggttattggtgccggcttgattggcttagaccttgcctacagtttgtccttacaaggcaaacgggtcaaactgattgaagcagccgaacgtccagatttctatcagactgacgcagaactgatagcccctgtaatggcagaaatgtccactcaccatgtcacctttattaataataagcgtgttacggctattcatgagatagagggaaaagttgtcgctcataccgagcaaggggacaccttccaaggtgatttggctattttagccattaactttaggccaaatacacaccttttgcaaggacaagtggcttgtgctctggataagaccattttggttaatgaaaacttacagaccagccaggctaatatctatgccattggagacatggtttcattgcattttggtatattgggaatggattactatacacctttgattaaccaagcaatgaagacaggtcaggctctggctctgcatttagctggatatcctattcctccattacagacggtcaaggtattaggaagttctcactttgattattatcgcgcgagtgttggtgtgacagaagaagaagcagagctttatatggatacgtgtagctatttgtaccaaaatggggattctaaaaacctcttttggctgaaattaatagctagaaaaacggatgggattttaataggcgctcagctcctatccaaaaccaatgctcttgtcatcgccaatcaattaggtcaggctctggctctgaaagttacagacgctgacttagcatttcaagattttctctttttacaaggtcacagtgatttggcttatcatcttcatgaagcttgtctcaaattatttgaaaagaggctccgccatgaagat

SEQ ID NO: 2858 - protein, 448 aa, Streptococcus pyogenes
MTLTTKTIHVIGASFAGLAFVDKYKDLNPDSQIILIDKESCPNYIPNGINQLFRGDIQDLSDAMWGRACLAAQIESNHRFIQAEVLAIEAPSNTLLLKDSQGRVFEEGYETLVCAMGASPQSHYIETSQTNKVLVTKYYEESQASLKLIEASQEVLVIGAGLIGLDLAYSLSLQGKRVKLIEAAERPDFYQTDAELIAPVMAEMSTHHVTFINNKRVTAIHEIEGKVVAHTEQGDTFQGDLAILAINFRPNTHLLQGQVACALDKTILVNENLQTSQANIYAIGDMVSLHFGILGMDYYTPLINQAMKTGQALALHLAGYPIPPLQTVKVLGSSHFDYYRASVGVTEEEAELYMDTCSYLYQNGDSKNLFWLKLIARKTDGILIGAQLLSKTNALVIANQLGQALALKVTDADLAFQDFLFLQGHSDLAYHLHEACLKLFEKRLRHED

SEQ ID NO: 2859 - DNA, 111 bp, Streptococcus agalactiae
gtgccaaaatatgataaagaaattagacttagactcattaattctattaatagagcgcttggctcaacatactttaactcgagaagctcatcaaaatctgggactttggtt

SEQ ID NO: 2860 - protein, 37 aa, Streptococcus agalactiae
MPKYDKEIRLRLINSINRALGSTYFNSRSSSKSGTLV

SEQ ID NO: 2861 - DNA, 144 bp, Streptococcus agalactiae
ttggtaaaatattttgtgaatgtagaaaagcaaaagttgccagaacttctccttccctatactcaagagcaaaacgactcatatacaaaactaaggctgcgtctaaccgtttataaaaagcattacattgataatgtttcacaa

SEQ ID NO: 2862 - protein, 48 aa, Streptococcus agalactiae
MVKYFVNVEKQKLPELLLPYTQEQNDSYTKLRLRLTVYKKHYIDNVSQ

SEQ ID NO: 2863 - DNA, 1428 bp, Streptococcus agalactiae
atgcgaatagaagctctaatggaaaaagaaaggcgtgttcaatatcggctactttcttttttaagaggctctcctcaggcaatagcactgaagttagctttattagaaactggtttaagtcgagcaacttttcttaaatatatcaataatcttaatagctactttgaacaagaaaaagttaattgtcgaatcgtttattataaggataagttatttttagaagaggattataacttatccaatcaagaagtgttgaaagctctgatgaaagatagtattaaatacactatcttaatatctttatttaatcagcgtcagttcacaatcgttggtctttctcaagaattgatggttagtgaggctactttaaatcgtcatcttgctcatctcaatgaattgttagcggaatttgatattgctatttcacaaggaaaacagattggtgatgaattgcaatggcgttatttttattatgaattattcaagcaactatggtcttatgacaagtgccaaaatatgataaagaaattagacttagactcattaattctattaatagagcgcttggctcaacatactttaactcgagaagctcatcaaaatctgggactttggtttagtatttgtcatcatcgtctccttgctatggaaaaaatatctgataatctcaagcctattgtgaaacattatcaatgtaatgctttttataaacggttagacgcagccttagttttgtatatgagtcgttttgctcttgagtatagggaaggagaagttctggcaacttttgcttttctacattcacaaaatattttaccaatcaatacaatggaatacatcatgggatttggaggcccgattattgattgtgtaaccgaaacaatcatctactttaaaaaggagagtattttagctgacgagacatcagatcaggttatttaccaacttggtcagttatatagccattattatttctttaaaggtcatattttagttgaacaacctgatttagaacaaacgtatcgacttattgatcataatatgagggataagttgcatcatatttcaaagaagattattgcaaatgttaatcgaattagacctttaacagaagatggttgttctttgctgactttacatttgttggaattgcttattttctcgaaaaatagtcaaaaaatgccctttaggattggtctagatatgacaggtaatgctgtggaacagtcattgttggaatatcgcattcgacaacatttctctggtaataattctattcaagtcgaaccttatgacgaaggaaagggatttgatatggttatttatcagagtcactcaagaccttataaagccaaactaacctattgccttaataaaggtgcttcagagcgagaactacaggaaatagattcacttatttatgacaat

SEQ ID NO: 2864 - protein, 476 aa, Streptococcus agalactiae
MRIEALMEKERRVQYRLLSFLRGSPQAIALKLALLETGLSRATFLKYINNLNSYFEQEKVNCRIVYYKDKLFLEEDYNLSNQEVLKALMKDSIKYTILISLFNQRQFTIVGLSQELMVSEATLNRHLAHLNELLAEFDIAISQGKQIGDELQWRYFYYELFKQLWSYDKCQNMIKKLDLDSLILLIERLAQHTLTREAHQNLGLWFSICHHRLLAMEKISDNLKPIVKHYQCNAFYKRLDAALVLYMSRFALEYREGEVLATFAFLHSQNILPINTMEYIMGFGGPIIDCVTETIIYFKKESILADETSDQVIYQLGQLYSHYYFFKGHILVEQPDLEQTYRLIDHNMRDKLHHISKKIIANVNRIRPLTEDGCSLLTLHLLELLIFSKNSQKMPFRIGLDMTGNAVEQSLLEYRIRQHFSGNNSIQVEPYDEGKGFDMVIYQSHSRPYKAKLTYCLNKGASERELQEIDSLIYDN

SEQ ID NO: 2865 - DNA, 1557 bp, Streptococcus pyogenes
gtgatttggcttatcatcttcatgaagcttgtctcaaattatttgaaaagaggctccgccatgaagattgaagacttaatggataaggaacgaagggcccaatatcgtctcttggtgaccctttatcatgctaaagaaacgttaaggctaaaagacctaatgaggctatcaaacttgtctaaagtgaccctattaaaatacattgacaatctaaatcatttgtgtcgagaacaaggtttagcctgtcaattacttttagaaaaagacagtctgagcttaaaagaaaatggccagttccattgggaggatttggtagctctgcttctcaaagaatcggttgcctatcagatattgacctacatgtactgccatgaacactttaacatcaccaacttatccgttgaactgatggttagtgaagctactctaaacagacaattagctcacctcaaccagcttttatcagaatttgatctggcgctctcgcaaggcagacaactgggaagtgagcttcagtggcgttatttctattttgaattgttccgccataccttgaccagacaaggcatagacgccttggtcaatcagttagacgcttcgcatttggctaccttaattgagcggctgattggccagtcattatcggcagaagccttagaacaattattgatttggttggcgatttcgcaagcgcgaatgtcctttcaaaaaagctacaatgatcattttttaagagatagtgactttatgacatctaatattttctttaagcgcttagaaagcatgcttttacattacttaagacgctatgcccttgaatttgatgcttttgaagctaagagcctctttgtctttttgcatgcttatcctctacttcctattgccagcatgaagtatagtttgggttttggaggtcctattgctgatcacatttcagaagccttatggcttttaaagaaggctcatgtgattatccatcagacaaaggaggaaatcatttatggcttggggatatttttttccaaagcttacttttttaaaggagctatccttagtcaaccaaccaatagccaatacctttatcaattagtaggcgaagataaaagagcgcttttaagggttatcataaaccatttagtgctgcaaatggatcaggaaacggatttcagtcagcagttgagtgacgacattttagcattgttgattttttccattgagcgccaccatgagcctcttttagtagggcttgccttggggcaaaataaggtggaagcagccattgcggaattggccattagacgtcatttggggcatcgtagggattttcaattaatgccctatgatcatcagaaagtttatgattgtctgattacctatcagactgtctgtttaccgagacaagatttaccctattaccggttaaaacagtatagctccccctatgaactcactgctttagaagcttttctcaaagaccttttccagcaaaaaaatacacgagaagaggaactctcactcagcccagcagctaagtctagttttgcacacaaaactgtg

SEQ ID NO: 2866 - protein, 519 aa, Streptococcus pyogenes
VIWLIIFMKLVSNYLKRGSAMKIEDLMDKERRAQYRLLVTLYHAKETLRLKDLMRLSNLSKVTLLKYIDNLNHLCREQGLACQLLLEKDSLSLKENGQFHWEDLVALLLKESVAYQILTYMYCHEHFNITNLSVELMVSEATLNRQLAHLNQLLSEFDLALSQGRQLGSELQWRYFYFELFRHTLTRQGIDALVNQLDASHLATLIERLIGQSLSAEALEQLLIWLAISQARMSFQKSYNDHFLRDSDFMTSNIFFKRLESMLLHYLRRYALEFDAFEAKSLFVFLHAYPLLPIASMKYSLGFGGPIADHISEALWLLKKAHVIIHQTKEEIIYGLGIFFSKAYFFKGAILSQPTNSQYLYQLVGEDKRALLRVIINHLVLQMDQETDFSQQLSDDILALLIFSIERHHEPLLVGLALGQNKVEAAIAELAIRRHLGHRRDFQLMPYDHQKVYDCLITYQTVCLPRQDLPYYRLKQYSSPYELTALEAFLKDLFQQKNTREEELSLSPAAKSSFAHKTV

SEQ ID NO: 2867 - DNA, 1983 bp, Streptococcus agalactiae
atgacatttgacaccattgatcaattagcggttaatacagtccgcacgctttctattgatgctatccaagcagcaaattctgggcacccaggtcttcctatgggagctgcgcctatggcttatgtgctttggaataaattcttaaatgtaaacccaaaaacaagtcgcaattggacaaaccgtgaccgttttgtgctatcagctgggcatggttcagctcttctttatagcctacttcatttagctggctatgatttatcaattgatgatttaaaacaatttcgccaatggggatcaaaaacacctggacatccagaagttaaccatactgatggtgtagaagcaacaactggacctttagggcaaggtattgctaatgctgttggtatggcaatggctgaagctcatttggctgctaaatttaataaaccaggctttgatttagttgatcattacacttatacacttcatggtgatggttgtttgatggagggtgttagccaagaagctgccagtcttgctggacacttaaaacttggtaaattggtccttctttatgattcaaatgatatctcacttgatggtccaacatctcaatcatttacagaagatgttaaaggacgttttgaatcatatggttggcaacatatcttagttaaagatggtaatgatttagaagcgattgctgcagcaattgaagctgctaaagctgaaactgataaaccaaccattattgaagttaaaactattattggatttggcgcagagaaacagggaacatcttcagttcatggagcgccacttggtgcagaaggtattacttttgccaagaaggcttatgtatgggaatatccagactttactgttcctgctgaagttgcagatcgatttgcctcagatcttcaagcgcgtggtgcgaaggcagaagaggcatggaatgatctttttgctaaatatgaagttgagtatccagaattagcaactgaatacaaagaagcttttgctggccaagctgagacagttgaactgaaagctcatgacctaggttcatcagtggctagtcgtgtttcaagccaacaagctattcaacaattatcgactcaattaccgaacctctggggagggtcagcagacctctcagcttctaataacacaatggtagcagcagaaacagatttccaagcaagtaactacgctgggcgtaatatttggtttggtgtacgtgaatttgcaatggctgctgcaatgaatggaattgcgcttcacggtgggactcgtgtttatgggggtacgttctttgtcttctcaaactacttgttaccagcagtacgtatggctgcacttcaaaacttgccaactgtctatgttatgacacatgattctattgctgttggagaagatgggccaactcatgagccaatagaacaattagcatcagtgcgctcaatgcctaatttgaacgttatccgtcccgcagacggtaatgaaacaaacgctgcatggcaacgagctgtatcagagacagatcgaccaacgatgcttgttttaacacgtcaaaacttaccagttcttgaaggaacatcagaattagcccaagaaggggttaataaaggtgcttatattttatcagaagctaaaggtgaacttgatggtatcatcattgcaacaggttcagaagttaaattagctttagatactcaagacaaacttgagtcagagggcatccatgttcgcgtcgtatctatgccagcacaaaacatttttgatgaacaagaggcttcatatcaagagcaagtgcttccatcagctgttacaaaacgtcttgctattgaggcaggatcaagcttcggttggggtaaatatgttggtttaaatgggctaacacttactattgatacttggggagcatcagcaccaggtaacagaattttcgaagagtatggctttacagttgagaatgctgtatcgctatataaagaactt

SEQ ID NO: 2868 - protein, 661 aa, Streptococcus agalactiae
MTFDTIDQLAVNTVRTLSIDAIQAANSGHPGLPMGAAPMAYVLWNKFLNVNPKTSRNWTNRDRFVLSAGHGSALLYSLLHLAGYDLSIDDLKQFRQWGSKTPGHPEVNHTDGVEATTGPLGQGIANAVGMAMAEAHLAAKFNKPGFDLVDHYTYTLHGDGCLMEGVSQEAASLAGHLKLGKLVLLYDSNDISLDGPTSQSFTEDVKGRFESYGWQHILVKDGNDLEAIAAAIEAAKAETDKPTIIEVKTIIGFGAEKQGTSSVHGAPLGAEGITFAKKAYVWEYPDFTVPAEVADRFASDLQARGAKAEEAWNDLFAKYEVEYPELATEYKEAFAGQAETVELKAHDLGSSVASRVSSQQAIQQLSTQLPNLWGGSADLSASNNTMVAAETDFQASNYAGRNIWFGVREFAMAAAMNGIALHGGTRVYGGTFFVFSNYLLPAVRMAALQNLPTVYVMTHDSIAVGEDGPTHEPIEQLASVRSMPNLNVIRPADGNETNAAWQRAVSETDRPTMLVLTRQNLPVLEGTSELAQEGVNKGAYILSEAKGELDGIIIATGSEVKLALDTQDKLESEGIHVRVVSMPAQNIFDEQEASYQEQVLPSAVTKRLAIEAGSSFGWGKYVGLNGLTLTIDTWGASAPGNRIFEEYGFTVENAVSLYKEL

SEQ ID NO: 2869 - DNA, 309 bp, Streptococcus agalactiae
ttgtttatgaagaaggagtgtcgtgatttttatcggcagatacagcatacttacaatgatatatctgtccgtgaagatgcagtgctatcatcaatactattatcagcatcgaatggtttgataaaaactagcgatgtacctcgtgttgcttatgagttaactcagcaattggaaaataatgagatagaaaaatctttcgagtcattagctacagttaaggaattgaaaaaatctgctaaaaaattgtctgagagatatgagcaaaataaggtaacaacgggattgctttctaaagtatttggaaatcat

SEQ ID NO: 2870 - protein, 103 aa, Streptococcus agalactiae
MFMKKECRDFYRQIQHTYNDISVREDAVLSSILLSASNGLIKTSDVPRVAYELTQQLENNEIEKSFESLATVKELKKSAKKLSERYEQNKVTTGLLSKVFGNH

SEQ ID NO: 2871 - DNA, 264 bp, Streptococcus pyogenes
atggaaaagaaacgacagcgcttatacgatgtgattagacaggcttatgattatccagaaaatcgtgaaaatgtggccttgtcgcagctacttttagcagcttctaatagattaattaaacacagtaacccacttcttgttgcctaccaactaaaccaagatgtggataattacttacttgataatgacattttacttccaaaatcgctttgccgttttaagcagtcattggaaaagtatattttagaggaagcctcatcagtc

SEQ ID NO: 2872 - protein, 88 aa, Streptococcus pyogenes
MEKKRQRLYDVIRQAYDYPENRENVALSQLLLAASNRLIKHSNPLLVAYQLNQDVDNYLLDNDILLPKSLCRFKQSLEKYILEEASSV

SEQ ID NO: 2873 - DNA, 732 bp, Streptococcus agalactiae
atgattaagtttgaacatgtttcgaaagtatacggagaaaaagaagctctcagtgatttaaccctctctgttaaagatggtgagatttttggattaataggtcacaatggagcaggaaaaacaacgacaattagtattctaacatctattattgatgcaacttatggccaagtctatattgatgacctacttttgacagaacatcgtgaccaaattaagaaaaaaataggttatgtaccggactcgccagatattttcttaaatttaaccgcagaggaatactggtactttttagctaaaatttatgacgttgccccagaagatattgaagcacgtatcacaaaattggtagacatatttgaactagaggagcaacgctataatcctattgaaagtttttcacatggtatgcgtcaaaaagtcattgttataggtgcccttcttccaaatcctgacatttggattctagatgagccgttaactggtttagaccctcaagcttcttttgatttgaaagaaatgatgaaagaacatgctaaaaatggaaaaacagttattttttcaacacatgtcttagcagttgcagaacagttatgcgacagaataggtattttgaaacaagggaaattaatctttgtcggtagcttaggtgagttaaaaatgaaatatccagataaagatttggaaactatctatttggaattagcaggacgtcaagctagtagggaggga

SEQ ID NO: 2874 - protein, 244 aa, Streptococcus agalactiae
MIKFEHVSKVYGEKEALSDLTLSVKDGEIFGLIGHNGAGKTTTISILTSIIDATYGQVYIDDLLLTEHRDQIKKKIGYVPDSPDIFLNLTAEEYWYFLAKIYDVAPEDIEARITKLVDIFELEEQRYNPIESFSHGMRQKVIVIGALLPNPDIWILDEPLTGLDPQASFDLKEMMKEHAKNGKTVIFSTHVLAVAEQLCDRIGILKQGKLIFVGSLGELKMKYPDKDLETIYLELAGRQASREG

SEQ ID NO: 2875 - DNA, 732 bp, Streptococcus pyogenes
atgatagaatttaaacatgtttcaaagttgtatggcgacaaagaagctctcagcgatttaaacgtcaccatcaatgacggtgaaatttttggccttatcggacataatggtgcaggtaaaaccacgaccatcagcattttgacttctattatcgaagcgagttatggcgaagtatttgtggatggtcaacttctgacagaaaatagagaagctatcaaaaaacaaattgcttatgtgccagattctcctgatattttcttgaatctaactccaaatgagtattggcagtttttagctaaaatttatggggtgtcagatgaggacagagaagaacggttagcacagctgacaacactttttgaactgaaggaagaagttaatcaaaccattgatagtttctcacatgggatgcgccaaaaagtgattgtgattggtgctcttgtatcaaatcctaacatctggattttggatgaaccattaacaggtttggatcctcaggcttcttttgaccttaaagaaatgatgaaagctcatgcagcttctggacatacagtcttattttcgactcacgtgctatcagtcgctgagcagttatgtgatcgtatcgggattctaaaaaaagggaaattgatttttgttggaacgattgatgagttgaaagaacaccatcctgacaaagacttggagagcatctaccttgaactcgctgggcgtaaggcgcaagaagagggg

SEQ ID NO: 2876 - protein, 244 aa, Streptococcus pyogenes
MIEFKHVSKLYGDKEALSDLNVTINDGEIFGLIGHNGAGKTTTISILTSIIEASYGEVFVDGQLLTENREAIKKQIAYVPDSPDIFLNLTPNEYWQFLAKIYGVSDEDREERLAQLTTLFELKEEVNQTIDSFSHGMRQKVIVIGALVSNPNIWILDEPLTGLDPQASFDLKEMMKAHAASGHTVLFSTHVLSVAEQLCDRIGILKKGKLIFVGTIDELKEHHPDKDLESIYLELAGRKAQEEG

SEQ ID NO: 2877 - DNA, 1602 bp, Streptococcus agalactiae
atgaattggtcacgtatctgggaactcgtaaaaattaatatcctttattcaaaccctcagactctatcggcactaagaaaaaagcaagaaaaacatcctaaaaaagaattttcagcttataaatccatgtttagaaatcagttatttcagattttgctcttttcaataatttatgtatttctctttgtatcacttgattttaaagaatatccgggctacttcacgttctacattggtatctttacactagtatccattatctactcttttattgcgatgtacagtgttttctatgagagtgacgatgttaaacaatatgcttatttgcctattaaatctgaagagctctatgttgctaaaatttttgcaacatttgggatgtctgtaacttttctaatgccaatcctaaccttaatgattgtggcttattggcgtataataggtggcccacttgcggtcctcctagcaatcataaattttgctattttatttttatcggtaacggtgatttcattgtatattaatagtttaataggccgtgccattattcgaagtgctaatcggaaacttatttctactatattaatttcactagctacatttggagcaatagttcccttattatttgtgaatatgacgagtcaaaagatggtacaagggaaattacaagatatcgctccaatcccttatgtcagaggttattatgatattgttacagcgccatttagtatggagagtctcctcaactattatctcccgctcttaatcattttattcttgataggtgctatttataaatgggttatgccacgctactatcaggagttgttgtatggacaggtcaagcagagaaaagtccatcgtcaaatcgattttagtaaacgtgagtcaattaataaaactcttgttaaacaccatttatcaagtttacaaaatgcgacattattgacaaatacatttttaatgccactattatatctagcaatgttcattgttccaattttgaataatggtaaagagattggtcgattttttaatgaaaattattttgggatagcttttctagcaggaatattaataggtagtttatgtgtgatgccagctagcattgtaggggtaggtatttctttagaaaaaagtaatttctactttataaaaagtttgcctatatcattttcgtatttcttgaagcataaatttgtaactttgataaccttacaacttgcagttcctacttttatttatttcttggtaggattctttctacttaaactatcaatcctcgttttattgagcttcattttaggtctagtcttcatgggacttatcgaaggccagtttatttatagacgtgactataaacatttgttcttgaattggcaagaggttacgcaactatttaatagagggttaggccaatggctgttagttggttcattgtttggaatgatgataataggtagttttcttattggaataagtattttttggtcaatggtatggaatactgtagctgtcaatatcataatccttatcattgggttgctcatattatcaatttgccaatacttactgctaaaaaatttttggaagaagcttgtt

SEQ ID NO: 2878 - protein, 534 aa, Streptococcus agalactiae
MNWSRIWELVKINILYSNPQTLSALRKKQEKHPKKEFSAYKSMFRNQLFQILLFSIIYVFLFVSLDFKEYPGYFTFYIGIFTLVSIIYSFIAMYSVFYESDDVKQYAYLPIKSEELYVAKIFATFGMSVTFLMPILTLMIVAYWRIIGGPLAVLLAIINFAILFLSVTVISLYINSLIGRAIIRSANRKLISTILISLATFGAIVPLLFVNMTSQKMVQGKLQDIAPIPYVRGYYDIVTAPFSMESLLNYYLPLLIILFLIGAIYKWVMPRYYQELLYGQVKQRKVHRQIDFSKRESINKTLVKHHLSSLQNATLLTNTFLMPLLYLAMFIVPILNNGKEIGRFFNENYFGIAFLAGILIGSLCVMPASIVGVGISLEKSNFYFIKSLPISFSYFLKHKFVTLITLQLAVPTFIYFLVGFFLLKLSILVLLSFILGLVFMGLIEGQFIYRRDYKHLFLNWQEVTQLFNRGLGQWLLVGSLFGMMIIGSFLIGISIFWSMVWNTVAVNIIILIIGLLILSICQYLLLKNFWKKLV

SEQ ID NO: 2879 - DNA, 1668 bp, Streptococcus pyogenes
ttgaactcgctgggcgtaaggcgcaagaagaggggtgatggcatgaattggtctactatttgggaacttatcaagataaacattctttattccaatccacaaagtttagctaacctcaaaaagcgtcaggaaaaacacccgaaagaaaacttcaaagcctataaaagcatgatgaggcaacaggccttaatgattgccatgtttttggtgatttacctttttatgtttattggtgtcgatttcagtcattatccaggacttttctcctttgacgttgctatgttttttatcatgtcaaccttgacagcctttagctctctttacaccattttttatgaaagtaatgacctaaaactttatattcacttaccagtaacgtcagaagaactctatattgcaaaaattgtctcgtcgctagggatgggtgctgtctttttgatgcctcttatctctcttctcttaattgcctattggcaactcttgggaaatcctttgtctattttagtagctatcgtgctctttttagtgttactagtgagttctatggtattagctatttatatcaatgcttgggtaggcaaaatcattgtaagaagtcgcaaacgaaaactcatttcaactatcatgatgtttgtctcaacttttggcgctttcgtcttaatttttgcgattaatattagtaacaacaagcgtacgatgacggatggcgtatttactgattacccaactattccctatttcaaaggattctatgatgttgttcaggcaccgttttctactgcggccctccttaacttttggttgccattgttacttatcctagctatggtatatggtattgtcacaaaagtgatgccaacttattatcgtgaggctttttatattagtaacgagaacaaagtcaagcaaactaaaaaaccagttaatcgtcctcatcagaatcaatcactggcgcagttgttgcgaaaacatcacctattaacgttacaaaatgcaactttactgacacaaacctatctcatgcccctgatgtatgtgatgctttttatcggtccaagtttgtcacgtggcacaggtttctttaagcatatttccccagattactttggggtagccttattatttggggttagtttgggtgtcatgtgtgcaacaccaaccagctttattggagtaggtatttcacttgaaaaggataactttacctttattaaaagcttaccaataacgttaaaaaaattcttgatggataaattttgcttgcttgtaggtctgcagctgattgtgcctatggtgatttatcttgtgtttggtctctttgtgttgcacctgcatcctcttctaacgattgctttttgtcttggctacgccctatcactgattgtgcaaggggaattgatgtatcgtcgtgactaccggcttctggatttaaaatggcaagacatgacgcaactctttaccagaggagatgggcaatggttaacaatgggacttatctttggtaatttaatagttgcaggtgtgctaggttttggagctgttatcattgccaatattatccaacaacctctgttgattagtattctattgagttgtctaatactaatggttttaggtcttgcgcaattatggattcaaaaaaccttctggaaaagcttagagaggctt

SEQ ID NO: 2880 - protein, 556 aa, Streptococcus pyogenes
LNSLGVRRKKRGDGMNWSTIWELIKINILYSNPQSLANLKKRQEKHPKENFKAYKSMMRQQALMIAMFLVIYLFMFIGVDFSHYPGLFSFDVAMFFIMSTLTAFSSLYTIFYESNDLKLYIHLPVTSEELYIAKIVSSLGMGAVFLMPLISLLLIAYWQLLGNPLSILVAIVLFLVLLVSSMVLAIYINAWVGKIIVRSRKRKLISTIMMFVSTFGAFVLIFAINISNNKRTMTDGVFTDYPTIPYFKGFYDVVQAPFSTAALLNFWLPLLLILAMVYGIVTKVMPTYYREAFYISNENKVKQTKKPVNRPHQNQSLAQLLRKHHLLTLQNATLLTQTYLMPLMYVMLFIGPSLSRGTGFFKHISPDYFGVALLFGVSLGVMCATPTSFIGVGISLEKDNFTFIKSLPITLKKFLMDKFCLLVGLQLIVPMVIYLVFGLFVLHLHPLLTIAFCLGYALSLIVQGELMYRRDYRLLDLKWQDMTQLFTRGDGQWLTMGLIFGNLIVAGVLGFGAVIIANIIQQPLLISILLSCLILMVLGLAQLWIQKTFWKSLERL

SEQ ID NO: 2881 - DNA, 1383 bp, Streptococcus agalactiae
atgtctagagaatacatcaccttgtcaaaaaatatcatcaaacaccttggtggacaaaataatattaacaatgtttaccattgtcaaacacgccttcgctttagtctcaatgatccgacgaaagtaaaccttgagcaattaaaaactttaaaagaggtaaaaactgtcgttatcagcggagggcaacatcagatagtgatagggactcatgtcgcaaaagtgtttgaagaaattaactccctcattgaaactaactcaacgactaaaatagaacaaaccaaaaaagccaaagcagttagtcgaattattgattttgtttctgggactttccaaccgattttacctgctttatcaggcgctggtatgattaaggcattgctagctttattactagtattcaaaatcttgacaccgtcatctcaaacatatatattactaaatctttttgcagatggtgttttctattttttacctatcttaatcgccatcacagctgctcaaaaattgaaagctaatcctattttagctttgggaactgttgtcatgctccttcaccctaattgggctaatttagtagcttctggtaaaccagtatccttattccatacgatcccattcacacttactaactatgcatcaagtgtcattcccattattctaattatttgtgttcaggcttatatagaaaaatatttaaagcaaattattcctaaatcactgcgtttagtgcttgttcctatgttaatatttctcagcatgggaattttgtcgttctctatattgggaccaatgggtactatcgctggccaatatttagctgttatttttacttttttatccaaatacgccagttgggcacctgcttttctagtaggagcatttgctcctatcctaatcatgtttggtgttcatagtggaattgctgcattaggaatcacacaactagcgaaattaggggttgattctatttttggaccaggcatgctctgctcaaatatcgcacaagcaactgcaggtacagtggtgactcttataacaaaagaaaaaaaacttaaagaaattgctggacctgctgccataacagcttatatgggaatcaccgaacctatcttatatggtgtcaaccttccgaaacgttatcctctaatagcctcacttattggtggtggtcttggaggactctatgccggtataatgaacgctcaccgcttcgctgtaggctcttctggtctaccaggtctgtttctttatatcagtcatacttcaacacatctttttattaccatgcttattgcagttatcattactgtaagcacaactgctatattgacattcattctagcacaatattacgaaaaacaagttagcatcagacaaagagac

SEQ ID NO: 2882 - protein, 461 aa, Streptococcus agalactiae
MSREYITLSKNIIKHLGGQNNINNVYHCQTRLRFSLNDPTKVNLEQLKTLKEVKTVVISGGQHQIVIGTHVAKVFEEINSLIETNSTTKIEQTKKAKAVSRIIDFVSGTFQPILPALSGAGMIKALLALLLVFKILTPSSQTYILLNLFADGVFYFLPILIAITAAQKLKANPILALGTVVMLLHPNWANLVASGKPVSLFHTIPFTLTNYASSVIPIILIICVQAYIEKYLKQIIPKSLRLVLVPMLIFLSMGILSFSILGPMGTIAGQYLAVIFTFLSKYASWAPAFLVGAFAPILIMFGVHSGIAALGITQLAKLGVDSIFGPGMLCSNIAQATAGTVVTLITKEKKLKEIAGPAAITAYMGITEPILYGVNLPKRYPLIASLIGGGLGGLYAGIMNAHRFAVGSSGLPGLFLYISHTSTHLFITMLIAVIITVSTTAILTFILAQYYEKQVSIRQRD

SEQ ID NO: 2883 - DNA, 1860 bp, Streptococcus pyogenes
atgacgtatcaagaaactgccaaggctattttagcggcggttggtggcaaaacaaatattcaacgtgtgacacactgtgtaacacgtctacgcttagtactgaaaaatgatgagaaagttaaagatcagcaagtcaaagccatttcaaatgtgattggcgtgatgcgcaaaaacggccagtaccaaattatcttgggcaatgatgtcaataattattaccaagcctttttaagcctagggcattttgacaatcaagatgaagatcattcttcaaaagcgaaaggaagtatccttgagcgcttgattgaaaccattgctggcgtgattacaccgctgattccagcccttcttggtggtggaatgctcaaagtggtgggaatcttgcttcctatgcttggcttagcgagtgcggactctcaaaccgttgcctttattaacttctttggcgatgcggcttattattttatgcctgtcatgattgcctattcagcagcggcgcgctttaaggtgacacctgttttagcagcgacgatcgcagggattttattgcatcctgcctttgttgcaatggtagcagaaggtaaaccattgactttatttggagcaccagtcactcctgctagctatggctcatctgttattcccattttgatgatggtttacttgatgcaatacattgaaaaatgggtcaatcgcttggtgccaagcgtgatgaaaagcttcttacagccaaccttaatcattttgatttctggctttttggctttagtggttgtaggtcctcttggtgtgattattggtcaagggttatctaataccatgctcgctatttatcatgtggctccgtggctagcacttgctattttgggagcgattatgccgcttgttgtcatgacggggatgcactgggcttttgcaccaatctttttggccgcttcggtcgcaacaccagatgtcttgattttaccagcaatgttggcttctaatttggctcaaggagccgcatctttggctgttgcctttaaaacaaagcagaaacaaacacgtcaagttgcccttgccgcggggatttcagctttgctggcaggtatcacggaaccggcactttatggggtcacactgaaatttaaaaagccactctatgcagccatgatttcaggtggtctggttggagcctttattggttttgtcaatattgcttcttatacctttgtcgtaccttctattattggtttaccacagtacatcaacccatcaggcggagctaattttacaaatgctttgattgccggaactgcgacgattgtgttagccttcagtttgacttggttcatgggaattgatgaagagtccccaaagcaagtgagtgttgcagcagatatgtcacaagttaagagcggcttgtcaaccaaacaaacgttgtatgctccaatgacaggtgagatgctttttctatcagaagttcctgatgaaaccttttcttccaagttattaggagaaggatttgccatattaccaagcgaaggtgaggtctatgccccctttgatggtgaagtcatcactttctttccaaccaagcatgctgttgccttaaaaaacacacgtggtgtggaagtcttgattcatgtcggtattgatacggttgagttaaaagggcaaggtttcgagcagttagtgtctgttggcgatgtcgtgaaacgaggccaggcacttctaaaaatggatattgatttcattacttcaaaaggctattcactcatcagtcctgtggtcgtgaccaattcggctgagcagttggagattattattcaagatgacaaaaaaatggtgactaaagaggacgctttgttagtcatttta

SEQ ID NO: 2884 - protein, 620 aa, Streptococcus pyogenes
MTYQETAKAILAAVGGKTNIQRVTHCVTRLRLVLKNDEKVKDQQVKAISNVIGVMRKNGQYQIILGNDVNNYYQAFLSLGHFDNQDEDHSSKAKGSILERLIETIAGVITPLIPALLGGGMLKVVGILLPMLGLASADSQTVAFINFFGDAAYYFMPVMIAYSAAARFKVTPVLAATIAGILLHPAFVAMVAEGKPLTLFGAPVTPASYGSSVIPILMMVYLMQYIEKWVNRLVPSVMKSFLQPTLIILISGFLALVVVGPLGVIIGQGLSNTMLAIYHVAPWLALAILGAIMPLVVMTGMHWAFAPIFLAASVATPDVLILPAMLASNLAQGAASLAVAFKTKQKQTRQVALAAGISALLAGITEPALYGVTLKFKKPLYAAMISGGLVGAFIGFVNIASYTFVVPSIIGLPQYINPSGGANFTNALIAGTATIVLAFSLTWFMGIDEESPKQVSVAADMSQVKSGLSTKQTLYAPMTGEMLFLSEVPDETFSSKLLGEGFAILPSEGEVYAPFDGEVITFFPTKHAVALKNTRGVEVLIHVGIDTVELKGQGFEQLVSVGDVVKRGQALLKMDIDFITSKGYSLISPVVVTNSAEQLEIIIQDDKKMVTKEDALLVIL

SEQ ID NO: 2885 - DNA, 801 bp, Streptococcus agalactiae
atgaaaagacattttgagacaactagaagaattgttattaaagtaggaaccagttccctcgtacagacaagcgggaaaattaatttaagtaaaatagaccatttagcatttgttatttctagtcttatgaatagaggcatggaggtgattttagtatcatctggtgctatggggtttggtttagacattttgaaaatggataagcgtcctcaagaaatatcacaacaacaagcagtttctagcgtaggacaagtagccatgatgagtctttattctcagatattttcgcactatcaaactcatgtttcccaaattttattaacacgtgacgttgtggtttttccagagagtttgcaaaatgtaacaaactcttttgagagtctgctctctatgggaattttgccaatcgtcaatgagaatgatgctgtcagcgtggatgagatggatcataaaacgaagtttggggataatgaccgtctctctgctgtcgttgctaaaattactaaagcagatttattaattatgctgtcagatattgatggtctttttgataaaaatcctaatatttatgatgatgctgttttacgtagtcatgtttctgaaatcaccgatgacatcatcaagtcagctggaggagcaggaagtaaatttggtactgggggcatgcttagtaaaattaaaagtgcacaaatggtgtttgataacaatggacaaatgatattgatgaatggcgccaatcctcgtgatattttaaaggtgttagatgggcataatattggaacttattttgctcaaggaaag

SEQ ID NO: 2886 - protein, 267 aa, Streptococcus agalactiae
MKRHFETTRRIVIKVGTSSLVQTSGKINLSKIDHLAFVISSLMNRGMEVILVSSGAMGFGLDILKMDKRPQEISQQQAVSSVGQVAMMSLYSQIFSHYQTHVSQILLTRDVVVFPESLQNVTNSFESLLSMGILPIVNENDAVSVDEMDHKTKFGDNDRLSAVVAKITKADLLIMLSDIDGLFDKNPNIYDDAVLRSHVSEITDDIIKSAGGAGSKFGTGGMLSKIKSAQMVFDNNGQMILMNGANPRDILKVLDGHNIGTYFAQGK

SEQ ID NO: 2887 - DNA, 825 bp, Streptococcus pyogenes
ttgggtatgatgaaacgacaatttgaagatgtaacacgtatcgtaattaaaattggcactagttcattagtgctaccaacaggtaaaattaatttagaaaaaatcgaccaactggcttttgtgatttcaagtttgatgaataagggcaaggaagttattttagtatcatcgggagcgatgggatttggactagatattttgaaaatggaaaaacgtccgaccaatcttgctaaacaacaggcagtttccagtgttggtcaggtagccatgatgagtctttattcacaaatttttgcatactaccaaaccaacgtgtcacaaattttattgacgagagatgtggtggttttcccagaaagtctagccaatgttaccaatgcttttgaaagtctgattagtttgggcattgtgccgattgttaatgaaaacgatgcggttagtgtggatgaaatggatcatgcgactaaatttggagataatgaccgtttatctgctgttgttgctggtattacaaaagctgatttattaatcatgttgtctgatattgatggcctttttgataaaaaccctactatttatgaggatgcgcagctacgcagccatgttgctaatattacgcaagaaatcattgcgtcagcaggtggtgcgggcagtaagtttggcacaggtgggatgctaagtaaggtgcagtctgctcagatggtatttgaaaacaaaggacagatggtcttgatgaatggagctaatcccagagatattttaagagtgcttgaagggcaaccactaggcacctggttcaagcagatagaagaggtaaggcatgac

SEQ ID NO: 2888 - protein, 275 aa, Streptococcus pyogenes
LGMMKRQFEDVTRIVIKIGTSSLVLPTGKINLEKIDQLAFVISSLMNKGKEVILVSSGAMGFGLDILKMEKRPTNLAKQQAVSSVGQVAMMSLYSQIFAYYQTNVSQILLTRDVVVFPESLANVTNAFESLISLGIVPIVNENDAVSVDEMDHATKFGDNDRLSAVVAGITKADLLIMLSDIDGLFDKNPTIYEDAQLRSHVANITQEIIASAGGAGSKFGTGGMLSKVQSAQMVFENKGQMVLMNGANPRDILRVLEGQPLGTWFKQIEEVRHD

SEQ ID NO: 2889 - DNA, 1251 bp, Streptococcus agalactiae
atgacgtatattgaaatattagggcaaaatgctaaaaaagctagtcaatcagtagcacgattaagtacagctagtaaaaatgagatactcagggacttagcgagaaacatagtggctgatactgaaaccattttgactgagaatgctcgcgatgttgttaaggcaaaagataatggtatctcagaaattatggtggaccgtctacgactaaacaaagaccgcatacaggcgatagcaaacggtatttatcaggtagcagatttggcagatccgattggtcaagttgttagtggttatacaaatttagatggtttaaaaatccttaaaaaaagagtgcctttaggggttattgcaatgatatttgaaagtcgtcccaatgtatcggtggatgcctttagtttagcttttaaaacagggaacgctattattttgcgtggtggtaaagatgctattttttcaaatactgccttggttaattgtatgcgccaaacattgcaagatacaggccacaacccagatatagtacaattagttgaagatactagtcacgttgtagcagaggagttaatgcaggcaacagactacgtggacgtcttaattccaagaggtggtgcaaaattaattcaaacggtgaaggaaaagtcaaagattcctgttatcgaaacaggtgttggaaatgttcatatctatattgatgaatttgcagatttagatatggcagctaagattgttattaatgctaaaacccaacgccctagtgtctgtaatgctgccgaagggttagttgttcatcaagctattgctaagggatttttatctcaattggagaaaatgctcaaagaatcgaaccagtcagttgaatttcgtgccgatgaggaagctttgcaacttttagaaaatgctgttgctgcaagtgagtctgattatgctactgaatttttagactatattatgtcagtaaaagtagtagattcttttgaacaagcaattagctggattaataaatacagtagtcatcactcagaagctatcattactaataatatcagtagggcagaaatttttcaggatatggtagatgcagcggcagtttatgttaatgcttcaacacgttttacagatggtttcgtttttggactcggagcagagattggtatttcgactcaaaaattacacgcgcgtggaccgatgggattagaagctttaacaagtacaaaatactatattaatggaactggtcaagtaagggaa

SEQ ID NO: 2890 - protein, 417 aa, Streptococcus agalactiae
MTYIEILGQNAKKASQSVARLSTASKNEILRDLARNIVADTETILTENARDVVKAKDNGISEIMVDRLRLNKDRIQAIANGIYQVADLADPIGQVVSGYTNLDGLKILKKRVPLGVIAMIFESRPNVSVDAFSLAFKTGNAIILRGGKDAIFSNTALVNCMRQTLQDTGHNPDIVQLVEDTSHVVAEELMQATDYVDVLIPRGGAKLIQTVKEKSKIPVIETGVGNVHIYIDEFADLDMAAKIVINAKTQRPSVCNAAEGLVVHQAIAKGFLSQLEKMLKESNQSVEFRADEEALQLLENAVAASESDYATEFLDYIMSVKVVDSFEQAISWINKYSSHHSEAIITNNISRAEIFQDMVDAAAVYVNASTRFTDGFVFGLGAEIGISTQKLHARGPMGLEALTSTKYYINGTGQVRE

SEQ ID NO: 2891 - DNA, 1248 bp, Streptococcus pyogenes
atgactgatatgagaaggttagggcaaagggcaaaacaagctagtcttttaatagcacctttgtcgacgcaaattaaaaatcgctttttaagcaccttagcaaaggcattagttgacgatacacagactctcttagccgctaaccaaaaagatttagcgaatgctaaagaacatggtatttctgacatcatgatggatcgcttgcgcttaacttcagaacggattaaagcgatagcacagggagttcaacaggttgctgacttagctgatccaatcggacaagtcattaagggctatactaacctcgatggccttaaaatcctccaaaagagagttcctctaggggtgattgcgatgatttttgagagtcgtccgaatgtttcagtggatgcttttagtctggcgttcaaaaccaataatgcgatcatcctaaggggaggaaaagatgcccttcactcaaataaagctttggtgaagttgatccgacaaagtctggaaaaatcagggatcaccccagatgctgtccagctagttgaggatccctcacatgctgtcgctgaagaattgatgcaggcaacggattatgtagatgttttgattccacgtggtggtgctaaattaattcagaccgttaaggaaaaagcaaaagtgcctgtcatcgaaacaggtgtggggaatgtgcatatctatgtggatgctcaagctgacttagatatagctactaagattgttatcaacgctaaaacaaagcgcccaagtgtttgcaatgcagctgagggattggtaattcacgaagctgtagcagcaaggtttattcctatgcttgaaaaagcgatcaatcaagttcagccagtagaatggcgggcagatgacaaggctttgccgttatttgagcaggcagtgcctgcaaaagcagaggattttgagaccgaatttttagattatatcatgtctgttaaggttgtttcctctttggaagaagctatttcttggataaatcagtatactagtcaccattccgaagctatcatcacaagggatattaaggcagcagagacctttcaagatttagtggatgctgctgctgtttatgtcaacgcttcaacacgatttaccgatggttttgtttttgggcttggtgctgaaattgggatttctactcaaaaaatgcacgcccgtgggccaatgggcttagaagccttgaccagcactaaattttatattaatggggatggacatatcagagaa

SEQ ID NO: 2892 - protein, 416 aa, Streptococcus pyogenes
MTDMRRLGQRAKQASLLIAPLSTQIKNRFLSTLAKALVDDTQTLLAANQKDLANAKEHGISDIMMDRLRLTSERIKAIAQGVQQVADLADPIGQVIKGYTNLDGLKILQKRVPLGVIAMIFESRPNVSVDAFSLAFKTNNAIILRGGKDALHSNKALVKLIRQSLEKSGITPDAVQLVEDPSHAVAEELMQATDYVDVLIPRGGAKLIQTVKEKAKVPVIETGVGNVHIYVDAQADLDIATKIVINAKTKRPSVCNAAEGLVIHEAVAARFIPMLEKAINQVQPVEWRADDKALPLFEQAVPAKAEDFETEFLDYIMSVKVVSSLEEAISWINQYTSHHSEAIITRDIKAAETFQDLVDAAAVYVNASTRFTDGFVFGLGAEIGISTQKMHARGPMGLEALTSTKFYINGDGHIRE

SEQ ID NO: 2893 - DNA, 945 bp, Streptococcus agalactiae
atgacaaacgattttcatcatattactgtgcttttgcacgagactgtggatatgcttgatattaagccggatggtatctatgtagatgctactttaggtggggcaggacacagcgaatatcttctttcacaattaggcccagatgggcacctttacgcatttgaccaagaccagaaggctattgacaatgctcatatacgtttaaagaaatatgtggataccggtcaagtaacctttatcaaagataatttcagaaatctatcttctaacttaaaagcattaggagtgtcggaaattaatggtatttgttatgatttaggtgtatcaagcccacagctggacgagcgtgaacgcggtttctcatataaacaagacgccccccttgatatgcgaatgaatagagagcagagtcttacagcttatgacgttgtgaacacttatagttatcatgatttagtaaggattttctttaagtatggcgaagataaattttcaaaacaaattgctcgaaaaattgagcaagtacgagctgaaaaaacaatatctacaacaacagaattggctgagattatcaaatcgtctaaatctgccaaagaactgaagaaaaaaggtcatccagctaaacaaatttttcaagctattcgtattgaagtcaatgacgaactaggagctgcagatgaatctatacaacaagcaatggacttattagctgttgatggtcgtatatctgtcatcacttttcattctttagaagatcgtcttactaagcaactttttaaagaagcatcaacagtagaagtacctaaaggtcttccttttataccagatgatttacaacctaagatggagctcgttaatcgtaaacccatcttaccaagtcaagaagaactagaagcgaacaatcgtgcccattcagcgaaattgagagtagcgcgtcgtattcga

SEQ ID NO: 2894 - protein, 315 aa, Streptococcus agalactiae
MTNDFHHITVLLHETVDMLDIKPDGIYVDATLGGAGHSEYLLSQLGPDGHLYAFDQDQKAIDNAHIRLKKYVDTGQVTFIKDNFRNLSSNLKALGVSEINGICYDLGVSSPQLDERERGFSYKQDAPLDMRMNREQSLTAYDVVNTYSYHDLVRIFFKYGEDKFSKQIARKIEQVRAEKTISTTTELAEIIKSSKSAKELKKKGHPAKQIFQAIRIEVNDELGAADESIQQAMDLLAVDGRISVITFHSLEDRLTKQLFKEASTVEVPKGLPFIPDDLQPKMELVNRKPILPSQEELEANNRAHSAKLRVARRIR

SEQ ID NO: 2895 - DNA, 1011 bp, Streptococcus pyogenes
atgaaatccttttctcttactttttcatttctaaaccttttgaagtatggtacaattaaagttatgacaaaagaatttcatcacgtgaccgtactccttcacgaaacagtggacatgcttgacataaagcctgatgggatttatgttgatgcgacgctaggtggctcaggccactcagcttatttgttgtccaaacttggtgaagaagggcacctctattgttttgaccaagaccaaaaggctattgacaatgcacaagttaccctcaaatcttatattgacaaaggacaggtaacttttattaaagataattttagacacctcaaagcacgtttaacagcgcttggagttgatgaaattgatggtatcttatatgaccttggtgtttccagcccgcaattggatgaaagagaacgagggttttcttataaacaagatgctccattggatatgcgcatggatcgtcagtcgctcttaacagcttacgaagtggtgaatacctatccattcaatgatttggttaagatttttttcaaatatggtgaagataaattctccaagcagatcgctcgaaaaattgaacaagcaagagctattaagcctattgagacaacaacagagttggcagaattgattaaggcagcaaagccagctaaagagttgaagaaaaaaggccaccctgctaaacagatttttcaagctattcgcattgaagtcaatgatgaattgggagcggccgatgaatctattcaggacgctatggaattattagcccttgatggtcgtatctcagttattaccttccattctctggaagatcgcctaaccaagcagttgtttaaagaagctagtacggtggatgtgccaaaagggcttcctctaattcctgaagatatgaaacctaagtttgaacttgtttcacgtaagccgatcttacctagtcattcagagttaacagctaataaaagggcacactcagccaagctacgtgttgccaaaaaaattcggaaa

SEQ ID NO: 2896 - protein, 337 aa, Streptococcus pyogenes
MKSFSLTFSFLNLLKYGTIKVMTKEFHHVTVLLHETVDMLDIKPDGIYVDATLGGSGHSAYLLSKLGEEGHLYCFDQDQKAIDNAQVTLKSYIDKGQVTFIKDNFRHLKARLTALGVDEIDGILYDLGVSSPQLDERERGFSYKQDAPLDMRMDRQSLLTAYEVVNTYPFNDLVKIFFKYGEDKFSKQIARKIEQARAIKPIETTTELAELIKAAKPAKELKKKGHPAKQIFQAIRIEVNDELGAADESIQDAMELLALDGRISVITFHSLEDRLTKQLFKEASTVDVPKGLPLIPEDMKPKFELVSRKPILPSHSELTANKRAHSAKLRVAKKIRK

SEQ ID NO: 2897 - DNA, 324 bp, Streptococcus agalactiae
atgacaaatgaaaaacgaactgaagcagtaacacaaactttacaacgtcacatcaagactttctctcgtattgagaaagctttttatggtgctattgtaattactgctattatcatggcagtcggtattatttacttgcaaagtaatagtttacaagttaaacaagaagtaaatcaattaaatagtaaaatcaacgataaacagacagaatttgacaatgctaaacaagaagtaaatgagctttctaatcgtgatcgaattactaaaattgctaaagatgctggtttaacaattcaaaacgacaatatttatcggaaggtggac

SEQ ID NO: 2898 - protein, 108 aa, Streptococcus agalactiae
MTNEKRTEAVTQTLQRHIKTFSRIEKAFYGAIVITAIIMAVGIIYLQSNSLQVKQEVNQLNSKINDKQTEFDNAKQEVNELSNRDRITKIAKDAGLTIQNDNIYRKVD

SEQ ID NO: 2899 - DNA, 351 bp, Streptococcus pyogenes
gtgttgccaaaaaaattcggaaataagcctatgacaaatgaaaaaagaactcaggtagttacaaatgccttgcaaaaacgaataaaaactttctctagaattgagaaggctttttatactgctatcattgtaacagcgattacgatggcagtaagtattatttacctgcaaagtcgtaagttgcagctacaacaagaaatcactagtttaaatagtcatatttcggatcaaaaactagagcttaataatgccaagcaagaagtaaatgagttatctcgccgtgatcgtattatagatattgctggtaaagcaggcttaagcaaccgtaataataatatcaagaaagtcgag

SEQ ID NO: 2900 - protein, 117 aa, Streptococcus pyogenes
VLPKKFGNKPMTNEKRTQVVTNALQKRIKTFSRIEKAFYTAIIVTAITMAVSIIYLQSRKLQLQQEITSLNSHISDQKLELNNAKQEVNELSRRDRIIDIAGKAGLSNRNNNIKKVE

SEQ ID NO: 2901 - DNA, 108 bp, Streptococcus agalactiae
ttggcttccttggataaattaaccccaaatttactatctgtaccaacgatgatgacaaagttgatgataaaaatgaaaaataggaaaatggttaaaatcatcagattt

SEQ ID NO: 2902 - protein, 36 aa, Streptococcus agalactiae
MASLDKLTPNLLSVPTMMTKLMIKMKNRKMVKIIRF

SEQ ID NO: 2903 - DNA, 2256 bp, Streptococcus agalactiae
gtgactttttttaaaaagctaaaaaaaatcttccttgattatgtgatccatataagagataggcgttcgccgcagaaaaatagggaaagagtaggtcaaaatctgatgattttaaccattttcctatttttcatttttatcatcaactttgtcatcatcgttggtacagatagtaaatttggggttaatttatccaaggaagccaagaaagtctatcaacaaagtatgacagtacaggcgaagcgtgggacaatttacgaccgtaatggaaatcctatcgctgaggatgctacgacctatagtctctacgctattatctcaaagaactatacgacagctacaggtcaaaaactatatgtacaaccttctcagtatgaaaaagtagctagtatcttagagaataaattgggcatgaagaaaaatcttgtcctaaaacaactcaatcaaaagaaattgtttcaagtttcctttggaagttcaggttcaggattgtcttataccaagatggctgacatcaagaaaacgatggaaaagtcagatatcaaaggaattggtttttctaccagtccggggcgtatttatccaaatgggatatttgcttcacaatttataggatttactcttcctcaggatgatggagatggaaaaaaattagttggtaatacaggccttgaagcggcacttaacaaggtattatcaggtactgatggtaaagtaacatacgaaaaagaccgtagtgggaatgttcttttaggtactgcaacaacagaacgtagggcggttaatggtaaggatatctacacaactttatcagagcctattcagactgttttagagactcagatggatgttttcgcagaaaaaaccaaaggaaaatttgcgagtgctacagttgtcaacgctaaaacgggtgaaattctagcaacgagtcagcgtcctacttataatccttctacccttaaaggttacgataagaaaaatttgggtacctataacacactactatatgataacttttttgaacctggttcaacaatgaaggtaatgactctagcctctgcaattgattctaagcattttaactctactgaagtgtataacagtgcacaatataaaattgcagatgcgattattcgagattgggatgtcaatgaagggttatcatctggtagttatatgacttttccacaagggtttgcacattccagtaacgttggtatggtaaccttggaacaaaaaatgggacgagataaatggttaaactatctttctaagtttaaatttggttacccaacacgttttgggatgcttcatgaaagtggaggtttgttcccatctgacaatgaagtaactatcgctatgagctcatttggtcaaggtattggtgtaacgcaagttcaaatgttgcgcgcatttacgtctatctcgaatgatggtgttatgttacaaccacagtttattagcagtatttatgatccaaatacagggacttctcgtacagcacgaaaagaagtcgttggaaaaccagtttccaaagaagcagctagtaaaacacgtgattatatggttactgttgggacagatccttattatggtacattatacgcagcaggtgccccagttattcaggtggggaatcaatcagttgcagtaaaatctggtactgcccaaatcgcccaggaaggtggtggtggttatctgcaaggaaaaaatgatactattaactcagttgtggctatggtgccatcggaaaatcctgacttcatcatgtatgttaccatccaacaacccgaaaaatttagtatcacattctggaaagatgttgttaatcctgttttagaacaagcaacagcaatgaaagaaacgatattaaaaccgggattgaatgactcagaacatcagacaaaatataaactatcaaaaatagttggtgaaaatccaggtcatgtagcggaagaattacgtcgtaatctggttcagccaattattttaggaaatggtagtaaagtttctaaagtatctaaaagaccaggagctaatcttgctgagaatgaacagctactagtattaacaaataaactgactgaattacctgatatgtatggttggtctaaagcaaacgttgaacagtttgctaaatggacaggtataaaagtgacctataaaggttcaacctcaggtaaagtaagaaaacaaagtattgatgttggaaaatccatcaataaaattaaaaaaatcaaaattacaataggagat

SEQ ID NO: 2904 - protein, 752 aa, Streptococcus agalactiae
MTFFKKLKKIFLDYVIHIRDRRSPQKNRERVGQNLMILTIFLFFIFIINFVIIVGTDSKFGVNLSKEAKKVYQQSMTVQAKRGTIYDRNGNPIAEDATTYSLYAIISKNYTTATGQKLYVQPSQYEKVASILENKLGMKKNLVLKQLNQKKLFQVSFGSSGSGLSYTKMADIKKTMEKSDIKGIGFSTSPGRIYPNGIFASQFIGFTLPQDDGDGKKLVGNTGLEAALNKVLSGTDGKVTYEKDRSGNVLLGTATTERRAVNGKDIYTTLSEPIQTVLETQMDVFAEKTKGKFASATVVNAKTGEILATSQRPTYNPSTLKGYDKKNLGTYNTLLYDNFFEPGSTMKVMTLASAIDSKHFNSTEVYNSAQYKIADAIIRDWDVNEGLSSGSYMTFPQGFAHSSNVGMVTLEQKMGRDKWLNYLSKFKFGYPTRFGMLHESGGLFPSDNEVTIAMSSFGQGIGVTQVQMLRAFTSISNDGVMLQPQFISSIYDPNTGTSRTARKEVVGKPVSKEAASKTRDYMVTVGTDPYYGTLYAAGAPVIQVGNQSVAVKSGTAQIAQEGGGGYLQGKNDTINSVVAMVPSENPDFIMYVTIQQPEKFSITFWKDVVNPVLEQATAMKETILKPGLNDSEHQTKYKLSKIVGENPGHVAEELRRNLVQPIILGNGSKVSKVSKRPGANLAENEQLLVLTNKLTELPDMYGWSKANVEQFAKWTGIKVTYKGSTSGKVRKQSIDVGKSINKIKKIKITIGD

SEQ ID NO: 2905 - DNA, 2253 bp, Streptococcus pyogenes
atgaaaaaatggcaaaaatatgttttagattatgttgtgcgcgataggagaactccagtcgaaaatcgcgttcgagttggacaaaatatgatgctcttaactatctttattttctttattttcattattaatttcatgattattattggaacagatcaaaagtttggagttagtttgtcagaaggggcgaagaaggtttatcaagaaaccgttacgatccaagctaagcgtgggaccatttatgatcgaaatggtacagctattgcagtggattctacgacttatagcatatacgcaattttggataaatcatttgtctcggcttcagatgaaaagttatatgtacaaccttctcagtatgaaacagtagctgatattttaaaaaagcatctgggaatgaaaaaaacagatgtaattaaacagcttaagcgtaaaggacttttccaagtctcgtttggaccgtcagggtctggcatttcatatagtactatgtctactattcaaaaggctatggaagatgccaaaatcaagggaattgctttcacaactagtcctggtcgtatgtatccaaatgggacatttgcttcagaatttataggcctagcatctctaacagaagataaaaagacaggtgttaagagtttagttggaaaaacaggtctagaagcttcttttgataaaattttatcaggtcaagatggtgttattacttatcaaaaagatcgaaatgggaccacactcttgggtacaggtaagactgtcaagaaagctattgatggcaaagatatttacacaacgctatctgagcctatccagaccttcttagaaacccagatggatgtttttcaagccaaatcaaatggtcagttggccagtgcaacacttgttaatgctaaaactggtgaaattttggcaacaacacaacgccccacttataatgctgatactctgaaaggacttgaaaatacgaactacaaatggtacagtgcacttcatcaaggaaattttgaaccaggttcaaccatgaaagtgatgactctggcagcggctattgatgataaagttttcaacccaaacgaaacctttagcaatgctaatggtttgacaattgcagatgctactattcaagactggtctattaacgaaggcatttccacaggacagtacatgaattatgcacaagggtttgccttctcaagtaacgttgggatgactaaacttgaacaaaaaatgggtaatgcaaaatggatgaattatttgacgaagttccgctttggttttcctactcgttttggtttaaaagatgaagacgcaggtatatttccttctgataatatcgtgactcaagctatgagcgcttttggtcaagggatttctgtaacccagattcaaatgcttagagcctttactgctatttctaataatggtgagatgttagagccacaatttatcagtcaaatttatgatcctaacacagcaagttttagaacggcaaataaagaaattgttggaaaacctgtatcaaaaaaagccgctagtgaaacaagacaatacatgattggtgtaggaacagaccctgagtttggaacactctattcaaaaacatttggaccaattattaaagtgggtgatttacctgttgctgttaaatcaggaacagcacaaattggttcagaagatggaagtggttatcaagatggtggattgactaactatgtctattcggttgtggcaatggtgccagctgataaaccagactttttgatgtatgttactatgactaaaccacaacattttggtccccttttttggcaagatgtggttaacccagtattggaagaagcatacttaatgcaagatacactaactaagccagtagtatcagatgctaatcgtcaaacaacttataaattaccaaactttgtaggaaagaatcctggtgagacatcaagcgagttgcgtcgaaaccttgtccagccagttgtccttggtactggcagcaagatcaaaaaagtatcgcatcagcccggtcaaacgttaacagaaaaccaacaagttctcatattatcagaccgttttgtggaggtaccagacatgtatggctggacaaaatccaatgttaaaacctttgctaaatggactggaatagacatcagctttaaaggaacagattctggtcgtgttatgaaacaaagtgttgatgttggtaagtccttgaaaaaaataaaaaaaatgaccattactttaggagat

SEQ ID NO: 2906 - protein, 751 aa, Streptococcus pyogenes
MKKWQKYVLDYVVRDRRTPVENRVRVGQNMMLLTIFIFFIFIINFMIIIGTDQKFGVSLSEGAKKVYQETVTIQAKRGTIYDRNGTAIAVDSTTYSIYAILDKSFVSASDEKLYVQPSQYETVADILKKHLGMKKTDVIKQLKRKGLFQVSFGPSGSGISYSTMSTIQKAMEDAKIKGIAFTTSPGRMYPNGTFASEFIGLASLTEDKKTGVKSLVGKTGLEASFDKILSGQDGVITYQKDRNGTTLLGTGKTVKKAIDGKDIYTTLSEPIQTFLETQMDVFQAKSNGQLASATLVNAKTGEILATTQRPTYNADTLKGLENTNYKWYSALHQGNFEPGSTMKVMTLAAAIDDKVFNPNETFSNANGLTIADATIQDWSINEGISTGQYMNYAQGFAFSSNVGMTKLEQKMGNAKWMNYLTKFRFGFPTRFGLKDEDAGIFPSDNIVTQAMSAFGQGISVTQIQMLRAFTAISNNGEMLEPQFISQIYDPNTASFRTANKEIVGKPVSKKAASETRQYMIGVGTDPEFGTLYSKTFGPIIKVGDLPVAVKSGTAQIGSEDGSGYQDGGLTNYVYSVVAMVPADKPDFLMYVTMTKPQHFGPLFWQDVVNPVLEEAYLMQDTLTKPVVSDANRQTTYKLPNFVGKNPGETSSELRRNLVQPVVLGTGSKIKKVSHQPGQTLTENQQVLILSDRFVEVPDMYGWTKSNVKTFAKWTGIDISFKGTDSGRVMKQSVDVGKSLKKIKKMTITLGD

SEQ ID NO: 2907 - DNA, 174 bp, Streptococcus agalactiae
ttgaaaaaccaacaacccagaaaagaacaaaaaaagcgtataagtatcctacttcaaggtaaaaaccaaaaatatttatcgcagatgtgccacttggtaacacatggacaaaataaaaaattagacccgcaattagttggagcgacattttttgctttggagtcaagccctcat

SEQ ID NO: 2908 - protein, 58 aa, Streptococcus agalactiae
MKNQQPRKEQKKRISILLQGKNQKYLSQMCHLVTHGQNKKLDPQLVGATFFALESSPH

SEQ ID NO: 2909 - DNA, 1008 bp, Streptococcus agalactiae
atgtttttaagtataatggcaggtgtcatagcatttgtcctgacagttattgccattccgcgcttcattaagttttaccaattgaagaaaattggcgggcaacaaatgcatgaagatgtcaaacaacatctagccaaagcaggtacgccgacaatgggaggaacggtatttttgattgttgctcttcttgtctcacttatttttagtattattttatctaaagaaaatagtggtaatttaggtgcaacttttggtattttatctgttgttctcatctatggaattattggttttttagatgattttttgaaaatttttaaacaaatcaatgagggcttgactccaaagcaaaaaatgtcgctccaactaattgcgggtctaattttttattttgtccatgtgttaccaagtggcacatctgcgataaatatttttggtttttaccttgaagtaggatacttatacgctttttttgttcttttctgggttgttggtttttcaaatgctgtgaacctaacagatggaattgatggtctagcttctatttcggttgttatcagtttgattacttatggaatcattgcttataatcaaacgcaatttgatattttattgattatcgttatcatgattggtgctttacttggcttttttgtctttaatcataaaccagctaaagtctttatgggagatgttggttcacttgcattgggtgctatgttagcagccatttcaattgccttacgtcaggaatggaccttgctttttatcggctttgtctatgtttttgagacgtcttcagtgatgttgcaagtagcatactttaagtatactaagaagaaaactggtgttgggaaacgtatcttccgcatgacaccatttcatcaccatttagaattaggtggtgtgtctggcaaaggtaataaatggagcgaatggaaagtagatgcttttttatgggctattggtattttcatgagcgctattacacttgctattttatatctt

SEQ ID NO: 2910 - protein, 336 aa, Streptococcus agalactiae
MFLSIMAGVIAFVLTVIAIPRFIKFYQLKKIGGQQMHEDVKQHLAKAGTPTMGGTVFLIVALLVSLIFSIILSKENSGNLGATFGILSVVLIYGIIGFLDDFLKIFKQINEGLTPKQKMSLQLIAGLIFYFVHVLPSGTSAINIFGFYLEVGYLYAFFVLFWVVGFSNAVNLTDGIDGLASISVVISLITYGIIAYNQTQFDILLIIVIMIGALLGFFVFNHKPAKVFMGDVGSLALGAMLAAISIALRQEWTLLFIGFVYVFETSSVMLQVAYFKYTKKKTGVGKRIFRMTPFHHHLELGGVSGKGNKWSEWKVDAFLWAIGIFMSAITLAILYL

SEQ ID NO: 2911 - DNA, 927 bp, Streptococcus pyogenes
ttgaaaaaaattggtgggcaacaaatgcatgaagatgtcaagcaacatttagctaaagctggaacaccgactatggggggaactgtttttcttttagtagctacggcagtatcgttattggttagtctattttcgatcaaaaacactcaaagtttagctttgatttcaggcattttatcaattgttgtcatttacgggattatcggatttttggatgattttttaaaaatttttaagcaaatcaatgaaggattgacagccaaacaaaagttagccttgcagttggttggaggattgatgttctattttttacatgttagtccaagtggcatttcctctattaatgtgtttggttatcagctgccgctgggaattttctacctattctttgttttgttttgggtggttggtttttcaaatgccgttaatttgacagatggtatcgatggcttagcttctatctcagtggtgattagtctagtgacttacggcgttattgcctacgttcagagtcaatttgatgttttgttactgattggagcaatgattggagccttgcttggcttcttctgctttaatcacaaacctgctaaagtatttatgggagatgtaggtagtttagcccttggagctatgttggctgccatttctattgcgcttcgtcaagaatggactctcctgattattgggatcgtttatgttcttgaaacaagttctgtgatgttgcaagtgtcctatttcaagtacaccaagaaaaaatatggagaaggtcgtcgtatttttagaatgacgcctttccaccaccatttggaattgggaggcttgtctggtaaaggcaagaagtggtcagaatggcaggtagatgcttttttgtggggagtaggaagtctagctagtttactagttttagctatcttatacgtgttc

SEQ ID NO: 2912 - protein, 309 aa, Streptococcus pyogenes
LKKIGGQQMHEDVKQHLAKAGTPTMGGTVFLLVATAVSLLVSLFSIKNTQSLALISGILSIVVIYGIIGFLDDFLKIFKQINEGLTAKQKLALQLVGGLMFYFLHVSPSGISSINVFGYQLPLGIFYLFFVLFWVVGFSNAVNLTDGIDGLASISVVISLVTYGVIAYVQSQFDVLLLIGAMIGALLGFFCFNHKPAKVFMGDVGSLALGAMLAAISIALRQEWTLLIIGIVYVLETSSVMLQVSYFKYTKKKYGEGRRIFRMTPFHHHLELGGLSGKGKKWSEWQVDAFLWGVGSLASLLVLAILYVF

SEQ ID NO: 2913 - DNA, 1341 bp, Streptococcus agalactiae
atgtcatttaaagattttaattttaaaccatacattcagagggctctcgatgagttaaaattcgtcgatccaactgatgttcaagctaaattgattccagttgttcgttcaggccgcgatcttgtgggggaatcgaaaactggttctggtaaaacccacacctttttacttcctatttttgagaagctagatgaaagtagtgatgatgttcaagttgttattactgcaccaagtagagagttgggaacacaaatttatcaggcaactaaacaaattgctgagcattcagagcaagaaatacgggtggttaactatgttggtggtactgacaaattacgtcaaattgaaaagttgaaagtaagccaacctcatattgtcattggaaccccaggacgaatttatgatttggtgaagtcaggtgatttagctattcataaggcgcatacttttgttgttgatgaagcagatatgactctagatatgggatttcttgataccgttgataagattgcagggtctttacccaaggatgtccaaattttagtcttttcagcaacgattccacaaaaattacagccatttttaaagaaatatttgaccaatcctgtaatggaaaaaatcaaaacagcaacagttatcgctgataccatcgataactggcttttgtccactaaaggacgtgataaaaatgcacaaattttggaactctctaaactaatgcagccctatcttgcaatgatatttgttaatacgaaagagcgtgcagacgaattacattcgtacctttctagtaatggcttaaaagtagctaaaattcatggtgggattgcacctcgtgaacgtaaacgtattatgaatcaggttaaaaacctcgaatttgaatatatcgttgcaacagatttagcagcgcgtggtattgatattgaaggtgttagccatgttatcaatgatgccatacctcaagacctatctttctttgtccaccgtgtcggtcgcacaggccgtaatggcttatctggtactgctataactttatatcagccaagtgacgattctgatattcgtgaacttgaaaaactaggtattaattttattcctaaagtcattaaaaacggtgaatttcaagatacatacgaccgtgatcgtcgtaataaccgtgaaaagtcctatcaaaaattagatacagaaatgattggacttgtgaaaaagaaaaagaaaaaaataaaaccaggttacaagaaaaaaattcaatggaaagttgatgaaaagcgtcgcaaagagcgtagagcaagtaatcgtgctaaggggcgtgcggagcgcaaagctaaaaaacaaagtttt

SEQ ID NO: 2914 - protein, 447 aa, Streptococcus agalactiae
MSFKDFNFKPYIQRALDELKFVDPTDVQAKLIPVVRSGRDLVGESKTGSGKTHTFLLPIFEKLDESSDDVQVVITAPSRELGTQIYQATKQIAEHSEQEIRVVNYVGGTDKLRQIEKLKVSQPHIVIGTPGRIYDLVKSGDLAIHKAHTFVVDEADMTLDMGFLDTVDKIAGSLPKDVQILVFSATIPQKLQPFLKKYLTNPVMEKIKTATVIADTIDNWLLSTKGRDKNAQILELSKLMQPYLAMIFVNTKERADELHSYLSSNGLKVAKIHGGIAPRERKRIMNQVKNLEFEYIVATDLAARGIDIEGVSHVINDAIPQDLSFFVHRVGRTGRNGLSGTAITLYQPSDDSDIRELEKLGINFIPKVIKNGEFQDTYDRDRRNNREKSYQKLDTEMIGLVKKKKKKIKPGYKKKIQWKVDEKRRKERRASNRAKGRAERKAKKQSF

SEQ ID NO: 2915 - DNA, 1341 bp, Streptococcus pyogenes
atgtcatttaaagattatcattttaagcaatacgttcagcaagcgctggaagaaattggctttgtcaatccaacagaggtccagaagcggctgattcctattgttaactccggtcgtgacttagttggggaatcaaaaacaggttcagggaaaacccacacctttttgttgcccatttttgaaaaacttgatgaagctaaagcagaagtgcaagtcgttattacagcacctagccgtgaattagcaactcaaatttttgatgcttgtaaacagattgctaagcacttccaagaagagattcgtttggccaactatgttggaggcacagacaaactccgtcagattgaaaaactaaaagacagccagccgcatattgtcatcgggaccccaggtcgtatttatgacttggtcaagtctggtgatttagcgattcataaagcaacgacctttgttgtggatgaggccgatatgaccatggacatgggctttttggatacggtagataagattgcagcttcgcttccaaaatctgttcagattttggtgttctcagcaactattccacagaaattacaaccctttttgaaaaaatacttgaccaatcctgttattgaacaaatcaagacaaagaccgttatcgcagataccattgataactggcttgtgtcgacaaaagggcgtgataagaatggtcaactgttagagattctcaaaaccatgcagccttatatggctatgctttttgtcaataccaaggaacgcgcagatgatttgcatgcctttttaacagctaatggcttaaaagtggctaagattcatgggggcattcctccaagagaacgtaagcgcatcatgaaccaagtcaaaaaactggactttgaatacattgttgccacagacttagcagcgcgtgggattgacattgaaggggtcagccatgtgatcaatgacgccatcccacaagacttgtctttctttgtccatcgtgtaggccgaacaggtcgaaatggtatggcaggaactgccattacactttaccagccaagtgacgactcagatatcaaagagctggaaaaaatggggattgcctttacaccgaaggtgctcaaaaatggagaatttcaagatacctatgaccgtgatcgccgtcaaaaccgtgaaaaagcctatcaaaaattagacacagaaatgattggtttggtcaaaaagaaaaagaaaaaagtcaaaccaggttacaagaaaaaaattcagtgggcggttgatgaaaaacgtcgcaaagaacgtcgtgctgaaaatcgtgctaagggccgcgctgagcgtaaggccaaaaaacaacatttt

SEQ ID NO: 2916 - protein, 447 aa, Streptococcus pyogenes
MSFKDYHFKQYVQQALEEIGFVNPTEVQKRLIPIVNSGRDLVGESKTGSGKTHTFLLPIFEKLDEAKAEVQVVITAPSRELATQIFDACKQIAKHFQEEIRLANYVGGTDKLRQIEKLKDSQPHIVIGTPGRIYDLVKSGDLAIHKATTFVVDEADMTMDMGFLDTVDKIAASLPKSVQILVFSATIPQKLQPFLKKYLTNPVIEQIKTKTVIADTIDNWLVSTKGRDKNGQLLEILKTMQPYMAMLFVNTKERADDLHAFLTANGLKVAKIHGGIPPRERKRIMNQVKKLDFEYIVATDLAARGIDIEGVSHVINDAIPQDLSFFVHRVGRTGRNGMAGTAITLYQPSDDSDIKELEKMGIAFTPKVLKNGEFQDTYDRDRRQNREKAYQKLDTEMIGLVKKKKKKVKPGYKKKIQWAVDEKRRKERRAENRAKGRAERKAKKQHF

SEQ ID NO: 2917 - DNA, 810 bp, Streptococcus agalactiae
atgtttaaaaaaataatattatctattgcaactatagccgcaaccgccagcctagcagtatcagttcaggcgtcagagaaagtagaacttaaagtagctacagattctgacacggcaccatttacttatcaaaaagacgggaaattcaaaggttatgatgttgatgttgtcaaagctgtttttaaaggtagtaagtacaaagtaaccttcaagacagttccttttgatactatttcaacaggtattgatgcagggaaatttgatttatcagctaatgatttttcatacaataaagaaagagcagaaaaatatctcttctcagatcctatatcccgttcaaattatgccgtagtagggaagaaggggagccattacaaatcattaagtgacctctctggaaaatcaaccgaagttttatctggcgttaactatgcacaggttctagaaaattggaataaaaatcatcctaataaaaaaccaataaaaatcaaatatgtttctgggacaactggtgttactagcagattaaaaaatattgagagtgggaaaattgactttatcctatatgatgccatttcatccgactatattgtaaaagaccaatcattaaacttaagcgtttctcctttgaaaggtaaaattggtaataataaggatggactagaatacctccttttaccaaaagataaaaaaggtaaaactctacagaaatttataaataagcgtattaaagttttgaaagaaaatggtactttggcacgtttaagtaaacaatatttcggtggagattacgtttcaaacattgataaa

SEQ ID NO: 2918 - protein, 270 aa, Streptococcus agalactiae
MFKKIILSIATIAATASLAVSVQASEKVELKVATDSDTAPFTYQKDGKFKGYDVDVVKAVFKGSKYKVTFKTVPFDTISTGIDAGKFDLSANDFSYNKERAEKYLFSDPISRSNYAVVGKKGSHYKSLSDLSGKSTEVLSGVNYAQVLENWNKNHPNKKPIKIKYVSGTTGVTSRLKNIESGKIDFILYDAISSDYIVKDQSLNLSVSPLKGKIGNNKDGLEYLLLPKDKKGKTLQKFINKRIKVLKENGTLARLSKQYFGGDYVSNIDK

SEQ ID NO: 2919 - DNA, 840 bp, Streptococcus pyogenes
atgattaaaaaacagtatttaggaagggcaacaattgccctagcatcgacccttgtgctagcagcttgtgggtcatcaaaaacagctgagtcaggaaatcaggggagttctaaagaagtcttatttgcaacggttggaacaacagctcccttttcttatgaaaaaggtggtcaactaactggctacgatatcgaggtggctaaagcagtctttaaaggatcggatgattacaaggtgtcctttaaaaaaacagaatggtcttctatctttacaggtttggactcaggaaaataccaaatgggtggtaacaacatttcctttaccaaagagcgttcagctaagtaccttttttcttatccaatcggatcaacaccttctgttttagttgttccaaaagacagtgatatcaagagctttgatgatatccaagggcatacgacacaagttgttcaagggactacaagtgttgcacagttagaagactttaataagaaacacagtgacaacccggttactctaaaattcaccaatgagaacattactcaaatgttaaccaatttgagtgaaggcaaggcagatttcaagatttttgacgctccaacggttaacgccattattaaaaatcaagggttagataatctcaaaacaattgaactcacctcaacagagcaaccatttatttattttatctttagtcaagatcaagagaaattgcaaagctttgttaacaagcgtattaaagagttgactgctgatggaactcttagcaagcttgccaaagagcaccttggcggtgattacgtgccatcagataaagagttgaaacttcctacagctaac

SEQ ID NO: 2920 - protein, 280 aa, Streptococcus pyogenes
MIKKQYLGRATIALASTLVLAACGSSKTAESGNQGSSKEVLFATVGTTAPFSYEKGGQLTGYDIEVAKAVFKGSDDYKVSFKKTEWSSIFTGLDSGKYQMGGNNISFTKERSAKYLFSYPIGSTPSVLVVPKDSDIKSFDDIQGHTTQVVQGTTSVAQLEDFNKKHSDNPVTLKFTNENITQMLTNLSEGKADFKIFDAPTVNAIIKNQGLDNLKTIELTSTEQPFIYFIFSQDQEKLQSFVNKRIKELTADGTLSKLAKEHLGGDYVPSDKELKLPTAN

SEQ ID NO: 2921 - DNA, 159 bp, Streptococcus agalactiae
ttgacacggttaattttcactactgcaaaaatcaaagctaaaatgagtccaaataaggctcctgctactgtcaataatagtgttatgggtaatcgctctaaaattgagggtattgcatctaaaacagccttccaactaaataatttccccgctggaacc

SEQ ID NO: 2922 - protein, 53 aa, Streptococcus agalactiae
MTRLIFTTAKIKAKMSPNKAPATVNNSVMGNRSKIEGIASKTAFQLNNFPAGT

SEQ ID NO: 2923 - DNA, 801 bp, Streptococcus agalactiae
atgaatcaatttatcttgacgggtggatggtcttggtataataatttggttagtcaggttccagcggggaaattatttagttggaaggctgttttagatgcaataccctcaattttagagcgattacccataacactattattgacagtagcaggagccttatttggactcattttagctttgatttttgcagtagtgaaaattaaccgtgtcaaaattttatatccgattcaagctttatttgttagttttttacgtgggactccaatacttgttcaattaatgctgagttattatggaattccacttttcttgaaatttttaaaccaaaaatatggttttgattggaacattaatgctataccggcttctgtatttgctattactgcatttgcttttaatgaagcggcttatacaagtgaaactatacgagcggcgattttgtcggttgatcaaggtgaaattgaggcagcacgtagtttagggatgacctcagcgcaagtttatcgtcgtgttattattccaaacgcagcagtagtcgcaacacctactttgataaacacgttaattggtctaactaagggaacctctttagcttttaatgctggtattgttgaaatgtttgcccaagcacaaattatgggtggtagcgattatcgctattttgaacgttatatctctgtggcacttgtttactgggcggttagtttcttaattgaacaattgggaaatgctattgaacgaaaaatggcaattaaggctccacgccatttaactgatgagattccaggaggagtacgc

SEQ ID NO: 2924 - protein, 267 aa, Streptococcus agalactiae
MNQFILTGGWSWYNNLVSQVPAGKLFSWKAVLDAIPSILERLPITLLLTVAGALFGLILALIFAVVKINRVKILYPIQALFVSFLRGTPILVQLMLSYYGIPLFLKFLNQKYGFDWNINAIPASVFAITAFAFNEAAYTSETIRAAILSVDQGEIEAARSLGMTSAQVYRRVIIPNAAVVATPTLINTLIGLTKGTSLAFNAGIVEMFAQAQIMGGSDYRYFERYISVALVYWAVSFLIEQLGNAIERKMAIKAPRHLTDEIPGGVR

SEQ ID NO: 2925 - DNA, 891 bp, Streptococcus pyogenes
ttgcttattgctataatacgaatttactattttacatgtgggtctaagagtgttagaatattaagacaaacaaatacaaaggggaaatacatgacatcagtgtttttaaccagtggttgggctttttatgattacctcatctcaccgattccacatgggaaactttttagttggcatgctgtttttgatgccattccaaatattatccaacggcttccaattacgcttggtttgacactatcaggagcaacctttggcttggttttggctttgatttttgcccttgtcaaaattaataaagtgaagctactataccctattcaagctatttttgtgagtttcttgcgaggaactcctattttggtacagttgatgttgacctactacggtattcccctctttctaaaatttctcaatcagaagtatggctttgattggaatgttaatgcaattccggcttctatttttgccattacagcctttgcttttaatgaagcagcctacgctagtgaaactattcgggcagccattttatcagtagatacaggtgaaattgaagcagcaaaaagtctaggcatgacttctgtgcaggtttaccgtcgtgtcattattcctaatgcaactgttgtggctattccaaccttgattaatgggttaattggcttaactaaaggaacatcgcttgcctttaatgcagggattgtcgaaatgtttgcccaggctcaaattctaggcggatcagattaccgttattttgaacgttatatctctgttgctcttgtctattggtctatcagtattttgatggagcaagtaggtcgcttgattgaaaacaagatggccatcaaagcaccagaacaagctagaaatgaaaagttaggagaattgcgt

SEQ ID NO: 2926 - protein, 297 aa, Streptococcus pyogenes
LLIAIIRIYYFTCGSKSVRILRQTNTKGKYMTSVFLTSGWAFYDYLISPIPHGKLFSWHAVFDAIPNIIQRLPITLGLTLSGATFGLVLALIFALVKINKVKLLYPIQAIFVSFLRGTPILVQLMLTYYGIPLFLKFLNQKYGFDWNVNAIPASIFAITAFAFNEAAYASETIRAAILSVDTGEIEAAKSLGMTSVQVYRRVIIPNATVVAIPTLINGLIGLTKGTSLAFNAGIVEMFAQAQILGGSDYRYFERYISVALVYWSISILMEQVGRLIENKMAIKAPEQARNEKLGELR

SEQ ID NO: 2927 - DNA, 741 bp, Streptococcus agalactiae
atgataaaattgagacaattgactaaatcattttctggtcaaaaagtgttagacaaacttgatttagatattgaaaaaggtcaagttgttgctctagtaggtgcttcaggtgcaggaaaatcaacctttcttcgtagtatgaattatttagaagagcctgattatggaacaattgaaattgatgattttaaagttgattttaaatcaatcagtaaagatgacatactaacattacgccgtaagttagccatggtttttcaacaattcaatctatttgagcgtcgtacagctttggataatgtaaaagaaggtttgaaaattgtcaaaaagatgtcagatcaagaggcaacacggattgcaagagacgaactggcaaaggtcggacttgcagatcgtgaaaaatattatccaagacatttatcaggtggacagaaacaacgtgttgctttggcacgcgcattagccatgaaacctgatgttcttcttttagacgaaccgacatcagcacttgatccagaattagttggagaagttgaaaaatctattgcagatgctgctaagcaggggcaaaccatggtacttgttagtcatgatatgaattttgtttaccaagtagcagataaagttttatttttggaaaaaggtcgtattttagagtctgggacgcctgaacaattatttaaccatcctttagaagaacgtacaaaagaattcttcgctagttataacaaatcgtaccta

SEQ ID NO: 2928 - protein, 247 aa, Streptococcus agalactiae
MIKLRQLTKSFSGQKVLDKLDLDIEKGQVVALVGASGAGKSTFLRSMNYLEEPDYGTIEIDDFKVDFKSISKDDILTLRRKLAMVFQQFNLFERRTALDNVKEGLKIVKKMSDQEATRIARDELAKVGLADREKYYPRHLSGGQKQRVALARALAMKPDVLLLDEPTSALDPELVGEVEKSIADAAKQGQTMVLVSHDMNFVYQVADKVLFLEKGRILESGTPEQLFNHPLEERTKEFFASYNKSYL

SEQ ID NO: 2929 - DNA, 744 bp, Streptococcus pyogenes
ttgatgattacaattagaaatttgagcaagacattctcagggcaaaaagttttagatagtttggctcttgatattgaaaaaggtcaagtgattgctttagttggtgcttcaggagcagggaaatcgaccttccttcgtagcctaaactatttggaaaaaccagattcaggctccattagcattggtgactttacggttgattttgagaccattaccacagagcaagtccttattttacgtcggaaacttgccatggtttttcaacaatttaatctttttgagcgtcgtacagcccttgagaatgtcaaagaaggtcttaaggtggtcaaaaaactgtctgaccaagaagcgactaaactggcgcaagcagaattggctaaggttggtttagcagatcgaaaacatcattacccacgtcatttatcagggggacaaaaacaacgggtagctttagcaagagctctggctatgaaaccagatgttttattactagatgagccgacctcggctcttgacccggaattagttggcgaagtggaaaagtctattactgatgctgctaaatccggacagaccatggttttagtgagtcacgacatgaattttgtttaccaagtggcagatagagtactctttttagatcaagggaaaatcttggaacaaggaacacctgaagaagtctttagacatcctcaaaaagaacgaaccaaagaattttttgcaagctattcaaaaacatacatt

SEQ ID NO: 2930 - protein, 248 aa, Streptococcus pyogenes
LMITIRNLSKTFSGQKVLDSLALDIEKGQVIALVGASGAGKSTFLRSLNYLEKPDSGSISIGDFTVDFETITTEQVLILRRKLAMVFQQFNLFERRTALENVKEGLKVVKKLSDQEATKLAQAELAKVGLADRKHHYPRHLSGGQKQRVALARALAMKPDVLLLDEPTSALDPELVGEVEKSITDAAKSGQTMVLVSHDMNFVYQVADRVLFLDQGKILEQGTPEEVFRHPQKERTKEFFASYSKTYI

SEQ ID NO: 2931 - DNA, 912 bp, Streptococcus agalactiae
atgtatgatactttaataataggttcaggtcctggtggtatgacagcagcgctttacgctgcacgttcaaaccttaaagttgggttaattgaacaaggtgctccaggtggacagatgaataatactgctgaaattgagaactatccaggctacgatcatatctcaggtccagaattatcaatgaagatgtatgagccgttggaaaaatttgaagtagagcatatttatggtatagttcaaagagttgagaacgatggtgatgtaaagcgtgttatcaccgaagatgaatcgtatgaagccaaaacagtaatccttgctaccggagctaaaaacagccttttaggagttccgggtgaagaggaatatactagtcgtggcgtttcttactgtgcggtttgtgatggtgcatttttccgtgatcaggatcttttagttgtgggtggcggtgattctgctgttgaagaagctgtcttcttaactcaatttgctaaaagtgttactattattcaccgacgtgatcaattgagagctcaaaaagtacttcaagaccgagcttttgctaacgaaaaaataaaatttgtatgggattcagtggtcaaagagattaaaggaaatgagattaaagtatctggtgtaactgttgaaaatctaaagactggagaaatctcagagatgactttcggaggtgttttcatttacgttggtttgaaaccacattctagcatggtctcagaattaggtattacggacgagactggctgggtcttaactgatacaaatatgaaaacatcaattccaggactatatgctattggggatgttcgtcaaaaagatctacgtcagattgcgactgctgttggtgaaggtgctatcgctggacagggtgtctataactatataactgagcatttc

SEQ ID NO: 2932 - protein, 304 aa, Streptococcus agalactiae
MYDTLIIGSGPGGMTAALYAARSNLKVGLIEQGAPGGQMNNTAEIENYPGYDHISGPELSMKMYEPLEKFEVEHIYGIVQRVENDGDVKRVITEDESYEAKTVILATGAKNSLLGVPGEEEYTSRGVSYCAVCDGAFFRDQDLLVVGGGDSAVEEAVFLTQFAKSVTIIHRRDQLRAQKVLQDRAFANEKIKFVWDSVVKEIKGNEIKVSGVTVENLKTGEISEMTFGGVFIYVGLKPHSSMVSELGITDETGWVLTDTNMKTSIPGLYAIGDVRQKDLRQIATAVGEGAIAGQGVYNYITEHF

SEQ ID NO: 2933 - DNA, 915 bp, Streptococcus pyogenes
atgtacgatacattaattattggttcaggaccagcaggaatgactgccgctttatacgctgctagaagtaatttatctgttgccattattgaacaaggggcacctggtggtcagatgaacaacacttttgatatagagaattacccgggatatgatcatatatctggaccagaattagctatgaaaatgtacgaacctttagagaagtttaacgttgaaaacatttatggtattgttcaaaaaatagaaaattttggtgactataagtgtgtgttgactgaagatgctagttatgaagctaaaacggttattattgcaacgggagctaaataccgtgtactaggtgttccaggtgaagaatactatactagtcgaggagtttcttattgtgcagtatgtgatggtgcgtttttccgtgaccaggatcttttggtcgttggtggtggtgactcagcagttgaagaagctatttatcttactcagtttgctaaaaaggtaaccgttgttcatcgccgtgatcaactaagagctcagaaaatcttgcaggaccgtgccttcgctaatgacaaagttgactttatctgggattcagttgtcaaagaaattcaaggtaacgacattaaggtctccaatgtcctaatcgaaaatgtgaaaacaggccaagtcactgaccacgcttttggaggtgtgtttatctatgttggtatgaatcctgttacaggtatggtaaaggatctagaaattaccgattcagaaggttggattatcacagatgatcatatgaggacaagtattcctggtatttttgcgattggagatgttcgtcaaaaagaccttcgccaaatcacgacagctgttggagatggtgcaattgcagggcaaggtgtttatcactaccttgaaagtttctcttca

SEQ ID NO: 2934 - protein, 305 aa, Streptococcus pyogenes
MYDTLIIGSGPAGMTAALYAARSNLSVAIIEQGAPGGQMNNTFDIENYPGYDHISGPELAMKMYEPLEKFNVENIYGIVQKIENFGDYKCVLTEDASYEAKTVIIATGAKYRVLGVPGEEYYTSRGVSYCAVCDGAFFRDQDLLVVGGGDSAVEEAIYLTQFAKKVTVVHRRDQLRAQKILQDRAFANDKVDFIWDSVVKEIQGNDIKVSNVLIENVKTGQVTDHAFGGVFIYVGMNPVTGMVKDLEITDSEGWIITDDHMRTSIPGIFAIGDVRQKDLRQITTAVGDGAIAGQGVYHYLESFSS

SEQ ID NO: 2935 - DNA, 1458 bp, Streptococcus agalactiae
atgtataaagacgatagtttaacactacatactgatttatatcaaatcaatatgatgcaagtttattttaataaaggtattcacaataaaagagcggtgtttgaagcttactttcgcaaggttccatttgaaaatggttatgctgtttttgcaggtttagagcgtattgttcgttatttagaaaatctgagcttttctgatagtgatttatcctatttagaagagttaggttatcctgaagaatttttagattacttaaaaaatttaaaaatggaactgactgtcaaatcagccaaggaaggtgaccttgtatttgctaatgaaccattagttcaaattgaaggtcctttagcacaatgtcagttagtagagacagcgattttaaatatcatcaactaccagacacttgttgctacaaaagcagctcgtattcgttctgttattgaagatgaaccgctattagagtttgggacacgacgtgctcaagaaatggatgcagccatttggggtactagggcagcgattattggtggtgctaacgcaacgagcaatgttcgtgctggtaaaatctttaatattccagtatcaggaacgcatgcacatgctttagttcaaacttatggcgatgattaccaggcatttaaagcttacgcagaaactcataaagattgcgtctttttagtggatacttatgatacccttcgtgtaggtgtgcctaatgctattcgagttgcaaaagagatgggcgaaaagattaatttcttgggagttcgccttgattcaggtgatttagcttatttgtctaagaaagttcgtcagcagttagatgacgccggttttcctaatgcaaagatttatgcttcgaatgatctagatgaaaatacaatcctcaacctaaaaatgcaaaaagctaaaattgatgtttggggtgtcggaacaaaattaattacagcctatgatcagcctgcgctaggtgctgtttataaaattgtttctattgagactgacgccggtagtatgcgagatacaattaaactatcaaacaatgctgaaaaagtatcaacacctgggaaaaagcaagtttggcgtatcaccagtcgagctaaagggaaatctgagggtgattacatcacatttgcagacactgatgtgacacaattagatgaaattgaaatgtttcatccaacttatacttatatcaataaaacagtccgtgattttgacgcagtacccttactggtagatatctttgacaaagggaaattagtttatcaattaccaagtcttcaagaaattcaagagtacggacgcaaagaatttgatcagctttgggatgagtataaacgtgttctgaatccacaggattacccagttgatttggcacgcgatgtttggcaaaataaaatggacctgattgatcgtatccgtaaagaagctttggcaaaaggagaagtaaga

SEQ ID NO: 2936 - protein, 486 aa, Streptococcus agalactiae
MYKDDSLTLHTDLYQINMMQVYFNKGIHNKRAVFEAYFRKVPFENGYAVFAGLERIVRYLENLSFSDSDLSYLEELGYPEEFLDYLKNLKMELTVKSAKEGDLVFANEPLVQIEGPLAQCQLVETAILNIINYQTLVATKAARIRSVIEDEPLLEFGTRRAQEMDAAIWGTRAAIIGGANATSNVRAGKIFNIPVSGTHAHALVQTYGDDYQAFKAYAETHKDCVFLVDTYDTLRVGVPNAIRVAKEMGEKINFLGVRLDSGDLAYLSKKVRQQLDDAGFPNAKIYASNDLDENTILNLKMQKAKIDVWGVGTKLITAYDQPALGAVYKIVSIETDAGSMRDTIKLSNNAEKVSTPGKKQVWRITSRAKGKSEGDYITFADTDVTQLDEIEMFHPTYTYINKTVRDFDAVPLLVDIFDKGKLVYQLPSLQEIQEYGRKEFDQLWDEYKRVLNPQDYPVDLARDVWQNKMDLIDRIRKEALAKGEVR

SEQ ID NO: 2937 - DNA, 1452 bp, Streptococcus pyogenes
atgtataaagatgatagtttaactctccatactgatttgtatcagattaatatgatgcaagtttattttgagcagggcattcataatcgtcatgcggtgtttgaagtctatttccgcaaggaaccttttaacaatggttatgctgtttttgccggtttacagcgcatggtggagtacctagagcaatttcaattttcagaaacagatttggcttaccttgaagaactgggttatccagaaaactttttgacctaccttaaagagttacgattagaattgaccatccgttcagctaaagaaggagatttggtttttgctaatgagccgattgtgcaagtagaaggccctctaggtcagtgtcagttggtcgaaacagctcttttaaacattgttaacttccagaccttgattgctacaaaggctgctcgtattcgttctgtgattgaggatgaaccccttttggaatttggcacccgtcgtgcacaggaactagatgctgcgatttggggaacccgcgcagcgatgattggtggagcagatgcaacaagtaatgtgagagcaggtaaacgctttgatatccctgtttcaggtacgcatgctcatgctttagtgcaagcctatggtaatgattatgatgctttcatggcttatgctaagacccataaagattgtgtatttcttgttgacacctatgatacacttaaagtaggtgtgccaacagctatccgagtagccaaagaaatgggtgacaagattaattttctaggtgttcgattggactctggtgacttggcttacctctcaaaaacagtccgtcagcagttagacgacgctggttttaccgaggctaagatctatgcttctaatgacctcgatgaaaataccatcctcaacttaaaaatgcaaaaggccaaaattgatgtttggggtgttgggaccaaactgatcacagcctatgatcagcctgccttaggtgctgtttataagattgtctctattgagcaagaagatggcagcatgcgtgatacgatcaaattatcaaataatgcagaaaaagtatccacaccaggtaaaaaacaagtttggcgcatcaccagtcgtgaaaaaggcaaatcagaaggcgactatatcacgtttactgatattaatgttaatgaattaactgagattgagatgttccatccgacctatacctatattaagaaaaccgttaaagaatttgatgcaattcctctcttagttgatatttttgtcaagggagaattagtttaccagctaccgaccttagctgaaatcaaggcttatgctaaaaaagaatttgacaagctttgggatgaatacaagcgtgtcttaaatcctcaagactacccagtagacttagcccgtgatgtgtggcaaaacaagatggccttaattgataacattcgcaaagatgcttatggaaagagtgaa

SEQ ID NO: 2938 - protein, 484 aa, Streptococcus pyogenes
MYKDDSLTLHTDLYQINMMQVYFEQGIHNRHAVFEVYFRKEPFNNGYAVFAGLQRMVEYLEQFQFSETDLAYLEELGYPENFLTYLKELRLELTIRSAKEGDLVFANEPIVQVEGPLGQCQLVETALLNIVNFQTLIATKAARIRSVIEDEPLLEFGTRRAQELDAAIWGTRAAMIGGADATSNVRAGKRFDIPVSGTHAHALVQAYGNDYDAFMAYAKTHKDCVFLVDTYDTLKVGVPTAIRVAKEMGDKINFLGVRLDSGDLAYLSKTVRQQLDDAGFTEAKIYASNDLDENTILNLKMQKAKIDVWGVGTKLITAYDQPALGAVYKIVSIEQEDGSMRDTIKLSNNAEKVSTPGKKQVWRITSREKGKSEGDYITFTDINVNELTEIEMFHPTYTYIKKTVKEFDAIPLLVDIFVKGELVYQLPTLAEIKAYAKKEFDKLWDEYKRVLNPQDYPVDLARDVWQNKMALIDNIRKDAYGKSE

SEQ ID NO: 2939 - DNA, 819 bp, Streptococcus agalactiae
atgactttgcaagatcaaattatcaaagaactcggtgtaaaacctgttattaatccaagtcaagaaatccgtcgttccgtagaatttttaaaagactatctattaaaacatagttttctaaagacctatgtactgggtatttcaggggggcaagattcaactttagcaggacgtctagctcaactagcagttgaagagttgcgtgctgatacaggggaaaactatcaatttatagctattcgtttaccatatggtattcaggccgatgaagaagatgcacaaaaagcattagattttatcaagccagatattgctttgaccattaatattaaagaagctgttgatggccaagttagagctcttaatgcagcaggagtagagattacagactttaataaaggaaatattaaagctcgtcaaagaatgattagtcaatatgcagttgcaggtcaatatgctggagcggttattggtactgatcatgctgcagaaaatattacaggttttttcaccaaatttggtgatggaggtgctgacttattacctctctttagacttaataaaagtcaggggaaacagttattagctgaacttggtgctgataaagccttgtacgaaaagattccaaccgcagatttagaagaaaataaaccaggaatcgctgatgaaatagcccttggagtaacctaccaagaaattgatgcttatcttgaagggaaggtggtttcggacaagtctcgaggtatcattgaaaattggtggtataagggtcaacataaacgtcatcttccaatcacaatttttgatgatttctggaaa

SEQ ID NO: 2940 - protein, 273 aa, Streptococcus agalactiae
MTLQDQIIKELGVKPVINPSQEIRRSVEFLKDYLLKHSFLKTYVLGISGGQDSTLAGRLAQLAVEELRADTGENYQFIAIRLPYGIQADEEDAQKALDFIKPDIALTINIKEAVDGQVRALNAAGVEITDFNKGNIKARQRMISQYAVAGQYAGAVIGTDHAAENITGFFTKFGDGGADLLPLFRLNKSQGKQLLAELGADKALYEKIPTADLEENKPGIADEIALGVTYQEIDAYLEGKVVSDKSRGIIENWWYKGQHKRHLPITIFDDFWK

SEQ ID NO: 2941 - DNA, 864 bp, Streptococcus pyogenes
ttgataacattcgcaaagatgcttatggaaagagtgaatgacatgacactacaagaagagataattcgacaattaggcgtcaaggctagcattgacccacaagaagaaattcggaaagccgttgattttttaaaagcttatttgcgtaagcactcatttttaaaaacttatgtcttaggcatttcgggaggtcaggattctaccctcgcaggaaagctagcccaaatggccattgcagagttacgggaggaagcaagtgatcaagcttaccaatttatagctgttcgcttgccttatggggttcaggctgatgaagcagatgcgcaaaaagccttggcttttattgcaccagatcagacccttaccattaatatcaaggcagctgtggacggtcaagtagaggctctacaagcagcaggcgttgagatttctgatttcaataaaggtaatattaaagcacgtcagcgaatgatcagtcaatatgccattgctggccaaatggctggtgctgttattggaacggatcatgcggcagaaaacatcactggtttctttactaaatttggtgatggtggagcagatattcttcccctctttaggcttaacaaacgtcaaggaaaggctcttttgaaagttttaggagcagatgctgctttgtatgaaaaagttccaactgctgatttagaagatcaaaaaccaggcttggctgatgaggttgctctaggggtgacctatcaagacatcgacgactatttggaagggaagctgatttccaaagtagctcaagcaactattgaaaaatggtggcataaaggacaacacaagcgtcacctgccaatcaccatttttgatgatttttggaaa

SEQ ID NO: 2942 - protein, 288 aa, Streptococcus agalactiae
LITFAKMLMERVNDMTLQEEIIRQLGVKASIDPQEEIRKAVDFLKAYLRKHSFLKTYVLGISGGQDSTLAGKLAQMAIAELREEASDQAYQFIAVRLPYGVQADEADAQKALAFIAPDQTLTINIKAAVDGQVEALQAAGVEISDFNKGNIKARQRMISQYAIAGQMAGAVIGTDHAAENITGFFTKFGDGGADILPLFRLNKRQGKALLKVLGADAALYEKVPTADLEDQKPGLADEVALGVTYQDIDDYLEGKLISKVAQATIEKWWHKGQHKRHLPITIFDDFWK

SEQ ID NO: 2943 - DNA, 1332 bp, Streptococcus agalactiae
atgtcaaaattaactcaaacatttacagataagttatttgctgattaccaagcaaatacaaaatttagcgctattgaaaatgcagtaactcacaatggtttattgaagtctctagagactcgtcaaagtgagattgagaacgactatgtcttttcaattgatttgaccaaagatgaagtttctaatcagaaacaatcaggacgttgctggatgtttgctgcactgaatacatttcgtcataaactgatttcagattttaaacttgagaattttgaattatctcaggcacatacatttttctgggataagtatgaaaaatcaaattggtttatggaacaaattattgcgactgcaaatcaggaattgagtagtcgtaaggtgaaattcctattagatgtacctcaacaagatggaggacaatgggacatggtggttgctctgtttgagaaatatggtgtcgttcctaaaacagtttatcctgaatctgtttcatcaagtgctagtcgtgaactaaatcaatatttgaataaactcttacgccaagatgcacagattctacgagaattaatagcacagggagcagatggggcaactgttcaaaataaaaaggaagaattgcttcaagaaatttttaactttttagcaatgaaccttggcttgccaccgcaatcttttgattttgcttatcgtgataaagacaatcattatcagtctgataaaaatattacaccgaaagcattttatcaaaaatatgttaatcttgacctatcagattatgtttctattatcaatgctccaactgtagataagccttatggacaatcctatacagttgagatgcttggaaatgttgtcggagggccagctgttaaatatttaaaccttgatatgaaacggtttaaagagttagcgattgcgcaaatgaaatcaggagaaactgtgtggtttggttcagacgtaggtcaagtatcaaatcgtcaaaagggtatcctagcaactacgacttatgattttaattcatctatggatattaaacttagccaagacaaagcgggccgcctagattatagtgaaagtttaatgacacatgctatggtcttaacgggagtagaccttgatgaatctggacaacctttaaaatggaaagttgagaactcttggggagagaaagttggtaaggatggttattttgtagcttcagatgcttggatggatgaatatacttaccaaatagtcgttcgtaaagaattgcttactaaagaagaattagaggcttacaacgcagagccaattactttagcgccgtgggatccgatgggagcattagctaat

SEQ ID NO: 2944 - protein, 444 aa, Streptococcus agalactiae
MSKLTQTFTDKLFADYQANTKFSAIENAVTHNGLLKSLETRQSEIENDYVFSIDLTKDEVSNQKQSGRCWMFAALNTFRHKLISDFKLENFELSQAHTFFWDKYEKSNWFMEQIIATANQELSSRKVKFLLDVPQQDGGQWDMVVALFEKYGVVPKTVYPESVSSSASRELNQYLNKLLRQDAQILRELIAQGADGATVQNKKEELLQEIFNFLAMNLGLPPQSFDFAYRDKDNHYQSDKNITPKAFYQKYVNLDLSDYVSIINAPTVDKPYGQSYTVEMLGNVVGGPAVKYLNLDMKRFKELAIAQMKSGETVWFGSDVGQVSNRQKGILATTTYDFNSSMDIKLSQDKAGRLDYSESLMTHAMVLTGVDLDESGQPLKWKVENSWGEKVGKDGYFVASDAWMDEYTYQIVVRKELLTKEELEAYNAEPITLAPWDPMGALAN

SEQ ID NO: 2945 - DNA, 1335 bp, Streptococcus pyogenes
atgtcagcattaacagagacatttacagaacaattatttgctcattacgaagccaatgcaaaattttcagctattgagaatgccgttacgcataatggtttgctaaaatcattagaaacccgtcaaagtgaagtggacaatgattttgtgttttctattgatttaactaaagataaggtatctaaccaaaaggcttctggtcgttgctggatgtttgctgccttgaacactttccgacacaaattaatcacagaatttaagttagaaaattttgaactgtcacaagctcatactttcttttgggataagtatgaaaaagctaactggtttatggagcaggtcattgctacagctgaccaagaattaaccagtcgtaaagttaagtttctcttggatgttccacaacaagatggtggtcagtgggacatggtggtttccttgtttgagaagtatggagtggtgccaaaatctgtttacccagaatcaatctcatcaagtaacagtcgtgaattaaaccagtatttgaataaattattgcgccaagatgctcaaattcttcgtgacctgattgcgtcaggtgctaaggcagaccaagttgaggatcgaaaagcagagcttcttcaggaaatttttaacttcttggccatgacccttggtttaccacctcgtcattttgattttgcctaccgtgataaagatgaccactatcatgttgagaaaggtttgacaccgcaagcgttttacgacaaatttgttggcttaaagctttctgattatgtgtctgttattaatgcgccaactgctgataagccttatggcaaatcatacactgttgagatgctaggaaatgtggtcggtagtcgtgaggttcgctacctcaaccttgatatgaaacgtttcaaagaactagctatcaagcagatgcaggctggtgagtccgtttggtttggctctgatgtgggtcaagtttcagatcgtcaaaaaggcattttagcaactaatacttacgattttgaagctagtatggatatcaatcttagtcaagataaggctggacgtttggattatagtgaaagtttgatgacacatgctatggttttaacaggtgttgacttagatgaaacaggaaaaccgttaaaatggaaggttgaaaattcatggggtgagaaggttggtgacaaaggttactttgttgcttcagatgcttggatggatgaatatacctatcaaattgttgtccgtaaagaattcttaacagctgacgagttagcggcttatgaaaaagagccacaagtactagctccttgggatccaatgggtgctttagcacaatac

SEQ ID NO: 2946 - protein, 445 aa, Streptococcus agalactiae
MSALTETFTEQLFAHYEANAKFSAIENAVTHNGLLKSLETRQSEVDNDFVFSIDLTKDKVSNQKASGRCWMFAALNTFRHKLITEFKLENFELSQAHTFFWDKYEKANWFMEQVIATADQELTSRKVKFLLDVPQQDGGQWDMVVSLFEKYGVVPKSVYPESISSSNSRELNQYLNKLLRQDAQILRDLIASGAKADQVEDRKAELLQEIFNFLAMTLGLPPRHFDFAYRDKDDHYHVEKGLTPQAFYDKFVGLKLSDYVSVINAPTADKPYGKSYTVEMLGNVVGSREVRYLNLDMKRFKELAIKQMQAGESVWFGSDVGQVSDRQKGILATNTYDFEASMDINLSQDKAGRLDYSESLMTHAMVLTGVDLDETGKPLKWKVENSWGEKVGDKGYFVASDAWMDEYTYQIVVRKEFLTADELAAYEKEPQVLAPWDPMGALAQY

SEQ ID NO: 2947 - DNA, 2250 bp, Streptococcus agalactiae
gtgattacaattaaaaaggaatctgttatcaaactattgaagtatgcttttggcattataatgggatttattatcttagctattgtaataggtgggctcctatttgcatactacgttagtcgttctccgaaattaaccgatcaagctttaaaatccgttaactctagtttggtttatgatggtaataataaacttattgccgatttaggctcagaaaagcgtgaaagtgttagtgcggatagcattccactaaatttggttaacgctatcacttctatcgaagataaacgtttctttaaacatagaggtgtcgatatttatcgtattttaggtgcagcttggcataatcttgttagtagtaatacgcaaggtggttcaacccttgatcaacagttgattaaactggcttacttttctaccaataaatctgaccaaacgttaaaacgtaaatcacaggaagtttggcttgcgcttcaaatggagcgtaaatacaccaaagaagaaattcttactttctatattaataaagtttatatgggaaatgggaattatggtatgagaacaacagctaaatcatactttggtaaagacctaaaggaattatctattgcacaacttgctttgctcgctggtattcctcaagcacctacacaatatgacccttataaaaacccagaatctgctcaaacaagacgtaataccgttcttcagcagatgtatcaagataaaaacatttctaaaaaggaatacgaccaagctgttgcaactccagtaactgatggcttaaaagaattaaagcaaaaatctacttatccaaaatatatggataactacttaaaacaagttattagtgaagttaaacaaaaaactggtaaagatatctttactgctgggctaaaagtgtatactaatatcaacactgatgcacaaaaacaactatatgacatctacaacagtgacacttacatcgcttatccaaacaatgaattacaaatagcatctaccatcatggatgcgactaatggtaaagtcattgcacaattaggcgggcgtcatcagaatgaaaatatttcatttgggacaaatcaatctgtcttaacagaccgcgattggggttctacaatgaaacctatctcagcttatgcacctgctattgatagtggtgtctataattcaacaggtcaatcattaaacgactcagtttactactggcctggtacttctactcaactatatgactgggatcgtcaatatatgggttggatgagtatgcagaccgctattcaacaatcacgtaacgtccctgctgtcagagcacttgaagccgctggattagacgaagcaaaatctttccttgaaaaattaggcatatactatccagaaatgaactattcaaatgctatttcaagtaacaacagtagcagtgatgcaaaatatggtgcaagtagtgagaaaatggcagcggcttactcggcttttgcaaacggcggaacttactataaaccgcaatatgttaataaaattgaatttagcgatggaaccaatgatacttatgcagcgtctggtagccgtgcgatgaaagagactactgcctacatgatgacggatatgctgaaaacagtactaacatttggtactggtactaaagcagctatccctggtgttgcacaagctggtaagactggtacttccaactatacggaagatgagttagctaaaattgaagcaactactggtatctacaatagcgccgttggtacaatggctcctgatgaaaactttgtcggctatacttctaagtacacaatggcaatttggactggttataaaaatcgccttacaccactttatggtagccaactggatattgctactgaggtttatcgtgcaatgatgtcctacctaactggcggatacagtgcagattggacaatgccagaagggctctatcgaagcggaagctacttgtatatcaatgggacaactacaaccggcacttactcttcttctgtctataagaatatctatcaaaattctggacagtcaagtcaaagcagtagttcaacatcctctgagaaacaaaaagaggataagaatacagcaaatgatgccaattcatcatccccacaagtcgaaacacctaataatggtaatgctactacccctaataattccaatcaaactgtgccaggaactggacatggtaatggtaatggtaatggtaacaacaatacagtacctaacggtaat

SEQ ID NO: 2948 - protein, 750 aa, Streptococcus agalactiae
MITIKKESVIKLLKYAFGIIMGFIILAIVIGGLLFAYYVSRSPKLTDQALKSVNSSLVYDGNNKLIADLGSEKRESVSADSIPLNLVNAITSIEDKRFFKHRGVDIYRILGAAWHNLVSSNTQGGSTLDQQLIKLAYFSTNKSDQTLKRKSQEVWLALQMERKYTKEEILTFYINKVYMGNGNYGMRTTAKSYFGKDLKELSIAQLALLAGIPQAPTQYDPYKNPESAQTRRNTVLQQMYQDKNISKKEYDQAVATPVTDGLKELKQKSTYPKYMDNYLKQVISEVKQKTGKDIFTAGLKVYTNINTDAQKQLYDIYNSDTYIAYPNNELQIASTIMDATNGKVIAQLGGRHQNENISFGTNQSVLTDRDWGSTMKPISAYAPAIDSGVYNSTGQSLNDSVYYWPGTSTQLYDWDRQYMGWMSMQTAIQQSRNVPAVRALEAAGLDEAKSFLEKLGIYYPEMNYSNAISSNNSSSDAKYGASSEKMAAAYSAFANGGTYYKPQYVNKIEFSDGTNDTYAASGSRAMKETTAYMMTDMLKTVLTFGTGTKAAIPGVAQAGKTGTSNYTEDELAKIEATTGIYNSAVGTMAPDENFVGYTSKYTMAIWTGYKNRLTPLYGSQLDIATEVYRAMMSYLTGGYSADWTMPEGLYRSGSYLYINGTTTTGTYSSSVYKNIYQNSGQSSQSSSSTSSEKQKEDKNTANDANSSSPQVETPNNGNATTPNNSNQTVPGTGHGNGNGNGNNNTVPNGN

SEQ ID NO: 2949 - DNA, 2163 bp, Streptococcus pyogenes
gtgattacaattaaaaatccaaaaatccttaagtggctaaagtatgtattaagtgcaattcttagccttattatccttgttattattattggtggtcttttgtttaccttctacattagcagtgctccgaaactgtcagaagcccagttaaaatcaacaaactctagcttggtttatgacggtaataacaatctgattgctgatttgggttctgaaaagcgtgaaaatgtaacagctgatagtatccctattaatctagttaatgctattacctcaattgaagataaacgtttctttaaccatcgtggagtagatctttatcgtatttttggtgctgcctttcataatctaacgagtcagaccactcaaggggggtcaacgcttgatcagcaactcattaaactagcctatttttctactaatgaatctgatcaaaccttaaaacgtaaggctcaagaagtttggcttgctcttcaaatggagcgaaaatatactaaacaagaaatcctgactttttacatcaacaaagtatatatgggtaatggcaactatggtatgctgacagccgctaagtcttattatggcaaggatcttaaggatttatcttatgcccaactagccctattggctggaatccctcaagctcctagtcaatatgatccttaccttcatcctgaagctgctcaaaatcgccgtaacgtcgtgttgcaacagatgtacatggaaaaacatctgacgaaagcagaatatgaaactgccatcgcaactcccgtcgctgaaggtctacaatcactccaacagcgctcaacttatccaaaatatatggataattatctaaaacaagttattgaagaagtcaaaaaagaaacgaataaagatatttttaccgctggtttaaaagtttataccaatattatccccgatgcgcagcagactctttataatatttatcattctggtgattatgtttactatccagaccaagatttccaagttgcttcaacgattgttgatgtgacaaatggtcatgttattgctcagcttggcggacgtaatcaagatgaaaatgtttcatttgggactaaccaagctgttttaactgatcgtgactggggttctaccatgaagccaatcacagcctatgctcctgctattgaatctggtgtttatacttctactgctcagtcgactaatgactcagtctattattggcctggaaccactacccaattgtttaactgggaccttagatataacggatggatgacaatccaagctgctattatgctatcgcgaaatgtcccagcagtccgagcactggaagccgcaggacttgactatgctcgatctttcttaagcagtttaggtattaactatcccgaaatgcactactcaaacgctatctcaagtaataacagtagctcagataaaaaatatggtgcaagtagtgaaaaaatggccgctgcatacgctgcttttgcaaatggtggtatttatcataaaccaaggtatgtcaataaagtggaatttagtgatggtacaagtaaaacttttgatgaaaaaggaaaacgtgccatgaaagaaaccacggcctatatgatgacagatatgttaaaaactgttctcacttatggtacaggtactgctgctgccattcctggtgttgcgcaagctggtaaaacagggacttctaactacactgatgaggaactagctaaaattggtgaaaaatacggcctttatccagattatgttggtacattagcgccagacgaaaactttgttggctttactaagcgctacgccatggctgtttggacaggttacaaaaaccgcttgaccccagtatacggatcaagtctagagattgcatctgacgtttatcgtagcatgatgacttacttaacaaatggttacagtgaagattggacgatgccaaatggtctttatcgcagtggtggattcctctacttaagcggaacctatgcgagcaacaccgactatactaattcggtttacaacaatctttacagcaataacacgacaacagcttctagccaaacgacttcagatgatactagtagtagcaatgatacaagtaattcaaccaatacagacaacaatggcagtcatccatctaccgatgataaaaagacaactcat

SEQ ID NO: 2950 - protein, 721 aa, Streptococcus agalactiae
VITIKNPKILKWLKYVLSAILSLIILVIIIGGLLFTFYISSAPKLSEAQLKSTNSSLVYDGNNNLIADLGSEKRENVTADSIPINLVNAITSIEDKRFFNHRGVDLYRIFGAAFHNLTSQTTQGGSTLDQQLIKLAYFSTNESDQTLKRKAQEVWLALQMERKYTKQEILTFYINKVYMGNGNYGMLTAAKSYYGKDLKDLSYAQLALLAGIPQAPSQYDPYLHPEAAQNRRNVVLQQMYMEKHLTKAEYETAIATPVAEGLQSLQQRSTYPKYMDNYLKQVIEEVKKETNKDIFTAGLKVYTNIIPDAQQTLYNIYHSGDYVYYPDQDFQVASTIVDVTNGHVIAQLGGRNQDENVSFGTNQAVLTDRDWGSTMKPITAYAPAIESGVYTSTAQSTNDSVYYWPGTTTQLFNWDLRYNGWMTIQAAIMLSRNVPAVRALEAAGLDYARSFLSSLGINYPEMHYSNAISSNNSSSDKKYGASSEKMAAAYAAFANGGIYHKPRYVNKVEFSDGTSKTFDEKGKRAMKETTAYMMTDMLKTVLTYGTGTAAAIPGVAQAGKTGTSNYTDEELAKIGEKYGLYPDYVGTLAPDENFVGFTKRYAMAVWTGYKNRLTPVYGSSLEIASDVYRSMMTYLTNGYSEDWTMPNGLYRSGGFLYLSGTYASNTDYTNSVYNNLYSNNTTTASSQTTSDDTSSSNDTSNSTNTDNNGSHPSTDDKKTTH

SEQ ID NO: 2951 - DNA, 597 bp, Streptococcus agalactiae
atggttaactatccacatcagcttattcggaaaacaacagttacaaaatcaaagaaaaagaaaatcgattttgccaaccgtggtatgtcatttgaagctgctatcaatgcaaccaatgactactatttgtctcacgaattagctgtcattcataagaaaccaacgccagtacaaatcgtcaaggtagattatcctaaacgtagtcgtgctaagattgtagaagcttattttagacaagcttctactactgattattctggtgtttacaaaggttactatattgactttgaagccaaagaaacccggcagaaaactgctatgcctatgaaaaattttcatgctcaccaaatagagcacatggcaaatgtattacagcaaaaagggatttgctttgtcttgcttcatttttccacacttaaggaaacctatctactccctgctaatgagttaatttcattttatcagattgataaaggcaataaatcaatgcctattgattatatcagaaaaaatggatttttcgtaaaggagagtgcctttcctcaagtcccttacttagatattattgaagaaaaattattaggcggtgattacaat

SEQ ID NO: 2952 - protein, 199 aa, Streptococcus agalactiae
MVNYPHQLIRKTTVTKSKKKKIDFANRGMSFEAAINATNDYYLSHELAVIHKKPTPVQIVKVDYPKRSRAKIVEAYFRQASTTDYSGVYKGYYIDFEAKETRQKTAMPMKNFHAHQIEHMANVLQQKGICFVLLHFSTLKETYLLPANELISFYQIDKGNKSMPIDYIRKNGFFVKESAFPQVPYLDIIEEKLLGGDYN

SEQ ID NO: 2953 - DNA, 597 bp, Streptococcus pyogenes
atggttaattatcctcataatcttattcgacaaaaagtaagttccgttcaaaagcaaaataaggtggacttcgccaatagaggtatgtcctttgaagctgctatcaacgcgacaaatgattattatttatctcgtcaaatagctgtcattcacaaaaaacctactcctgtccaaattgtcaaagtggattaccctaaacgcagtcgggcaaaaatcgttgaagcgtactttagacaagcttcaacgactgactattgcggcgtttataaaggacattatgttgattttgaagcaaaagaaaccaggcaaaaaacagctatgcccatgaaaaatttccatttacatcagattgaacatatggcttgcgttttacatcaaaaaggaatctgctttgtccttcttcacttttccacactgaaggagacttactacctacctgctcaagccttgatttcattttatcagatagataatggcagtaaatcgatgcccattgattatatcagaaaaaatggctttaaggtagcatttggagcctttccacaagtcccttatttaaacataattgaacaaaattttttaggcggtgattacaat

SEQ ID NO: 2954 - protein, 199 aa, Streptococcus pyogenes
MVNYPHNLIRQKVSSVQKQNKVDFANRGMSFEAAINATNDYYLSRQIAVIHKKPTPVQIVKVDYPKRSRAKIVEAYFRQASTTDYCGVYKGHYVDFEAKETRQKTAMPMKNFHLHQIEHMACVLHQKGICFVLLHFSTLKETYYLPAQALISFYQIDNGSKSMPIDYIRKNGFKVAFGAFPQVPYLNIIEQNFLGGDYN

SEQ ID NO: 2955 - DNA, 516 bp, Streptococcus agalactiae
atgaagtcaactattcttgtaacaggttacaaaaattttgaattagggattttccaggataaggatcctcggattactattataaaaaaggctattgataaggattttagacgcttcttggaaaatggagcagactggtttatttttatgggaaatttagggtttgagtactgggctttggaagttgctcttgatttacaaaaagaatatgattttcaaattgcgacaatttttacctttgagaaccatggccaaaattggaatgaggctaataaagctaagttggcactctttaagcaagttgactttgttaaatatactttcccaagctatgaaaacccgggtcaatttaaacaatacaatcattttctcattaacaacacacaaggtgcatatcttttttatgattctgaaaatgaaactaatttaaaatttttgctagaaatgatggagaaaaaggaagcttatgatatttctttcctaacttttgatcgcttaaatgaaatatatgaggaa

SEQ ID NO: 2956 - protein, 172 aa, Streptococcus agalactiae
MKSTILVTGYKNFELGIFQDKDPRITIIKKAIDKDFRRFLENGADWFIFMGNLGFEYWALEVALDLQKEYDFQIATIFTFENHGQNWNEANKAKLALFKQVDFVKYTFPSYENPGQFKQYNHFLINNTQGAYLFYDSENETNLKFLLEMMEKKEAYDISFLTFDRLNEIYEE

SEQ ID NO: 2957 - DNA, 513 bp, Streptococcus pyogenes
atgactgcgattctaattacaggttaccgaagctttgaaatagggatttttgaccataaagacccacgagtttcaattattaaacaggctattcgtaaagatttaataggttatttggaaaatggtgtggattggtttatctttacagggaacttgggttttgaacaatgggctttggaagtagctaatgagctaaaagaggagtatcccttgcagatagctactatattcttgtttgaaacgcatggagataggtggaatgaaaaaaataaagaagttttaagtcagtttagggctgttgactttgtaaaatattactttccaaattacgaacaaccgacgcaatttagtcaatattatcagtttttattagaaaagacagaaggggcttatgttttttatgacacagaaaacgagaccaacttaaaatattttctcaagaaagcaaaagatatgccgcattatcagttgctattgctaacctttgatcggctaaatgatatgtcacaaagc

SEQ ID NO: 2958 - protein, 171 aa, Streptococcus pyogenes
MTAILITGYRSFEIGIFDHKDPRVSIIKQAIRKDLIGYLENGVDWFIFTGNLGFEQWALEVANELKEEYPLQIATIFLFETHGDRWNEKNKEVLSQFRAVDFVKYYFPNYEQPTQFSQYYQFLLEKTEGAYVFYDTENETNLKYFLKKAKDMPHYQLLLLTFDRLNDMSQS

SEQ ID NO: 2959 - DNA, 96 bp, Streptococcus agalactiae
atggaaaaatcaagcgtaaaacgttctcatatccgaaaaaacgatcattcctcatatatttcatttaagcgatcaaaagttaggaaagaaatatca

SEQ ID NO: 2960 - protein, 32 aa, Streptococcus agalactiae
MEKSSVKRSHIRKNDHSSYISFKRSKVRKEIS

SEQ ID NO: 2961 - DNA, 351 bp, Streptococcus agalactiae
ttgactggtttggagaatagaatggcaagtattatttatagcccaaaagatatttttgagcaagattttaaagttagtatgcggggatatgacaagaaagaagtcgatgtatttctggatgatgtcatcaaagattacgaaaattatcttgagcaaattgagaagctccaaatggaaaatagacgtctacaacaagctttagacaaaaaagaaagcgaagcttcaaatgtaagaaattcagggacagctatgtataatcaaaaaccgattgcccaatctgcaaccaattttgatattttaaaacgcattagccgccttgagaaagaagtttttggaagacaaattagagaa

SEQ ID NO: 2962 - protein, 117 aa, Streptococcus agalactiae
MTGLENRMASIIYSPKDIFEQDFKVSMRGYDKKEVDVFLDDVIKDYENYLEQIEKLQMENRRLQQALDKKESEASNVRNSGTAMYNQKPIAQSATNFDILKRISRLEKEVFGRQIRE

SEQ ID NO: 2963 - DNA, 324 bp, Streptococcus pyogenes
atgacaagtattatttatagtcctaaagatatttttgagcaagaatttaagactagtatgcgagggtttgataagaaagaagttgatgaatttcttgataatgtaattaaagattatgaaaatttcaatgctcaaattgaagctttaaaagctgagaatgaagccttaaaaaaggcgaagtttcaagctagaaatacagtttcagcgactgttcaacaaccagtaccgcaaccgactcgtgttgctcaatcagctactaattttgacatcttgaaacgtattagtaaattggaaaaagaggtttttggtaaacaaattattgag

SEQ ID NO: 2964 - protein, 108 aa, Streptococcus pyogenes
MTSIIYSPKDIFEQEFKTSMRGFDKKEVDEFLDNVIKDYENFNAQIEALKAENEALKKAKFQARNTVSATVQQPVPQPTRVAQSATNFDILKRISKLEKEVFGKQIIE

SEQ ID NO: 2965 - DNA, 1152 bp, Streptococcus agalactiae
atgaaagaatcattcaaattaatagcaactgctgctgctggtttagaagccattgttggtagagaaatcagaaacctaggaattgactgccaagttgagaacggtagagtccgtttccacggagatatcaaaacaatcattgaaacgaacctatggctacgagctgccgatcgtataaagattattgtaggagagtttccagcacctacttttgaggaactttttcagggtgtatatggccttgactgggaaaattatttaccgttaggggcaaaatttcctattgctaaagcaaagtgtgtcaagtcaaaattgcacaatgaacctagtgtacaagccatttctaaaaaagctgttgctaagaaacttcaaaaagtctttcaccgtcctgaaggagttcccttacaagaaaatggagctgaatttaaaatagaagtttctattttaaaagataaagcgactgtcatgattgatacgactggatcaagtctcttcaaacgtggctaccgtgcagaaaaaggtggtgcaccaattaaagaaaacatggcagcagctattattcaattatctaattggttccctgataagccattgattgatccaacttgtggttcaggtactttttgtattgaagctgctatgattggaatgaatatagctcctggttttaatcgtgattttgcctttgaggcgtggccatgggtagatcaaagtcaagtacaaaaggttcgtgatgaagctgagagtaaagcaaactatgatattgatttagatatttcaggttttgatttagacggtcgtatggtagaaattgctagaaaaaatgcagaagaagcaggacttggagatgttatcaaattgaaacaaatgcgtcttcaagatttaaaaacagataaaattaacggtgttattatctccaacccaccatatggtgaacgactcctggatgacaaagcagtggacattttgtataatgagatgggacaaacatttgcgcctttaaaaacttggagcaagtttatcctaactagtgacgaaggatttgaaaaaaaatacggctcacaagctgataaaaaacgtaagctttacaatggtactttaaaagttgatttgtaccaatattacggtgaacgtgtgagacgtcaagtaaaa

SEQ ID NO: 2966 - protein, 384 aa, Streptococcus agalactiae
MKESFKLIATAAAGLEAIVGREIRNLGIDCQVENGRVRFHGDIKTIIETNLWLRAADRIKIIVGEFPAPTFEELFQGVYGLDWENYLPLGAKFPIAKAKCVKSKLHNEPSVQAISKKAVAKKLQKVFHRPEGVPLQENGAEFKIEVSILKDKATVMIDTTGSSLFKRGYRAEKGGAPIKENMAAAIIQLSNWFPDKPLIDPTCGSGTFCIEAAMIGMNIAPGFNRDFAFEAWPWVDQSQVQKVRDEAESKANYDIDLDISGFDLDGRMVEIARKNAEEAGLGDVIKLKQMRLQDLKTDKINGVIISNPPYGERLLDDKAVDILYNEMGQTFAPLKTWSKFILTSDEGFEKKYGSQADKKRKLYNGTLKVDLYQYYGERVRRQVK

SEQ ID NO: 2967 - DNA, 1152 bp, Streptococcus pyogenes
atgaaagaaacatttagattagtcgcaactgcagccgcaggtttagaagctgtcgttggtaaagaagtcagagcactaggctttgattgtcaggttgaaaatgggaaagtttattttgaaggtgatgtagaagcgattgttaaaacaaatctttggttacgtgcagcagatcgtatcaaaattatcgtaggacaatttcctgctagaacctttgaagaattattccaaggtgtctttgccttggattgggaaaattatttaccgctaggagctaaatttccaatctcaaaagccaaatgtgttaagtctaaattgcataacgagccaagtgttcaggcgattaccaaaaaggccgttgttaagaaactgcaaaagcatttccacaggccagaaggagttcctcttcaagaagttgggtcaacgtttaacattgaggtatctattttaaaagaccaagccactattatgattgacacgacaggatctagcctatttaaacgagggtatcgcgttcaaaaaggtggagcaccgatcaaggaaaatatggcagctgctatcttggccttatctaactggtttccagataaacctctggttgatcccacctgtggatcgggaacgttttgcatcgaggcagccatgattgggatgaatattgctccaggatttaaccgttcgtttgcttttgaagaatggagctgggtagataaagatatggtgcaacaagttcgtgatgatgctgaacaagaagctaattatgaaatcgaattagatatttctggctttgatatcgatggccgcatgattgagattgctaaaagtaatgctgaagaagctggtttatctgatgtgattacctttaagcaaatgcgtctgcaagactttcgaacagacaaggttaatggtgtagtgatatcaaatcctccttatggagaacggttgcttgatgacaaagcggttgacatcttgtataatgaaatgggacaaacctttgcaccattgaaaacatggagcaaatttatccttacaagtgatgaactttttgaactaaaatacgggcaaaaagctgataaaaaacgtaaactttataacggcaccctaaaagttgatttgtaccaattttatggggaaagggtaaagcgacatctgata

SEQ ID NO: 2968 - protein, 384 aa, Streptococcus pyogenes
MKETFRLVATAAAGLEAVVGKEVRALGFDCQVENGKVYFEGDVEAIVKTNLWLRAADRIKIIVGQFPARTFEELFQGVFALDWENYLPLGAKFPISKAKCVKSKLHNEPSVQAITKKAVVKKLQKHFHRPEGVPLQEVGSTFNIEVSILKDQATIMIDTTGSSLFKRGYRVQKGGAPIKENMAAAILALSNWFPDKPLVDPTCGSGTFCIEAAMIGMNIAPGFNRSFAFEEWSWVDKDMVQQVRDDAEQEANYEIELDISGFDIDGRMIEIAKSNAEEAGLSDVITFKQMRLQDFRTDKVNGVVISNPPYGERLLDDKAVDILYNEMGQTFAPLKTWSKFILTSDELFELKYGQKADKKRKLYNGTLKVDLYQFYGERVKRHLI

SEQ ID NO: 2969 - DNA, 1461 bp, Streptococcus agalactiae
atgtcagaagatcaaaaacacccattttttgaaccaaaaaaagaaactgatggtcttgaatttaaagatgctaaagaaatgacagtagaagaggctgttagaaaagattctgaaattaaggctggtattaccgaagaagatagtattcttgataaatacatcaaacaacatcgtgatgaagtagcttcacaaaagtttgagacaaaatcaagcgattttgcaaaccttgatacggcatctttagatgattttatcaagaaacagcgcgaagaattatcagcgatgttagctgcagaagagctttctaaaaagttggataattcagtctctcaagaacaagatacagaagctaatgctgtctcacctaaagaagaatcttcacaagaacaagaaaatagtgtaaccccagttcctcctctgaatacggaagcagaaccaactgcaacagaaccagattcgactattgctgattcagaggagtataaatcctcttctaagaagcgtggaggtatcgtaggaacattgattgctcttattttacttctaatagtagcaatctttggttacaactatttcaagaataataattcgacaaattctcaaactgcaacaagtcaaagttctagttctaaggctacgacgacttcatcagaagaagataaaaaagctagtcagaacttagataatttcaacaaatcttatgctaacttttttgttgatgataagaaaacccaactcaaaaatagcgaatttgataaattgtcagaattagaaaagaaagttgatgctttaaaaggaactaaatactacggtaaagtaaaagttaaatttgatagtctaaaacgtcaaattgatgctgttaaagctgttaacgacaagtttaagtcgcctgctgtagttgatggtaagaagagtgaaaaattagaggtaaaagatggagcgaattttgactctttagatagtaaaactcttaatactggtaatgctagtctagatagtttacttcactccatcgtttcaactggtcgtaatcaggtaaaacaatccgaagaacaggcttcgtctaataaggtttcagacactcaaataactgaacaaccaaacgtaactaacggtcaatcttcctcatcagctgctacaataaataatcaggcagctggcactgcatcaggtaatttggaacgtaaccgtagtcgagtaccgtataataatgctgctattgcggatacaggaaatcctgcctggatatttaacccaggagtattagagaaaatcgtggccacttcacaggcgcgaggctatttctctggaaataactatattcttgaacctgtaaatattatcaatggtaatggttattacaatatgtttaaattagatggcacttatttgttctctatcaatgccaagacaggttactttgtaggtaacgctcctggaagagctgatagtttagattat

SEQ ID NO: 2970 - protein, 487 aa, Streptococcus agalactiae
MSEDQKHPFFEPKKETDGLEFKDAKEMTVEEAVRKDSEIKAGITEEDSILDKYIKQHRDEVASQKFETKSSDFANLDTASLDDFIKKQREELSAMLAAEELSKKLDNSVSQEQDTEANAVSPKEESSQEQENSVTPVPPLNTEAEPTATEPDSTIADSEEYKSSSKKRGGIVGTLIALILLLIVAIFGYNYFKNNNSTNSQTATSQSSSSKATTTSSEEDKKASQNLDNFNKSYANFFVDDKKTQLKNSEFDKLSELEKKVDALKGTKYYGKVKVKFDSLKRQIDAVKAVNDKFKSPAVVDGKKSEKLEVKDGANFDSLDSKTLNTGNASLDSLLHSIVSTGRNQVKQSEEQASSNKVSDTQITEQPNVTNGQSSSSAATINNQAAGTASGNLERNRSRVPYNNAAIADTGNPAWIFNPGVLEKIVATSQARGYFSGNNYILEPVNIINGNGYYNMFKLDGTYLFSINAKTGYFVGNAPGRADSLDY

SEQ ID NO: 2971 - DNA, 1467 bp, Streptococcus pyogenes
gtgtcagaagaaagcaaagaagtcgaagtaacaaaagaatcgcaaacattggggcttaatgaagccaagtcaatgacaattggtgaagctgtacgcaaacagtcagagataaaagcaggtgttactaaggatgatagtattttagataagtacattaagcaacaccgtgacgaagtttcttctcaaaagtttgatgctaagtatacagagcttgatacagctagtttagataactttatcaaaaaacaaagagaagcattgagtaaagccggtcttgttgatgacgaacctgtgtctgcggagtctgctgagcaagatagcactttggttgaagaagtagctgaagacttagctccaatggagactactgcggtggtaactgggattccggtggaagcgacagtccctgtgttagatctagatccatcagagagggtcattccagaaccacagatgaccaaggaagaaccaaaaagagatcagtttctttctgaagatagccaccatccagccaaacaaaacacgaaaaaaggttggttaatagctttatttctgctattattggccattcttgcagttgtatttggttggaaccatttcttgagacaagacagtggtaaaacaactcaaacagcaagtaaacagacaaagacctctttgcagaccgacagtgctaaaaaagcaacgcgcttgaaggctgctgctaaagctttcgaaaaactatatggtactttttatacagatgccacaaagagcaaattaaaaaatagtgcctttgctactttgccagatttagaagctgccttgaaagctttggaaggctctgcttactatgataaggcgaaagcaaaagtcgattcccttaagaaagctattgctgctattacagcggttaacggtaaatttgtttccgatgttgttgtagatggtgaaaaggtttcggctgaagtcaaggctgatgctaattttgatgatttatcaagtgcaaccttgacaataggaaatgcaaatcttgatgctgtcttgcaggcaagcatcacagaaggtcgtcagcaactagccagcaaggctgaggccgctaaagcagctaatgagcaagcagtccaggatcaagcagctcaaggacaaagtacatcagtagcaccatctggctatggcttgacaagttatgatcctgcaagcttacaacggcatttatcacgtgtaccttacaatcaagatgttattgctgacagagctaacccatcttgggcatttaatccaggagttcttgaaaaaattgtagcaacctcacaagctagaggttatatttcaggcaaccaatatattttagagccggttaatattattaatggcaatggttactataatatgtttaagcctgatggcacttatctgttctctattaattgtaagacgggttattttgtaggaaatggcaaaggttatgctgatgctttagattac

SEQ ID NO: 2972 - protein, 489 aa, Streptococcus pyogenes
VSEESKEVEVTKESQTLGLNEAKSMTIGEAVRKQSEIKAGVTKDDSILDKYIKQHRDEVSSQKFDAKYTELDTASLDNFIKKQREALSKAGLVDDEPVSAESAEQDSTLVEEVAEDLAPMETTAVVTGIPVEATVPVLDLDPSERVIPEPQMTKEEPKRDQFLSEDSHHPAKQNTKKGWLIALFLLLLAILAVVFGWNHFLRQDSGKTTQTASKQTKTSLQTDSAKKATRLKAAAKAFEKLYGTFYTDATKSKLKNSAFATLPDLEAALKALEGSAYYDKAKAKVDSLKKAIAAITAVNGKFVSDVVVDGEKVSAEVKADANFDDLSSATLTIGNANLDAVLQASITEGRQQLASKAEAAKAANEQAVQDQAAQGQSTSVAPSGYGLTSYDPASLQRHLSRVPYNQDVIADRANPSWAFNPGVLEKIVATSQARGYISGNQYILEPVNIINGNGYYNMFKPDGTYLFSINCKTGYFVGNGKGYADALDY

SEQ ID NO: 2973 - DNA, 480 bp, Streptococcus agalactiae
atgacaaaagaagttgtcgtagagagttttgaattagatcacaccatcgttaaagcaccctacgttcgtttaatttcagaagaagttggaccggtcggagacatcattactaactttgatatccgccttattcagcctaatgaaaatgctattgatactgctggtttacatactatcgagcaccttctggcgaagttaatccgccaacgaattaatggtttgattgattgttctccttttggttgtagaactggttttcacatgattatgtggggaaaacaggatgctactgaaattgctaaagtcatcaaatctagtctagaggctattgctggtggggtcacttgggaagacgttcctggaacaaccattgaatcttgtggaaattataaagaccacagtctccactctgctcaagaatgggcgaaattaattctttcccaagggatttctgacaatgcttttgagcgccacattgtc

SEQ ID NO: 2974 - protein, 160 aa, Streptococcus agalactiae
MTKEVVVESFELDHTIVKAPYVRLISEEVGPVGDIITNFDIRLIQPNENAIDTAGLHTIEHLLAKLIRQRINGLIDCSPFGCRTGFHMIMWGKQDATEIAKVIKSSLEAIAGGVTWEDVPGTTIESCGNYKDHSLHSAQEWAKLILSQGISDNAFERHIV

SEQ ID NO: 2975 - DNA, 480 bp, Streptococcus pyogenes
atgacaaaagaagttatcgtcgaaagttttgagctagatcatactattgtaaaggccccttatgttcgtcttatttctgaagaatttggacccaagggcgatcgtattacaaattttgatgttcgcctagtgcagcctaaccaaaattctattgaaacagccggtttgcataccattgaacacttacttgccaagctcatccgccaacgcattgatgggatgattgattgctctccttttggctgtcgaacaggttttcaccttatcatgtggggaaaacacagttctactgatattgccaaggtgattaaatccagcctagaagaaattgcaactgggattacttgggaagatgttcctggaacaactcttgaatcctgtgggaactataaggatcatagcctctttgccgccaaagaatgggctcaattgattattgatcaagggatttcagacgatccttttagtcgccatgtcatc

SEQ ID NO: 2976 - protein, 160 aa, Streptococcus pyogenes
MTKEVIVESFELDHTIVKAPYVRLISEEFGPKGDRITNFDVRLVQPNQNSIETAGLHTIEHLLAKLIRQRIDGMIDCSPFGCRTGFHLIMWGKHSSTDIAKVIKSSLEEIATGITWEDVPGTTLESCGNYKDHSLFAAKEWAQLIIDQGISDDPFSRHVI

SEQ ID NO: 2977 - DNA, 1605 bp, Streptococcus agalactiae
atgtttaatattatattagcaatggtttgtgcactcattggtttgattattggttatgtggctatttcaatgaaaatgaaatcatcaaaagaagctgcagaactaactcttttaaatgcagaacaagatgccgttgatttacgtggtaaagcagaaattgaagcagaacacatccgtaaagcagcggaacgtgaaagtaaagctcaccaaaaagaattacttttagaagcaaaagaagaggctagaaaatatcgtgaagagatcgaaaaggaatttaaatctgatagacaagagttgaaacagatggaggcacgtttaacagatcgtgcatcatctcttgatcgtaaagatgaaaatctatctaacaaagaaaaaatgttagatagcaaagaacaaagtctaaccgataaatctagacatattaatgagcgcgaacaggaaattgctactttagaaacaaaaaaagtagaagaattgtcacgcatcgcagagcttagtcaagaagaagctaaagatatcattttagctgataccgaaaaagatttagctcatgatattgcgacacgtattaaagaagcagaacgtgaagtaaaagatcgatcaaacaagatagcaaaagacttgctagcccaagctatgcaacgtttagctggtgaatatgttactgaacaaacaattacaactgttcatctccctgatgataatatgaagggacgtatcattggtcgtgaaggacgtaatattcgtactctggaaagtttgacaggtattgatgttatcatagatgatacgccagaagtcgttgtcttatcaggtttcgaccccattcgtcgtgaaattgctcgtatgactttagaatctttgattcaagatggacgtatccatccagctcgtattgaagagttggttgaaaaaaatcgtttggaaatggatcaacgtatccgtgagtatggtgaggcagcagcttatgagattggtgcaccaaatctgcatcctgatttgataaaaattatgggacgtttgcagttccgtacatcatatggtcaaaatgtacttcgtcattcagttgaagttggtaaacttgcaggtattttggctggagaactaggagaaaatgttgatttagctcgtcgggctggattcctccatgatatggggaaagctattgatcgcgaagttgaaggcagtcacgttgaaattggtatggaatttgctcgtaagtacaaagagcatccgattgttgttaatactattgcaagccaccatggtgatgtagaacctgacagcgttattgcagtaattgttgctgctgcagacgcccttagttcagcacgaccaggtgcgcgtaatgagtcaatggaaaattatatcaaacgtctgcgtgatttagaagaaattgctaatggctttgagggagtgcaaaatgcctttgcacttcaagccggacgtgaaattcgtatcatggtacaacctggtaaagtttctgatgatcaagtagttattatgtcgcataaggtacgtgaaaaaatcgaacaaaacttggattatccaggtaatattaaggtaacagttattcgtgaaatgcgagctgttgattttgcaaaa

SEQ ID NO: 2978 - protein, 535 aa, Streptococcus agalactiae
MFNIILAMVCALIGLIIGYVAISMKMKSSKEAAELTLLNAEQDAVDLRGKAEIEAEHIRKAAERESKAHQKELLLEAKEEARKYREEIEKEFKSDRQELKQMEARLTDRASSLDRKDENLSNKEKMLDSKEQSLTDKSRHINEREQEIATLETKKVEELSRIAELSQEEAKDIILADTEKDLAHDIATRIKEAEREVKDRSNKIAKDLLAQAMQRLAGEYVTEQTITTVHLPDDNMKGRIIGREGRNIRTLESLTGIDVIIDDTPEVVVLSGFDPIRREIARMTLESLIQDGRIHPARIEELVEKNRLEMDQRIREYGEAAAYEIGAPNLHPDLIKIMGRLQFRTSYGQNVLRHSVEVGKLAGILAGELGENVDLARRAGFLHDMGKAIDREVEGSHVEIGMEFARKYKEHPIVVNTIASHHGDVEPDSVIAVIVAAADALSSARPGARNESMENYIKRLRDLEEIANGFEGVQNAFALQAGREIRIMVQPGKVSDDQVVIMSHKVREKIEQNLDYPGNIKVTVIREMRAVDFAK

SEQ ID NO: 2979 - DNA, 1605 bp, Streptococcus pyogenes
atggttaatattattttattaattgtttctgccctcattggtttaatattaggttatgcacttatttcgattagactcaagtctgcgaaggaagctgcagagttgactcttttaaacgctgaacaagaagctgttgatattcgtggcaaagcagaagtagatgctgaacacatcaaaaaaacagctaaacgtgaaagtaaagcaaatcgtaaagaattacttttagaagcaaaagaagaggcaagaaaatatcgtgaagagattgaacaagaatttaagtctgaaagacaagagcttaaacaactcgagacacgcttagcggagcgctccttaactcttgaccgtaaagatgaaaacctatcaagtaaagaaaaggtactagatagtaaagaacaaagtctgaccgataaatctaaacacattgatgagcggcaacttcaagtggaaaaacttgaagaggagaaaaaagcagaactggaaaaagttgctgcgatgacgattgcagaagcgcgtgaagtgattttaatggagacggaaaacaaactgacccatgaaattgcgacgcgcattcgagatgccgaacgtgacatcaaggaccgaacagttaaaacagccaaggacttgttagcgcaagccatgcaacgccttgctggtgagtatgtgactgaacaaactattaccagtgtccatctcccagacgacaacatgaagggccgaattattggacgtgaaggccgtaatattcgtactttagagagcttgactggcattgacgttattattgacgatactcctgaagttgttatcttatcaggatttgatcctattcgacgtgaaattgctcgtatgaccttggaatctctgattgctgatggtcgcatccatccagctcgtatcgaggaattggttgagaaaaatcgtcttgaaatggataatcgtattcgtgagtacggtgaagctgcagcctatgagattggtgcaccaaaccttcatcctgatttgattaaaatcatgggacgcctgcaattccgtacctcgtttggtcaaaatgtcctacgtcactctgttgaggttggtaagttagctggtattttagctggtgagttaggtgaaaatgttgctcttgcccgccgtgctggtttcttgcatgatatgggtaaagctattgaccgtgaggttgaaggcagtcacgttgagattggaatggaatttgcacgtaaatacaaagaacatccagttgttgtcaacactattgctagccaccacggagatgtggagccagattctgtgatcgctgtgctagtagctgcagcagacgctctcagttcggctcgtccaggcgctcgtaatgagtcaatggagaattacatcaagcgtcttcgtgatttagaagaaatcgcgacaagttttgatggggtacaaaatagttttgctctacaagctggacgtgagattcgtattatggttcaacctgaaaaaatttcagatgatcaggttgtcattttgtcgcataaagtaagagaaaaaattgaaaacaatctagattacccaggaaatattaaagtaactgttattcgtgagatgagagcggttgattatgccaag

SEQ ID NO: 2980 - protein, 535 aa, Streptococcus pyogenes
MVNIILLIVSALIGLILGYALISIRLKSAKEAAELTLLNAEQEAVDIRGKAEVDAEHIKKTAKRESKANRKELLLEAKEEARKYREEIEQEFKSERQELKQLETRLAERSLTLDRKDENLSSKEKVLDSKEQSLTDKSKHIDERQLQVEKLEEEKKAELEKVAAMTIAEAREVILMETENKLTHEIATRIRDAERDIKDRTVKTAKDLLAQAMQRLAGEYVTEQTITSVHLPDDNMKGRIIGREGRNIRTLESLTGIDVIIDDTPEVVILSGFDPIRREIARMTLESLIADGRIHPARIEELVEKNRLEMDNRIREYGEAAAYEIGAPNLHPDLIKIMGRLQFRTSFGQNVLRHSVEVGKLAGILAGELGENVALARRAGFLHDMGKAIDREVEGSHVEIGMEFARKYKEHPVVVNTIASHHGDVEPDSVIAVLVAAADALSSARPGARNESMENYIKRLRDLEEIATSFDGVQNSFALQAGREIRIMVQPEKISDDQVVILSHKVREKIENNLDYPGNIKVTVIREMRAVDYAK

SEQ ID NO: 2981 - DNA, 147 bp, Streptococcus agalactiae
gtggaagtatccattccggaagtaggttcatctaaaaatagtaattggggcttaccaaccaaagttaaaacaaaagctaaaagtcgtttttgccctccagataaagtctctgtaaattgttgcaagtgcgtatcactccactgtaga

SEQ ID NO: 2982 - protein, 49 aa, Streptococcus agalactiae
MEVSIPEVGSSKNSNWGLPTKVKTKAKSRFCPPDKVSVNCCKCVSLHCR

SEQ ID NO: 2983 - DNA, 714 bp, Streptococcus agalactiae
atgattatagtaaaggagaaccaaatggcaaaagatataattaaggttgatcatatatttaaaagcatcgggcaaaaaacgattttagaagatatatcatttagtatagcttctaaccaatgtgtagcattgattggacctaatggtgcagggaaaacaactctgatgtcaactttgttaggtgatattagtatttcttcaggatcattgacgatttttaatctgcctgcacaccacaataggttaaaatataaggtggccatcttaccacaagaaaatgtattgccctcaaagtttacagtgagagaactcattgatttccaaaggtgtttatttccagaagtgctgccaatgtctctgattttagactatctacagtggagtgatacgcacttgcaacaatttacagagactttatctggagggcaaaaacgacttttagcttttgttttaactttggttggtaagccccaattactatttttagatgaacctacttccggaatggatacttccacacgtcaacgattttgggagctgattgcgacactaaaaaaagaaggtgtcacaattgtctattctagtcattatatcgaagaggtagaacatacagctgataggattttagtacttcataaaggaaagttattacgcgatacaacccccctttgccatgaagcaagaaaaaaccgaaaagttattcaccgttccgct

SEQ ID NO: 2984 - protein, 238 aa, Streptococcus agalactiae
MIIVKENQMAKDIIKVDHIFKSIGQKTILEDISFSIASNQCVALIGPNGAGKTTLMSTLLGDISISSGSLTIFNLPAHHNRLKYKVAILPQENVLPSKFTVRELIDFQRCLFPEVLPMSLILDYLQWSDTHLQQFTETLSGGQKRLLAFVLTLVGKPQLLFLDEPTSGMDTSTRQRFWELIATLKKEGVTIVYSSHYIEEVEHTADRILVLHKGKLLRDTTPLCHEARKNRKVIHRSA

SEQ ID NO: 2985 - DNA, 177 bp, Streptococcus agalactiae
ttgattacagagtgtgaagccaagagtgatagtataacgtttgttactggggaggctgaagctgtatggaaaatactggcagataatggttgtcctattgaagctattgagatgaccaatagaactttgttaaatcgtatttttgagactactaaggaggtaaaacatgagaatctt

SEQ ID NO: 2986 - protein, 59 aa, Streptococcus agalactiae
MITECEAKSDSITFVTGEAEAVWKILADNGCPIEAIEMTNRTLLNRIFETTKEVKHENL

SEQ ID NO: 2987 - DNA, 738 bp, Streptococcus agalactiae
atgagaatctttaaagcattattgaaaatggaatttcttttgacaaaacgtcaacttgccaatctcattatggctataggtatgccagtggctttttttctatttttttcaggatttatgggcgaaggactcactaaagccatcgaagctatctacgttcgtaattatatgataacgatggcaggattctcaagtcttagctttgctttttttacttttccattttctatgaaagatgatcaactctcaaaccgaatgcaattattaagacactcaccagtaccaatgtggcaatattatctagcaaaaattattcgtattttattttactattgcctagcaataactgttgttttcctaactgggcatattttaaggcaagttagtatgccaatagaacaatggatgcagagctttttattgctattaggaggagcaacatgttttattccttttggattgctcgtctcctactttaaaaatactgaactaatgtcaatggtagccaatatttgttatatgtcattagctgttcttggtggcatgtggatgccaattacaatgttcccaaaatggttgcaagctttatcaaagttaacccctacttaccatttgactcaagttatccttagtccgtttgctaatagttttgctggtttttctcttattattctgataggctatggtattataatgttagttatcgcttatctactatctcagaagaggcattcaatt

SEQ ID NO: 2988 - protein, 246 aa, Streptococcus agalactiae
MRIFKALLKMEFLLTKRQLANLIMAIGMPVAFFLFFSGFMGEGLTKAIEAIYVRNYMITMAGFSSLSFAFFTFPFSMKDDQLSNRMQLLRHSPVPMWQYYLAKIIRILFYYCLAITVVFLTGHILRQVSMPIEQWMQSFLLLLGGATCFIPFGLLVSYFKNTELMSMVANICYMSLAVLGGMWMPITMFPKWLQALSKLTPTYHLTQVILSPFANSFAGFSLIILIGYGIIMLVIAYLLSQKRHSI

SEQ ID NO: 2989 - DNA, 1083 bp, Streptococcus agalactiae
ttgaaaaataaaaaaaataactatgatttaatgtattttattccgttagtatttttgatttaccccataggagggattctctattatcactaccctttttggactttattttttacgctagcttttgtaggagcatatttatactctgttattatcaggggcgaatcaaagtatcacatgattgcctggtctacaatgttgacatatattttctacatgacaatttttataaatagtggtttcatctggtatatttactttctgagtaatttactcgtctatcgctttagagataaattgaagtcttttagattcattagttttgcttgtactctagccacagtggtatttttatgcttctttaaggcatcagactttggtgatagaatcatgtttctaattgttcctattttttgtatcggttacatgtggattgctattgaaaatagaaatagcgaagaacaaagagaaaaaattgcagagcaaaatcagtatatcaatattttgtcagctgaaaatgaacgtaaccgtatagggcgtgatttgcatgatagtttaggacatacatttgctatgatgacactaaagacagaactagcgttaaagttgttagaaaaaaggaactatgataaggtacaaaaagaactatcagaattaaatcatattagtcatcaatcgatgagtgaggtccgtcaaattgtttctaacctcaagtatcgtacagtagtggaagaaattgatgagttgtaccgcttgtttcaattatctaacattaagttaacagttgttaataagttagagacgtcacaactaagtccagtaacacaatctacaatcacaatgatattaaaggaattatccaataatattgttaagcatgctgaagctgatagcgtggagttgagtttagtaaggcaaggtgctactataaatattgagatgattgataatggttgtggttttacaaaccttgacggagatgagttgcatagtattcaagagagattaactatcgttgaagggacactaacgattttgtcccgaagtaaaccaactcatattcaggtggtattgaaagaggta

SEQ ID NO: 2990 - protein, 361 aa, Streptococcus agalactiae
MKNKKNNYDLMYFIPLVFLIYPIGGILYYHYPFWTLFFTLAFVGAYLYSVIIRGESKYHMIAWSTMLTYIFYMTIFINSGFIWYIYFLSNLLVYRFRDKLKSFRFISFACTLATVVFLCFFKASDFGDRIMFLIVPIFCIGYMWIAIENRNSEEQREKIAEQNQYINILSAENERNRIGRDLHDSLGHTFAMMTLKTELALKLLEKRNYDKVQKELSELNHISHQSMSEVRQIVSNLKYRTVVEEIDELYRLFQLSNIKLTVVNKLETSQLSPVTQSTITMILKELSNNIVKHAEADSVELSLVRQGATINIEMIDNGCGFTNLDGDELHSIQERLTIVEGTLTILSRSKPTHIQVVLKEV

SEQ ID NO: 2991 - DNA, 1002 bp, Streptococcus pyogenes
atgaaaaaacgttactatgctcttgtttggctctactcaaccattaccattttatctattgtttttgtggtcatggataatttaggaatcacttttaactaccttcgcaatcatttatggcaggtcgaacgtctagggttttcgattttattgttgattgtttctgtgactttattattgttgttattgtggattattatggatgataacagtaagcgtaacatcaaccaaaatctaaaatatattctcaataatcgacgactctatctagatgagacatcagaaatcaatactaatttaagtcgactttctaaaaaaatgtctcacctgactgctaacatgcaaaagaaagaaagtgcttatattcttgatagccaagaagttgtaaaacaagagcgcaaacgaattgcaagagatttacatgacacagtcagtcaagagctattcgcttcgtcattgattttatcaggaatttcgatgagtttggaacaactggacaaaacacaattacaaacacagttaacaacggttgaagcaatgttgcaaaatgctcaaaatgatctacgcattctccttttgcatcttagacctaccgagctagctaatcggactttatctgagggccttcatatgattcttaaggaattaacagataaaagtgatattgaagtcatttataaggaaaccattgctcagcttcctaaaacaatggaagataatctttttagaattgcccaagaattcattagcaacacgttaaaacatgctaaagctagtcgaattgaagtttatctcaatcaaacctcaacagaattacaattgaagatgattgatgatggtgtaggatttgatatggatcaggtaagggatttgagttatggtctgaagaatattgaagaccgtgtcaatgatttagcaggaaacctacatttaattagtcaaaaaggcaaaggagtttccatggatattagactgccgatagtgaagggagatgacgatgag

SEQ ID NO: 2992 - protein, 334 aa, Streptococcus pyogenes
MKKRYYALVWLYSTITILSIVFVVMDNLGITFNYLRNHLWQVERLGFSILLLIVSVTLLLLLLWIIMDDNSKRNINQNLKYILNNRRLYLDETSEINTNLSRLSKKMSHLTANMQKKESAYILDSQEVVKQERKRIARDLHDTVSQELFASSLILSGISMSLEQLDKTQLQTQLTTVEAMLQNAQNDLRILLLHLRPTELANRTLSEGLHMILKELTDKSDIEVIYKETIAQLPKTMEDNLFRIAQEFISNTLKHAKASRIEVYLNQTSTELQLKMIDDGVGFDMDQVRDLSYGLKNIEDRVNDLAGNLHLISQKGKGVSMDIRLPIVKGDDDE

SEQ ID NO: 2993 - DNA, 462 bp, Streptococcus agalactiae
atgaaattacttgttgctgaggatcagtccatgctacgagatgctatgtgccaattacttttgatggaagaaagtgtttctactattgatcaagctggaaatggtggagaagctattgccattttatccaataaagccatagatgttgcaatattggatgttgagatgccgatattatcaggtttagatgtcttagagtgggttagaaaataccagaatgttaaggtcataattgtaacaacctttaagcggtcaggttatttccaaagggctattcgttcaaatgtagatgcttatgttttgaaagaccgctcagtagctgatttgatgaaaacgattcaaaaagttttatctgggggtaaagaatattcgcctgaattaatggaaaacgttatatctaatcctttgagtgagcaagaaataaaaattctttccctaattgctcaagggaagaccagcaaa

SEQ ID NO: 2994 - protein, 154 aa, Streptococcus agalactiae
MKLLVAEDQSMLRDAMCQLLLMEESVSTIDQAGNGGEAIAILSNKAIDVAILDVEMPILSGLDVLEWVRKYQNVKVIIVTTFKRSGYFQRAIRSNVDAYVLKDRSVADLMKTIQKVLSGGKEYSPELMENVISNPLSEQEIKILSLIAQGKTSK

SEQ ID NO: 2995 - DNA, 645 bp, Streptococcus pyogenes
atgacgatgagtaagataaaagtgatattggtcgatgatcatgaaatggtccgcatgggactcaagagttttttgaatttacaagctgatattgatgtcgttggtgaggcctctaatggacgtgaaggggttgatttggcattggctttgaagccagatgttttggttatggatctagtgatgccagagttaggcggtgttgaggcaactttagaagtcctaaaaaaatggaaagaggctaaggtacttgtgttaacttcctatctagataatgaaaagatataccctgtcattgatgcaggagcgaagggttatatgttaaaaacatcgagtgcggctgaaattttaaatgccattcgcaaggtttcaaagggagagttagctattgaaacagaagttgacaaaaaaattaaggcgcatgatcaacaccctgacttgcatgaggaactaacagcgcgtgagtatgacattttacaccttttagctaaagggtatgataatcagaccatcgctgatgaactctttatttccttaaaaaccgtcaaaacacatgtgtccaatattctagccaagttagaagttggtgaccgaacccaagcggttgtctatgcttttcgacatcatttagtcccccaagacgataat

SEQ ID NO: 2996 - protein, 215 aa, Streptococcus pyogenes
MTMSKIKVILVDDHEMVRMGLKSFLNLQADIDVVGEASNGREGVDLALALKPDVLVMDLVMPELGGVEATLEVLKKWKEAKVLVLTSYLDNEKIYPVIDAGAKGYMLKTSSAAEILNAIRKVSKGELAIETEVDKKIKAHDQHPDLHEELTAREYDILHLLAKGYDNQTIADELFISLKTVKTHVSNILAKLEVGDRTQAVVYAFRHHLVPQDDN

SEQ ID NO: 2997 - DNA, 702 bp, Streptococcus agalactiae
atgcaaaaatttaaagaacgttttgatacgcttagtgatgcaattttggccattgctatgacgattttagttttggagataaaaactccggctacgatgggtgatattggtgactttacacggaacataggtttatttattgttagctttgttgttgtttttaatttttggtacgaaagggcacaaaatagcctagatgctcaaaagactaatgatgaaattatagctcttgatatcattgaacacctaggtatttgtttgattcctctctttactaaatttatgatttcttttgagaatcataattttgctgttatggcttatggactcttaacgttattagttggtctcacatcagacattattcggattcgtttggcaagttatgatttagtgaccattcctagtgaattgaaagagcgggttataaaagtcatgacaacttttgccattcgttcagttgtggttcgctttatcatcattatcctcgcttattttctacctgaggtagggatatttgcatatttagtcataccgctctttatgttttggcgtcgctctagagcaggaaaatactatgctaaaaagggcattgaggcaccatcttatatcaagctttttatccaaattggagagagagctcctgaggattttactaattcaagtagtggaataggtggggtaaaaagactctataaaaaa

SEQ ID NO: 2998 - protein, 234 aa, Streptococcus agalactiae
MQKFKERFDTLSDAILAIAMTILVLEIKTPATMGDIGDFTRNIGLFIVSFVVVFNFWYERAQNSLDAQKTNDEIIALDIIEHLGICLIPLFTKFMISFENHNFAVMAYGLLTLLVGLTSDIIRIRLASYDLVTIPSELKERVIKVMTTFAIRSVVVRFIIIILAYFLPEVGIFAYLVIPLFMFWRRSRAGKYYAKKGIEAPSYIKLFIQIGERAPEDFTNSSSGIGGVKRLYKK

SEQ ID NO: 2999 - DNA, 627 bp, Streptococcus agalactiae
atgtctgaacgtggtttgctaattgttttctcaggaccatctggtgttggtaaggggacagttaggcaagaaattttttcaacccctgaccataaatttgattattccgtttcaatgactactcgtccacaacgcccaggcgaagttgatggagttgattatttcttccgtacacgtgaagagtttgaagcgttgattaaagaaggtcaaatgcttgagtatgcggagtatgttggtaactactatggaactcctttaagttatgtcaacgagactttagacaaagggattgatgtttttcttgaaatagaagttcagggagcgcttcaagttaaatcgaaggttccggacggtgttttcattttcttaacaccaccagatttagaggaattagaagagcgtttagtaggacgtgggacagatagtccagaagtgattgcccaacgtattgaacgtgccaaagaagaaattgctttgatgagggagtatgactatgctgttgtcaatgatcaagtgtcattagcagcagaacgtgttaaacgtgtcattgaagcagaacattatcgtgtggatcgtgttattgggcgttataccaacatggtcaaagaaactgataaaaaattaagt

SEQ ID NO: 3000 - protein, 209 aa, Streptococcus agalactiae [sequence omitted]

SEQ ID NO: 3001 - DNA, 633 bp, Streptococcus pyogenes
atgtctgaacgcggtttgttaatcgtcttttctggcccttcaggtgtcggaaaaggaacggtaagacaagaaattttttcaacgccagatcataaatttgaatattcggtttcaatgacgactcgtccgcaaagaccgggcgaggttgatggggttgattatttcttccgcacacgtgaagaatttgaagaactcattaaaactggtcaaatgctagagtatgctgaatatgttggtaattactatggcacccctttaacttatgttaatgagactcttgataagggaattgatgtctttttagaaattgaagttcaaggagctcttcaggttaagtcaaaagtaccagatggtgtttttgtttttttaacaccaccagatttagatgaattagaagaccgcctggttggtcgtggtacagatagtcaagaagtcatagctcaacgtattgaaagagcaaaagaagaaattgcccttatgcgcgaatacgattatgcagttgttaatgatgaagttgccttggcagctgagcgggttaagcgtatcattgagacagaacactttcgtgtggagcgcgtgattggtcgttatgataaaatgattaaaataacaaaaaattcctttaaagctaaa

SEQ ID NO: 3002 - protein, 211 aa, Streptococcus pyogenes
MSERGLLIVFSGPSGVGKGTVRQEIFSTPDHKFEYSVSMTTRPQRPGEVDGVDYFFRTREEFEELIKTGQMLEYAEYVGNYYGTPLTYVNETLDKGIDVFLEIEVQGALQVKSKVPDGVFVFLTPPDLDELEDRLVGRGTDSQEVIAQRIERAKEEIALMREYDYAVVNDEVALAAERVKRIIETEHFRVERVIGRYDKMIKITKNSFKAK

SEQ ID NO: 3003 - DNA, 312 bp, Streptococcus agalactiae
atgatgttaaaaccttctatcgacactttgttggataaagttccttcaaaatattctttagttattttacaagctaagcgtgctcatgaattggaagctggtgagaaagccactcaagattttaaatctgtgaaatcaacacttcgcgctttagaagaaatcgagtcaggtaatgttgtaattcacccagatccatcagcaaaacgtgcctcagttcgcgctcgtatcgaagctgaacgccttgctaaagaagaagaagaacgtaaaatcaaagagcaaattgctaaagaaaaagaagacggcgaaaaaatt

SEQ ID NO: 3004 - protein, 104 aa, Streptococcus agalactiae
MMLKPSIDTLLDKVPSKYSLVILQAKRAHELEAGEKATQDFKSVKSTLRALEEIESGNVVIHPDPSAKRASVRARIEAERLAKEEEERKIKEQIAKEKEDGEKI

SEQ ID NO: 3005 - DNA, 315 bp, Streptococcus pyogenes
atgatgttaaaaccttccattgataccttattagataaagtaccatccaagtattcacttgtgattttacaagccaaacgtgcccatgaactagaagctggtgccactccaactcaagaatttaaatcagtgaagtcaacacttcaggcacttgaagaaattgaatcaggaaacgttgtgattcacccagatccttcagctaaacgtgaagctgtccgtgctaagattgaggcagaacgcttggccaaagaggaagaggaacgtaaaatcaaagaacaaattgccaaagaaaaagaagaagaaggagaaaaaatc

SEQ ID NO: 3006 - protein, 105 aa, Streptococcus pyogenes
MMLKPSIDTLLDKVPSKYSLVILQAKRAHELEAGATPTQEFKSVKSTLQALEEIESGNVVIHPDPSAKREAVRAKIEAERLAKEEEERKIKEQIAKEKEEEGEKI

SEQ ID NO: 3007 - DNA, 2388 bp, Streptococcus agalactiae
atggcaagaaaattagcacaggttattgttgatattcctctgatgcagacagataaaccattttcgtatgccattcctaaagatttggaagatttggtacaagtaggagtacgcgttcatgttccttttggaagaggaaatcgtcttttgcaaggctttgttgtcggtttcagagatgatgatgaattagagactaaggatattgcggaggtcctagattttgaacctgttttaaatcaggaacaactagacttagctgatcagatgcgccatactgtcttttcttataaaatatctattttgaaatcaatgttaccaagtcttttgaattcgcaatatgataaactcttgttagcaacagacacattaccatcagaagatagagaagatctatttggtcataaaacggaaattgtcttttcaagtttgtcttctcaagatgccaaaaaagcaggcagattaattcaaaaaggtttcatagaagttcaatatttagccaaagataagaaaacaataaaaacagaaaagatttacaaaatcaacagaactctgttagaaaagagccaaatagcagcaagagcgaaaaagagactggagttgaaagaattcctgttagaaaatcctcaaccagggcgcctcacagctttaaacaaacaattttcatctcctgtggttaattttttcagagaagaaggaatcattgaagtcattgaaaaagaagctagtagatctgataattattttaaaggaatcctaaaaacggattttttggatttaaatcaggaacaagctaaagtagttaaaatagttgttgaccaaattggtaaggaacagaataaacccttcttgttggaggggattacagggtctggtaagacagaggtatatcttcatatcattgataacgttttaaagttgggaaaaacagcgattgttctcgttccagaaatttctttaactccccagatgacgaatcgttttatttctcgttttggaaagcaagttgctattatgcactcgggcttgtcagaaggtgaaaaatttgatgagtggcgaaagataaaatcaggtcaagctaaagttgtcgttggagctcgttcagcaatttttgctcctttggaaaatatcggagccatcattatagatgaggaacatgaatcaacttataagcaagaatctaacccaaggtatcatgcgcgcgatgtggccttgctacgtgcagaatattataaagctgtgttactaatgggatcagcaactccaagtatcgaaagccgagctagagctagtcgggatgtttataaatttttagaattaaaacatcgtgctaatcctaaagcacgtattcctcaggttgaaattattgattttagaaattttattggtcaacaagaagttagtaatttcacatcatatttactagataaaatccgagatagattagataagaaagagcaagtggttcttatgctcaatcgtagaggttattctagttttattatgtgtcgagactgcggctacgttgatcaatgtcctaattgtgacatttctctgactttacatatggctacaaagaccatgaattgtcattattgtgggtttgaaaagcctattccaagaacatgtccaaattgcaatagtaaaagtatctcttactatggtactggaacccaaaaagcttatgaagaacttttgaaagttatcccagacgcaaagattttacggatggatgttgatacgacaaggcaaaaaggcggtcatgagtctattttgaagcgtttcggaaatcatgaagctgatattttattgggaacacagatgattgctaagggattggattttccaaatgttactttagttggagtactaaatgcagatacttctctgaatttacctgattttcgatcatcagagcgaacttttcagctattaactcaagtggctggacgtgctgggcgtgctgaaaaagaaggagaggttgtcattcaaacttataatcctaatcattatgctattcaattagcccaaaagcaagattttgaagctttttatcaatatgaaatgaatatccgtcgacaacttggttatcctccttattattttacagttggtttaacattatcgcataaagatgaagagtggttaatacgaaaatcttatgaagtattaagtttattgaagcaaggctttagtgataaagtaaagttgttaggtccaacgccaaaaccaattgcaagaacacataacctttatcactaccaaattattatcaagtatcgatttgaggacaaccttgaacttgttttgaatcgcttattagacatgactcaagacaaggagaatagagatcttcgcttagcaatagaccacgaaccgcaaaatatgatg

SEQ ID NO: 3008 - protein, 796 aa, Streptococcus agalactiae
MARKLAQVIVDIPLMQTDKPFSYAIPKDLEDLVQVGVRVHVPFGRGNRLLQGFVVGFRDDDELETKDIAEVLDFEPVLNQEQLDLADQMRHTVFSYKISILKSMLPSLLNSQYDKLLLATDTLPSEDREDLFGHKTEIVFSSLSSQDAKKAGRLIQKGFIEVQYLAKDKKTIKTEKIYKINRTLLEKSQIAARAKKRLELKEFLLENPQPGRLTALNKQFSSPVVNFFREEGIIEVIEKEASRSDNYFKGILKTDFLDLNQEQAKVVKIVVDQIGKEQNKPFLLEGITGSGKTEVYLHIIDNVLKLGKTAIVLVPEISLTPQMTNRFISRFGKQVAIMHSGLSEGEKFDEWRKIKSGQAKVVVGARSAIFAPLENIGAIIIDEEHESTYKQESNPRYHARDVALLRAEYYKAVLLMGSATPSIESRARASRDVYKFLELKHRANPKARIPQVEIIDFRNFIGQQEVSNFTSYLLDKIRDRLDKKEQVVLMLNRRGYSSFIMCRDCGYVDQCPNCDISLTLHMATKTMNCHYCGFEKPIPRTCPNCNSKSISYYGTGTQKAYEELLKVIPDAKILRMDVDTTRQKGGHESILKRFGNHEADILLGTQMIAKGLDFPNVTLVGVLNADTSLNLPDFRSSERTFQLLTQVAGRAGRAEKEGEVVIQTYNPNHYAIQLAQKQDFEAFYQYEMNIRRQLGYPPYYFTVGLTLSHKDEEWLIRKSYEVLSLLKQGFSDKVKLLGPTPKPIARTHNLYHYQIIIKYRFEDNLELVLNRLLDMTQDKENRDLRLAIDHEPQNMM

SEQ ID NO: 3009 - DNA, 2409 bp, Streptococcus pyogenes
atgtccatgacagaaaaggagaagcaaatggaaaaagtagctcatgtgattgtagatattccattgatgcaaacggacaagccattttcttatggtattccaaaagagttagtttctctcgtgcagcttggttctcgtgtgcatgttccttttggaaaagggaatcgtttgttgcaaggctttattattggttttggccaagaagattcaagctctcttaaactgattcagaccgttttagatcctgagccagtcctaaaccaagagcaattgacccttgctgatcagcttcgaaaaacagttttttcttataaaatcacgctcttaaaagcaatgattcctaatcttcttaactctaactatgataaagtgctaaggccagagtcaggtctaaaaaagtctgatagggactttctttttgaaggaaaaccatctgtcttatattctaccttagaccgcgagaaggaaaaaatagctcttaagggcatacaagctgggcatattactgttagttatttagccaaagacaagaaaaacctaaagacagaaaaatattatcacgtcgacttagacgccttagcggtacatcccatctctagtcgtgccaaaaagcgtcaattattaaaagactatctgctaacccatacgaaggaagctaaacttgcaacgctttatcaagccttttctagagatgtggtggcttactttgtgacaaatcacttaattcgtattgacgaacgtccaattgatcgcagtgagtcctattttgaccagatcaaaccatcttcttttttaaccttaaatgaacagcaggcgtcagctgttactgaaattgttgaacaaattgggaaaccgagtaaaccttttttgattgaagggattacaggttcgggtaagacagaagtttatcttcatatcatcgaagcggttttaaaacaggataagacagccattgttttagtgccagaaatttcgttgactcctcagatgacctctcgttttatttcccgtttcggaaagcaagtggctattatgcattcaggcttatcagatggtgaaaagtttgatgagtggcgcaagataaaaacaggacaggctaaggttgtggttggtgcccgctctgctattttctccccactagagcggattggtgcaattattatcgatgaggagcatgaatcaacctataaacaagaaagcaaccctagataccatgccagagaggttgccctgctcagagctaaacaccatcaagcagttgtggttatgggctctgctacgccaagtattgaaagccgagcaagggctagtaagggtgtctatcattttattcaattaacgcaaagagcaaaccctcttgctaagattccagaagtaacgattgttgattttcgtgattatattggacagcaagcagttagtaattttaccccatatttgattgataagattaaagaacgtttggttaaaaaagaacaagttgtcttaatgttaaatagacgtggttattctagttttgtgatgtgtcgggactgtggttatgtggacaaatgtcccaactgtgatatctctttaacccttcacatggatactaaaactatgaattgccattactgtgggtttcaaaaacctatcccaattacttgtcctgagtgtcatagcaatagtatccgctattatggcactggaactcaaaaagcttttgatgaattgcaaggggttattccagaagctaagatcttgagaatggatgttgacaccacacgaaaaaaaagaagtcacaaaaccatactagatagttttggtcgccaggaagcagatattttgttagggacgcaaatgattgccaaaggactggattttccaaatgtgactttagttggggtactaaatgcagatacttccttaaatttgccggattttcgagcgtcagaaaaaacgtttcaattgttaacacaggttgctggtcgggcaggccgtgcccataagccaggagaggtcttgattcaaacttataatcccgatcactatgctattcaattagctaagaaacaagattttgaagctttttaccgttatgagatgtctattcgtcatcaaatggcttatcccccttactactttacagtgggtattacgctttcgcatcgtttagaagcatcggttgtaaaaaaagcttatcaagttacagaactgctaaagagtcacttatcggataatattaaaatattaggaccgactcctaagccaattgctagaacacacaatttataccactatcaaattttgttaaaataccgttttgaagataacctagaagagacgctcaatcgtattcttgattggagtcaagaagcagataatcgtcatttaaaactaattattgattgtgaaccgcaacaattttta

SEQ ID NO: 3010 - protein, 803 aa, Streptococcus pyogenes
MSMTEKEKQMEKVAHVIVDIPLMQTDKPFSYGIPKELVSLVQLGSRVHVPFGKGNRLLQGFIIGFGQEDSSSLKLIQTVLDPEPVLNQEQLTLADQLRKTVFSYKITLLKAMIPNLLNSNYDKVLRPESGLKKSDRDFLFEGKPSVLYSTLDREKEKIALKGIQAGHITVSYLAKDKKNLKTEKYYHVDLDALAVHPISSRAKKRQLLKDYLLTHTKEAKLATLYQAFSRDVVAYFVTNHLIRIDERPIDRSESYFDQIKPSSFLTLNEQQASAVTEIVEQIGKPSKPFLIEGITGSGKTEVYLHIIEAVLKQDKTAIVLVPEISLTPQMTSRFISRFGKQVAIMHSGLSDGEKFDEWRKIKTGQAKVVVGARSAIFSPLERIGAIIIDEEHESTYKQESNPRYHAREVALLRAKHHQAVVVMGSATPSIESRARASKGVYHFIQLTQRANPLAKIPEVTIVDFRDYIGQQAVSNFTPYLIDKIKERLVKKEQVVLMLNRRGYSSFVMCRDCGYVDKCPNCDISLTLHMDTKTMNCHYCGFQKPIPITCPECHSNSIRYYGTGTQKAFDELQGVIPEAKILRMDVDTTRKKRSHKTILDSFGRQEADILLGTQMIAKGLDFPNVTLVGVLNADTSLNLPDFRASEKTFQLLTQVAGRAGRAHKPGEVLIQTYNPDHYAIQLAKKQDFEAFYRYEMSIRHQMAYPPYYFTVGITLSHRLEASVVKKAYQVTELLKSHLSDNIKILGPTPKPIARTHNLYHYQILLKYRFEDNLEETLNRILDWSQEADNRHLKLIIDCEPQQFL

SEQ ID NO: 3011 - DNA, 933 bp, Streptococcus agalactiae
atgacaaaattattattcatggggacccctgatttttcagcgacggttttaaaaggtattttagcagatggtaagtatgatgttttagctgttgtgacgcaaccagatcgtgctgtaggtcgtaaaaaagaaattaaaatgacccctgtaaaagaagtggccttggaaaacaacattcctgtgtatcagccggaaaaactatctggaagtccagaattagaacaactaatgaccctaggtgcagatggtattgtaacagctgcttttggtcaattcttaccaacaaagcttttggaatcggtaggttttgcaattaatgtacatgcttctctattgccaaaatatcgtggtggggcaccaattcattatgccattattaatggcgaaaaagaagctggggttaccatcatggaaatggttgcaaagatggatgcaggggatatggtatcaaaagcttccgttgagataactgatgaagacaatgtagggacaatgtttgatagactcgccgttgttggtcgtgaccttttattagatacgcttccaggttatctatcaggtgatattaagccgataccacaaaatgaagaagaggtaagtttttctcctaatattagtccagatgaagagagaattgattggaataaatcatcgcgcgacatttttaaccatgttcgagggatgtatccatggccagttgcacatacccttttggagggaaatcgttttaaactttatgaagtaacaatgtcagaaggaaagggctcaccgggtcaagtgatcgctaagacaaagaactcattgacagtagcaactggtgacggagctattgaactcaaatcagttcaaccagcagggaaacctcgtatggatataaaagactttttaaatggtgttggtcgtaatttagaaataggagataaatttggcgaa

SEQ ID NO: 3012 - protein, 311 aa, Streptococcus agalactiae
MTKLLFMGTPDFSATVLKGILADGKYDVLAVVTQPDRAVGRKKEIKMTPVKEVALENNIPVYQPEKLSGSPELEQLMTLGADGIVTAAFGQFLPTKLLESVGFAINVHASLLPKYRGGAPIHYAIINGEKEAGVTIMEMVAKMDAGDMVSKASVEITDEDNVGTMFDRLAVVGRDLLLDTLPGYLSGDIKPIPQNEEEVSFSPNISPDEERIDWNKSSRDIFNHVRGMYPWPVAHTLLEGNRFKLYEVTMSEGKGSPGQVIAKTKNSLTVATGDGAIELKSVQPAGKPRMDIKDFLNGVGRNLEIGDKFGE

SEQ ID NO: 3013 - DNA, 933 bp, Streptococcus pyogenes
atgataaaattattatttatgggaactccccaattttcagcaactgtattgaagggcttgctagataatcctgcctatgagattttaggagtggttactcagcctgatcgagctgttggacgcaaaaaagatattaaggtaacacctgtaaagcaattagctcttgagcatggaatatcaatctatcagccggaaaaattatcaggctctcaagaactcattgagattatgggacttggtgcagatggtattattacagcagcatttggccaatttttaccaacaatattacttgattcagtttcatttgctattaatgtacatgcatcattgttacctaaatatcgaggtggagcacctatccattatgctattatgaatggagataaagaggccggcgttactattatggaaatgattaaagaaatggatgcaggtgacatggtcgctaaagcaagcactccaattcttgaaaccgataatgtaggtactctttttgagaaattagccatcattggtcgagacttacttttggatagtttgccagcttatctttctggagaattaaaacctattcctcaagatcacagccaagctactttttcacctaatatctctccagaacatgaaaaattagattggacaatgtctaatcaagaagtgttcaatcatattcgaggtatgaacccttggccggtagcgcatacgtttttagaggggcaacgtttaaaaatttacgaagctcaactagctgaaggagagggattacctggacaagttgttgtcaaaaccaaaaaatctttggtaatagctactggacaaggtgctttgtccttgatcgttgtgcaaccggctggtaaacctaaaatgtcaataatagactttttaaacggcattggtagaaaacttgaagtaggggacatcattggcaga

SEQ ID NO: 3014 - protein, 311 aa, Streptococcus pyogenes
MIKLLFMGTPQFSATVLKGLLDNPAYEILGVVTQPDRAVGRKKDIKVTPVKQLALEHGISIYQPEKLSGSQELIEIMGLGADGIITAAFGQFLPTILLDSVSFAINVHASLLPKYRGGAPIHYAIMNGDKEAGVTIMEMIKEMDAGDMVAKASTPILETDNVGTLFEKLAIIGRDLLLDSLPAYLSGELKPIPQDHSQATFSPNISPEHEKLDWTMSNQEVFNHIRGMNPWPVAHTFLEGQRLKIYEAQLAEGEGLPGQVVVKTKKSLVIATGQGALSLIVVQPAGKPKMSIIDFLNGIGRKLEVGDIIGR

SEQ ID NO: 3015 - DNA, 1320 bp, Streptococcus agalactiae
ttggcgaatgattggaaaaagagtgcgcgtggtttagctttaatgactttagaggaagtttttgataaaggagcttattctaatatcgcacttaataagagtttaaaaaaatctagactatcagataaagatcgtgccttagtaacagaaattgtctatggaactgtggctagaaaaataacgctagaatggtatctatcacactttatagttgatcgtgataagcttgaattatgggtatatcatctcttgctactgagcctttatcaactactctatctggacaacatcccagatcacgctattgttaatgatgctgtcactattgctaagaatcgaggcaataaaaagggtgctgaaaagttaattaatgccgttttacgaagagtaagttcggagacgctccctgaaattgcatcaataaaacgccaaaacaaacgttactctgttgcttattccatgccagtgtggctcgtaaaaaaattaattgaccaatatggtgagacaagagctttagctattatggagagtttatttgagcgaaataaagccagtcttcgtgtgactgacttatcgcaaaaacaaactatcaaagaaactttaaatgttagagattcacatattgcagagacagctttagttgcagactcaggaaattttgcatcgacatcatttttccaagatggcctcattactatccaagatgaatctagtcaattagttgctccaacactcaaagtctcaggtaatgaccaagtattggatgcatgtagtgcaccaggaggaaaaacaagtcatatcgcctcatatttgactacaggggcagtaactgctttagatttgtatgatcataaattggaattggttatggaaaatgcaaaacgcctaggtctgtcagataagataaaaactaaaaagttagatgcaagtaaagctcatgagtattttcttgaggatacttttgacaaaattttagtagacgcaccttgttcaggtatcgggctaattcgccgtaaaccagatattaagtacaataaagctaatcaagactttgaagcactccaagagattcaattgtctatcctatctagcgtttgtcaaacgctacgtaaaggtggtataataacctatagcacttgtaccatttttgaggaagaaaattttcaagttattgaaaaattcttagaaaaccaccccaattttgagcaagtagaactgagtcatacacaagaggatattgtaaagagaggctgtattagtataagccctgaacaatatcatacagatggcttttttattggacaagtcaaacgtatcttg

SEQ ID NO: 3016 - protein, 440 aa, Streptococcus agalactiae
MANDWKKSARGLALMTLEEVFDKGAYSNIALNKSLKKSRLSDKDRALVTEIVYGTVARKITLEWYLSHFIVDRDKLELWVYHLLLLSLYQLLYLDNIPDHAIVNDAVTIAKNRGNKKGAEKLINAVLRRVSSETLPEIASIKRQNKRYSVAYSMPVWLVKKLIDQYGETRALAIMESLFERNKASLRVTDLSQKQTIKETLNVRDSHIAETALVADSGNFASTSFFQDGLITIQDESSQLVAPTLKVSGNDQVLDACSAPGGKTSHIASYLTTGAVTALDLYDHKLELVMENAKRLGLSDKIKTKKLDASKAHEYFLEDTFDKILVDAPCSGIGLIRRKPDIKYNKANQDFEALQEIQLSILSSVCQTLRKGGIITYSTCTIFEEENFQVIEKFLENHPNFEQVELSHTQEDIVKRGCISISPEQYHTDGFFIGQVKRIL

SEQ ID NO: 3017 - DNA, 1320 bp, Streptococcus pyogenes
ttggcagataattggaaaaaaagtacgcgaggcaaagccctccttgtcattgaagctatttttgatcagggggcttacacaaacatagcgcttaatcagcaactaagcaataaagctttatctgctaaggacagagctctattaactgagattgtatatggtaccgtttcacgtaaaattagcttggaatggtatttagcccattatgtcaaagaccgagataaattggacaaatgggtttattatctccttatgctcagtctttatcaactgacttatttagataagttaccagcgcatgccattgttaacgatgcggttggtattgccaaaaatcgtggcaataaaaaaggtgcagagaagtttgtcaatgctattttacgtcaattcaccagccatcctctcccagatatggaaacaattaagcgtcgaaataagtattattcggtcaagtattcactgcctgtttggttggttaaaaagttagaagaccaatttggttctgacagatcagtggccatcatggaaagtttatttgtgcgtagtaaggctagtattcgcgtgacagaccctttgaagctagaggaagttgctgaggctttagatgcagaacgttcccttttatcagcaactggtttaaccaaagcgtcaggtcattttgcagccagtgattatttcacaaatggggacatcactattcaagatgaaagcagtcagcttgtagctcctactttaaacattgacggtgacgacataattcttgatgcgtgtagcgctccagggggcaagacctctcatatagcatcttacttaaaaacaggtaaagttattgccttagatctctatgatcataaactagagttggtgaaggaaaatgctaaccgcttaggagttgctgataacattgagacaagaaaactagatgccagagaggttcatcgtcattttgaaaaggatagctttgataagattttggtggatgctccttgctcaggaattggtttgattcgtcgaaaacccgatatcaaatataataaagaaagtcaaggtttcaatgctctgcaagctatccagctagagatattgtctagtgtttgtcaaaccttgcgtaaaggtggtataataacatacagtacttgcactatttttgatgaggagaatcgtcaagtcatcgaagcatttttacagagtcatcctaattttgaacaagtaaaactgaaccatacacaagcagatattgtcaaggatggttatcttattatcacaccagaacaataccagactgatggcttctttattggacaagtcagacgagtcttg

SEQ ID NO: 3018 - protein, 440 aa, Streptococcus pyogenes
LADNWKKSTRGKALLVIEAIFDQGAYTNIALNQQLSNKALSAKDRALLTEIVYGTVSRKISLEWYLAHYVKDRDKLDKWVYYLLMLSLYQLTYLDKLPAHAIVNDAVGIAKNRGNKKGAEKFVNAILRQFTSHPLPDMETIKRRNKYYSVKYSLPVWLVKKLEDQFGSDRSVAIMESLFVRSKASIRVTDPLKLEEVAEALDAERSLLSATGLTKASGHFAASDYFTNGDITIQDESSQLVAPTLNIDGDDIILDACSAPGGKTSHIASYLKTGKVIALDLYDHKLELVKENANRLGVADNIETRKLDAREVHRHFEKDSFDKILVDAPCSGIGLIRRKPDIKYNKESQGFNALQAIQLEILSSVCQTLRKGGIITYSTCTIFDEENRQVIEAFLQSHPNFEQVKLNHTQADIVKDGYLIITPEQYQTDGFFIGQVRRVL

SEQ ID NO: 3019 - DNA, 735 bp, Streptococcus agalactiae
atggaaatatctcttttaacagatattgggcaacgtcgttccaataatcaagattttattaatcaatttgaaaataaagccggcgtcccactaatcatcttagcagatggtatgggaggacatcgtgcaggaaatattgctagcgagatgactgtaactgatctaggaagtgattgggcggagacagatttttctgagttatcagaaattcgtgattggatgcttgtctctattgaaacagagaatcgcaaaatatatgaattaggtcagtcagatgattacaaaggtatgggaactaccattgaagcagttgccattgtaggagataatattattttcgcacatgtaggagattcacgtatcggtatcgttcgtcaaggagagtatcatttattgacgagtgatcattctcttgttaatgaattggtaaaagctggccaattaacagaagaagaagctgctagtcatcctcaaaaaaatattattacgcaatcaattggtcaagccaatccagtcgaacctgatttaggagttcatctacttgaagaaggtgactaccttgtagttaatagtgatggactaactaatatgttgagtaatgccgatattgctacagtactaacacaagaaaaaaccttagatgataagaatcaagatttaatcactctagcaaaccatagaggaggtcttgataatatcactgtggcactagtttacgttgaaagtgaggcggtt

SEQ ID NO: 3020 - protein, 245 aa, Streptococcus agalactiae
MEISLLTDIGQRRSNNQDFINQFENKAGVPLIILADGMGGHRAGNIASEMTVTDLGSDWAETDFSELSEIRDWMLVSIETENRKIYELGQSDDYKGMGTTIEAVAIVGDNIIFAHVGDSRIGIVRQGEYHLLTSDHSLVNELVKAGQLTEEEAASHPQKNIITQSIGQANPVEPDLGVHLLEEGDYLVVNSDGLTNMLSNADIATVLTQEKTLDDKNQDLITLANHRGGLDNITVALVYVESEAV

SEQ ID NO: 3021 - DNA, 738 bp, Streptococcus pyogenes
atgaagatttcattaaaaacagacattgggcaaaaacgctcaaacaatcaagattttatcaataagtttgataataaaaaaggcatcactttagtgattttagcagacggtatgggtggccacagagctggaaatattgccagtgagatgacagtcacagacctgggaagagaatgggtaaaaacagacttcacagagttaagtcagattagagattggttatttgaaactatccagtcagaaaatcaacggatttatgatctaggccaatcagaagactttaaaggaatgggaacgactgttgaagcagtagctttagttgaatctagcgccatttatgctcatattggtgattcacggattggtcttgtccatgatgggcattataccttattgaccagtgatcattctttagtgaatgagttggttaaggcaggacagatcacagaagaagaagctgctagccatccacaaagaaatattatcactcaatctattggtcaagcttccccagtagagcctgatttaggagtgagggttttggagccaggggattatcttgtcattaacagtgatggtctaaccaatatgatttcaaatgatgaaattgtgactatcttgggcagtaaggttagtcttgatgaaaaaaaccaagaaatgattgacttagctaacctaagaggaggcctagataatattacaatcgctttggttcataacgaaagtgaggacgtcgaa

SEQ ID NO: 3022 - protein, 246 aa, Streptococcus pyogenes
MKISLKTDIGQKRSNNQDFINKFDNKKGITLVILADGMGGHRAGNIASEMTVTDLGREWVKTDFTELSQIRDWLFETIQSENQRIYDLGQSEDFKGMGTTVEAVALVESSAIYAHIGDSRIGLVHDGHYTLLTSDHSLVNELVKAGQITEEEAASHPQRNIITQSIGQASPVEPDLGVRVLEPGDYLVINSDGLTNMISNDEIVTILGSKVSLDEKNQEMIDLANLRGGLDNITIALVHNESEDVE

SEQ ID NO: 3023 - DNA, 1953 bp, Streptococcus agalactiae
atgattcagattggcaaattatttgctggtcgttatcggatccttaaatcaatcggacgaggtggaatggcggatgtttatctagctcgagatctaattttagataatgaagaggtcgcaataaaagtattgcgaaccaattatcaaacagatcagattgcggttgctcgcttccagagagaagcacgagcaatggctgagctgacacatcctaatattgtcgctattcgtgatataggtgaagaagacggacagcagttcttagtaatggaatatgttgatggattcgatttaaaaaagtatattcaagacaatgcacccctatcaaataatgaagttgttcgaatcatgaatgaagtcctttcagccatgtcactggcacatcagaaaggtatcgtacaccgtgatttaaaacctcaaaatattttattaactaaaaaagggactgtaaaagttacagatttcggtattgcggtagcgtttgctgaaactagtttaacgcaaacgaattctatgttaggtagtgttcattatttatcgccagagcaggcgcgtggttcaaaagcgactgttcagagtgatatttatgccatgggaatcatgctttttgaaatgttaactggccatattccttatgatggggatagtgcagttactattgccctacagcacttccaaaaaccactaccatcaatccttgcagaaaataaaagcgttccacaagctttggaaaacattgtcattaaagcaacagctaaaaagctaacagatcgctataagacaacttatgagatgggacgtgatttatcaactgctctaagctcgacacgtcaccgtgaaccaaaacttgtttttaatgatactgagagtactaagacactacccaaagtaacatctacagtatcatctctaacgacagaacaactgttgcgtaatcaaaaacaggccaaaacaacagaaaaaataactcctgattctgcgagtaacgataaaacgaagtctaaaaagaaggcttctcatcgacttcttggtacaatcatgaaattattctttgcactctgtgttgtaggaataattgtatttgcttataaaattttagtaagtcctacgactattcgtgttccagatgttagcaacaaaacagtagctcaagcaaaaatgacattggaaaattctggattgaaagtaggagctattcgtaatattgagagtgatagtgtttcagaaggacttgtcgtaaaaacagaccctgctgcaggacgttctcgcagagaaggggctaaagttaatctttatattgccactccaaacaagagtttcactctaggtaattataaggaacataattacaaagatatcctcaaagatcttcaaggcaaaggtgttaaaaaatctttaatcaaggttaagcgtaaaattaataatgattatactactggtacaatcttagcacagtcgcttccagaaggaacatcttttaatcctgatggtaataagaaattaacacttacggttgctgttaatgatccaatgattatgcctgatgtaacaggtatgactgttggagaagtaatagaaaccttgacagacctcggattagatgcagataatcttgtcttctatcaaatgcaaaatggcgtttatcaaacagtagtaacacctccatcttcaagtaagatagcaagtcaggatccttattacggaggagaagttggattaaggagaggagataaagttaagctgtatcttcttggttctaaaacaacgaataactcatcatctacgccaatagattcttcggcttcaagctcaacaggaacaactacctcggattctgtaagctcatcaacggatgctagcacttctgatagtagtagcacttctacaagtagttcaacactaccaagtgatagtacaactaatacaggaacagctaacaatccattaactcaa

SEQ ID NO: 3024 - protein, 651 aa, Streptococcus agalactiae
MIQIGKLFAGRYRILKSIGRGGMADVYLARDLILDNEEVAIKVLRTNYQTDQIAVARFQREARAMAELTHPNIVAIRDIGEEDGQQFLVMEYVDGFDLKKYIQDNAPLSNNEVVRIMNEVLSAMSLAHQKGIVHRDLKPQNILLTKKGTVKVTDFGIAVAFAETSLTQTNSMLGSVHYLSPEQARGSKATVQSDIYAMGIMLFEMLTGHIPYDGDSAVTIALQHFQKPLPSILAENKSVPQALENIVIKATAKKLTDRYKTTYEMGRDLSTALSSTRHREPKLVFNDTESTKTLPKVTSTVSSLTTEQLLRNQKQAKTTEKITPDSASNDKTKSKKKASHRLLGTIMKLFFALCVVGIIVFAYKILVSPTTIRVPDVSNKTVAQAKMTLENSGLKVGAIRNIESDSVSEGLVVKTDPAAGRSRREGAKVNLYIATPNKSFTLGNYKEHNYKDILKDLQGKGVKKSLIKVKRKINNDYTTGTILAQSLPEGTSFNPDGNKKLTLTVAVNDPMIMPDVTGMTVGEVIETLTDLGLDADNLVFYQMQNGVYQTVVTPPSSSKIASQDPYYGGEVGLRRGDKVKLYLLGSKTTNNSSSTPIDSSASSSTGTTTSDSVSSSTDASTSDSSSTSTSSSTLPSDSTTNTGTANNPLTQ

SEQ ID NO: 3025 - DNA, 1896 bp, Streptococcus pyogenes
atgattcagattggcaaattatttgctggtcgttatcgcattctgaaatctattggccgcggtggtatggcggatgtttatttagcaaatgacttgatcttggataatgaagacgttgcaatcaaggtcttgcgtaccaattatcaaacagatcaggtagcagttgcgcgtttccaacgagaagcgcgggccatggctgaattgaaccatcccaatattgttgccatccgggatataggtgaagaagacggacagcaatttttagtaatggaatatgtggatggtgctgacctaaagagatacattcaaaatcatgctccattatctaataatgaagtggttagaattatggaagaagtcctttctgctatgactttagcccaccaaaaaggaattgtacacagagatttaaaacctcaaaatatcctactaactaaggagggtgttgtcaaagtaactgatttcggcatcgcagtagcctttgcagaaacaagcttgacacaaactaattcgatgttaggcagtgttcattacttgtctccagaacaggctcgcggctccaaagcgacgattcaaagtgatatttatgcgatggggattatgctctttgagatgttgacaggccatatcccttatgacggcgatagtgctgttacgattgccttgcaacattttcaaaagcctcttccatctattatcgaggagaaccacaatgtgccacaagctttggagaatgttgttattcgagcaacagccaagaaattaagtgatcgttacgggtcaacctttgaaatgagtcgtgacttaatgacggcgcttagttataatcgtagtcgggagcgtaagattatctttgagaatgttgaaagtaccaaacccctccccaaagtggcctcaggtcccaccgcttctgtaaaattgtctccccctaccccaacagtgttaacacaggaaagtcgattagatcaaactaatcaaacagatgctttacagccccccaccaaaaagaaaaaaagtggtcgttttttaggtactttattcaaaattcttttttctttctttattgtaggtgtagcactctttacttatcttatactaactaaaccaacttctgtgaaagttcctaatgtagcaggcactagtcttaaagttgccaaacaagaactgtatgatgttgggctaaaagtgggtaaaatcaggcaaattgagagtgatacggttgctgagggaaatgtagttagaacagatcctaaagcaggaacagctaagaggcaaggctcaagcattacgctttatgtgtcaattggaaacaaaggttttgacatggaaaactacaaaggactagattatcaagaagctatgaatagtttgatagaaacttatggtgttccaaaatcaaaaatcaaaattgagcgcattgtaactaatgaatatcctgaaaatacagtcatcagtcaatcgccaagtgcgggtgataaatttaatccaaacggaaagtctaaaattacgctcagtgttgctgttagtgatacgatcactatgcctatggtaacagaatatagttatgcagatgcagtcaataccttaacagctttaggtatagatgcatctagaataaaagcttatgtgccaagctctagctcagcaacgggctttgtgccaattcattctcctagttctaaagctattgtcagtggtcaatctccttactatggaacgtctttgagtctgtctgataaaggagagattagtctttacctttatccagaagaaacacactcttctagtagctcatcgagttcaacgtcaagttcaaacagttcttcaataaatgatagtactgcaccaggtagcaacactgaattaagcccatcagaaactacttctcaaacacct

SEQ ID NO: 3026 - protein, 632 aa, Streptococcus pyogenes
MIQIGKLFAGRYRILKSIGRGGMADVYLANDLILDNEDVAIKVLRTNYQTDQVAVARFQREARAMAELNHPNIVAIRDIGEEDGQQFLVMEYVDGADLKRYIQNHAPLSNNEVVRIMEEVLSAMTLAHQKGIVHRDLKPQNILLTKEGVVKVTDFGIAVAFAETSLTQTNSMLGSVHYLSPEQARGSKATIQSDIYAMGIMLFEMLTGHIPYDGDSAVTIALQHFQKPLPSIIEENHNVPQALENVVIRATAKKLSDRYGSTFEMSRDLMTALSYNRSRERKIIFENVESTKPLPKVASGPTASVKLSPPTPTVLTQESRLDQTNQTDALQPPTKKKKSGRFLGTLFKILFSFFIVGVALFTYLILTKPTSVKVPNVAGTSLKVAKQELYDVGLKVGKIRQIESDTVAEGNVVRTDPKAGTAKRQGSSITLYVSIGNKGFDMENYKGLDYQEAMNSLIETYGVPKSKIKIERIVTNEYPENTVISQSPSAGDKFNPNGKSKITLSVAVSDTITMPMVTEYSYADAVNTLTALGIDASRIKAYVPSSSSATGFVPIHSPSSKAIVSGQSPYYGTSLSLSDKGEISLYLYPEETHSSSSSSSSTSSSNSSSINDSTAPGSNTELSPSETTSQTP

SEQ ID NO: 3027 - DNA, 693 bp, Streptococcus agalactiae
atgaaaaaatttcagttttttctacttgttgaagccgttgtcttagttatgggattaatgaaaattttatctgatgactggacaagttttatttttattctcgctttgattcttttagccttaagattttataacaacgatagtcgtcataattttctgttaacgacaagtttgttattactatttttaatctttatgcttaacccttacattattgcagccgttgtttttgcagttttgtatgttctaatcaatcatttctcgcaagttaagaaaaaaaatcgttatgctttgattcaatttaagaatcatcaattagatgttaagacaacacgaaaccaatggttaggtactgatcaacacgaaagtgacttttatgcttttgaagatattaatattataagaatctctgggactgatacaattgatttaacaaatgttattgtatctgggcaggataatgttattataattcaaaaagtttttggtgatactaaagtattggttcctttagacgttgccgtaaaggctgatattagttctgtttacggtagtgtacagtactttgattttgaggagtatgatctaagaaatgaatctataaaattgtcacaagaggaagaatattaccttttgaaacgtgtcaaattagttgtaaacactatcgctgggaaagttgaggttagtcgtaaa

SEQ ID NO: 3028 - protein, 231 aa, Streptococcus agalactiae
MKKFQFFLLVEAVVLVMGLMKILSDDWTSFIFILALILLALRFYNNDSRHNFLLTTSLLLLFLIFMLNPYIIAAVVFAVLYVLINHFSQVKKKNRYALIQFKNHQLDVKTTRNQWLGTDQHESDFYAFEDINIIRISGTDTIDLTNVIVSGQDNVIIIQKVFGDTKVLVPLDVAVKADISSVYGSVQYFDFEEYDLRNESIKLSQEEEYYLLKRVKLVVNTIAGKVEVSRK

SEQ ID NO: 3029 - DNA, 684 bp, Streptococcus pyogenes
atgcaattttccaggaattctgataaaatacaaagaaataaggggaaactaatgaaaaaatttcaattctttttacttatcgagtgtatactgctagctatgggtatcatgacaatcttggataatgatttatcaagttttatcctaattctagttcttatcttattagcattacgcttttataaccaagatagccgcaataattttttactaactgtcagtttattgtttctttttttaattttcatgcttaatccctacattatcatggctgttcttttggggatagtttacattttcattaaccatttttcacaagtcaaaaagaagaatcgctttgccttgattcgtttcaaggaagaaaagattgaagtgaacaataccaagcatcaatggattggtactgctaattatgaaagtgattattattgttttgatgacattaacatcattcgaatctcaggaaatgacacggttgacttaaccaatgttattgtgacaggaatggataatatcattgtgatacgtaaaatttttggaaatacgactatattggtacctattgatgtcactgttactttagatgttagttccatatacggaagcgttgatttttttagatgtcagcaatatgatttgcgcaacgaatctattaagtttaaagaaacggataaccaatccctt

SEQ ID NO: 3030 - protein, 228 aa, Streptococcus pyogenes
MQFSRNSDKIQRNKGKLMKKFQFFLLIECILLAMGIMTILDNDLSSFILILVLILLALRFYNQDSRNNFLLTVSLLFLFLIFMLNPYIIMAVLLGIVYIFINHFSQVKKKNRFALIRFKEEKIEVNNTKHQWIGTANYESDYYCFDDINIIRISGNDTVDLTNVIVTGMDNIIVIRKIFGNTTILVPIDVTVTLDVSSIYGSVDFFRCQQYDLRNESIKFKETDNQSL

SEQ ID NO: 3031 - DNA, 1017 bp, Streptococcus agalactiae
atgaaaaagcaccactactttttagctttcttctatggaagtgtcattatatttgccatttgttttgtcattattgatagtttgggtgttaatttggtgcacctctatcaaacgtctcgtttgtggctgattgaacaattgattttctctattttctttctatctttagcggtaactatccttttattgctaacttggtttttattagatgataatagtaaacgtcaaattaaccataatttacgtcgcattttaaataaccaatcaataaatgttaccgatgatggtactgaaatatcgaccaatattcaacggctctctaaaaaaatgaatttaatgacagcaagtctacaatctaaggaaaatagtcgtattttaaaaagccaagaaattgtgaaacaagaacgtaagcgtattgcacgtgatttacacgacacagttagtcaggatttgttcgctgcttccatggttttgtcagggatagcacagaatgtttctcagctagacgttgatcaggttggctcgcaattattagcagtagaagaaatgcttcagcatgcacaaaatgatttgagaattctgctacttcatttgaggccagttgaattagaaaataagaccctatctgaaggattcagaatgatattgaaagaattgaccgataagagcgacattgaagttgtttatcatgaatcaattctaaccttacccaaaaagattgaagacaatatttttagaattggtcaagaatttatcagtaatactttaaagcattcacaagccagtcgtctcgaagtttaccttaatcaaacagagaatgaattgcagttaaaaatgattgataatggtattggatttgatatggattctgtctatgatttaagttatgggttaaaaaatattgaagatcgagtagaagatttagcaggaaatttacagcttctcagtcagcctggtaaaggagttgctatggatataagattacctttagtaaatcagagtgaggataaaaatgga

SEQ ID NO: 3032 - protein, 339 aa, Streptococcus agalactiae
MKKHHYFLAFFYGSVIIFAICFVIIDSLGVNLVHLYQTSRLWLIEQLIFSIFFLSLAVTILLLLTWFLLDDNSKRQINHNLRRILNNQSINVTDDGTEISTNIQRLSKKMNLMTASLQSKENSRILKSQEIVKQERKRIARDLHDTVSQDLFAASMVLSGIAQNVSQLDVDQVGSQLLAVEEMLQHAQNDLRILLLHLRPVELENKTLSEGFRMILKELTDKSDIEVVYHESILTLPKKIEDNIFRIGQEFISNTLKHSQASRLEVYLNQTENELQLKMIDNGIGFDMDSVYDLSYGLKNIEDRVEDLAGNLQLLSQPGKGVAMDIRLPLVNQSEDKNG

SEQ ID NO: 3033 - DNA, 651 bp, Streptococcus agalactiae
gtgaggataaaaatggataaaataaaaattgtacttgttgatgaccatgagatggttcgtctcggtttaaaaagttttttaaacttacaagctgatgttgaagtaataggtgaggcctcaaatggtttagaaggcataaaaaaagcactggagttacgtccagacgttgttgttatggacttagtaatgcctgaaatggacggtgtagaagcaaccttagcattattgaaggattggccagaagctgccattttagtcttaacatcttacttggataatgaaaaaatttaccctgttattgaagcaggtgccaaaggctatatgttaaagacctcaagcgcagcagagattcttaatgccattcgtaaagtttcaaggggagaacaagctattgaaaatgaagtagataagaaaattaaggctcatgataaatgtccagctttacatgagggcttaacagcaagggaacgtgatatccttaatttattagccaaaggttatgacaatcaaaggattgctgatgaattatttatctcgttaaagactgttaaaactcatgtttctaatattttgggaaaactaaatgtagcagatcgaactcaagcagttgtctatgctttccaacaccatttggtaccacaagatgatgaa

SEQ ID NO: 3034 - protein, 217 aa, Streptococcus agalactiae
MRIKMDKIKIVLVDDHEMVRLGLKSFLNLQADVEVIGEASNGLEGIKKALELRPDVVVMDLVMPEMDGVEATLALLKDWPEAAILVLTSYLDNEKIYPVIEAGAKGYMLKTSSAAEILNAIRKVSRGEQAIENEVDKKIKAHDKCPALHEGLTARERDILNLLAKGYDNQRIADELFISLKTVKTHVSNILGKLNVADRTQAVVYAFQHHLVPQDDE

SEQ ID NO: 3035 - DNA, 1398 bp, Streptococcus agalactiae
atggacgcaaaaactaaatataaagcaaaaaaaataaaggcagtgttttttgatattgatgacacgcttcgtgttaaagatacaggttatatgccaccatcaatcttaaaagtttttaaagctttgaaagataaaggaatcgttgtaggtattgcttcaggaagagcacgatatggcgttccaaaagaagttcaagatttaaatgccgattattgtgtaaaattaaatggagcttacgttaaggacaaggataagaatattatcttccatcgtcctattccagctgaatatgtagagcaatataagaaatgggcggacactgttggtattaagtacggtttagctggtcgtcatgaggcagttttatcagatcgtgatgatttggtaaatgatgcgattgatattgtgtattctgatctcgaagttaatccagatttcaataaagaacatgatatttatcagatgtggacatttgaagataaaggagatagccttcatctacctgaaccgttagctgaacatcttcgcttgatacgttggcatgatcattcttcagatgttgtgttaaaaggaacatcgaaggctttaggtgtttctaaagttgttgaacatttgggcttaaagccagagaatatcttggttttcggagatgagctcaatgatttagaactctttgattatgctggactagctgtggcgatgggagtgtcacacccagaagctcaaaaaaaagcagattttatcacaaaaaaagtagaagaagatggcattttgtatgccctggaggaactaggtttgatagaaaaagaattaacatttccacaagtagatattgaaaatacagaaggtcctgtggctgtcattaaaacaaatcacggggatatgactgtaaaactcttcccggatcatgctcctaaaacggtagcaaactttattggtttagctaaacaaggttattatgatggtattatcttccatcgtattattccagattttatgattcagggtggtgatccaactggtacaggtatgggtggtgaatctatctatggggaaagttttgaagacgaattttccgaggaattatataatgttcgcggagctctttcaatggctaatgctggaccaaatacgaatggcagccaatttttcatcgtccaaaatacaaaaattccttatgcgaaaaaggaattagagcgaggtggttggccaacaccaattgctgagttgtatgctggacaaggtggtacaccgcatctagatcgtcgccacagtgtatttggacaattagtagaccaaagttcttttgaggtacttgatgagattgcggcagtagagactggttctcaagacaaaccattggaagatgttgttattttaacgattgaggttaaagaa

SEQ ID NO: 3036 - protein, 466 aa, Streptococcus agalactiae
MDAKTKYKAKKIKAVFFDIDDTLRVKDTGYMPPSILKVFKALKDKGIVVGIASGRARYGVPKEVQDLNADYCVKLNGAYVKDKDKNIIFHRPIPAEYVEQYKKWADTVGIKYGLAGRHEAVLSDRDDLVNDAIDIVYSDLEVNPDFNKEHDIYQMWTFEDKGDSLHLPEPLAEHLRLIRWHDHSSDVVLKGTSKALGVSKVVEHLGLKPENILVFGDELNDLELFDYAGLAVAMGVSHPEAQKKADFITKKVEEDGILYALEELGLIEKELTFPQVDIENTEGPVAVIKTNHGDMTVKLFPDHAPKTVANFIGLAKQGYYDGIIFHRIIPDFMIQGGDPTGTGMGGESIYGESFEDEFSEELYNVRGALSMANAGPNTNGSQFFIVQNTKIPYAKKELERGGWPTPIAELYAGQGGTPHLDRRHSVFGQLVDQSSFEVLDEIAAVETGSQDKPLEDVVILTIEVKE

SEQ ID NO: 3037 - DNA, 1410 bp, Streptococcus pyogenes
ttggaggaaagtatggacgcaaaactaaaatacaaagctaaaaaaatcaaaatggtgttctttgatattgatgataccttgagggtcaaagatacgggttatatgcctgagtcgattcaaagagtatttaaggctttgaaggcaaaaggcatcttggttggtattgcttcaggtcgcgctcggtacggtgttccacaagaagttcaagatttacatgctgactattgtgtcaaattaaatggagcttatgtcaaagacgatgctaaaactattattttccaagctccgattccagcagatgttgttgtggcctataaaaaatgggcggatgatatgggcattttttatggaatggcgggtcgtcatgaagcggtgttgtccgctcgaaatgacatgattagcaatgctattgataatgtctacgctcaactagaggtctgtccggattataatgagtatcatgatgtttaccagatgtggactttcgaggacaagggagatggcttgcagttgcctgctgaattagcagagcaccttcgtttggtcagatggcacgataactcatcagatgttgtcttgaaaggtacgtcaaaagcgctaggtgtttcaaaagtagttgaccatttaggattaaaacctgaaaatattttggtttttggagatgaactcaatgacctagagttatttgactatgctggtatcagtattgcaatgggagtatcacatccattactgcaagaaaaagcagattttatcacaaaaaaagttgaagaagatggcattttatatgccttggaggaattaggattgattgacaaagaattacagtttccacaattggatttgccaaaccataaaggaccaaaagcaaccattaaaacaaaccatggcgatatgaccctggtcttgttcccagatcatgctcctaaaacagtagccaatttcttaggtttggctaaagaagggtactatgatgggattatcttccaccgtattattcctgaatttatgattcaagggggcgatccaacaggaacaggaatgtgtggacaatccatctatggtgaaagttttgaagatgaattttcggatgaactctataatctccgtggggccttgtcgatggctaatgcgggaccaaatactaacggcagtcagttctttattgttcaaaatagtaagattccttatgccaaaaaagaactagaacgtggtggttggccggctccaattgcagcttcttacgctgcaaatggtggaactcctcaccttgatcgtcgtcatacggtctttggtcagcttgtggacgaaacttcattccaagttttggatttgattgctggcgttgaaactggcgcacaggataaacctaaagaagacgttatcattgaaacaatcgaggtatttgac

SEQ ID NO: 3038 - protein, 470 aa, Streptococcus pyogenes
LEESMDAKLKYKAKKIKMVFFDIDDTLRVKDTGYMPESIQRVFKALKAKGILVGIASGRARYGVPQEVQDLHADYCVKLNGAYVKDDAKTIIFQAPIPADVVVAYKKWADDMGIFYGMAGRHEAVLSARNDMISNAIDNVYAQLEVCPDYNEYHDVYQMWTFEDKGDGLQLPAELAEHLRLVRWHDNSSDVVLKGTSKALGVSKVVDHLGLKPENILVFGDELNDLELFDYAGISIAMGVSHPLLQEKADFITKKVEEDGILYALEELGLIDKELQFPQLDLPNHKGPKATIKTNHGDMTLVLFPDHAPKTVANFLGLAKEGYYDGIIFHRIIPEFMIQGGDPTGTGMCGQSIYGESFEDEFSDELYNLRGALSMANAGPNTNGSQFFIVQNSKIPYAKKELERGGWPAPIAASYAANGGTPHLDRRHTVFGQLVDETSFQVLDLIAGVETGAQDKPKEDVIIETIEVFD

SEQ ID NO: 3039 - DNA, 372 bp, Streptococcus agalactiae
ttgaggttaaagaataaaatgaagattggcgataagttaaagggaacagtcactggcattaggccttatggagcctttgtttctcttgaggatggtaggactggacttatccatatttctgaaattaaaacaggttacattgataatatttatgatgttcttagtgtaggtgatgaagtctatgttcaggttatagatgtagatgaatttacacaaaaagcaagtttatcgcttcggacccttgaagaagagagacatcatattcagcatcgtcatcgattttctaacaatcgtcttaagataggtttcaaaccacttgaggaaaatttacctagttgggttgaggaaggtctagcctacttgaataataaa

SEQ ID NO: 3040 - protein, 124 aa, Streptococcus agalactiae
MRLKNKMKIGDKLKGTVTGIRPYGAFVSLEDGRTGLIHISEIKTGYIDNIYDVLSVGDEVYVQVIDVDEFTQKASLSLRTLEEERHHIQHRHRFSNNRLKIGFKPLEENLPSWVEEGLAYLNNK

SEQ ID NO: 3041 - DNA, 375 bp, Streptococcus pyogenes
atgaaaattggcgacaaactgcatggcaccatcactgggattaaaccatacggagcctttgttgcccttgaaaatgggacaacaggtctcattcatatttcagaaataaaaacgggatttattgacgatattgatcaattattggctataggcaaccaggttttagtacaagtaattgatattgatgaatatagtaaaaagccaagtttatctatgcggaccttagcagaagaaaaacagcattttttccatcgtcatcgttattccaacagtcggcacaagattggctttaggccacttgaagagcagttacctcagtggattgaagaaagcctgcagtttttaaaaaagaacactaaaaagagtctggaacct

SEQ ID NO: 3042 - protein, 125 aa, Streptococcus pyogenes
MKIGDKLHGTITGIKPYGAFVALENGTTGLIHISEIKTGFIDDIDQLLAIGNQVLVQVIDIDEYSKKPSLSMRTLAEEKQHFFHRHRYSNSRHKIGFRPLEEQLPQWIEESLQFLKKNTKKSLEP

SEQ ID NO: 3043 - DNA, 774 bp, Streptococcus agalactiae
atgacaaatgaaaaaggtattgtattcaacattcaacattttagtattcacgatggtccaggtattcgaacaaccgttttcttaaagggttgtcctcttagatgtccttggtgtgctaatcccgagtcgcaaaaaatggttccagaaacaatgagagatgccattactaatgaaagcgtcatcgtgggcgaagaaaaatcggttgatgatattattgaagaagttttaaaagatattgatttttacgaagaatctggtgggggcataacgctatctggcggtgaaatatttgcacaatttgaatttgccaaggcaattttaaaacgtgctaaatcactgggaatccacacggctattgaaacaactgcttatactagacatgaacaattcatagatcttatccaatacgttgattttatttacaccgatttaaaacattacaatagcctcaaacaccaagaaaagacgatggttaagaatgcttcaatcatcaaaaacattcattatgcttttgccaacggtaaaacgattgtgctacgtattcctgtcatacctaattttaacgattcattagaagatgctgaagaatttgcttgtttatttgatcgcctagatatccgtcaagtgcaactcttacctttccaccaatttgggcaaaacaaatatcaattacttaatcgtcaatatgaaatggaagagatcgctgcactacacccagaggatctactcgattatcaagctatttttagcaagtataatattcactgctacttt

SEQ ID NO: 3044 - protein, 258 aa, Streptococcus agalactiae
MTNEKGIVFNIQHFSIHDGPGIRTTVFLKGCPLRCPWCANPESQKMVPETMRDAITNESVIVGEEKSVDDIIEEVLKDIDFYEESGGGITLSGGEIFAQFEFAKAILKRAKSLGIHTAIETTAYTRHEQFIDLIQYVDFIYTDLKHYNSLKHQEKTMVKNASIIKNIHYAFANGKTIVLRIPVIPNFNDSLEDAEEFACLFDRLDIRQVQLLPFHQFGQNKYQLLNRQYEMEEIAALHPEDLLDYQAIFSKYNIHCYF

SEQ ID NO: 3045 - DNA, 771 bp, Streptococcus pyogenes
atgactgatcgcggtattgttttcaacatccaacattttagtattcatgacggtcctggtattcggacaaccgtttttttaaaaggttgccccttgagatgtccatggtgtgccaatcccgaatcccaacaaaaagcgcctgagcagatgttaacaagtgatgggcttaatactaaaatagttggagaggaaaaaaccgtggacgaggtgatcgaagaagtccttaaagaccttgatttctacgaagagtcaggtgggggcatgaccctgtcagggggggaaatctttgctcagtttgactttgccttagccctgttaaaagcagccaaagcagcaggtcttcacaccgcaattgaaaccaccgcctttgccaaacacgagcaatttgtcacccttgttgactacgtggactttatctataccgatttgaaacattataatcagctcagacaccaaaaagtgactggggttcgtaatgacttgattatcaagaatattcattatgcctttcaagctggaaaagaaatcgtcttgcgcatccctgttattccccaatttaatgattccctagacgatgctaaagccttctcagagctctttaatcagcttgagattgaccaagtgcaactgttacctttccatcaatttggagaaaacaagtacaaacttctaggtagggagtatgagatggctgaggtcaaggcttatcatcccgaagatttagcagactatcaggctgttttcctcaaccataatattcattgctatttt

SEQ ID NO: 3046 - protein, 257 aa, Streptococcus pyogenes
MTDRGIVFNIQHFSIHDGPGIRTTVFLKGCPLRCPWCANPESQQKAPEQMLTSDGLNTKIVGEEKTVDEVIEEVLKDLDFYEESGGGMTLSGGEIFAQFDFALALLKAAKAAGLHTAIETTAFAKHEQFVTLVDYVDFIYTDLKHYNQLRHQKVTGVRNDLIIKNIHYAFQAGKEIVLRIPVIPQFNDSLDDAKAFSELFNQLEIDQVQLLPFHQFGENKYKLLGREYEMAEVKAYHPEDLADYQAVFLNHNIHCYF

SEQ ID NO: 3047 - DNA, 534 bp, Streptococcus agalactiae
atgaatagattagaaaatattattagtttagtatcccagtaccaaaaaatagatgttaatacactctcggagttgttgcaagtttctaaagtaacgatacgtaaagatttagataaactagaaggcaaagggcttttgcatagagagcacggttatgcagttttaaacagtggggatgaccttaatgttaggttatcttttaaccataaaactaaaaaagaaattgctgccttagctgcaaatatggtgtctgacaatgacactatcttaatagaatcaggctctacttgtgctcttttagcagaaaatatctgtcagacaaagcgaaatgtcactattttgaccaactcttgctttattgctaactatttacgagagtatgattcatgccaaattgtcttacttggtggtgagtatcaatcaagttcacaggttacggtaggtcctctcttgaaaaagatgatttcactttttcatgtctcgttagcttttgttgggactgatggttttgatccmaaaactaggatttatggg

SEQ ID NO: 3048 - protein, 178 aa, Streptococcus agalactiae
MNRLENIISLVSQYQKIDVNTLSELLQVSKVTIRKDLDKLEGKGLLHREHGYAVLNSGDDLNVRLSFNHKTKKEIAALAANMVSDNDTILIESGSTCALLAENICQTKRNVTILTNSCFIANYLREYDSCQIVLLGGEYQSSSQVTVGPLLKKMISLFHVSLAFVGTDGFDPKTRIYG

SEQ ID NO: 3049 - DNA, 747 bp, Streptococcus pyogenes
atgatgaatcgattagaacgtattattcaactggtttcccagaagaaaaaaatagatgttaacagtttatcagagcaattagacgtttcgaaagtaaccattcgaaaagaccttgataagcttgaaagtaagggcttgttgcgacgggaacatggctatgcggtgctaaacagtggcgatgacctcaatgtacgcttgtcctacaattacaacataaagcgacggattgcagaaaaagcagctgaattggtacaagacaacgataccattatgattgaatctggctcaacctgtgcccttttggcagaagtgctttgccagaccaaacgaaatattaaagtcattaccaattcgtgcttcattgccaactacattcgtcaatatagtagctgtcaaatcattttactgggcggttattaccagcccaattcagaggtgactgttggtcctttattgaaagaaatgatatccctttttcatgtcaatcgtgtctttgttggaacagacggtttcaacaaagatcttggctttatgggcaaggacatgatgcgctcagaaggggtgcgttacatggcagatgctgctgaggaagtggtgattctgaccgattccagcaagttttcaaaaaccagtctggtacaccagttgtcattagctgatgtcaatcgcgtcattacagaccaagcactagacaagcaaacacaagagttattaagtgctagtggtcttgttcttgattttgtttct

SEQ ID NO: 3050 - protein, 249 aa, Streptococcus pyogenes
MMNRLERIIQLVSQKKKIDVNSLSEQLDVSKVTIRKDLDKLESKGLLRREHGYAVLNSGDDLNVRLSYNYNIKRRIAEKAAELVQDNDTIMIESGSTCALLAEVLCQTKRNIKVITNSCFIANYIRQYSSCQIILLGGYYQPNSEVTVGPLLKEMISLFHVNRVFVGTDGFNKDLGFMGKDMMRSEGVRYMADAAEEVVILTDSSKFSKTSLVHQLSLADVNRVITDQALDKQTQELLSASGLVLDFVS

SEQ ID NO: 3051 - DNA, 246 bp, Streptococcus agalactiae
ttgatccmaaaactaggatttatgggtagagatttaatgcgttctgaagttgcacaagagatggcgaatgctgccgatgaagtcattattttaacagattctagtaagtttaatcagactgcattggtggaacagcttccgttgtcaactgtatcacaagttattacagataaacatccaaattcggaaattgctaatttgttccaagaagcagagattaccattcaatctttattacaagtacca

SEQ ID NO: 3052 - protein, 82 aa, Streptococcus agalactiae
  MISC_FEATURE (1)..(82): Xaa = Any Amino Acid
MIXKLGFMGRDLMRSEVAQEMANAADEVIILTDSSKFNQTALVEQLPLSTVSQVITDKHPNSEIANLFQEAEITIQSLLQVP

SEQ ID NO: 3053 - DNA, 987 bp, Streptococcus agalactiae
atgagtatgaaattagagcgtcaaaaattgttagctaaagtagcttacctttactatatggaagggaaaagccaatctgagattgccaatgaattaggaatttatcgtacaacaataagtcgtatgttagccaaagcgagagaagaaggtcttgttagaatcgaaatttcagattttaatccagaaatttttcagttagaatcctattttaaaagtaaatatcaccttaaagatattgagattgtttcttcgcgaaaagatagcgatacttcagagatagagaaggatttagcacatgtagctgcagctatgattcgaaaaaaaattaaagagaatgacaaggtggggattgcttgggggaggacacttagtaaagtagttgaagcaatgcgtcctcatccggtttctcaagtttcttttgttcctttggccggaggtccaagtcatattaatgcacgctatcacgttaatactctggtttacgaaatgtcaaggcgtttccaaggaagttgtactttcattaatgcaactctagttcaagaaaacgctaatttagcgaaaggaatattaacttcaaaatattttgaggggctaatggataattgggaaaaacttgatgtggcaattgtgggcgttggtggtaaacctaaaagcaatgaacaacagtggcttgaccttttaaatcaagatgattttcaatgcttggatgaagaagcagctgtaggtgaaattacttgtcgtttttttaatcattcaggtgatcctgtgaatcaacatttagctaaaaggacaataggaattaccttagaacaactacagaaagttcctaatagaatagcggttgctcatggcaattataaggctgcggcactcttagccgttttaaaaaaggggtatattaatcatttagttactgatttttccacagccttaaatattttaagattagataaagacacctttgtggatactatatatcaaaagagc

SEQ ID NO: 3054 - protein, 329 aa, Streptococcus agalactiae
MSMKLERQKLLAKVAYLYYMEGKSQSEIANELGIYRTTISRMLAKAREEGLVRIEISDFNPEIFQLESYFKSKYHLKDIEIVSSRKDSDTSEIEKDLAHVAAAMIRKKIKENDKVGIAWGRTLSKVVEAMRPHPVSQVSFVPLAGGPSHINARYHVNTLVYEMSRRFQGSCTFINATLVQENANLAKGILTSKYFEGLMDNWEKLDVAIVGVGGKPKSNEQQWLDLLNQDDFQCLDEEAAVGEITCRFFNHSGDPVNQHLAKRTIGITLEQLQKVPNRIAVAHGNYKAAALLAVLKKGYINHLVTDFSTALNILRLDKDTFVDTIYQKS

SEQ ID NO: 3055 - DNA, 978 bp, Streptococcus pyogenes
atgaaagaagaacgcagacggctccttgccaaggtggcttacttgcattatgttcaaggcaagagccaaaccttgatttcaaaggaaatgaatatctaccgaacaacggtttgtcggatgttagcaaaagccaaggaagaaggcattgttcggattgaaattgccgactatgatgctgatttatttgctttagaagaatacgtgcgacagcagtatggcttggaaaaactagaccttgtgcccaaccaggttgaagataccccaatggataccttgacaaatgttgctaaaacagcagctgaggtttttagacatgttgttaaagatggcgataagatcggtctgtcctggggagcgactctttcttgcttgatggatgagttaaatccaaaagcgatgaaagatgtgtttatttatcctttggcaggaggacctagccatattaatgccaaataccatgtcaataccctggtttaccgcttggctcgcatctttcatggtaatagcgcttttatgaacgctatggtcattcaagaagacaaacacttggctaagggaatcttacaatctaaatactttaacgacattttaacaagctgggaccagttagatcttgccttagtaggaattggtggggagcctaatagccttgagcagagccaatggcgtgatttattaaccagctcagatcatgaccaactcaaatatgaaaaagccgttggtgaagtttgttgccgtttctttgatcaggcaggtcagccagtttacactggcctacaggatcgaactattggtatttcactagaacagttgaggcgtgtccccaaaacaatggctgttgcaacaggtaaacacaaggctaaggcaatattggcagccttaaaagcaggttttatcaattatctagtgacggataaagagaccatgctagctgttttagcgttagatgaagatattgatcttaataacgttcttctt

SEQ ID NO: 3056 - protein, 326 aa, Streptococcus pyogenes
MKEERRRLLAKVAYLHYVQGKSQTLISKEMNIYRTTVCRMLAKAKEEGIVRIEIADYDADLFALEEYVRQQYGLEKLDLVPNQVEDTPMDTLTNVAKTAAEVFRHVVKDGDKIGLSWGATLSCLMDELNPKAMKDVFIYPLAGGPSHINAKYHVNTLVYRLARIFHGNSAFMNAMVIQEDKHLAKGILQSKYFNDILTSWDQLDLALVGIGGEPNSLEQSQWRDLLTSSDHDQLKYEKAVGEVCCRFFDQAGQPVYTGLQDRTIGISLEQLRRVPKTMAVATGKHKAKAILAALKAGFINYLVTDKETMLAVLALDEDIDLNNVLL

SEQ ID NO: 3057 - DNA, 327 bp, Streptococcus agalactiae
gtgcttatggaaatcatagtcgcagaccaaattattatggggctcattttgaatgctggggatgctaaacaacatatctatcaagccttaaaacttgcaaaagaaggaaattttgcagaaagtaagattgaaatagaactagcagatagtgcactcctagaagctcataatcttcaaacacaattccttgcacaagaagcaggagggacaaggacagatatctcagcactctttattcattctcaggatcatttgatgacaagtattactgagattaacttgattaaagaaattattgatttacgccaggaattacatattcaaaaa

SEQ ID NO: 3058 - protein, 109 aa, Streptococcus agalactiae
MLMEIIVADQIIMGLILNAGDAKQHIYQALKLAKEGNFAESKIEIELADSALLEAHNLQTQFLAQEAGGTRTDISALFIHSQDHLMTSITEINLIKEIIDLRQELHIQK

SEQ ID NO: 3059 - DNA, 318 bp, Streptococcus pyogenes
atgcaagttattgtaccagaccaaatcattatgggcttaattttaaatgcaggcgatgccaaacaacatatctaccaagctctgaaatgtgctaaagaggacgattatgccactagtgaaaaagaaatggccttagcagatgatgccttattagaagcccacaatttacagacccagtttcttgcccaagaagctagtggtaataagtcagagattacagctctttttgttcactcacaggatcacttgatgacgaccattacagaaattaatctcatcaaagagattattgaccttcgtaaagaattggcaactaaa

SEQ ID NO: 3060 - protein, 106 aa, Streptococcus pyogenes
MQVIVPDQIIMGLILNAGDAKQHIYQALKCAKEDDYATSEKEMALADDALLEAHNLQTQFLAQEASGNKSEITALFVHSQDHLMTTITEINLIKEIIDLRKELATK

SEQ ID NO: 3061 - DNA, 318 bp, Streptococcus agalactiae
atgataaaaattggtttattctgtgcagcaggtttttcaacaggtatgttagtaaacaatatgaaaatcgcagcggataaagaagggatagaggcacatattgaagcttattcacaaggaaaaattgcagattatgctaaagatttagatgttgcattacttggtccacaagttagctatactctagataaatcaaaatcaatctgtgatgaatacggtgtaccgatagcagttattccaatggcagattatggtatgttggatggtgtaaaagttttgaaacttgctttgagtttattggaaacaagaaaagaggct

SEQ ID NO: 3062 - protein, 106 aa, Streptococcus agalactiae
MIKIGLFCAAGFSTGMLVNNMKIAADKEGIEAHIEAYSQGKIADYAKDLDVALLGPQVSYTLDKSKSICDEYGVPIAVIPMADYGMLDGVKVLKLALSLLETRKEA

SEQ ID NO: 3063 - DNA, 327 bp, Streptococcus pyogenes
atgactaaaaaggagattgacatgattaaaattggattgttttgtgcagcaggattttcaaccggtatgttggtgaacaacatgaaagtagctgctgaaaaaaaaggcattgattgtcagattgaagcctatgctcaagggaaattagcggactatgcaccattacttgatgtggcacttttaggcccacaggttgcctatactctggataaatcagaagctatttgtaaagacaatgatatccctattgcagttatcccaatggctgattatggaatgttagacggcaacaaggtgcttgatttagcccttagccttgttaaagaa

SEQ ID NO: 3064 - protein, 109 aa, Streptococcus pyogenes
MTKKEIDMIKIGLFCAAGFSTGMLVNNMKVAAEKKGIDCQIEAYAQGKLADYAPLLDVALLGPQVAYTLDKSEAICKDNDIPIAVIPMADYGMLDGNKVLDLALSLVKE

SEQ ID NO: 3065 - DNA, 1299 bp, Streptococcus agalactiae
atgtcaaagtttgatagtcagaaaataattactccgattatgaagtttgtcaatatgcgagggattattgcactcaaagatggcatgctagcaattctaccactaacagttgttgggagtctctttttaatattagggcagcttccatttaaaggtcttaatcaagccatagctaatgtttttggaccagaatggacagaaccatttatgcaagtttattcaggaacttttgcgattatgggcttgatttcctgttttgcaattgcttatgcttatgctaaaaatagtagtgtagaaccgttacctgctggcgttttatcactttcgtctttctttattttaatgaaatcatcttatattcctgtaaaaggagaagcaatagcggatgctatttctaaggtttggtttggcggtcaggggattattggagcaattattattggcttagtagttggtgctatctatacatggtttatccaacatcatattgttataaaaatgccagagcaagtaccacaggcaatagcaaaacaatttgaagctatgattccagcttttgttatctttcttttatcgatgattgtttatttgattgctaaggtaacaactggaggtacctttattgagatgatttatgatatcattcaagtaccgttgcaaggcttaacaggctcactttatggagcaattgggattgctttctttatttcattcttatggtggtttggtgtccatggccaatctgtggtgaatggtattgtgactgctttgttactatccaatttagatgccaataagtctttattagcagcaaatcgcttaacattagataatggcgctcacattgtaacacagcagtttttggatagtttcttgattttatcgggctcaggaataacttttggactagttattgcgatgctttttgcagcaaaatcaaaacaatacaaggcacttgggaaagtggccgcttttcccgcaattttcaatgttaacgagccaatcgtctttggctttccaatcgtaatgaatcctgtgatgtttctgccttttattttagtaccagttttggcagctttaattgtttatggagctattgcggttggttttatgcaaccattctcaggtgttactttaccatggagtactccagcaattatttctggattcatggtaggtggttggcaaggtgcactcgtccaaatagtcattttagctatctcaactgctgtttacttcccattctttaaaatccaagataatattacttacaaaaatgaatgtgaaatggaaagggga

SEQ ID NO: 3066 - protein, 433 aa, Streptococcus agalactiae
MSKFDSQKIITPIMKFVNMRGIIALKDGMLAILPLTVVGSLFLILGQLPFKGLNQAIANVFGPEWTEPFMQVYSGTFAIMGLISCFAIAYAYAKNSSVEPLPAGVLSLSSFFILMKSSYIPVKGEAIADAISKVWFGGQGIIGAIIIGLVVGAIYTWFIQHHIVIKMPEQVPQAIAKQFEAMIPAFVIFLLSMIVYLIAKVTTGGTFIEMIYDIIQVPLQGLTGSLYGAIGIAFFISFLWWFGVHGQSVVNGIVTALLLSNLDANKSLLAANRLTLDNGAHIVTQQFLDSFLILSGSGITFGLVIAMLFAAKSKQYKALGKVAAFPAIFNVNEPIVFGFPIVMNPVMFLPFILVPVLAALIVYGAIAVGFMQPFSGVTLPWSTPAIISGFMVGGWQGALVQIVILAISTAVYFPFFKIQDNITYKNECEMERG

SEQ ID NO: 3067 - DNA, 2454 bp, Streptococcus agalactiae
atgaccaaacaattactcactcaaaaatatacaaatgatgttcaacaaaattctcaaaagcattttggctatttgacagagcgcatgtattcttatcgcgataaggttcttgataagaaaccattcatagatgcagaacgtgctatcttggtaactgaagcctatcaaaagcatcaggaaaaacctaatgttttaaagagagcttacatgttgcaaaatattttggaaaaaatgacaatctatattgacgatgagacaatgattgtcggtaaccaagcttcatctgataaagatgctcctatttttccagaatacactctagaatttgttgtaaatgaactagacctttttgaaaaacgagatggtgatgtcttttacattacagaagaaaccaaagaacaaattagaaatattgcacctttctgggaaaataataatttacgggctcgtgcgggcgttatgcttccagaagaagttcaagtttatatggagacaggcttctttgggatggaaggtaagatgaattctggggatgctcacttagctgtcaactatcagaagttactagaagaagggcttattggctttgaaaaaaaagcaagaaaagctaaagctgacttagatttaacaaagcctgagagtattgacaaatatcatttctatgattctattttaattacaatagaagctgttaaaacctatgcagagcgttttgctatcctagcaaaaaaacaagctaaaacagcaaatgctaagagacgtcaggaattgttagatatcgctagtatttgtgaacgagtgccctattacccagctgaaacgtttgcagaagccgttcaatcggtttggtttattcagtgtattcttcaaatagaatcaaacggtcattctctatcttatggacgctttgatcaatacatgtatccatatgttaaatctgacttagaagctggacgtgagactgaggattcgatcgttgagcgcctaactaacctatggattaaaacaataactattaataaggttcgtagccaagctcatacgttttcgtctgctggtagtcctctttaccaaaatgtaacgattggaggacaaacacgacataaggaagatgctgttaatcctttatcatttctagtactaaaatcagtcgctcagacacacttaccacagcctaatctaacggttcgttatcatgctaacctagacaagtcattcatgaatgaagctattgaagttatgaaattaggctttggtatgccagcttttaataatgatgaaattattattccatcatttattaaaaaaggagtttccgaagaagatgcctatgattattcagcgattggttgtgtcgaaacagcagttcctgggaaatggggttatcgttgtaccggcatgagctatatcaacttccctaaagtgttattaattacaatgaatgacggtattgacccggcttctgggaagagatttgcgccttcttatgggcatttcacccagatgacctcatataaagaacttaaagaagcttgggacaaaacacttcgttacttaactcgaatgagcgttattgttgaaaatgctattgatattagtctcgaaagagaagtacctgatattctttgttcagctttaactgatgattgtattggacgaggtaagcacttaaaagaaggtggtgcagtatatgactacatatctggtctacaagttggaatcgctaatctttcagactcacttgctgcgcttaaaaaattagtatttgaagaaaaacgcctaaccacattagaagtatggcaagcattgcagagtgattacgcaggtccgcgtggtgaagaaattcgtcaaatgttgatcaatgaagcaccaaaatatggaaatgatgatgactacgcggatagtttagtacgtgagtgttatgatgtttatgttgaagaaattgctaaatatcccaacacacgctatggacgtggaccaatcggtggtattcgctattcaggaacgtcctctatttcagcaaatgtaggccaaggacgaggtactttagcaactccagatggtaggcatgcaggaactccattagctgaaggttgttcaccatctcataatatggacaaaaagggacctacctctgttttgaaatcagtttcgaagttaccaactgatgagattgtcggcggtgtactccttaaccaaaaagtcaaccctcaaaccttggcaaaagaagaagataaacaaaaattaattgccttacttagaacattcttcaatcgccttcatggttaccatatccagtataatgttgtctcacgtgagactttgattgatgctcagaagcaccctgaaaaacaccgcgatttgattgtgcgtgtagcaggttattctgcattctttaatgtcctatctaaggcaactcaagatgatattattgcacgtacagaacatgctctt

SEQ ID NO: 3068 - protein, 818 aa, Streptococcus agalactiae
MTKQLLTQKYTNDVQQNSQKHFGYLTERMYSYRDKVLDKKPFIDAERAILVTEAYQKHQEKPNVLKRAYMLQNILEKMTIYIDDETMIVGNQASSDKDAPIFPEYTLEFVVNELDLFEKRDGDVFYITEETKEQIRNIAPFWENNNLRARAGVMLPEEVQVYMETGFFGMEGKMNSGDAHLAVNYQKLLEEGLIGFEKKARKAKADLDLTKPESIDKYHFYDSILITIEAVKTYAERFAILAKKQAKTANAKRRQELLDIASICERVPYYPAETFAEAVQSVWFIQCILQIESNGHSLSYGRFDQYMYPYVKSDLEAGRETEDSIVERLTNLWIKTITINKVRSQAHTFSSAGSPLYQNVTIGGQTRHKEDAVNPLSFLVLKSVAQTHLPQPNLTVRYHANLDKSFMNEAIEVMKLGFGMPAFNNDEIIIPSFIKKGVSEEDAYDYSAIGCVETAVPGKWGYRCTGMSYINFPKVLLITMNDGIDPASGKRFAPSYGHFTQMTSYKELKEAWDKTLRYLTRMSVIVENAIDISLEREVPDILCSALTDDCIGRGKHLKEGGAVYDYISGLQVGIANLSDSLAALKKLVFEEKRLTTLEVWQALQSDYAGPRGEEIRQMLINEAPKYGNDDDYADSLVRECYDVYVEEIAKYPNTRYGRGPIGGIRYSGTSSISANVGQGRGTLATPDGRHAGTPLAEGCSPSHNMDKKGPTSVLKSVSKLPTDEIVGGVLLNQKVNPQTLAKEEDKQKLIALLRTFFNRLHGYHIQYNVVSRETLIDAQKHPEKHRDLIVRVAGYSAFFNVLSKATQDDIIARTEHAL

SEQ ID NO: 3069 - DNA, 2415 bp, Streptococcus pyogenes
atgactgaaacaaaaagcccttattttggacatttaacagacagaatgactcactatcgtgaagctgtgttagacaagaaaccttatattgatgctgagcgtgctattttagccactgaagcctatcaaaaacaccaaaataagccagcaaacctcaaacgcgcttacatgcttcaaactattttggaaaacatgaccatctatattgaggatgaaagcctcattgctggtaaccaagcctcttcaaacaaggatgcaccgattttcccagaatacactctggaatttgtcctcaacgaacttgatctttttgaaaaacgagatggggatgtcttctacattaccgaagaaaccaagcaacagctccgagacattgccccattctgggaaaacaataacctgcgtgctcgctgcggtgtcttgctaccagaagaagtgcaagtgtacatggaaacaggtttctttggcatggaaggcaagatgaactctggggatgctcatttagcggttaattaccaaaaactcttggagcatggcttaaagggatttgaagaacgggcacgagctgccaaagctgcgcttgatttgaccattcctgaaaacattgacaaataccatttttacgactctgtttttattgtcattgatgcagtcaaaacttatgctaaacgctatgccaagttggctagagaactagcaaaaacggctaaaccagaacgtcaagcagaattgttagacatcgcgcgcatttgtgataaagtaccttacgaaccagcgaaaacctttgcagaggctgtgcaatctgtctggttcattcagtgtattttgcaaattgaatcaaatgggcattccctatcttatggccgctttgaccagtacatgtatccttatgtcaaagctgatttggaggctggccgtgaaacagaagacacaattgttgaacgtttgaccaacctctggattaagaccttgaccattaataaagtacggagccaagcccacaccttctcatcagcaggtagtccactttaccaaaacgtgacaatcggcggtcaaacacgcgataaaaaagatgcggtcaacccactgtcttaccttgtcctacggagtgtggctcaaaccaaattgccacaacctaacttgactgttcgttaccacaaaggcctagacaatacctttatgaacgaatgtatcgaggtcatgaaacttggttttggtatgccagccatgaacaacgatgaaatcatcattccatctttcatcaaaaaaggtgtctcagaagaagatgcttatgattactcagccattggctgtgtggaaacagcagttcctggaaaatggggctaccgttgcacggggatgagttacatcaacttccctaaaatcttgctgattaccatgaatgacgggattgacccagcatcaggcaagcgctttgcaaaaggacacggtcacttcaaagacatgacctcttatgaagaattaaaagcagcatgggatgccaccctgcgcgaaattacccgcatgagcgtcattgttgaaaatgccattgacctcggtcttgaacgtgaagtaccagatattctttgctcagccttgacagatgattgtatcggtcgtggcaagaccttaaaagaaggcggagctgtttacgactatatctcaggccttcaagttggtattgccaacctatcagactccctagcagcgctgaaaaaattagtgtttgaagaaggtcgcttgaccccagaggaactctggaaggcccttgaaagtgactttgctggagaacgcggagaagacatccgccaaatgctcatcaatgacgcaccaaaatatggtaatgatgatgactacgcagatagtttagtcgtcgaagcttacgacacctacattgatgaaattgccaaatacccaaatacccggtatggccgtggcccaatcggaggtatccgctattctgggacatcatcaatctcagccaatgtcggacaaggaaaagggaccttggcgacaccagacggtcgccatgcaggcacaccactagcagaaggctgttcaccagaacacagcatggacaaaaaaggcccgacttcagtattgaaatctgttgctaaattaccaacagatgagattgtcggaggagtgctactcaaccaaaaagttaacccacaaaccctggccaaagaagaagacaaactgaaattaatggccttacttcgtaccttctttaatcgcctacacggttatcatatccagtacaatgtcgtgtcacgtgagaccttgattgatgcccaaaaacatcctgaaaagcaccgcgacctcattgtccgtgttgccggctactcagctttcttcaatgtgctctcaaaagcaacccaagatgacattattgaacgtacagaacacacactt

SEQ ID NO: 3070 - protein, 805 aa, Streptococcus pyogenes
MTETKSPYFGHLTDRMTHYREAVLDKKPYIDAERAILATEAYQKHQNKPANLKRAYMLQTILENMTIYIEDESLIAGNQASSNKDAPIFPEYTLEFVLNELDLFEKRDGDVFYITEETKQQLRDIAPFWENNNLRARCGVLLPEEVQVYMETGFFGMEGKMNSGDAHLAVNYQKLLEHGLKGFEERARAAKAALDLTIPENIDKYHFYDSVFIVIDAVKTYAKRYAKLARELAKTAKPERQAELLDIARICDKVPYEPAKTFAEAVQSVWFIQCILQIESNGHSLSYGRFDQYMYPYVKADLEAGRETEDTIVERLTNLWIKTLTINKVRSQAHTFSSAGSPLYQNVTIGGQTRDKKDAVNPLSYLVLRSVAQTKLPQPNLTVRYHKGLDNTFMNECIEVMKLGFGMPAMNNDEIIIPSFIKKGVSEEDAYDYSAIGCVETAVPGKWGYRCTGMSYINFPKILLITMNDGIDPASGKRFAKGHGHFKDMTSYEELKAAWDATLREITRMSVIVENAIDLGLEREVPDILCSALTDDCIGRGKTLKEGGAVYDYISGLQVGIANLSDSLAALKKLVFEEGRLTPEELWKALESDFAGERGEDIRQMLINDAPKYGNDDDYADSLVVEAYDTYIDEIAKYPNTRYGRGPIGGIRYSGTSSISANVGQGKGTLATPDGRHAGTPLAEGCSPEHSMDKKGPTSVLKSVAKLPTDEIVGGVLLNQKVNPQTLAKEEDKLKLMALLRTFFNRLHGYHIQYNVVSRETLIDAQKHPEKHRDLIVRVAGYSAFFNVLSKATQDDIIERTEHTL

SEQ ID NO: 3071 - DNA, 666 bp, Streptococcus agalactiae
atggaatttttacttgacactttaaatttagaagctataaaaaaatggcatcatatactgccactagcaggtgtaacttcaaatcccaccattgctaagaaagaaggagatatacattttttccaacgcattcgtgatgttcgagaaattattggacgtgaagcaagtttgcatgttcaagtagtggccaaagattatcaaggaatattggatgatgctgctaaaatacgccaagaaacggacgatgacatttatatcaaagtcccagttacgccagatggattagcagcaattaaaacgttaaaagcagaaggttataatattacagccacagcaatatacaccagtatgcaaggtcttttggctatatcagctggagcagactacctagcaccttactttaaccgaatggagaaccttgatattgatgcgacacaagttattaaggaattagcgcaagcaatagagcggacaggttcttctagcaaaattttagcagctagttttaaaaacgcttcacaagtaacgaaggccttatcacagggtgctcaatcaatcaccgcgggaccagatatttttgaatcagtctttgcgatgccatctattgcaaaagctgttaacgactttgcagatgattggaaagccagtcaacactcagaacatatt

SEQ ID NO: 3072 - protein, 222 aa, Streptococcus agalactiae
MEFLLDTLNLEAIKKWHHILPLAGVTSNPTIAKKEGDIHFFQRIRDVREIIGREASLHVQVVAKDYQGILDDAAKIRQETDDDIYIKVPVTPDGLAAIKTLKAEGYNITATAIYTSMQGLLAISAGADYLAPYFNRMENLDIDATQVIKELAQAIERTGSSSKILAASFKNASQVTKALSQGAQSITAGPDIFESVFAMPSIAKAVNDFADDWKASQHSEHI

SEQ ID NO: 3073 - DNA, 666 bp, Streptococcus pyogenes
atggaatacatgttagacactttagatttagaagctattaaaaaatggcatcacattttgcctctcgcaggtgtgacctcaaacccttctattgccaaaaaagaaggtgagattgatttctttgaacggattcgagaagtccgtgctattatcggtgacaaggcttctattcatgttcaagtgatcgcccaagattacgaaggcatcttaaaagatgctgctgaaatccgcaggcaatgtggagatagtgtgtatgtcaaagtacctgtaaccacagagggccttgcagccattaaaaccttgaaagccgaaggctatcacatcacagcaaccgctatttatacgaccttccaaggactattagccattgaagctggcgctgattatttggctccttactataaccgtatggaaaatcttaatattgatccagaagctgtcatagaacaattagcagaagctattaaccgcgagaatgctaatagtaagattttggcagcaagctttaaaaatgtggctcaggttaataaatcctttgctctaggagcacaagccatcactgctggcccagatgtgtttgaagcaggatttgccatgccatctattcaaaaagcggttgacgattttggcaaggattgggaagccattcatcaccgcaagagcatt

SEQ ID NO: 3074 - protein, 222 aa, Streptococcus pyogenes
MEYMLDTLDLEAIKKWHHILPLAGVTSNPSIAKKEGEIDFFERIREVRAIIGDKASIHVQVIAQDYEGILKDAAEIRRQCGDSVYVKVPVTTEGLAAIKTLKAEGYHITATAIYTTFQGLLAIEAGADYLAPYYNRMENLNIDPEAVIEQLAEAINRENANSKILAASFKNVAQVNKSFALGAQAITAGPDVFEAGFAMPSIQKAVDDFGKDWEAIHHRKSI

SEQ ID NO: 3075 - DNA, 1092 bp, Streptococcus agalactiae
ttgagaatgaaagttttcgcaagtccatcgcgctatatacaaggaaaggatgctttattccaaagtattgaacatatcaaatctttaggtcagactccacttatcctttgtgatgatgttgtttataatatcgttggagaaaggtttttatcttatctacaagacgatttgttaccacatcgtgtttcctttaacggagaagcatctgataatgaaatcaatcgtgtcgttgctgttgcgaaagaaaagaatagtgaccttattattggacttggtggtggaaaaactattgactctgcaaaggcaattgcagataaagttaatttaccagtggtcattgcaccaacagtagcttcaacagatgccccaacatcagcgttatcagtaatctatacagatgaaggagcttttgaaaaatatattttttattcaaagaatccagacttagttttagttgatactcaagtaattgcccaagcgccaaaacgtttactagcttctgggatagcagatggcttagctacttgggttgaagcgagagcagtcttacaaaaaaatgggatagcgatggctggcggtagacagactttagcgggcgtggcaattgcccaagcatgtgagcgtactttatttaatgatagtttacaagctttagcggcttgtgatgccaaagtggttacaaaagctttagaaaatgttattgaagctaataccttacttagtggtttaggttttgaaagtgcaggattagctgcagctcatgctattcataatggttttactgccttgagtggagatattcatcacttaacccatggtgaaaaagttgcctatggaacgttgacgcaacttttcctcgaaaatagaccaaaggaagaaattgatcgctacattaatctttaccaagcgattggaatgccaactacacttgcagaactccatttgggtgatgcaacatatgaagaacttttaaaagttggtcagcaagcaacaattgaaggtgaaacaatacatgaaatgccattcaaaattagtgcagaggatgtcgctgcagccctgttaacggttgaccgttatgtttcaaatcatcaa

SEQ ID NO: 3076 - protein, 364 aa, Streptococcus agalactiae
MRMKVFASPSRYIQGKDALFQSIEHIKSLGQTPLILCDDVVYNIVGERFLSYLQDDLLPHRVSFNGEASDNEINRVVAVAKEKNSDLIIGLGGGKTIDSAKAIADKVNLPVVIAPTVASTDAPTSALSVIYTDEGAFEKYIFYSKNPDLVLVDTQVIAQAPKRLLASGIADGLATWVEARAVLQKNGIAMAGGRQTLAGVAIAQACERTLFNDSLQALAACDAKVVTKALENVIEANTLLSGLGFESAGLAAAHAIHNGFTALSGDIHHLTHGEKVAYGTLTQLFLENRPKEEIDRYINLYQAIGMPTTLAELHLGDATYEELLKVGQQATIEGETIHEMPFKISAEDVAAALLTVDRYVSNHQ

SEQ ID NO: 3077 - DNA, 1086 bp, Streptococcus pyogenes
atgaaagtatttgcaagtccatctcgttacattcaaggtaaaaatgccttgtttaccaatgttaaaaccctaaaacaactaggggatagccccattttactgtgtgatgacgtggtgtatggcatcgtcggagaaagatttgaaagctatttgatagataatggcatgactcctgttcacgtagcctttaatggcgaagcctcagataatgaaatcagccgcgtggttgccattgccaaggaaaatggcaatgatgttattattggacttggtggtggaaaaaccattgacagtgctaaggctatcgctgacttacttgctgttccggtgattattgccccaaccattgcttcaacagatgccccaacctcagccttatcggttatttacaccgatgaaggagcctttgaaaaatacattttctattcaaagaatccagatcttgtattggttgacacacaagtgatctgtcaggcaccaaaacgcttattggcgtcagggattgcagatgggttagcaacatgggtagaggcgcgtgctgttatgcaaaaaaatggagacaccatggcaggtggcaatcaaaccttggcaggagttgccattgccaaagcctgtgagcagaccttgtttgcagatggcctaaaagcgatggctagctgtgacagacaagtcgtgaccccggccttggaaaatgtcattgaagccaatacacttcttagtgggcttggttttgaaagtgcgggtctggctgctgcacatgccattcacaatggctttacagcgctgacaggtgctattcatcaccttacccatggtgaaaaagtcgcctatggcacgttgacccaactcttcttggaaaatcgttcgcgtgaagaaattgaccgctacatcgacttttaccaagctattggcatgccaacaaccctcaaagaaatgcatttagacacggctactcaagaggatttcttaaaaattggccgtcaagcaaccatggcaggcgaaaccatccatcaaatgccatttgttatcagtccagaagatgtagcagcggctttggttgctgttgatgcctatgttacgagtcga

SEQ ID NO: 3078 - protein, 362 aa, Streptococcus pyogenes
MKVFASPSRYIQGKNALFTNVKTLKQLGDSPILLCDDVVYGIVGERFESYLIDNGMTPVHVAFNGEASDNEISRVVAIAKENGNDVIIGLGGGKTIDSAKAIADLLAVPVIIAPTIASTDAPTSALSVIYTDEGAFEKYIFYSKNPDLVLVDTQVICQAPKRLLASGIADGLATWVEARAVMQKNGDTMAGGNQTLAGVAIAKACEQTLFADGLKAMASCDRQVVTPALENVIEANTLLSGLGFESAGLAAAHAIHNGFTALTGAIHHLTHGEKVAYGTLTQLFLENRSREEIDRYIDFYQAIGMPTTLKEMHLDTATQEDFLKIGRQATMAGETIHQMPFVISPEDVAAALVAVDAYVTSR

SEQ ID NO: 3079 - DNA, 924 bp, Streptococcus agalactiae
atgtcaaaaatttataattctattacagacttaatcggaaatacacccattattcaattacatcatattgttccagaaggagctgcagaggtgtacgttaagttagaatcctttaacccaggttcatctgtcaaagatcgtatcgctctagctatgattgaagatgcagagcaaaaagggattcttaaagccggagatacaatcgtagaacctacatctggtaatacaggtatcggtttggcttgggtaggaaaagctaaagggtataatgttattattgttatgccagaaaccatgtcaattgaacgtcgtaaaatcattcaagcctatggtgctcaattagtactaacacctggtagtgaagggatgaagggagctattgctaaggcaaaagaaatttctgcagagcaaaatgcttggctacccctgcaatttaataatcaagccaatccagaaatccacgaaaaaacgactggtagggaaattatcgagacttttggtgaaaaaggtttagatgcttttatcgcaggtgtgggaactggtgggacaattactggtgtctctcgtgcattaaaaaaagtcaatcctgatgtcgctatttatgctgtagaagctgatgaatctgcaatcctttctggtgagcaacctgggcctcataaaatacaagggatttctgcaggtttcattccagaaacattggctacagattcttatgatcatatcattcgcgttacatctgacgatgctattgaaacaggacgtatcatcggcggactagaaggtttcctcgcaggaatttctgcttcagctgctatttatgctgctattgaagtggccaaacaactaggaaaagggaaaaaggttttagctcttctccctgataatggcgaacgttacttatcaacaagcctgtatgattttgaa

SEQ ID NO: 3080 - protein, 308 aa, Streptococcus agalactiae
MSKIYNSITDLIGNTPIIQLHHIVPEGAAEVYVKLESFNPGSSVKDRIALAMIEDAEQKGILKAGDTIVEPTSGNTGIGLAWVGKAKGYNVIIVMPETMSIERRKIIQAYGAQLVLTPGSEGMKGAIAKAKEISAEQNAWLPLQFNNQANPEIHEKTTGREIIETFGEKGLDAFIAGVGTGGTITGVSRALKKVNPDVAIYAVEADESAILSGEQPGPHKIQGISAGFIPETLATDSYDHIIRVTSDDAIETGRIIGGLEGFLAGISASAAIYAAIEVAKQLGKGKKVLALLPDNGERYLSTSLYDFE

SEQ ID NO: 3081 - DNA, 939 bp, Streptococcus pyogenes
atgactaaaatttacaaaactataacagaattagtaggtcaaacacctattatcaaacttaaccgtttaattccaaacgaagctgctgacgtttatgtaaaattagaagcttttaacccaggatcttctgttaaagatcgtattgctttatcgatgattgaagctgctgaagctgaaggtctgataagtcctggtgacgttattatcgaaccaacaagtggtaatacaggtattggtcttgcatgggtaggtgctgctaaagggtatcgagtcattattgttatgcccgaaactatgagcttggaaagacggcaaatcattcaggcttatggtgcagagcttgtcttaacacctggagcagaaggtatgaaaggggctattgcaaaagctgaaactttagcaatagaactaggtgcttggatgcctatgcaatttaataaccctgccaatccaagcatccatgaaaaaacaacagctcaagaaattttggaagcttttaaggagatttctttagatgcattcgtatctggtgttggtactggaggaacactttctggtgtttcacatgtcttgaaaaaagctaaccctgaaactgttatctatgctgttgaagctgaagaatctgctgtcttatctggtcaagagcctggaccacataaaattcaaggtatatcagctggatttatcccaaacacgttagataccaaagcctatgaccaaattatccgtgttaaatcgaaagatgctttagaaactgctcgactaacaggagctaaggaaggcttcctggttgggatttcttctggagctgctctttacgccgctattgaagtcgctaaacagttaggaaaaggcaaacatgtgttaactattttaccagataatggcgaacgctatttatcgactgaactctatgatgtaccagtaattaagacgaaa

SEQ ID NO: 3082 - protein, 313 aa, Streptococcus pyogenes
MTKIYKTITELVGQTPIIKLNRLIPNEAADVYVKLEAFNPGSSVKDRIALSMIEAAEAEGLISPGDVIIEPTSGNTGIGLAWVGAAKGYRVIIVMPETMSLERRQIIQAYGAELVLTPGAEGMKGAIAKAETLAIELGAWMPMQFNNPANPSIHEKTTAQEILEAFKEISLDAFVSGVGTGGTLSGVSHVLKKANPETVIYAVEAEESAVLSGQEPGPHKIQGISAGFIPNTLDTKAYDQIIRVKSKDALETARLTGAKEGFLVGISSGAALYAAIEVAKQLGKGKHVLTILPDNGERYLSTELYDVPVIKTK

SEQ ID NO: 3083 - DNA, 642 bp, Streptococcus agalactiae
atgaactataaaacgataaaatcagacggaattgtcgaagaagaaattaaaaaatcgcgatttatttgtcatctaaagcgagtagagtccgaagaggaggggcgtaattatattacgcaaatcaagaaagcgcactacaaagccaatcattcgtgttcagctatggttattggcgaaaaaggggatataaaacgatctagtgatgatggagaacctagtggtacagcaggtatccctatgctaaccgtacttgaaaagcaaggcctgacaaatgttgttgccgtcgttacacggtattttggaggtatcaaattaggcgcaggggggcttattcgtgcctactctggtagcgtagctaataccatcaaagagatcggggtagtagaagttaaagaacaaattggtattcgtattcaattaacttatcctcaatatcaaacttttgacaacttcctaaaagagcaccaccttcaggagtttgaaacagaatttttagaagctgtaacctgtaaaatatacgttgaccctaaggaatttgaacacacaataactaatttgacagagttctaccaaggaaaagctttgttaactgaagaagggagtcaaattgttgaaattccctttaaggctgaaaccgataaa

SEQ ID NO: 3084 - protein, 214 aa, Streptococcus agalactiae
MNYKTIKSDGIVEEEIKKSRFICHLKRVESEEEGRNYITQIKKAHYKANHSCSAMVIGEKGDIKRSSDDGEPSGTAGIPMLTVLEKQGLTNVVAVVTRYFGGIKLGAGGLIRAYSGSVANTIKEIGVVEVKEQIGIRIQLTYPQYQTFDNFLKEHHLQEFETEFLEAVTCKIYVDPKEFEHTITNLTEFYQGKALLTEEGSQIVEIPFKAETDK

SEQ ID NO: 3085 - DNA, 645 bp, Streptococcus pyogenes
ttgtacaatttttttatggaacattttaagacaatcaaagccagtggttttttcgaagaaagtattaaaaaatctcgtttcatttgtcatatcaaacgagtgagcactgaagaagatggtaagaattttgttaatgctatcaaaaaagaacattacaaagctaatcattcctgctttgcgatgattatcggtaacaacagacagatcaagcgctcaagtgatgatggtgaaccttcaggaactgctggaatacctatcctttctgtgttagaaaagcagtgtttaacaaatgtagtagttgtggtaacgcgttactttggtggtattaaattaggaacaggtgggttaatcagagcatactctaacatgaccgcaacagctattaaacgatttggcatcattgaagttaaacagcagataggactagaaatcacactttcttatccccaatatcaactatactctaacttgctagatcaattggctttaaccgaaacagaaactaagttttcagacacgataaagacaacactttattgtgatactgaacgtgtggaaaatctcattgatactttaacaaattattatcatggtcagataagctgtgagaaaatcggatccaaagttattgaattcccctgtgat

SEQ ID NO: 3086 - protein, 215 aa, Streptococcus pyogenes
LYNFFMEHFKTIKASGFFEESIKKSRFICHIKRVSTEEDGKNFVNAIKKEHYKANHSCFAMIIGNNRQIKRSSDDGEPSGTAGIPILSVLEKQCLTNVVVVVTRYFGGIKLGTGGLIRAYSNMTATAIKRFGIIEVKQQIGLEITLSYPQYQLYSNLLDQLALTETETKFSDTIKTTLYCDTERVENLIDTLTNYYHGQISCEKIGSKVIEFPCD

SEQ ID NO: 3087 - DNA, 1287 bp, Streptococcus agalactiae
atggaaaattatttaggtaggctttggacaaaagcacaattatctgagcaacttagaaaaattgcaattagcttgccatcttttataaagaaaggaagcgactatatttgtacccgatgctctagttctgttgctaaaaattgccaattaccaactggaaattattattgtagagaatgtatagtttttggaagagttactagtaatgaaaatttatattatttcccacaaaaaacattttctaaaacgaattctttaaaatggaaaggggaactgacaccttatcaaaatgaggtttcagaagagttgttgaaaggtatttcaagtaaggaaaatcttcttgttcatgctgtgacaggggctggtaaaacagaaatgatataccactctgtcgccaaagtaattgatactggaggaagcgtttgtattgccagtcctagaattgatgtttgtttagaattgtataagcgactttcaaacgattttagatgtgccataacattaatgcatggagaatctccttcttatcagagatcccctttaactattgccacaacacatcaattgttaaaattttatcatgcttttgatttgctaattgttgatgaagttgatgcttttccgtatgtcgacaacccgatactataccagggtgtaaaacaggccttaaaggaaaacggaacaagtatttttctgactgcaacttcaacgactgagttagaaagaaaagttgcaagaaaagaactaaaaaaattgcatctagctaggagatttcatgccaatccgttagtgatacccgagatggtttgggtaagtggtatccagaaaagcttgcagacacaaaaactacctcccaaattatatcagttgataaataaacagcgacaaacgagatatcctttgttattatttttcccccatatttcagaaggtcaggtattcaccgaaattttaagacaagcctttcctatggaaaaaattggttttgtttcaagtaagagcacatctaggttaaagttagtgcaagattttcgagataacaaattgtctatcctagtgtcaactaccattctagagagaggagtaactttccctagcgtcgacgtttttgttatacaagcaaatcatcatttgtttacgaaaagttccttggtacaaatttcaggaagagttggaagagcattagaaaggcccgaagggctcctttacttccttcatgatgggaaaagtaaatcgatgcaccaagctataaaggagattaaaaacatgaatcatataggaggattt

SEQ ID NO: 3088 - protein, 429 aa, Streptococcus agalactiae
MENYLGRLWTKAQLSEQLRKIAISLPSFIKKGSDYICTRCSSSVAKNCQLPTGNYYCRECIVFGRVTSNENLYYFPQKTFSKTNSLKWKGELTPYQNEVSEELLKGISSKENLLVHAVTGAGKTEMIYHSVAKVIDTGGSVCIASPRIDVCLELYKRLSNDFRCAITLMHGESPSYQRSPLTIATTHQLLKFYHAFDLLIVDEVDAFPYVDNPILYQGVKQALKENGTSIFLTATSTTELERKVARKELKKLHLARRFHANPLVIPEMVWVSGIQKSLQTQKLPPKLYQLINKQRQTRYPLLLFFPHISEGQVFTEILRQAFPMEKIGFVSSKSTSRLKLVQDFRDNKLSILVSTTILERGVTFPSVDVFVIQANHHLFTKSSLVQISGRVGRALERPEGLLYFLHDGKSKSMHQAIKEIKNMNHIGGF

SEQ ID NO: 3089 - DNA, 1323 bp, Streptococcus pyogenes
atggagtctattgaaaatagttatggacggttgttgctagaaagccagttaccagattcagcaaagcagcttgctcaacctttaaaaagtgtagtaatattgagaggaaaaatgatttgtcaacgttgtcactatcagcttgatgaagaagcacgattgccaagtggagcctattattgccgattttgtcttgtctttggacgaaatcaatcagataaattgctctatgctatcccacctatgcattttccaaaaggtaattatctggtttggggtggtcaactaactgcttatcaagagatgatttcccaacaattattaatcaatatgcaaaatcaaaaaacaacattagttcatgctgtaactggtgcaggaaaaacagaaatgatttatgctgcgattgaggcggtaattaacacaggtggctgggtttgcattgccagcccaagagtagatgtttgtgtagaggtggctactcgtttatcccaagccttctcctgcagcatctgtttaatgcacgcagagtctcttccttatcaaagagctcctattatagtagccacaacgcatcagctgctaaaatttcacaaggcttttgatctcttaattattgatgaagtagacgcattcccttttgtaaataatattcaacttcattatgctgcaagtcaggctttaaaagaaggtggcgcaaagattttattaactgcaacttcaactagaactttagaaagaaaggtaaacaagggagaagtagtcaagctgacattggcgagacgctttcataataggccattagttattccaaaatttataagaagttttaatctatttaaaatgatacatcggcaaaaacttcctcttaaaattttaaaatacttaaaaaaacaaagaaaaacaggctatccccttttaatttttctacccactattataatggcagaatctgttacagcaatcttaaaagagttattgcccgccgaacaaatagcttgtgtttctagtcaatcacaaaacaggaaagaagatatcacagcttttcgtcaagggaaaaaaacgattttaattacaacatcaattttagaaaggggtgtgacatttccccaaattgatgtttttgttcttgggtctcatcatcgtgtctatagttcccaaagtcttgttcaaattgctggacgagttggaagatctatagacagaccagacggaacgttatatttctttcatgaaggtatcagtaaagcaatgctactagcaagaaaagagattaaagaaatgaattataaagggtattcgcatgatctgtctactatgtcaacaaat

SEQ ID NO: 3090 - protein, 441 aa, Streptococcus pyogenes
MESIENSYGRLLLESQLPDSAKQLAQPLKSVVILRGKMICQRCHYQLDEEARLPSGAYYCRFCLVFGRNQSDKLLYAIPPMHFPKGNYLVWGGQLTAYQEMISQQLLINMQNQKTTLVHAVTGAGKTEMIYAAIEAVINTGGWVCIASPRVDVCVEVATRLSQAFSCSICLMHAESLPYQRAPIIVATTHQLLKFHKAFDLLIIDEVDAFPFVNNIQLHYAASQALKEGGAKILLTATSTRTLERKVNKGEVVKLTLARRFHNRPLVIPKFIRSFNLFKMIHRQKLPLKILKYLKKQRKTGYPLLIFLPTIIMAESVTAILKELLPAEQIACVSSQSQNRKEDITAFRQGKKTILITTSILERGVTFPQIDVFVLGSHHRVYSSQSLVQIAGRVGRSIDRPDGTLYFFHEGISKAMLLARKEIKEMNYKGYSHDLSTMSTN

SEQ ID NO: 3091 - DNA, 663 bp, Streptococcus agalactiae
atgacttgtttgttatgtcatgaaatagatttatcgcaattaacttttgtggaacttatgcttctaaaaccaaagcaaaacgtaatttgtcaaacgtgcaagggtagttttgaagcacttagtagggagatgggttgccaaacatgttgcaagcaaattccccaaaaacaatgtcaagattgtatttattggggtaaaaaaggtatagaggtaaatcatttttccctttatagatacaatgaagcaatgaaaaaaaatttttctctttttaaatttcaaggggattatttgttgaaagatgtttttacaaaagaaataaaagctgctctaaaaaagtataagggctacactatagtgccagttcccttgagtcatgaaggataccaaaataggcaatttaatcaagtgattgcttttctacaatcggcaaatataccttacaaaaatattctttctaaaaaagatggaggtaagcaatcggctaataataaagaagaaagactcaaacaagttcagcaatttacattaaaaaatgaggctgagttaggggacaaccttttaattgttgatgatatttatacaacaggcgcaacaatagcacaaatcaggaaactattagaagaaaaaggtataaaaaatataaaaagtttttcattagcacgc

SEQ ID NO: 3092 - protein, 221 aa, Streptococcus agalactiae
MTCLLCHEIDLSQLTFVELMLLKPKQNVICQTCKGSFEALSREMGCQTCCKQIPQKQCQDCIYWGKKGIEVNHFSLYRYNEAMKKNFSLFKFQGDYLLKDVFTKEIKAALKKYKGYTIVPVPLSHEGYQNRQFNQVIAFLQSANIPYKNILSKKDGGKQSANNKEERLKQVQQFTLKNEAELGDNLLIVDDIYTTGATIAQIRKLLEEKGIKNIKSFSLAR

SEQ ID NO: 3093 - DNA, 663 bp, Streptococcus pyogenes
atgatctgtctactatgtcaacaaattagtcaaacaccaataagtattacagaaatcatctttttaagacgtatctcttcaccgatttgtcaacaatgtcaaaaaagctttcaaaagataggaaaaagtgtttgtgcgacatgttgtgcaaactcagatataatagcttgtcgagattgtctaaaatgggaaaacaaaggatacaatgtaaatcatagaagcttatattgttataatgctgctatgaaagcatacttcagtcaatataagtttcaaggagactatttattaagaaaagtttttgcagtagaacttgccgatgttatcaccaagtactataaaggctatatcccagtcccggttcctgtaagtcccggttgttttcgagaaagacaatttaatcaagtgagcgctattcttgaggcagctaatgttagctacctttctctttttgaaaagctagataatactcaccaatcttccagaacaaaaaaagagagattattagtagaaaaatcttatcgactactaaaagtatcaaacattcctgataaaatccttatagtagatgatatttatactactggtagtacaattatcgctcttagaaaacaattggctaaagtagcaaatagtgacattaaaagtttgtcaattgcacgt

SEQ ID NO: 3094 - protein, 221 aa, Streptococcus pyogenes
MICLLCQQISQTPISITEIIFLRRISSPICQQCQKSFQKIGKSVCATCCANSDIIACRDCLKWENKGYNVNHRSLYCYNAAMKAYFSQYKFQGDYLLRKVFAVELADVITKYYKGYIPVPVPVSPGCFRERQFNQVSAILEAANVSYLSLFEKLDNTHQSSRTKKERLLVEKSYRLLKVSNIPDKILIVDDIYTTGSTIIALRKQLAKVANSDIKSLSIAR

SEQ ID NO: 3095 - DNA, 552 bp, Streptococcus agalactiae
atgattaaatacagtattcgtggtgaaaacatcgaagtaacagaagctattcgtgagtatgttgagaccaaactctctaaagttgaaaaatactttaatgaagcacaagaattagatactagagtcaacctcaaagtatacagagagaagaccgcaaaagttgaagtaacaatcttaatagattctattactttacgagcagaagatgtttcacaagatatgtatgggtcaattgacttagttgttgataaaattgagcgtcaaattcgtaaaaataaaactaaaattgcgaaaaaatatcgtgaaaagattccagcaagtcaagttttcacaacagaatttgaggctgagccagatgaagaagcagtaagccaaagaattgtacgtactaagaatgttaatctaaaaccaatggatgttgaggaagcattgttgcaaatggaacttttaggtcatgatttctttatctatacagatgcagaagataatacgacaaatgtcctttacaagcgtgaagatggcgaactaggtttaattgaagctaaaggaaat

SEQ ID NO: 3096 - protein, 184 aa, Streptococcus agalactiae
MIKYSIRGENIEVTEAIREYVETKLSKVEKYFNEAQELDTRVNLKVYREKTAKVEVTILIDSITLRAEDVSQDMYGSIDLVVDKIERQIRKNKTKIAKKYREKIPASQVFTTEFEAEPDEEAVSQRIVRTKNVNLKPMDVEEALLQMELLGHDFFIYTDAEDNTTNVLYKREDGELGLIEAKGN

SEQ ID NO: 3097 - DNA, 546 bp, Streptococcus pyogenes
atgattaagttcagtattcgtggagaaaatatcgaagtgacagaagctattcgcgattatgtagaatcaaagcttactaaaatcgaaaaatattttgctaaagaccaagaaatagatgcacgtgttaatttaaaagtttatcgggagagatcttcaaaagttgaggtaacgatcccattagattcagtaacccttcgtgctgaagatgtttcacaggatatgtacggctctattgatttagttgttgataagatcgaacgccaaattagaaaaaataaaaccaaaattgctaaaaaacatcgcgaaaaggttccaactggtcaagtctttacaactgagtttgaagctgaagaagtcgatgagataccagaagtacaagttgtacgtactaaaaatgtgacattaaaaccaatggatgttgaagaagcgcgtttacagatggaactattgggacatgatttctttatctacactgattctgaagatggcgcaacaaacattttataccgtcgcgaagatggaaacctaggattaatagaagctaaa

SEQ ID NO: 3098 - protein, 182 aa, Streptococcus pyogenes
MIKFSIRGENIEVTEAIRDYVESKLTKIEKYFAKDQEIDARVNLKVYRERSSKVEVTIPLDSVTLRAEDVSQDMYGSIDLVVDKIERQIRKNKTKIAKKHREKVPTGQVFTTEFEAEEVDEIPEVQVVRTKNVTLKPMDVEEARLQMELLGHDFFIYTDSEDGATNILYRREDGNLGLIEAK

SEQ ID NO: 3099 - DNA, 144 bp, Streptococcus agalactiae
atgaacgaatgtgcagggtggatttacattgtaaatccgtcaatgacaaaaaacaataaatctgtcagcgagacagaaaagagcaaagctcaaacttttaatgagagtttgatcctggctcaggacgaacgctggcggcgtgcc

SEQ ID NO: 3100 - protein, 48 aa, Streptococcus agalactiae
MNECAGWIYIVNPSMTKNNKSVSETEKSKAQTFNESLILAQDERWRRA

SEQ ID NO: 3101 - DNA, 348 bp, Streptococcus agalactiae
  misc_feature (1)..(348): n = a, c, g, or t
atggcaattatttaccttatcgttgcagtgtttgctggtgaggcttatattgcaaaagaaataagtaacggtgtcaatggtcttgtttatgccctccaactagctgggcaatttgcggcaggtgtattcgttattttagcaggtgtacgccttatcctaggtgaaattgtaccagcctttaagggaatctcagaaaaattggttccaaattcaaaaccagccttggattgtccaattgtttacccttatgcacctaatgcagtattgattggttttatctcaaagtttgttggtggattggttagtatgatagtcatgattgtgactggcactannnnnttaattaat

SEQ ID NO: 3102 - protein, 116 aa, Streptococcus agalactiae
  MISC_FEATURE (1)..(116): Xaa = Any Amino Acid
MAIIYLIVAVFAGEAYIAKEISNGVNGLVYALQLAGQFAAGVFVILAGVRLILGEIVPAFKGISEKLVPNSKPALDCPIVYPYAPNAVLIGFISKFVGGLVSMIVMIVTGTXXLIN

SEQ ID NO: 3103 - DNA, 1023 bp, Streptococcus agalactiae
atgacaaaaccaattatcttaacaggtgatagaccgacaggaaagttgcatattggacattatgtaggtagcttaaaaaatagagttctacttcaaaatgagggtagctatactttatttgtctttttagcagaccaacaagcactgacagaccatgctaaagatccgcaaactattgttgaatcaattggtaatgttgcacttgattatttagctgttgggttagatccaaacaagtcgactttattcattcaaagtcaaattcctgagttagcagaattaagtatgtattatatgaacttggtttcacttgcacgtttagaacgtaatccaactgtaaaaacagaaattgctcaaaaaggttttggtgagtctattccagcaggattcttagtttatcctgttgcacaagcagctgatataaccgcttttaaagctaaccttgttcctgtagggactgaccaaaaaccaatgattgaacaaacacgtgaaatagttagatctttcaatcatgcttataattgtcaggttttagttgaaccagagggaatctatccagaaaatgatgcagcaggtcgtctgccagggttagatggtaatgcaaaaatgtctaagtcattaaataatggaatctttttagcagatgatatggatacagttaagaaaaaagttatgagtatgtatactgatccaaaccacattaaagtagaagaaccaggacaaatcgaaggtaatatggtatttcattaccttgatgtttttggaagagatgaagaccaaaaagagattactgctatgaaagaacactatcaaaaaggtggacttggggatgttaaaacaaaacgttatctacttgatatcttagagcgtgaattatcacctattagagaacgtcgcctcgaatatgctaaagatatgggacaagtttatcaaatgttacaaaaaggtagtgagaaagctcaagctgttgcagcctctactttggatgaggttaaatcagccatgggtttgaactattttaaa

SEQ ID NO: 3104 - protein, 341 aa, Streptococcus agalactiae
MTKPIILTGDRPTGKLHIGHYVGSLKNRVLLQNEGSYTLFVFLADQQALTDHAKDPQTIVESIGNVALDYLAVGLDPNKSTLFIQSQIPELAELSMYYMNLVSLARLERNPTVKTEIAQKGFGESIPAGFLVYPVAQAADITAFKANLVPVGTDQKPMIEQTREIVRSFNHAYNCQVLVEPEGIYPENDAAGRLPGLDGNAKMSKSLNNGIFLADDMDTVKKKVMSMYTDPNHIKVEEPGQIEGNMVFHYLDVFGRDEDQKEITAMKEHYQKGGLGDVKTKRYLLDILERELSPIRERRLEYAKDMGQVYQMLQKGSEKAQAVAASTLDEVKSAMGLNYFK

SEQ ID NO: 3105 - DNA, 1023 bp, Streptococcus pyogenes
atgatgacaaaacctattattttaactggagatagaccaactggaaaattacatttaggtcattatgtcggaagtcttaaaaatcgtgtctttttacaaaatgaaaacaagtataagatgtttgttttcttggccgatcaacaggcactgacggatcatgctaaagaatccgaattaattcaagaatctattggaaatgttgccttggattacctctctgtcggtttggatccgaagcaatcaacgatttttattcaaagtcagattccagagctagctgaattgagcatgtattatatgaatctggtatcattagcacgtttggaaagaaatcccactgttaaaaccgaaattgctcagaaaggttttggcgaaagtattccatctggttttttggtttatccagtatcacaggccgctgatattacagcatttaaagcgaatttagtacctgtaggtaacgaccagaaaccgatgattgaacaaacacgtgaaattgtgagaagttttaatcatacttaccatacagactgtttagtagaacctgaaggtatttatccagaaaatgaaaaagctggacgcttacctggtcttgatggcaatgccaaaatgtctaagtcattgggaaatggaatctatctctcagatgatgcagataccgttcgcaaaaaagtgatgagcatgtatactgatccaaatcatattaaaatagaagatcctggtcaaattgaagggaatatggtctttcattatttggatatttttgctagaaaagaagatcaagctgatatcgaagcaatgaaagagcattatcaaataggtggtttaggagatgtgaaaacgaaacgctaccttttagatattttagaacgtgaattagcacctattcgtgaaagacgtttggagtacgctaaagatatgggagaggtgttccgtatgttacaagaaggtagtcaaaaagcaagaactgtggcagccaagactttatcagaagtgaagtcagcaatgggtattaattatttt

SEQ ID NO: 3106 - protein, 341 aa, Streptococcus pyogenes
MMTKPIILTGDRPTGKLHLGHYVGSLKNRVFLQNENKYKMFVFLADQQALTDHAKESELIQESIGNVALDYLSVGLDPKQSTIFIQSQIPELAELSMYYMNLVSLARLERNPTVKTEIAQKGFGESIPSGFLVYPVSQAADITAFKANLVPVGNDQKPMIEQTREIVRSFNHTYHTDCLVEPEGIYPENEKAGRLPGLDGNAKMSKSLGNGIYLSDDADTVRKKVMSMYTDPNHIKIEDPGQIEGNMVFHYLDIFARKEDQADIEAMKEHYQIGGLGDVKTKRYLLDILERELAPIRERRLEYAKDMGEVFRMLQEGSQKARTVAAKTLSEVKSAMGINYF

SEQ ID NO: 3107 - DNA, 954 bp, Streptococcus agalactiae
ttggtaaaagaacatcaaaaaatcgtagttgccttaggtggcaacgctattctatcaacagatgcttcagcaaaagcacaacaagaagcattaatcaacacatcaaaatcactggtcaaactgattaaagaaggccatgatgtcattgttactcatggaaatggtccccaagttggtaacttattgctacagcaagcagcttcagattctgaaaagaatccagcaatgcctttggatacttgtgttgccatgacagaaggaagtattggtttttggttacaaaatgctcttaacaatgaattacaagaacaaggcattgacaaagaggttgcaacagtggtaactcaagttattgtagatgaaaaagatcaagctttcactaatccaacaaaacctattggcccattcttatctgaagaagatgccaagaaacaagcccaagaaacaggttcaaaatttaaagaagatgctggccgtggatggcgtaaagtcgttccttcaccaaaaccggttggtatcaaagaagcttctgttattagacggttagtggactctggtgtggttgttattagcgcaggtggcggaggtgtaccagttattgaagatgctaatacaaaggcattaaaaggggttgaagctgttattgacaaagactttgccagtcaaactttatcagaacttgttgatgctgacttattcatcgtcttaactggcgttgacaacgtttttgttaattttaataaacctaatcaagaaaaattagaagaagttactgtttcacaaatgaaacaatatatcactgaaaatcaatttgcccctggaagtatgctaccaaaggtcgaagctgcgattgcttttgttgaaaataaacctgaatcacgagctattattacttcacttgaaaatattgataatgttttagcccaaaatgcagggacacaaattgttgcaaat

SEQ ID NO: 3108 - protein, 318 aa, Streptococcus agalactiae
MVKEHQKIVVALGGNAILSTDASAKAQQEALINTSKSLVKLIKEGHDVIVTHGNGPQVGNLLLQQAASDSEKNPAMPLDTCVAMTEGSIGFWLQNALNNELQEQGIDKEVATVVTQVIVDEKDQAFTNPTKPIGPFLSEEDAKKQAQETGSKFKEDAGRGWRKVVPSPKPVGIKEASVIRRLVDSGVVVISAGGGGVPVIEDANTKALKGVEAVIDKDFASQTLSELVDADLFIVLTGVDNVFVNFNKPNQEKLEEVTVSQMKQYITENQFAPGSMLPKVEAAIAFVENKPESRAIITSLENIDNVLAQNAGTQIVAN

SEQ ID NO: 3109 - DNA, 948 bp, Streptococcus pyogenes
atgacgaaacaaaaaatcgtagtcgcacttggaggaaatgctattctttcaacagatgcgtcagcaaaagcacaacaagaagccttgatttccacatcaaaatcactggttaaattaattaaagaaggtcatgaagtcatcgtgacccacggcaatggcccacaagttggtaatctcttgttacaacaagcagcagcagattctgaaaagaatccggctatgcctttggatacttgtgttgccatgacagaaggtagcatcggtttttggttagttaatgccctcgataatgaattgcaagcccaaggtattcaaaaagaagtggcagctgttgtcactcaagtgatcgtggatgccaaagacccagcttttgaaaacccaacaaaaccaattggtccatttcttaccgaagaagatgccaaaaaacaaatggcggagtctggtgcaagtttcaaagaagatgcaggtcgtggctggcgtaaggttgtgccatcaccaaaaccagttggtattaaagaagccaatgtcatcagaagtctcgttgattctggcgttgttgtggttagtgctggtggtggcggtgtgcccgttgtggaagatgctactagcaagaccctgactggtgtggaagctgttattgacaaggactttgctagtcaaaccctttcagaattggtggacgcagacctctttatcgttttgacaggagttgataatgtttacgtcaacttcaacaaacctgaccaagccaaattggaagaagtgactgtctctcaaatgaaagaatacatcacacaagaccaatttgcaccaggtagtatgttaccaaaagtggaagctgccattgcttttgttgaaaacaaaccaaatgctaaagccattatcacatcgctcgaaaatattgacaatgtactatcagcaaacgctggaacacaaattatcgcaggg

SEQ ID NO: 3110 - protein, 316 aa, Streptococcus pyogenes
MTKQKIVVALGGNAILSTDASAKAQQEALISTSKSLVKLIKEGHEVIVTHGNGPQVGNLLLQQAAADSEKNPAMPLDTCVAMTEGSIGFWLVNALDNELQAQGIQKEVAAVVTQVIVDAKDPAFENPTKPIGPFLTEEDAKKQMAESGASFKEDAGRGWRKVVPSPKPVGIKEANVIRSLVDSGVVVVSAGGGGVPVVEDATSKTLTGVEAVIDKDFASQTLSELVDADLFIVLTGVDNVYVNFNKPDQAKLEEVTVSQMKEYITQDQFAPGSMLPKVEAAIAFVENKPNAKAIITSLENIDNVLSANAGTQIIAG

SEQ ID NO: 3111 - DNA, 1437 bp, Streptococcus agalactiae
atgaggtataaaatggaaaaagaaaaaaaattaggtcttttaccactaacaatgcttgtcattggctctcttatcggtggcggaatctttgatttaatgcaaaatatgagttccagagccggtttggtaccaatgcttattgcttgggtaattactgctatcgggatggggactttcgttttaagttttcaaaatttatctgaaaaaaggccggacctaacagctggaatctttagttacgctaaagaggggtttggaaactttatgggatttaactctgcatggggttattggttatcagcttggcttggaaatgttgcctacgctgcactcttattcagttcactcggttatttctttaaattctttggtaatggaaataatatcatctcaattattggagcaagtatagttatttgggttgtccatttcttaattttaagaggtgttaatacagctgcatttattaataccatagttacctttgcaaaattagtacctgttattattttcttaatttcagcgttattagctttcaaatttaacatttttagtcttgatatctggggaaatggattacatcaatcaattttcaaccaagtcaattcaactatgaaaaccgctgtttgggtatttattggtattgagggcgccgttgtcttctcaggtcgtgctaaaaaacactctgatattggtaaagcaagtatcctagcattattcactatgatttcactttatgtattgatttctgttttatcacttggtatcatgtcacgtccagaacttgcaaacttaaaaacaccagctatggcttacgttctagaaaaggctgttggtcactggggcgctatcttagttaaccttggtgttatcatttcagtatttggcgctattcttgcttggactttatttgcagcagaattaccatatcaagctgctaaagaaggtgcttttcctaaattctttgcaaaagaaaataaaaacaaagctccaatcaattcactcttagtcactaatctttgtgtacaagcattcttaatcacgttcttattcacacaaagtgcttatcgttttggtttcgcattagcatcatctgctatcttaattccttatgcttttacagcactatatcaattacaattcacactccgtgaggataagtcaactccaggacatcaaaagaatttaattatcggtatcctcgctacaatctatgctgtttaccttatctacgctggtggttttgattacttacttttgacaatgattgcttacactctaggtatgattctctatattaaaatgagaaaagatgacaagcttcctatctttgtgggatatgaaaaaattagtgccattgtcattctagcgctttgcttattatgtattattgaaattatgactggacaaattgacattgctgcaatcctagcaggt

SEQ ID NO: 3112 - protein, 479 aa, Streptococcus agalactiae
MRYKMEKEKKLGLLPLTMLVIGSLIGGGIFDLMQNMSSRAGLVPMLIAWVITAIGMGTFVLSFQNLSEKRPDLTAGIFSYAKEGFGNFMGFNSAWGYWLSAWLGNVAYAALLFSSLGYFFKFFGNGNNIISIIGASIVIWVVHFLILRGVNTAAFINTIVTFAKLVPVIIFLISALLAFKFNIFSLDIWGNGLHQSIFNQVNSTMKTAVWVFIGIEGAVVFSGRAKKHSDIGKASILALFTMISLYVLISVLSLGIMSRPELANLKTPAMAYVLEKAVGHWGAILVNLGVIISVFGAILAWTLFAAELPYQAAKEGAFPKFFAKENKNKAPINSLLVTNLCVQAFLITFLFTQSAYRFGFALASSAILIPYAFTALYQLQFTLREDKSTPGHQKNLIIGILATIYAVYLIYAGGFDYLLLTMIAYTLGMILYIKMRKDDKLPIFVGYEKISAIVILALCLLCIIEIMTGQIDIAAILAG

SEQ ID NO: 3113 - DNA, 1341 bp, Streptococcus pyogenes
atggcgtcaaatcacatgaacgaacaagaaagagaacaggcaaagtttagcttgagcggtgccactctttacgggatcaatgccgttatcggctctggtatttttctcttacctagggccatttataagggccttggccctgcatccatcgctgttatgtttggaacagctattttgaccatcatgttggcagtttgttttgcagaagtctctggttattttgggaaaaacggcggagccttccaatattccaaacgagcttttggtgattttattggctttaacgttggcttccttggttggaccgttaccatcttcgcttgggcagccatggcagctgggtttgccagaatgtttatcattactttccctgcctttgaaggttggcacattccacttagtattgggttaatcatcttactatctttgatgaatatcgctggtttgaaaacctctaaaattgtcaccatcacagccaccattgctaagttaattccaatcgttgccttttgtgcctgtacccttttcttcatcaaaaacgggcttcctaactttaccccatttgttcagttggaaccagggactaacctcttaggggctatctccaatactgctgtttatatcttctatggctttatcggttttgaaaccctctctattgtcgctggggaaatgcgtgaccctgaaaaaaatgtaccgcgtgctcttttaggatcaatcagtatcgtctctgtcttatatatgctgattatcggtggaaccattgccatgcttggctctcaaatcatgatgaccaatgcacctgttcaagatgcctttgttaaaatgataggccctgctggcgcttggatggtctcaatcggtgctttaatttccattacaggtcttaacatgggagaatccatcatggtgccacgttacggtgctgccattgctgatgaagggctcttaccagctgctattgccaagcaaaatcaaaatggcgcgccactcgttgctatcttggtttcaggagcaattgccattgtactcctgcttactggctcatttgaaagcttagcaaaactcagtgttgttttccgcttcttccaatacattccaacagcactagccgttatgaaattacggaaggacgatcccgatgctaatgtgatcttccgagtaccatttggccctattatcccaattcttgcagttatcgttagtttagttatgatttggggtgacaacccaatgaactttgtttatggtgcagttggtgtcatcattgcaagtagtgtgtactaccttatgcacggacgtaaccaccaaatggaccaaatgccccctaaggaacaaatc

SEQ ID NO: 3114 - protein, 447 aa, Streptococcus pyogenes
MASNHMNEQEREQAKFSLSGATLYGINAVIGSGIFLLPRAIYKGLGPASIAVMFGTAILTIMLAVCFAEVSGYFGKNGGAFQYSKRAFGDFIGFNVGFLGWTVTIFAWAAMAAGFARMFIITFPAFEGWHIPLSIGLIILLSLMNIAGLKTSKIVTITATIAKLIPIVAFCACTLFFIKNGLPNFTPFVQLEPGTNLLGAISNTAVYIFYGFIGFETLSIVAGEMRDPEKNVPRALLGSISIVSVLYMLIIGGTIAMLGSQIMMTNAPVQDAFVKMIGPAGAWMVSIGALISITGLNMGESIMVPRYGAAIADEGLLPAAIAKQNQNGAPLVAILVSGAIAIVLLLTGSFESLAKLSVVFRFFQYIPTALAVMKLRKDDPDANVIFRVPFGPIIPILAVIVSLVMIWGDNPMNFVYGAVGVIIASSVYYLMHGRNHQMDQMPPKEQI

SEQ ID NO: 3115 - DNA, 1011 bp, Streptococcus agalactiae
atgacacaagtatttcaaggacgtagtttcttagcagaaaaagatttttctcgtgaggaatttgaatatcttattgatttttcagctcatttaaaagaccttaaaaaacgtggtgttcctcatcattatcttgaaggtaaaaatattgctctcttatttgaaaaaacatctactcgtactcgcgcagcctttacaactgcagcaattgacctaggcgctcatccggaataccttggtgcaaatgatattcaacttggtaaaaaagaatcaacagaagatactgctaaggttttaggacgtatgtttgatggtattgaattccgtggttttagccaaagaatggttgaagagcttgctgaattttctggagtacctgtctggaatggtttaacagatgaatggcatccaacacaaatgctagctgactaccttactatcaaagaaaacttcggtaaacttgaaggtattactcttgtttactgtggtgacggacgtaacaatgttgccaactcgcttttagtggctgggactttgatgggggtcaatgtacacatcttttctccaaaagaacttttccctgctgaagagattgttaaattggctgaagaatatgccaaagagtccggggctcacgttctcgttactgataatgtagacgaagctgtaaagggagcagatgtcttttacactgatgtctgggtatcgatgggagaagaagataagttcaaagaacgcgttgaacttcttcaaccatatcaagtaaacatggaactgattaaaaaagctaataatgataatcttatcttcttacactgcttacctgcattccatgatacaaataccgtttacggcaaagacgtcgctgaaaaatttggcgtcaaggaaatggaagttactgatgaagtcttccgtagcaaatatgctcgtcatttcgaccaagctgaaaatcgtatgcacactattaaagctgtaatggctgcaacccttggaaatcttttcattccaaaagtt

SEQ ID NO: 3116 - protein, 337 aa, Streptococcus agalactiae
MTQVFQGRSFLAEKDFSREEFEYLIDFSAHLKDLKKRGVPHHYLEGKNIALLFEKTSTRTRAAFTTAAIDLGAHPEYLGANDIQLGKKESTEDTAKVLGRMFDGIEFRGFSQRMVEELAEFSGVPVWNGLTDEWHPTQMLADYLTIKENFGKLEGITLVYCGDGRNNVANSLLVAGTLMGVNVHIFSPKELFPAEEIVKLAEEYAKESGAHVLVTDNVDEAVKGADVFYTDVWVSMGEEDKFKERVELLQPYQVNMELIKKANNDNLIFLHCLPAFHDTNTVYGKDVAEKFGVKEMEVTDEVFRSKYARHFDQAENRMHTIKAVMAATLGNLFIPKV

SEQ ID NO: 3117 - DNA, 1011 bp, Streptococcus pyogenes
atgacacaagtatttcaaggacgtagcttcctagcagaaaaagattttacacgcgctgaattagaataccttattgatttttcagcacatttgaaagatttgaaaaaacgtggtgtgcctcatcactacttagaaggtaaaaacattgccctcttgtttgaaaaaacatcaactcgtacgcgtgcagcttttacaacagcagccattgacctaggtgctcacccagaatacctcggtgccaatgacatccaacttggtaaaaaagaatcaacagaagacactgctaaagtattgggtcgtatgtttgatgggattgaattccgtggctttagccaacgcatggttgaagaattggcagaattctcaggtgtgccagtttggaatggtttgactgatgaatggcacccaacccaaatgcttgctgactattttacagtgaaagaaaactttggcaaacttgaaggccttacccttgtttactgtggtgacgggcgtaataacgttgccaattcccttcttgtgactggtgctatccttggtgttaatgttcatatcttctcaccaaaagaacttttcccagaagaagagattgtgacattggctgaaggctatgctaaagaaagtggcgctcgtatccttatcacagaagatgctgacgaagctgttaaaggcgcagacgtgctttacacagatgtttgggtatcaatgggtgaagaagacaaattcaaagaacgtgttgaattgcttcaaccatatcaagtcaacatggaccttgttcaaaaagcaggaaatgacaagcttatcttcttgcactgcttgccagctttccatgacacaaataccgtttatggtaaagacgttgctgaaaaattcggcgtgaaagaaatggaagtcactgatgaagtcttccgcagcaaatacgctcgtcattttgaccaagctgaaaaccgcatgcacactatcaaagcggttatggcagcaacccttggtaacctctttattccaaaagtg

SEQ ID NO: 3118 - protein, 337 aa, Streptococcus pyogenes
MTQVFQGRSFLAEKDFTRAELEYLIDFSAHLKDLKKRGVPHHYLEGKNIALLFEKTSTRTRAAFTTAAIDLGAHPEYLGANDIQLGKKESTEDTAKVLGRMFDGIEFRGFSQRMVEELAEFSGVPVWNGLTDEWHPTQMLADYFTVKENFGKLEGLTLVYCGDGRNNVANSLLVTGAILGVNVHIFSPKELFPEEEIVTLAEGYAKESGARILITEDADEAVKGADVLYTDVWVSMGEEDKFKERVELLQPYQVNMDLVQKAGNDKLIFLHCLPAFHDTNTVYGKDVAEKFGVKEMEVTDEVFRSKYARHFDQAENRMHTIKAVMAATLGNLFIPKV

SEQ ID NO: 3119 - DNA, 429 bp, Streptococcus agalactiae
atgaagctattagtcaatcacttgccttaccaaagagctgcaagcctatatattcgcttttctgttttcgttatcgaaagaaatataaaaatggaagaagaattcgatgataatgacgagcaagatactatttatgctgttctttatgatgggaaacagccagtttcaacaggacgctttcttcctgaaactcaaacagaagctcgtttgactcgaattgcgactttaaaaggttatcgtggtaacggctatggtaccaaaattattatagcactagaaaattatgcaaaagaaaatggttatcactatctaactatacatgctgaattgacagcaaaagatttctaccagacacttgggtatcaagctactgggaatatttatatggaagacggggaagcctgtcaaacactcgaaaaatatttaatt

SEQ ID NO: 3120 - protein, 143 aa, Streptococcus agalactiae
MKLLVNHLPYQRAASLYIRFSVFVIERNIKMEEEFDDNDEQDTIYAVLYDGKQPVSTGRFLPETQTEARLTRIATLKGYRGNGYGTKIIIALENYAKENGYHYLTIHAELTAKDFYQTLGYQATGNIYMEDGEACQTLEKYLI

SEQ ID NO: 3121 - DNA, 426 bp, Streptococcus pyogenes
atggcagataaatttgatgccaatgacgaaacaagaacggtttatgcagtcgtttatgacaatgaccagcccgtttcaacaggacaatttttagctgaaacgaaaatagaagcacgattgacacgcattgtaaccttagcagattattgtggttgcggttatggtgccaaagtcactgaagcgctcgaaacttataccagacgagaaggcttttaccaactaaccattcacagtgaactgacagcacaaaccttttatgaaaacctaggttatcagtcctatggtcccaagtgtttagaagatggtgagtattgtcagtcccttgcaaaaaccattcttaaatgggagaagaatatggacatagcaatgctaattgcgattgttggtggtctattaggctgctatctctatctcacaaaaaataat

SEQ ID NO: 3122 - protein, 142 aa, Streptococcus pyogenes
MADKFDANDETRTVYAVVYDNDQPVSTGQFLAETKIEARLTRIVTLADYCGCGYGAKVTEALETYTRREGFYQLTIHSELTAQTFYENLGYQSYGPKCLEDGEYCQSLAKTILKWEKNMDIAMLIAIVGGLLGCYLYLTKNN

SEQ ID NO: 3123 - DNA, 1230 bp, Streptococcus agalactiae
atgactcaaacacatccaattcatgttttctcagaaattggaaaacttaaaaaagttatgctacaccgtccaggtaaagaaatagaaaatctgatgcctgattatttagagagactcttgtttgatgatatcccatttttggaagatgcacaaaaagaacacgatgcgtttgcacaagcacttcgcaacgaaggagtcgaagtactttaccttgaaaatcttgctgccgagtcgttaacaaaccaagaaattcgtgaacagtttatcgatgagtacattggcgaagcaaatgttcgcggtcgtgctactaaaaaagctattcgagaattattactcaatatcaaagataataaagaacttatcgaaaaaactatggcaggtatccaaaagtctgagctacctgaaatcccatcttctgaaaaaggtctaactgatcttgtcgaatctaattatccatttgccatagatccgatgccaaatctttactttacacgtgatccatttgcaactattgggaatggagtttcattaaatcatatgttctctgaaacacgtaatcgcgaaactttatacggtaaatatatctttacacatcacccagagtacggtggaaaagtccctatggtctatgaacgtgaagaaacaactcgtattgaaggtggagatgagcttgtcctttctaaagatgtccttgccgttggtatctctcaacgtactgatgctgcctctattgaaaaactcttagtcaatatttttaaacaaaatttaggttttaaaaaggttttagcatttgaatttgcaaataatcgtaaatttatgcaccttgacacagtctttacaatggttgactatgacaagtttacaattcacccagaaattgaaggcgatcttcgcgtttactctgtaacttacgaaaaccaagatcttcatattgaagaagaaaaaggtgatttggcagatcttctagcgaaaaacctaggagttgagaaagtggaattgattcgttgtgggggtgacaacttagtcgctgctggacgtgaacaatggaatgatggttcaaatacattaactatagcaccaggtgtcgttatcgtttacaacagaaatacaatcacaaatgcaatcttagagtccaaaggattgaaattaattaagattaatggaagtgaattagttcgtgggcgtggtggaccacgctgcatgtcaatgccatttgaacgtgaagacctt

SEQ ID NO: 3124 - protein, 410 aa, Streptococcus agalactiae
MTQTHPIHVFSEIGKLKKVMLHRPGKEIENLMPDYLERLLFDDIPFLEDAQKEHDAFAQALRNEGVEVLYLENLAAESLTNQEIREQFIDEYIGEANVRGRATKKAIRELLLNIKDNKELIEKTMAGIQKSELPEIPSSEKGLTDLVESNYPFAIDPMPNLYFTRDPFATIGNGVSLNHMFSETRNRETLYGKYIFTHHPEYGGKVPMVYEREETTRIEGGDELVLSKDVLAVGISQRTDAASIEKLLVNIFKQNLGFKKVLAFEFANNRKFMHLDTVFTMVDYDKFTIHPEIEGDLRVYSVTYENQDLHIEEEKGDLADLLAKNLGVEKVELIRCGGDNLVAAGREQWNDGSNTLTIAPGVVIVYNRNTITNAILESKGLKLIKINGSELVRGRGGPRCMSMPFEREDL

SEQ ID NO: 3125 - DNA, 1233 bp, Streptococcus pyogenes
atgactgctcaaacaccaattcatgtttattctgaaattggaaaattaaaaaaagtgttgctccacagacccggtaaagaaattgaaaatcttatgccagactacttggaacgcttgttgtttgatgatattccattcttagaggatgcccaaaaagaacatgatgcttttgcccaagctttgcgtgacgaaggtattgaagtcttgtaccttgagaccttagctgcagaatctcttgtcactccagaaattcgcgaagctttcatcgatgaatacctaagtgaagctaatatccgtggaagagctactaaaaaagccattcgtgaattgttgatggctatcgaagacaatcaagaattgattgaaaaaaccatggcaggagttcaaaaatctgaacttccagagatcccagcatctgaaaaaggcttgactgacttggttgaatccaattacccatttgccatcgacccaatgccaaacctttatttcacacgggacccattcgcaactatcggtacaggtgtttctcttaaccacatgttctcagaaacccgtaaccgtgaaaccctttatggtaaatacattttcactcatcacccaatttatggtggtggtaaagtgcctatggtttatgaccgtaatgaaaccactcgcattgaaggtggggacgaacttgttctttcaaaagatgtgcttgcggttggtatttctcaacgtacagatgctgcttctattgaaaaattgttggttaacatctttaaacaaaaccttggcttcaagaaagtattggcctttgaatttgcaaataaccgtaaatttatgcacttagacactgtctttaccatggttgactatgacaaattcaccattcacccagaaattgaaggcgaccttcgtgtttactctgtcacttacgacaatgaagaacttcatatcgttgaagaaaaaggtgatttagcagaacttcttgctgctaaccttggtgttgaaaaagttgaccttatccgttgtggtggtgacaacttagtagcagcaggtcgtgaacaatggaacgatggttctaataccttgaccatcgcaccaggtgtggttgtggtttataaccgtaacaccattaccaatgccattcttgaatctaaaggcttgaagttgatcaagattcacggaagtgaattggttcgcggtcgtggtggacctcgttgtatgtcaatgccatttgaacgtgaagatatt

SEQ ID NO: 3126 - protein, 411 aa, Streptococcus pyogenes
MTAQTPIHVYSEIGKLKKVLLHRPGKEIENLMPDYLERLLFDDIPFLEDAQKEHDAFAQALRDEGIEVLYLETLAAESLVTPEIREAFIDEYLSEANIRGRATKKAIRELLMAIEDNQELIEKTMAGVQKSELPEIPASEKGLTDLVESNYPFAIDPMPNLYFTRDPFATIGTGVSLNHMFSETRNRETLYGKYIFTHHPIYGGGKVPMVYDRNETTRIEGGDELVLSKDVLAVGISQRTDAASIEKLLVNIFKQNLGFKKVLAFEFANNRKFMHLDTVFTMVDYDKFTIHPEIEGDLRVYSVTYDNEELHIVEEKGDLAELLAANLGVEKVDLIRCGGDNLVAAGREQWNDGSNTLTIAPGVVVVYNRNTITNAILESKGLKLIKIHGSELVRGRGGPRCMSMPFEREDI

SEQ ID NO: 3127 - DNA, 618 bp, Streptococcus agalactiae
atggacagaaaccttgaaacagaacttaaacagttactgtctgatagtcattctttagcaaaaaaatatttgcaagagaaagaattcagtcaaaacagagttatccaaacttatcgcaaagcatatcaaacctttaaaactaaaaaaggtgcacgttcaagtatcgaagcattattgaagcgagttaattcaggaaacgaaattactagtataaatcctctagttgatatctataatgccgctagccttaggtttggattacctattggtgctgaggatagtgatacatttagaggtgatttaaaactaactattaccaatggtggtgatgaattttacttgattggcgaagattttaacagaccaactctttcaggtgagcttgcctatgttgatgatgttggagcagtttgccgctgttttaattggcgtgatggaaaacgtactatgattaccgataatactcagaatgcttttttagttatcgaattaattgataatggaagagaaattatttttaaagaagcgttggactttatcgccaccaatacaaatcgttttctaaaagctaaaacacagaccatcatattagataaagaacacagtgaaataacgcta

SEQ ID NO: 3128 - protein, 206 aa, Streptococcus agalactiae
MDRNLETELKQLLSDSHSLAKKYLQEKEFSQNRVIQTYRKAYQTFKTKKGARSSIEALLKRVNSGNEITSINPLVDIYNAASLRFGLPIGAEDSDTFRGDLKLTITNGGDEFYLIGEDFNRPTLSGELAYVDDVGAVCRCFNWRDGKRTMITDNTQNAFLVIELIDNGREIIFKEALDFIATNTNRFLKAKTQTIILDKEHSEITL

SEQ ID NO: 3129 - DNA, 714 bp, Streptococcus pyogenes
atggttgaatttgtagcagatcaaagtttttgggaactttttccaggtgccaaactaggtgtcgtcttattaaaggatgttcagaaccaagcagagtcaccagaagatgtcaaacagctcttagcagacagccatgagttagcaaaagcttatttaacagcagacaattttagtgataatcaggtggttcaagtctaccgcaaggcctatcaacactttaaaaccaaaaaaggagctcgctctagcattgaagcccttctcaagcgggtgtcaaatggtcaaagcattccgtctattaacccactagtggatatttataatgcggctagtctacgttttggtttacctgctggagccgaagatagtgacagttttatcggagatttgcgtctgacgataacagatggtggtgacgacttttacttgattggggatgctgacaacaacccaaccttgccaaatgaactctgttataaagatgatattggagcgttttgtcgttgccttaactggcgagatggcgaacgcaccatggtgacagaacacaccaaaaatgcatttctgatcatcgaagctcttgatcaagaaggtcaaaatagattgcaagaagctctgaaattcattgaaggcagcgcaaaaatgtaccttcatgcaatcacttctgtgcatgtgttggataaagacaatccacacgtgccactttttacagaaaac

SEQ ID NO: 3130 - protein, 238 aa, Streptococcus pyogenes
MVEFVADQSFWELFPGAKLGVVLLKDVQNQAESPEDVKQLLADSHELAKAYLTADNFSDNQVVQVYRKAYQHFKTKKGARSSIEALLKRVSNGQSIPSINPLVDIYNAASLRFGLPAGAEDSDSFIGDLRLTITDGGDDFYLIGDADNNPTLPNELCYKDDIGAFCRCLNWRDGERTMVTEHTKNAFLIIEALDQEGQNRLQEALKFIEGSAKMYLHAITSVHVLDKDNPHVPLFTEN

SEQ ID NO: 3131 - DNA, 93 bp, Streptococcus agalactiae
ttgattaagattactccaattttagaagttggaaacaaattccagtacgatgaatcaacaataaatttagtcatgaaggcctctcaatttttt

SEQ ID NO: 3132 - protein, 31 aa, Streptococcus agalactiae
MIKITPILEVGNKFQYDESTINLVMKASQFF

SEQ ID NO: 3133 - DNA, 678 bp, Streptococcus agalactiae
gtgattacaaaagaacaatatttttatttcagacaactagatgattttaaacactttactattgaacaatttgaccatattgtgagccacattaaacatcgtacagctctaaaaaatcataccttattttttgaaggtgattaccgtgaaaaactgtttttaatccagtcaggacatgtaaaaattgaacaatcagacgcttctggttctttcatttatacagattatgttagacaaggtacggtttttccttatggaggtctctttttggatgatgattaccatttttcagcagtggctattacggatattgagtatttttctctgccaatggctttatacgaagaatactctcttcaaaatatcaatcaaatgaagcatctttgtcggaaatattctaagctattacgagttcatgaaatacgacttcgtaatatggtgacttcaagtgccagtatgagagttatccaatcgcttgcaactctacttttgcaagttcctacagaaaggggacatttaccttttcctattacaacgattgaaattgccaatatgagcggaactactcgcgagacagttagtcatgttttaaaggaattacgccaaaaagatatcgttgaaatgaaaggaaagaagcttctctataataataaaaattatttcaagaaattcattgaa

SEQ ID NO: 3134 - protein, 226 aa, Streptococcus agalactiae
MITKEQYFYFRQLDDFKHFTIEQFDHIVSHIKHRTALKNHTLFFEGDYREKLFLIQSGHVKIEQSDASGSFIYTDYVRQGTVFPYGGLFLDDDYHFSAVAITDIEYFSLPMALYEEYSLQNINQMKHLCRKYSKLLRVHEIRLRNMVTSSASMRVIQSLATLLLQVPTERGHLPFPITTIEIANMSGTTRETVSHVLKELRQKDIVEMKGKKLLYNNKNYFKKFIE

SEQ ID NO: 3135 - DNA, 678 bp, Streptococcus pyogenes
gtgattcgaagagaagattatcaataccttagaaaactaaacgattttcgctacttttctattgaacaatttgacaaaattgtagggcagatggaattccgaaaagctaaaaaggaccatatccttttttttgagggagataaaagagataagctttttctagtgacctctggttatttcaaggtggagcagtccgatcaatcaggaaccttcatgtatacggatttcatcagacacggcaccatttttccttacggtggcctctttacagatgattattaccatttttcagtggtagccatgacagacgtgacttatttttactttccagtcgatttatttgaagattattcgcttgaaaatcgtctacaaatgaaacacttatatagtaagatgtctaagctgctcgagttacatgagttgagggtccgaaacttgattacatcaagtgctagttctcgtgtgattcaatctctggcgattttgctggttgaaatgggtaaagacagtgataccttaccttttcaattaacaacaacagatattgctcaaataagtgggacgacaagagaaacagttagccatgtgcttagagatttgaagaagcaagaattgattaccataaaaggtaagtatttgacttatctagataaagactattttttacaatacacaaag

SEQ ID NO: 3136 - protein, 226 aa, Streptococcus pyogenes
VIRREDYQYLRKLNDFRYFSIEQFDKIVGQMEFRKAKKDHILFFEGDKRDKLFLVTSGYFKVEQSDQSGTFMYTDFIRHGTIFPYGGLFTDDYYHFSVVAMTDVTYFYFPVDLFEDYSLENRLQMKHLYSKMSKLLELHELRVRNLITSSASSRVIQSLAILLVEMGKDSDTLPFQLTTTDIAQISGTTRETVSHVLRDLKKQELITIKGKYLTYLDKDYFLQYTK

SEQ ID NO: 3137 - DNA, 1482 bp, Streptococcus agalactiae
ttgatgtcaaattgggatactaagtttttgaaaaaaggttttacttttgatgatgttctgcttattcctgctgaaagccatgttttaccaaatgaagttgatatgaagacaaagttggctgataatttgacattaaacattccaatcattacagctgcaatggatacagttacagatagtaagatggctattgctattgcacgtgctggtgggcttggtatcattcataaaaatatgtcaatagttgatcaagcagaagaagttcgtaaagttaaacgctcagaaaatggtgttattattgacccattcttcttgacaccagataatactgtctctgaagctgaggaattgatgcaaaactatcgcattagtggagttcctattgtagagacactcgagaatcgtaaattagttggaattattactaaccgtgatatgcgtttcatttctgattataaacaactaatctcagagcacatgacaagtcaaaatcttgtaacagctcctattggtacagatcttgaaactgcagagcgtattcttcatgagcatcgtattgaaaagctacctttagtagatgatgagggacgtctttcaggacttattactattaaggatatcgaaaaagttattgaatttcctaaggcagcaaaagatgaatttggacgtctcttagttgcaggtgcagtaggtgtaacctctgatacttttgaacgtgcagaagctttgtttgaagcaggtgcagatgctattgtcattgatacagcacatggacattcagctggtgtgctccgtaaaattgctgaaattcgtgctcacttccctaatcgcacattgattgcgggaaatattgctacagcagaaggagcgcgtgcactttatgatgcaggtgtggatgtcgttaaagttggtattggtccaggttcaatttgtacgactcgtgtcgttgctggggtaggtgttcctcagattacagctatttacgatgcagcggctgttgcgcgtgagtacggtaagactatcattgctgatggtggtattaaatattcaggtgatattgtaaaagcacttgcagcaggtggaaatgcagttatgctaggttcaatgtttgcaggaacagatgaagcgccaggagaaacagaaattttccaagggcgtaagttcaagacataccgtggtatgggctcaattgcagcaatgaaaaaaggttcaagcgatcgttatttccaaggttctgtaaacgaggctaacaaattggttccagaaggtattgaaggtcgtgtagcatacaaaggttcagtagccgatattgttttccaaatgcttggtggcattcgctctggtatgggatatgtaggtgcagcgaacataaaagaacttcatgataatgctcaatttgttgaaatgtcaggagctggcttgaaagaaagccatccccatgatgttcaaattacaaatgaggcaccaaattattcagtacac

SEQ ID NO: 3138 - protein, 494 aa, Streptococcus agalactiae
MMSNWDTKFLKKGFTFDDVLLIPAESHVLPNEVDMKTKLADNLTLNIPIITAAMDTVTDSKMAIAIARAGGLGIIHKNMSIVDQAEEVRKVKRSENGVIIDPFFLTPDNTVSEAEELMQNYRISGVPIVETLENRKLVGIITNRDMRFISDYKQLISEHMTSQNLVTAPIGTDLETAERILHEHRIEKLPLVDDEGRLSGLITIKDIEKVIEFPKAAKDEFGRLLVAGAVGVTSDTFERAEALFEAGADAIVIDTAHGHSAGVLRKIAEIRAHFPNRTLIAGNIATAEGARALYDAGVDVVKVGIGPGSICTTRVVAGVGVPQITAIYDAAAVAREYGKTIIADGGIKYSGDIVKALAAGGNAVMLGSMFAGTDEAPGETEIFQGRKFKTYRGMGSIAAMKKGSSDRYFQGSVNEANKLVPEGIEGRVAYKGSVADIVFQMLGGIRSGMGYVGAANIKELHDNAQFVEMSGAGLKESHPHDVQITNEAPNYSVH

SEQ ID NO: 3139 - DNA, 660 bp, Streptococcus agalactiae
atgaaaaattatggaaaaattttaaaagagttgagagaggacaaaggtatatccctaagttctctagccaaaagtgctcaattatcaaaatcaactctatcacgttttgaaaatggtgagacacaaataggtattgataaatttattaaagctttacaaacgttggaggttggggtaactatcaatgaagtatccattctagattcaaaagttaaggctggaacttctaatactgatttagagcaattaactttactggaatcttatcgagataatgaagatatcatgagaattttcagtttccaaaaacaacaatcctgtgatagaatagaaagcaatgttctcaaaatattggctaaactttttatttcaaatttagggttaaatatgaggctgcctcaagatgagattaacctggtagttacttatctgaatggtgtgacacagtacaatgatttttatttcaaagtcatctgctattttcaagatattttacctgaagatgttattttaaataagattagtaatatgactaaagaacagttaccttattctaaatcactggtcaatttattgataaaacaagtcattatagctttggaaaaagatagtgttgataaagctatagtatttgctgatcttgctaataaagttagtcaa

SEQ ID NO: 3140 - protein, 220 aa, Streptococcus agalactiae
MKNYGKILKELREDKGISLSSLAKSAQLSKSTLSRFENGETQIGIDKFIKALQTLEVGVTINEVSILDSKVKAGTSNTDLEQLTLLESYRDNEDIMRIFSFQKQQSCDRIESNVLKILAKLFISNLGLNMRLPQDEINLVVTYLNGVTQYNDFYFKVICYFQDILPEDVILNKISNMTKEQLPYSKSLVNLLIKQVIIALEKDSVDKAIVFADLANKVSQ

SEQ ID NO: 3141 - DNA, 864 bp, Streptococcus agalactiae
ttggaaggtttacttattgcattgattcccatgtttgcgtggggaagtattggatttgttagtaataaaattggaggacgtccaaatcaacaaacatttggaatgactttaggagcattgctatttgcgattatcgtatggttatttaaacagccagagatgactgcctcattgtggatttttggtatcttaggtggtatcctatggtcagtcggccaaaatggtcaattccaagcaatgaaatatatgggagtctctgttgctaatccactgtcaagtggtgcacaattagtaggtggaagcctagttggtgctttagtctttcatgaatggactaagccaatccaatttattttaggattgacagcgttgacattattagttatcggcttctatttctcaagtaaacgtgatgtctcagaacaagctttggcaacacatcaagagttttcaaaaggatttgctacaattgcttattcaactgtaggttacatctcatacgcagttttatttaataacattatgaagttcgacgctatggccgttattttacccatggctgttggaatgtgtctaggtgcaatttgtttcatgaagtttcgtgttaactttgaggctgttgttgttaaaaatatgattacaggtctcatgtggggcgttggtaatgtcttcatgttattggcagcagctaaagcagggctagcaattgcttttagtttttctcaacttggagtaattatctctattattggtggtattttatttttaggtgagacaaaaacgaagaaagagcagaagtgggttgtcatgggtatcctttgttttgttatgggtgctatattacttggtattgttaaatcttat

SEQ ID NO: 3142 - protein, 288 aa, Streptococcus agalactiae
MEGLLIALIPMFAWGSIGFVSNKIGGRPNQQTFGMTLGALLFAIIVWLFKQPEMTASLWIFGILGGILWSVGQNGQFQAMKYMGVSVANPLSSGAQLVGGSLVGALVFHEWTKPIQFILGLTALTLLVIGFYFSSKRDVSEQALATHQEFSKGFATIAYSTVGYISYAVLFNNIMKFDAMAVILPMAVGMCLGAICFMKFRVNFEAVVVKNMITGLMWGVGNVFMLLAAAKAGLAIAFSFSQLGVIISIIGGILFLGETKTKKEQKWVVMGILCFVMGAILLGIVKSY

SEQ ID NO: 3143 - DNA, 861 bp, Streptococcus pyogenes
ttggaaggtattttttatgcacttattcccatgtttacatggggaagcattggatttgttagtaacaaaattggaggaaaaccttcgcaacaaactctaggaatgacttttggggctttattattttcattagctgtttggttaattgttagacctgagatgacactgcaactttggctttttggaatattgggtggttttatctggtcaattggtcaaactggtcaatttcatgccatgcaatacatgggagtctccgttgccaatcctttgtcaagtggctctcaacttgttctgggaagtttgattggtgtcctcgtttttcatgaatggacaagacctatgcaatttgtagtaggaagtctagcactattacttctgattgttggtttttacttttctagtaaacaagatgatgctaatgcacaagtcaatcaccttcataatttttcaaaaggatttagggcgctcacttattcaacaattggttacgtgatgtatgctgtattatttaataacatcatgaaatttgaagttttgtcagtcattttacccatggcagtaggtatggttttaggagctataactttcatgtcatttaaaatttccattgaccagtatgtgattaaaaatagcgttgttggattactttggggcattgggaatatttttatgcttttagctgcatcaaaagcaggacttgctattgcctttagtttctcacaattaggtgctatcatttcgattgtcggaggcattttattcctaggcgaaaccaaaaccaaaaaagaaatgcgttgggttgtcacaggaattatttgttttatcgtaggtgctattttattaggtgtggtcaaatct

SEQ ID NO: 3144 - protein, 287 aa, Streptococcus pyogenes
LEGIFYALIPMFTWGSIGFVSNKIGGKPSQQTLGMTFGALLFSLAVWLIVRPEMTLQLWLFGILGGFIWSIGQTGQFHAMQYMGVSVANPLSSGSQLVLGSLIGVLVFHEWTRPMQFVVGSLALLLLIVGFYFSSKQDDANAQVNHLHNFSKGFRALTYSTIGYVMYAVLFNNIMKFEVLSVILPMAVGMVLGAITFMSFKISIDQYVIKNSVVGLLWGIGNIFMLLAASKAGLAIAFSFSQLGAIISIVGGILFLGETKTKKEMRWVVTGIICFIVGAILLGVVKS

SEQ ID NO: 3145 - DNA, 1107 bp, Streptococcus agalactiae
atgtggataaaaaatatttctttaaaacattatcgtaattatgaagaagcacaagtagatttttcacccaacctcaatattttcattggccgcaatgctcaaggaaagacaaattttttagaagcaatctacttcttggctttgactcgaagtcaccgtacccgttctgataaagaacttgtacattttaaacaccatgatgtacaaattacaggtgaggtaatccgcaaaagtggccatcttaacttagatattcaattatctgaaaaaggaagaatcactaaagttaaccatcttaaacaggcaaaattatctgattatattggggctatgactgtcgtactttttgcccctgaagatcttcaattagttaaaggtgcacctagtctaagacgaaaatttttagatatagatattggacaaattaagccaacgtacttagctgaactttcaaattacaatcatgtattaaaacaaagaaacacttatctaaaaactactaataacgtcgacaaaacttttttaacagtccttgatgaacaattagctgattatggaagtcgtgtcattgaacaccgttttgattttatccaagccctaaatgatgaagcggacaaacatcactacattatcagtactgagttagaacatttatctattcactacaaatcgtcaatagagtttacagataagtcaagtattagggaacattttttaaaccaattatctaaaagccactcaagagacatctttaagaaaaacacaagcatcggacctcatcgtgatgatattactttctttattaatgatatcaatgctacttttgctagccaagggcaacaaagaagccttattttatcattgaaattagcagaaattgagctaataaaaaccgttaccaacgattatccgattctcttacttgacgacgtcatgagtgaacttgacaaccatcgtcaactaaaactcttagagggaatcaaagagaatgttcaaacatttattactacaacaagtttagaacatttaagtgctttacctgatcaactcaaaatctttaacgttagtgatggtactattagtattaatgaaaaaaaagcaacagat

SEQ ID NO: 3146 - protein, 369 aa, Streptococcus agalactiae
MWIKNISLKHYRNYEEAQVDFSPNLNIFIGRNAQGKTNFLEAIYFLALTRSHRTRSDKELVHFKHHDVQITGEVIRKSGHLNLDIQLSEKGRITKVNHLKQAKLSDYIGAMTVVLFAPEDLQLVKGAPSLRRKFLDIDIGQIKPTYLAELSNYNHVLKQRNTYLKTTNNVDKTFLTVLDEQLADYGSRVIEHRFDFIQALNDEADKHHYIISTELEHLSIHYKSSIEFTDKSSIREHFLNQLSKSHSRDIFKKNTSIGPHRDDITFFINDINATFASQGQQRSLILSLKLAEIELIKTVTNDYPILLLDDVMSELDNHRQLKLLEGIKENVQTFITTTSLEHLSALPDQLKIFNVSDGTISINEKKATD

SEQ ID NO: 3147 - DNA, 1104 bp, Streptococcus pyogenes
atgtggattaaagagttagagttaaaacattatcgcaattatgaccacctgcttgcctcattttcgtcgggtttaaatgtctttatcggtaataatgctcaaggaaaaaccaattttctcgaggcaatctattttctatcacttactagaagtcatcgcacgagggctgataaagaattgattcattttgatcactcaactgtttctcttactggtaagattcagcgtattagtggtactgttgatttagaaatcaatctatcagataaaggacgtgtgacaaagattaatgcgctaaagcaagcaaaattatctgattatattggaacgatgatggttgtgctttttgcaccagaagatttgcaactagttaagggagcacctagccttcgtcgcaaatttatcgacattgaccttggtcaaattaagcctgtttacttatctgagttatcccattataaccacgtgcttaaacagcgtaatagctatttaaaaagtgcccaacaaattgatgccgcttttctagctgttctagatgagcaattagctagctatggagcccgtgtcatggaacatcgtattgattttatcaatgcgttagagaaagaagcaaatactcatcaccaagccatctcaaatggtttagaaagtctctctctctcctatcagtcgtcagttgtctttgacaaaaaaactaatatttaccaacaatttttacaccaacttgaaaaaaatcatcagaaagatttcttccgtaaaaacactagcgttggtccacatcgcgatgaattagccttttacattaacgggatgaatgctaactttgctagtcaaggtcagcaccgcagccttatcctttccttaaaaatggctgaagttagtttaatgaaggccttgactggagataatcccattcttttactagacgatgtcatgagcgagctagacaatacacgacaaacaaagttacttgaaacagtaattaaagaaaatgtccaaacctttatcacaacaacaagtttggatcacctgtcacagttgccagaaggtatccgtatttttcacgtgacaaaaggaaccgttcaaattgattctgatattcac

SEQ ID NO: 3148 - protein, 368 aa, Streptococcus pyogenes
MWIKELELKHYRNYDHLLASFSSGLNVFIGNNAQGKTNFLEAIYFLSLTRSHRTRADKELIHFDHSTVSLTGKIQRISGTVDLEINLSDKGRVTKINALKQAKLSDYIGTMMVVLFAPEDLQLVKGAPSLRRKFIDIDLGQIKPVYLSELSHYNHVLKQRNSYLKSAQQIDAAFLAVLDEQLASYGARVMEHRIDFINALEKEANTHHQAISNGLESLSLSYQSSVVFDKKTNIYQQFLHQLEKNHQKDFFRKNTSVGPHRDELAFYINGMNANFASQGQHRSLILSLKMAEVSLMKALTGDNPILLLDDVMSELDNTRQTKLLETVIKENVQTFITTTSLDHLSQLPEGIRIFHVTKGTVQIDSDIH

SEQ ID NO: 3149 - DNA, 351 bp, Streptococcus agalactiae
atggattataaattatttgatgaatatattactttacaatcacttctaaaagagattggtatcattcaaagtggcggagccattaaaaaatttttagcggataatcgagtattgtttaacggtgaccttgaaaataggcgtggaaagaaactccgcctgggggatattattactattcctgatcaaaatatcgagatcattataaggaagccatcagatcaagaaattgaagaacgtaatatagaaatagctgaaaaacagcgtgtttcagcaatcgttaaagaaatgaataaaaacaccaacaaaggtaaatcaaaaactagcaaaaaaccagttcgctttccagggaca

SEQ ID NO: 3150 - protein, 117 aa, Streptococcus agalactiae
MDYKLFDEYITLQSLLKEIGIIQSGGAIKKFLADNRVLFNGDLENRRGKKLRLGDIITIPDQNIEIIIRKPSDQEIEERNIEIAEKQRVSAIVKEMNKNTNKGKSKTSKKPVRFPGT

SEQ ID NO: 3151 - DNA, 435 bp, Streptococcus pyogenes
ttgaatgacaaaatggagatgacaatgatatacaaattatttacagaatttatcaccctacaagcccttcttaaagaattaggaattatccaaagtggtggcgctatcaagggatttctcgctgaaacaaccgttctatttaatggtgaagatgagaaacgtcgaggcaaaaaaatcagagtaggggataagatttctctacctgaccaagacttaattatcactattgttgagcctagtcaagaagaaaaagaacaatttgccgaagaaatggctgaaaagacacgtgtagcggctctagtgaaacaaatgaaccaagctaacaaaaagacttcttctaaacataacaatcgtcaatctactaccaaaaaatcactaagagcaactaagaaaactaaaggtaaaccaactgcacctgtccgcttcccaggtatc

SEQ ID NO: 3152 - protein, 145 aa, Streptococcus pyogenes
LNDKMEMTMIYKLFTEFITLQALLKELGIIQSGGAIKGFLAETTVLFNGEDEKRRGKKIRVGDKISLPDQDLIITIVEPSQEEKEQFAEEMAEKTRVAALVKQMNQANKKTSSKHNNRQSTTKKSLRATKKTKGKPTAPVRFPGI

SEQ ID NO: 3153 - DNA, 1242 bp, Streptococcus agalactiae
atgaaaatagttgaaggcgtttctctacatttaattaaaaaccaacaatttaagactaatcatcttacttttcgattttcaggtgattttaataataaaacagtagcacgtagatcgctcgttgctcaaatgttagttactgcaaatgctaagtatcctaaggtacaagaatttcgagaaaagttagcttccttatatggcgctagtttatcaactaagatttctactaagggtcttgttcacattgttgatattgatattgtatttgttaaaaatacctttactttagaacaagaaaatatcgttgaacaaattattacattcttggaggatatgctgttttctcctttaatttctttagaacagtatcaaacatctatttttgatactgagaagaaaaaccttattcaatatttagaggctgatattgaagataatttttatagcagtgacttagcactaaaatctttattctacaataataagacacttcgtttacctaagtatggtacagcatctttagtggaatcagaaaattcatttacagcttatcaagaatttcagaagatgcttaaggaagatcaattagatatttttgtcgtaggggattttgatgactatcgaatgattcaggcttttaatcgtatggcatttgagccacgtcacaaagtattagcttttgattatacgcagacttatgaaaatataacgagaagtcaagtagaagataaggacgttaatcaatctattatgcaattggcttatcatcttccaataacttataaagatgaagattattttgctttaatagtatttaacggtttatttggtgcttttgcccactccttgttgtttacagaaattcgagaaaagcaaggtttagcctatactataggtagtcaatttgacagctttacaggtctctttacgatatatgcaggtattgataaagagaatcgtgagcgttttttgaagcttattaataagcaattcaataatattaagatgggcaggttttcttctacattattgaaacaaacaaaagatatattgaaaatgaactatgttttagcttctgataatcctaaggtcatagttgaccacatttatcatgaacattatttagatcagtttcatacttcagcactattcattgacaaagtagacgatgtaacaaaatcagatattgtcagcgtagcaacaaaattaaaattacaagctttttattttttggaaggaaac

SEQ ID NO: 3154 - protein, 414 aa, Streptococcus agalactiae
MKIVEGVSLHLIKNQQFKTNHLTFRFSGDFNNKTVARRSLVAQMLVTANAKYPKVQEFREKLASLYGASLSTKISTKGLVHIVDIDIVFVKNTFTLEQENIVEQIITFLEDMLFSPLISLEQYQTSIFDTEKKNLIQYLEADIEDNFYSSDLALKSLFYNNKTLRLPKYGTASLVESENSFTAYQEFQKMLKEDQLDIFVVGDFDDYRMIQAFNRMAFEPRHKVLAFDYTQTYENITRSQVEDKDVNQSIMQLAYHLPITYKDEDYFALIVFNGLFGAFAHSLLFTEIREKQGLAYTIGSQFDSFTGLFTIYAGIDKENRERFLKLINKQFNNIKMGRFSSTLLKQTKDILKMNYVLASDNPKVIVDHIYHEHYLDQFHTSALFIDKVDDVTKSDIVSVATKLKLQAFYFLEGN

SEQ ID NO: 3155 - DNA, 1242 bp, Streptococcus pyogenes
atgaaaattgttcagggagtacaacttcatctgattaagaccaaacagtttaaaaccaatcatattacctttcgtttttcaggtgatttgaaccaaaaaacagtagcaaaaaaagtcttagtggcacagatgttagcaacagctaatgagtgttatccaactgttaggcagtttagagaaaaattagcacgactttatggagctagcttgtcaactaacgtgttaacaaaagggttagttcatattgtggatatcgatattacttttattcaagatagatatgcttgcaatggggaaaaaatactagatgaaatgattcagtttttaaaagatatcttgttctcacccctattatccatcgcccagtatcagcctaaagtttttgagactgaaaaaaataatttgattaactacatcgagtcagatagagaggattctttttactacagctctcttaaggtaaaagaattgttttattgtaataagaatctacaaatgtcagaatatggtagcccagaactaattgcaaaagagactgcctatactagctatcaagaatttcataaaatgctcaatgaagatcagattgatattttcattttaggagattttgatgattatcgcgttgttcagctaattcatcaatttccacttgataaccgaaataaaaacctaaatttctttcatttacaaaattctgtcaatattattaaagaatctattgaaaaaagagcagttcatcaatctattttacaattagcttatcacttcccttcagtttttggacaacgtgactattatgctttagttcttttaaatgggttgttaggctcttttgcacattcccgtctctttataaaaattagagaagaagaaggacttgcttatagtatagggtgtcgttttgatagttatacaggattatttgaaatttatactggaattgacagtcaacatcgcactaaaacgttacaactaatcatccaagaattaaatgccattaaaatgggacgattctcagaacaattgattaaaaagaccagatcgatgttgttgaataatgccttattatcagaagattataataaaaatataattgaaagaatatacagatcttcttacattgattcttcttattctattaaaaattggattaaaggggttaatgaagttaataaagcagatatcattaaagtagctaatcttttaaagcttcaaactgtctattttttagaaggaata

SEQ ID NO: 3156 - protein, 414 aa, Streptococcus pyogenes
MKIVQGVQLHLIKTKQFKTNHITFRFSGDLNQKTVAKKVLVAQMLATANECYPTVRQFREKLARLYGASLSTNVLTKGLVHIVDIDITFIQDRYACNGEKILDEMIQFLKDILFSPLLSIAQYQPKVFETEKNNLINYIESDREDSFYYSSLKVKELFYCNKNLQMSEYGSPELIAKETAYTSYQEFHKMLNEDQIDIFILGDFDDYRVVQLIHQFPLDNRNKNLNFFHLQNSVNIIKESIEKRAVHQSILQLAYHFPSVFGQRDYYALVLLNGLLGSFAHSRLFIKIREEEGLAYSIGCRFDSYTGLFEIYTGIDSQHRTKTLQLIIQELNAIKMGRFSEQLIKKTRSMLLNNALLSEDYNKNIIERIYRSSYIDSSYSIKNWIKGVNEVNKADIIKVANLLKLQTVYFLEGI

SEQ ID NO: 3157 - DNA, 1281 bp, Streptococcus agalactiae
atgacagttaataaaataacttatcagaaccttcaggaggaagtatataagttaacattagagagcggactaaatgtataccttattccaaagccatcatttaaggaaactgttggagtattgacagcaaattttggatcactccatacaaaatatacgaggaatggttgtgtagaacattatccggcaggaattgctcacttcttagaacataaattatttgaactggataaaggacaagacgctgcaactcaatttactaaatatggcgccgagagtaacgcctttacaacttttgataaaactagtttttatttttcaactataagtcacattacaaactgcttagatatactacttgactttgtattgacaacaaactttacagaagagtcaattactaaagaaaaagatattatcaaacaagaaattgaaatgtatcaagatgacccagaatataggctttatcaaggagtgttatcgaacctttaccccaactctccattagcatttgatatcgctggagattaccaatcaatctctcaaataaccttaaccgatttacaagaaaatcacaaagacttttatcagttgtctaatatgaatttagttcttgttggacaatttagtccacaagaaattataacttaccttcaaaaaaattctcatttcacaagttactcacagaatattgaccgagattctattagccttgagcctgttataaaaaacaactcttgccatatgacagtgacaaaacctaaattagctattggttatcgaaaatcaaatcatatgatacatggttcttacctaaaagagaaaatcggattacagctattttttgcaatgcttttaggatggacttctacaattaaccaagactggtacgaatctggtcaaattgatgattcttttgatatagaaattgaagttcatccagattttgagtgcgttattatttctttagatacgacagagccaattgctttttcaactcagttgaggttattgctaaaaaatgctttgcaatcatctgatcttaccgaaagccacttaaaaaacgttaagagagagctctatggcgattttttaagaagcttagattctattgaaaatctcgcaatgcaattcgtcacctatttatatgatggaaaaacgatgtatttggatttgccatctatcgttgaagaattagatttggaagatgtcattacgattggtaaggatttcttagataatgctgacacatctgacttcgttatttttccaaaatcttcg

SEQ ID NO: 3158 - protein, 427 aa, Streptococcus agalactiae
MTVNKITYQNLQEEVYKLTLESGLNVYLIPKPSFKETVGVLTANFGSLHTKYTRNGCVEHYPAGIAHFLEHKLFELDKGQDAATQFTKYGAESNAFTTFDKTSFYFSTISHITNCLDILLDFVLTTNFTEESITKEKDIIKQEIEMYQDDPEYRLYQGVLSNLYPNSPLAFDIAGDYQSISQITLTDLQENHKDFYQLSNMNLVLVGQFSPQEIITYLQKNSHFTSYSQNIDRDSISLEPVIKNNSCHMTVTKPKLAIGYRKSNHMIHGSYLKEKIGLQLFFAMLLGWTSTINQDWYESGQIDDSFDIEIEVHPDFECVIISLDTTEPIAFSTQLRLLLKNALQSSDLTESHLKNVKRELYGDFLRSLDSIENLAMQFVTYLYDGKTMYLDLPSIVEELDLEDVITIGKDFLDNADTSDFVIFPKSS

SEQ ID NO: 3159 - DNA, 1287 bp, Streptococcus pyogenes
atgacaaaattagtaaagataaactatcctaatattgacgaagacctttactatgtaaaattagaaaatggtttaactgtttattttataaaaaaaatagggtttttagaaaaaacagctatgttgacagtaggtttcggttctcttgacaataagttgacagtcgatgacgaatcacgagatgctccagcaggtattgcacactttttagaacataaactctttgaagatgaatcaggtggagatatttcattaaagtttacacagctaggagcagagacaaatgcctttacaactttcaaccaaacgagtttcttcttttcaacagctagtaaatttcaggaaaatttggaactccttcaatattttgttctttctgctaatataacagatgaatctgttagtagagaaaaaaaaataatcgggcaagaaattgatatgtatcaagatgatgctgactaccgtgcatatagtggaatccttcagaacttatttccaaaaacaagtttagctaatgatattgctggctcaaaagcatccattcaaaagatcacgaaaatattattggaaacgcatcatacttatttttaccaacctactaatatgagtctattcattgtcggtgatattgatattgacgaaacttttttagctattcaaaggtttcaaaccacattatcctatccagatagaaaaagggtaactgttgatcctttacactattatcctgtcattaaatcatcttctgttgacatggatgttactactgccaagctggttgttggttttcgagggtatctgaccttaactcagcattcactattaacgtatcgtattgccttgaagctatttttatcaatgcttataggttggacttctaaaatctatcatacgctatatgaagatggtaaaatagacgattcatttgatgtggatgttgaaattcatcataattttcaatttgtattaatatcacttgatacaccagagcctatcgcaatgtctaactatatccgtcaaaaattagctactataaagatatcaaaagagtttacaaatgagcacttaaatctattaaaaaaagaaatgtatggtgactttattcagagtttagactctatagaacatttaacccatcagttcagtctatacctgtctgattctgataaagaaacatattttgatattccaaaaattatagaaagactcactctaaaagatgttgttacaattggaaaagcattttttgaaaaagctgatgcttcagacttcacagtcttcccaaaa

SEQ ID NO: 3160 - protein, 429 aa, Streptococcus pyogenes
MTKLVKINYPNIDEDLYYVKLENGLTVYFIKKIGFLEKTAMLTVGFGSLDNKLTVDDESRDAPAGIAHFLEHKLFEDESGGDISLKFTQLGAETNAFTTFNQTSFFFSTASKFQENLELLQYFVLSANITDESVSREKKIIGQEIDMYQDDADYRAYSGILQNLFPKTSLANDIAGSKASIQKITKILLETHHTYFYQPTNMSLFIVGDIDIDETFLAIQRFQTTLSYPDRKRVTVDPLHYYPVIKSSSVDMDVTTAKLVVGFRGYLTLTQHSLLTYRIALKLFLSMLIGWTSKIYHTLYEDGKIDDSFDVDVEIHHNFQFVLISLDTPEPIAMSNYIRQKLATIKISKEFTNEHLNLLKKEMYGDFIQSLDSIEHLTHQFSLYLSDSDKETYFDIPKIIERLTLKDVVTIGKAFFEKADASDFTVFPK

SEQ ID NO: 3161 - DNA, 561 bp, Streptococcus agalactiae
atgtttccaaaaggagaatttatgatgaagaaagaaaatattccgaatctattaactgtagtcagaattttaatgattccgttatttatagtattaacttcagtaacaacaagtacaacttggcatattgttgcagctattgtatttgctattgcaagtttgaccgattacctagatggttatctagcacgtaaatggcaagtagtaacaaattttgggaaatttgcagacccattagctgataaaatgctagttatgagtgcttttatcatgttagttggactagacttagcaccagcttgggtttcagctattatcatttgtagagagttagcagttacaggtttgcgtttacttttagttgaaacaggtggaacagtacttgctgcagctatgccagggaaaataaagacggctactcaaatgtttgcagttatttttttgttagtacattggatgacacttggtaacatcatgttatacattgctctattctttaccttgtattcaggctacgactattttaaaggtgcaggcttcttatttaaggatacttttaaa

SEQ ID NO: 3162 - protein, 187 aa, Streptococcus agalactiae
MFPKGEFMMKKENIPNLLTVVRILMIPLFIVLTSVTTSTTWHIVAAIVFAIASLTDYLDGYLARKWQVVTNFGKFADPLADKMLVMSAFIMLVGLDLAPAWVSAIIICRELAVTGLRLLLVETGGTVLAAAMPGKIKTATQMFAVIFLLVHWMTLGNIMLYIALFFTLYSGYDYFKGAGFLFKDTFK

SEQ ID NO: 3163 - DNA, 540 bp, Streptococcus pyogenes
atgataaaaaaagaaaatattcctaatctattaactcttgttcgaatcgcaatgattcctttctttctttttattacttcctcatctaataaggtggggtggcatatttttgcagctgtgatttttgcaattgccagttttaccgattatctagatgggtatcttgcgcgtaagtggcatgtagccagtaattttggaaagtttgccgatcctctagcagataagatgcttgtcatgagtgcctttatcatgttagttggacttggcttagttcctgcgtgggtgtcagctgttattatttgccgagaattggcagtaactggtcttcgattactacttgttgaaaccggaggaaaggtccttgcagctgctatgccgggaaaaatcaaaacagcgacacaaatgttgtctattattttattactttgccattggatattcctaggaaacgtcttactctatattgctctttttttcactatttattctggatatgattattttaaaggagcaagctttctttttaaggatacgtttaaa

SEQ ID NO: 3164 - protein, 180 aa, Streptococcus pyogenes
MIKKENIPNLLTLVRIAMIPFFLFITSSSNKVGWHIFAAVIFAIASFTDYLDGYLARKWHVASNFGKFADPLADKMLVMSAFIMLVGLGLVPAWVSAVIICRELAVTGLRLLLVETGGKVLAAAMPGKIKTATQMLSIILLLCHWIFLGNVLLYIALFFTIYSGYDYFKGASFLFKDTFK

SEQ ID NO: 3165 - DNA, 837 bp, Streptococcus agalactiae
atgacaaatattattaccgttaataatctcttttttaaatatgatagtaatcaaacacattatcaattggagaatgtatcgtttcatgtgaaacaaggagaatggctatctattattggtcataatggttctgggaaatccactactgttcgtttaatagatggacttttagaggcggagtctggccagattatcattgatggacaagagttaaccgaagataatgtctgggagttacgtcacaagattggcatggtatttcaaaatcctgataaccaatttgtaggggcaactgttgaagatgacgtcgcctttggtttggaaaataaaggtattcctttgaaagacatgaaagaaagagtggaccaagcacttgatttggtaggaatgtctgaatttaaaatgagggagcctgcacgtttatctggaggacaaaagcagcgtgtagccattgcaggagctgtagctatgcgtccacaagttatcatcttggatgaggcgactagtatgcttgatcctgagggacgattggaactgataagaacgatacgagctattcgtcaaaaatataatcttactgttatttcaattacacacgacttagatgaagttgcattgagtgatcgtgtcatcgttatgaaaaatggtaaagttgagtcgacatccactccaaaagcgttatttggtcgtggaaatcgtttgattagtttaggtttagatgttccctttacaagtaggttaatggcagaactggctgctaatggtcttgatatagggacagagtatcttacagagaaggaattagaagaacaattatgggaattgaatttaaaaatg

SEQ ID NO: 3166 - protein, 279 aa, Streptococcus agalactiae
MTNIITVNNLFFKYDSNQTHYQLENVSFHVKQGEWLSIIGHNGSGKSTTVRLIDGLLEAESGQIIIDGQELTEDNVWELRHKIGMVFQNPDNQFVGATVEDDVAFGLENKGIPLKDMKERVDQALDLVGMSEFKMREPARLSGGQKQRVAIAGAVAMRPQVIILDEATSMLDPEGRLELIRTIRAIRQKYNLTVISITHDLDEVALSDRVIVMKNGKVESTSTPKALFGRGNRLISLGLDVPFTSRLMAELAANGLDIGTEYLTEKELEEQLWELNLKM

SEQ ID NO: 3167 - DNA, 888 bp, Streptococcus pyogenes
atgattattttaaaggagcaagctttctttttaaggatacgtttaaataacatgtcagctattattgaacttaaaaaagttacatttaattaccataaagaccaagaaaaaccaacattagatggcgtatcgtttcatgtgaaacaaggtgagtggctgtctatcattggccataatggatctggtaaatcaacgactattcggttaattgatggattattggaaccagaatcagggtctattattgttgatggagatctactaaccataactaatgtttgggaaattcgtcataaaattggtatggtctttcaaaaccctgataatcagtttgttggagcaactgttgaagatgatgttgcttttgggcttgaaaataaaggtattgcacatgaagatataaaagagagggttaatcatgctttagagttagtcggcatgcagaactttaaagaaaaagaaccagcccgtttatctggtggccaaaaacagcgcgtagctattgcaggtgcagttgctatgaagcctaaaattattattttagatgaagctactagtatgcttgaccctaaaggacgattagagttaatcaaaactataaaaaacatccgtgacgactaccagctgactgttatttccattactcatgacttagatgaagttgctcttagtgatagagttttagtgatgaaagatggtcaagtggaatcaacatcaacaccagaacaattatttgcaagaggggatgaactactccaattaggtcttgatatcccttttacaacatctgttgtacagatgcttcaagaagaaggttatcctgttgactatggatatctcacagaaaaggaattagaaaatcagttatgtcaattaatctccaaaatg

SEQ ID NO: 3168 - protein, 296 aa, Streptococcus pyogenes
MIILKEQAFFLRIRLNNMSAIIELKKVTFNYHKDQEKPTLDGVSFHVKQGEWLSIIGHNGSGKSTTIRLIDGLLEPESGSIIVDGDLLTITNVWEIRHKIGMVFQNPDNQFVGATVEDDVAFGLENKGIAHEDIKERVNHALELVGMQNFKEKEPARLSGGQKQRVAIAGAVAMKPKIIILDEATSMLDPKGRLELIKTIKNIRDDYQLTVISITHDLDEVALSDRVLVMKDGQVESTSTPEQLFARGDELLQLGLDIPFTTSVVQMLQEEGYPVDYGYLTEKELENQLCQLISKM

SEQ ID NO: 3169 - DNA, 840 bp, Streptococcus agalactiae
atgggaattgaatttaaaaatgtaagttatacctatcaagccggcactccttttgaagggcgtgccctttttgacgtcaatctgaaaattgaagatgcttcctataccgcgttcattgggcacacaggttctggaaaatcaactattatgcaacttttgaatggtttacatattcctacaaaaggtgaggtaattgtcgatgatttttctattaaagcaggggacaagaacaaagaaatcaaatttataaggcaaaaagttggtttagtttttcaatttccagaaagtcagctttttgaagagacagttttaaaggatgttgcttttggaccacaaaattttggtatttctcagattgaagctgaaaggctggctgaagaaaaattaaggttagttggtatcagtgaggatttattcgataaaaatccatttgaactttctggagggcagatgaggcgggttgctatagctggtattttagcgatggaacccaaagtactagtactggatgagccaacagctggacttgatcctaagggaagaaaagaattaatgactctttttaaaaatcttcataaaaaaggaatgactatcgtcttagtgactcacttaatggacgatgtagcggattatgctgactatgtgtatgttttagaagcagggaaagtaaccttatcaggacaaccaaaacagatttttcaagaagtagaacttttagaaagtaaacaattaggagttcccaaaatcaccaagtttgctcaaagactatctcataagggattaaatttacctagtttaccaattactattaacgaatttgtggaggctattaagcatgga

SEQ ID NO: 3170 - protein, 280 aa, Streptococcus agalactiae
MGIEFKNVSYTYQAGTPFEGRALFDVNLKIEDASYTAFIGHTGSGKSTIMQLLNGLHIPTKGEVIVDDFSIKAGDKNKEIKFIRQKVGLVFQFPESQLFEETVLKDVAFGPQNFGISQIEAERLAEEKLRLVGISEDLFDKNPFELSGGQMRRVAIAGILAMEPKVLVLDEPTAGLDPKGRKELMTLFKNLHKKGMTIVLVTHLMDDVADYADYVYVLEAGKVTLSGQPKQIFQEVELLESKQLGVPKITKFAQRLSHKGLNLPSLPITINEFVEAIKHG

SEQ ID NO: 3171 - DNA, 840 bp, Streptococcus pyogenes
atgtcaattaatctccaaaatgtaagttatacttatcaagcagggactccttttgaagggcgtgccctttttaacattaatttagatattttagatggttcttatacggcttttatcggacatactggatccgggaaatcgaccattatgcaattgctaaatggtttacacgttccgacaacgggaattgtcagcgtagataaacaagatataacgaatcactctaaaaataaagagattaaatctattcgaaaacatgtaggattagtttttcaatttccagaaagtcaactatttgaagagacagttttgaaagatgttgcttttggccctcaaaattttggggtctctccggaggaagcagaagctttagcgcgtgaaaaactagctcttgttgggatttcagaaaatctttttgaaaagaatccatttgaactctcagggggtcaaatgcgtcgtgttgctattgcgggtatccttgctatgcagccaaaggttttagttttagatgaaccgactgctggtcttgatcctaaagggcgtaaagaattaatgactatttttaaaaagttacaccaatctggcatgactattgttttagtaacccatctgatggatgatgtggccaattacgcagattttgtatatgttcttgacaaaggtaaaattattttatcaggaaaacccaaaacaatttttcaacaagtcagtttgcttgagaaaaaacagttaggagttcctaaggtgactaaacttgctcaaaggcttgttgatagaggaatacctatctcttctttgcctattaccttagaggagctaagagaggtactaaaacatgga

SEQ ID NO: 3172 - protein, 280 aa, Streptococcus pyogenes
MSINLQNVSYTYQAGTPFEGRALFNINLDILDGSYTAFIGHTGSGKSTIMQLLNGLHVPTTGIVSVDKQDITNHSKNKEIKSIRKHVGLVFQFPESQLFEETVLKDVAFGPQNFGVSPEEAEALAREKLALVGISENLFEKNPFELSGGQMRRVAIAGILAMQPKVLVLDEPTAGLDPKGRKELMTIFKKLHQSGMTIVLVTHLMDDVANYADFVYVLDKGKIILSGKPKTIFQQVSLLEKKQLGVPKVTKLAQRLVDRGIPISSLPITLEELREVLKHG

SEQ ID NO: 3173 - DNA, 810 bp, Streptococcus agalactiae
ttgtggaggctattaagcatggataaattgattttgggacgttacataccaggtaattctctcattcataaattagatcctcgaagtaagttactagccatgttgctttttatcattattgttttttgggcaaataatgtagtgacaaatgtgatcgtattcatttttacgttggttattgtgggtttatctcagataaaattttcctattttttcaatggtattaaaccgatggttggtattattttatttacaaccctcttccagatgctgtttgcacaaggcgggcaggttatcttctcgttttggatttttagcatcactagccttgggttacaacaagcagcacttatttttatgagatttgttttaattatcttcttttcgacattacttaccttaactactactccgttaagtttagcagatgctgttgaatctttgttaaaaccattggaagtactgagagtaccagcacacgagattggtttgatgttatcccttagcttacgtttcgttcctactttaatggatgatacaacacgtatcatgaatgctcaaagagctcgtggagttgattttggagagggaaacctaattcataaggttaagtctattatccctattttgattccattatttgcttctagttttaaaagagcagatgcgttggcaattgctatggaagcaagaggttatcaaggcggagccaatcgtagtaagtaccgtttattgaagtggactgttcgggatacttttagtatattacttatgttattattgggtttgagtttgtttctattaaaaaat

SEQ ID NO: 3174 - protein, 270 aa, Streptococcus agalactiae
MWRLLSMDKLILGRYIPGNSLIHKLDPRSKLLAMLLFIIIVFWANNVVTNVIVFIFTLVIVGLSQIKFSYFFNGIKPMVGIILFTTLFQMLFAQGGQVIFSFWIFSITSLGLQQAALIFMRFVLIIFFSTLLTLTTTPLSLADAVESLLKPLEVLRVPAHEIGLMLSLSLRFVPTLMDDTTRIMNAQRARGVDFGEGNLIHKVKSIIPILIPLFASSFKRADALAIAMEARGYQGGANRSKYRLLKWTVRDTFSILLMLLLGLSLFLLKN

SEQ ID NO: 3175 - DNA, 798 bp, Streptococcus pyogenes
atggataagctgattcttggtcgttatattcccggagattctctcattcatcgtcttgacccaagaagtaaattattagcgatgattatttatattgtcattatcttttgggctaacaatgttgtgacaaatttgttgatgttgacttttactttagcagttgtttttttgtcaaaaatcaagttgtctttctttttaaatggggttaaaccaatgattggtattatcctcttcacgactttatttcagatgtttttctcacaaggaggaaaagtaatttttagttggtggttcattagcataactgatttaggattgagccaagctattttaatttttatgcgtttcgttctaattattttcttttcaacgctgttaacgttgacgacaacacctttaagcctatctgatgcagttgaatcattattaaaacctttaacaagatttaaagttccagctcacgagatcggactaatgctttctttaagtttacgttttgtgcctactttaatggatgataccacgcgtattatgaatgcacaaagggcccgtggagttgattttggagagggaaatttaattcaaaaagttaaatccattattcctattttaatccctcttttcgcttcaagctttaaaagagccgacgcattagctattgctatggaagctagaggttatcagggaggagaagggcgaactaaatatcgtcaattagactggcagctaaaagatagtttagctattggaatagtttctttattgggtttgctactttttttcttgaaaacctctttg

SEQ ID NO: 3176 - protein, 266 aa, Streptococcus pyogenes
MDKLILGRYIPGDSLIHRLDPRSKLLAMIIYIVIIFWANNVVTNLLMLTFTLAVVFLSKIKLSFFLNGVKPMIGIILFTTLFQMFFSQGGKVIFSWWFISITDLGLSQAILIFMRFVLIIFFSTLLTLTTTPLSLSDAVESLLKPLTRFKVPAHEIGLMLSLSLRFVPTLMDDTTRIMNAQRARGVDFGEGNLIQKVKSIIPILIPLFASSFKRADALAIAMEARGYQGGEGRTKYRQLDWQLKDSLAIGIVSLLGLLLFFLKTSL

SEQ ID NO: 3177 - DNA, 822 bp, Streptococcus pyogenes
gtggcaaccaattcaattattgccgacatgacaaaagctattgctggtgataaaatcgatctgcacagcattgtgccaatcggtcaagaccctcatgagtacgaaccattaccagaagatgttgaaaaaacaagtaatgctgatgtgattttctataatggtatcaatctagaagatggcgggcaagcttggttcaccaaactagtgaaaaatgctcaaaaaacgaaaaacaaagattactttgccgtgtctgatggcattgatgtgatttacttggaaggtgcaagcgaaaaaggaaaagaagatccacatgcttggttaaatctcgaaaacggaatcatttattcaaaaaacattgccaaacaattgattgcaaaggatcctaaaaacaaagaaacttatgaaaagaacctaaaagcttatgtggctaaattggaaaaactagacaaagaagccaaatcaaaatttgatgctattgcagaaaataaaaaattgattgtgactagtgaaggctgcttcaagtacttttcaaaagcttacggtgtcccatctgcttatatctgggaaattaacaccgaagaagaaggaacaccagatcaaatttcatcattgattgaaaaactaaaagtcatcaagccatctgcgctttttgtagagtcaagtgtcgatagacgccctatggaaactgtttctaaagatagtggtattcctatttattctgagatctttacagattcaattgctaaaaaaggtaaacctggcgatagttattatgctatgatgaaatggaaccttgacaaaatttctgaaggtctagcaaaa

SEQ ID NO: 3178 - protein, 274 aa, Streptococcus pyogenes
VATNSIIADMTKAIAGDKIDLHSIVPIGQDPHEYEPLPEDVEKTSNADVIFYNGINLEDGGQAWFTKLVKNAQKTKNKDYFAVSDGIDVIYLEGASEKGKEDPHAWLNLENGIIYSKNIAKQLIAKDPKNKETYEKNLKAYVAKLEKLDKEAKSKFDAIAENKKLIVTSEGCFKYFSKAYGVPSAYIWEINTEEEGTPDQISSLIEKLKVIKPSALFVESSVDRRPMETVSKDSGIPIYSEIFTDSIAKKGKPGDSYYAMMKWNLDKISEGLAK

SEQ ID NO: 3179 - DNA, 702 bp, Streptococcus agalactiae
atgaataaaagaagaaaattatcaaaattgaatgtaaaaaaacatcatttagcttatggagctatcactttagtagcccttttttcatgtattttggctgtaatggtcatctttaaaagttcacaagttactactgaatctttgtcaaaagcagataaagttcgcgtagccaaaaaatcaaaaatgactaaggcgacatctaaatcaaaagtagaagatgtaaaacaggctccaaaaccttctcaggcatctaatgaagccccaaaatcaagttctcaatctacagaagctaattctcagcaacaagttactgcgagtgaagaggcagctgtagaacaagcagttgtaacagaaaacacccctgctaccagtcaggcacaacaagcttatgctgttactgagacaacttatagacctgctcaacaccagacgagtggccaagtattgagtaatggaaatactgcaggggctattggctcagcagctgcagcacaaatggctgctgcaacaggagtccctcagtctacttgggaacatattattgcccgtgaatcaaatggtaatcctaatgttgctaatgcctcaggagcttcaggacttttccaaacgatgccaggttggggttcaacagctacagttcaggatcaagttaattcagctattaaagcttatcgtgctcaaggtttatcagcttggggttac

SEQ ID NO: 3180 - protein, 234 aa, Streptococcus agalactiae
MNKRRKLSKLNVKKHHLAYGAITLVALFSCILAVMVIFKSSQVTTESLSKADKVRVAKKSKMTKATSKSKVEDVKQAPKPSQASNEAPKSSSQSTEANSQQQVTASEEAAVEQAVVTENTPATSQAQQAYAVTETTYRPAQHQTSGQVLSNGNTAGAIGSAAAAQMAAATGVPQSTWEHIIARESNGNPNVANASGASGLFQTMPGWGSTATVQDQVNSAIKAYRAQGLSAWGY

SEQ ID NO: 3181 - DNA, 612 bp, Streptococcus pyogenes
atgtttaagaaagaaaatttaaaacaacgttattttaattttggattagtagcgttagctctaacaatattagccatcatttttgccttctcaagtaaaaatgctgatactaagtcttatgctaagaagtcagaaagtaaaatggtaacaatcgacaaggctccaaaaaataatcatgctattactaaagaagaaagcaaagaaaaagcaaagagcattgcttcggagcctattcccacagtagaaaactctgtagctccgacagtaacagaggaagtaccggttgttcagcaagaagtgactcaaactgttcagcaggtatcttcagtagcctataatccaaacaatgtggtactttccaatggaaatactgctggtattgtaggaagtcaagcggcggcacagatggcagcagcaacaggtgttccacaatcaacttgggaacatataattgcgcgtgaatctaatggaaatcctaacgcagctaatgcttctggggcatcagggttgttccagacaatgccaggttggggttctacagcaacggttgaagatcaagtcaatgcagccttgaaagcctatagtgcacaaggtttatcagcttggggttac

SEQ ID NO: 3182 - protein, 204 aa, Streptococcus pyogenes
MFKKENLKQRYFNFGLVALALTILAIIFAFSSKNADTKSYAKKSESKMVTIDKAPKNNHAITKEESKEKAKSIASEPIPTVENSVAPTVTEEVPVVQQEVTQTVQQVSSVAYNPNNVVLSNGNTAGIVGSQAAAQMAAATGVPQSTWEHIIARESNGNPNAANASGASGLFQTMPGWGSTATVEDQVNAALKAYSAQGLSAWGY

SEQ ID NO: 3183 - DNA, 870 bp, Streptococcus agalactiae
atgttttatacaattgaagagctggtagagcaagctaatagccaacataagggtaacatagcagagctcatgatccaaacggaaattgaaatgactggtagaagtcgtgaagaaattcgttatattatgtcccgaaatcttgaagtcatgaaagcttctgttattgatggattaacccctagtaaatcaatcagtggtttaacaggcggtgatgctgtcaagatggatcaatatttacaatcaggaaaaactatttcagataccacaatcctagctgccgttaggaatgctatggctgttaatgagttaaatgctaagatgggactggtctgtgcaacaccaactgcaggtagtgcaggatgtttaccagctgtgatttctacagccattgaaaagcttaatttaacagaagaagagcaacttgattttctatttacagccggcgcatttggtctcgtcattggtaataatgcctctatctcaggtgcagaaggaggttgccaagctgaagttgggtcagctagtgctatggctgcggctgctttagttatggctgctggaggtactcctttccaagctagccaagctatagcatttgttattaaaaatatgcttggacttatctgtgaccctgttgcaggtttagttgaagtcccttgtgtgaagcggaatgctcttggatcaagttttgcacttgttgctgctgatatggccttggctggtattgaatcgcaaattccagtagatgaagttattgatgcaatgtatcaagttggatcaagtttaccgactgcttttcgtgagactgcagaaggaggacttgctgccacgccgacaggaagacgttatagtaaagaaatttttggggaa

SEQ ID NO: 3184 - protein, 290 aa, Streptococcus agalactiae
MFYTIEELVEQANSQHKGNIAELMIQTEIEMTGRSREEIRYIMSRNLEVMKASVIDGLTPSKSISGLTGGDAVKMDQYLQSGKTISDTTILAAVRNAMAVNELNAKMGLVCATPTAGSAGCLPAVISTAIEKLNLTEEEQLDFLFTAGAFGLVIGNNASISGAEGGCQAEVGSASAMAAAALVMAAGGTPFQASQAIAFVIKNMLGLICDPVAGLVEVPCVKRNALGSSFALVAADMALAGIESQIPVDEVIDAMYQVGSSLPTAFRETAEGGLAATPTGRRYSKEIFGE

SEQ ID NO: 3185 - DNA, 870 bp, Streptococcus pyogenes
atgttttatactattgaagaacttgtcaaacaagctgaccaacaatttaatggaaatattgctgaactcatgattgccacggaagtggagatgtctggaagaaatcgagaagatattatcaaaatcatgtcacgcaatttacaagttatgaaagcagctgtaacagaaggactaacctcaaccaaatctatcagtggtttgacagggggcgatgcggtcaaaatggataactacattaaaaaagggaacagcctttctgatactactattcttaatgctgttagaaatgctatagctgtaaacgaattaaatgctaaaatgggacttgtctgtgcaacacccactgcaggaagtgcaggatgcttaccagcagtgctcgcaacagctattgaaaaacttgacttatcagaaaaagaacaattagagtttttatttactgcaggagcttttggtcttgttattggaaataacgcctctatttctggtgcagaaggtggatgccaagcagaagttggttctgcagctgctatgagtgcagctgctcttgttaaagcagccggtggaacatctcatcaagctagtcaagctattgcgtttgttatcaaaaatttattaggacttgtctgtgatcctgttgccggcctagtagaagtgccttgtgtcaaacgcaatgccctaggagcaagtttcgcccttgtcgcagctgatatggctttagctgatattgattctcaaattcctgttgacgaagttattgatgctatgtatcaagtcggctctgccatgccaactgctttccgtgaaacagcagaaggtggtttagccgctactccaactggacgacgttacagcgtagaaatatttggcgaa

SEQ ID NO: 3186 - protein, 290 aa, Streptococcus pyogenes
MFYTIEELVKQADQQFNGNIAELMIATEVEMSGRNREDIIKIMSRNLQVMKAAVTEGLTSTKSISGLTGGDAVKMDNYIKKGNSLSDTTILNAVRNAIAVNELNAKMGLVCATPTAGSAGCLPAVLATAIEKLDLSEKEQLEFLFTAGAFGLVIGNNASISGAEGGCQAEVGSAAAMSAAALVKAAGGTSHQASQAIAFVIKNLLGLVCDPVAGLVEVPCVKRNALGASFALVAADMALADIDSQIPVDEVIDAMYQVGSAMPTAFRETAEGGLAATPTGRRYSVEIFGE

SEQ ID NO: 3187 - DNA, 666 bp, Streptococcus agalactiae
atgaaacatttaaaatttcaatcggtcttcgacattattggtcctgttatgattggaccatcaagtagtcatactgcaggagctgtccgcattggtaaagttgtccattctatttttggtgaacctagtgaagtaacctttcatttatacaattcttttgctaaaacttaccaaggacacggtactgataaagcattggttgcagggattctaggaatggatacagataatccagatattaaaaactctcttgaaattgctcatcaaaaaggaattaagatttactgggatatcctaaaagatagtaattcaccacatccaaatactgcgaaaataactgttaaaaatggggataggagcatgagtattacaggagtgtcaattggtggcggaaacatccaagttactgagttgaatggattctcagtttcattaacaatgaatactcctactttaattatcgttcatcaagatatacctggcatgattgctaaagtaactgatattttatctgactttaacattaatattgctcaaatgaatgtaacacgcgaaagtgcaggagaaaaagctatcatgattatagaagtagattcacgagattgtcaacaagctgtcaaaaagatagaagctattcctcatttacacaatgtcaacttctttgat

SEQ ID NO: 3188 - protein, 222 aa, Streptococcus agalactiae
MKHLKFQSVFDIIGPVMIGPSSSHTAGAVRIGKVVHSIFGEPSEVTFHLYNSFAKTYQGHGTDKALVAGILGMDTDNPDIKNSLEIAHQKGIKIYWDILKDSNSPHPNTAKITVKNGDRSMSITGVSIGGGNIQVTELNGFSVSLTMNTPTLIIVHQDIPGMIAKVTDILSDFNINIAQMNVTRESAGEKAIMIIEVDSRDCQQAVKKIEAIPHLHNVNFFD

SEQ ID NO: 3189 - DNA, 675 bp, Streptococcus pyogenes
ttgcctatgaatacacaaaaatttcaatcagtttttgacatcattgggccagtaatgattggtccatcaagtagtcacacagctggtgccgtcagaattggtaaggtagtccattccatctttggagatattcctgatgaagtgacgtttcacctttataattcatttgctaaaacctacagaggacatggtactgataaggctcttgttgcaggaattatgggtatgggtactgataatcctgatattaaaaattctctagaaattgctcatcaaaaagggataaaaatctattgggatatcttaaaagatagtaatgctccccatcccaatactgttaaaatcagtgtcaaaaaagctgacaaaacacttagtgttactggtgtttcaattggaggaggaaacattcaagtaacagaactaaatggtttttctgtctcgttatccatgaatactcctactatagttactgtacacaaagatattcccggaatgatcgcaaaggtaactgatatcctatcttccaataatattaatatcgccacaatgaatgttacacgtgaatccgctggtgaaaaagctactatgattatagaagtcgattctagagagtgccaagaagcagccaaccaaattgcaaaaattcctcatatttataatgtcaacttctttgac

SEQ ID NO: 3190 - protein, 225 aa, Streptococcus pyogenes
LPMNTQKFQSVFDIIGPVMIGPSSSHTAGAVRIGKVVHSIFGDIPDEVTFHLYNSFAKTYRGHGTDKALVAGIMGMGTDNPDIKNSLEIAHQKGIKIYWDILKDSNAPHPNTVKISVKKADKTLSVTGVSIGGGNIQVTELNGFSVSLSMNTPTIVTVHKDIPGMIAKVTDILSSNNINIATMNVTRESAGEKATMIIEVDSRECQEAANQIAKIPHIYNVNFFD

SEQ ID NO: 3191 - DNA, 1191 bp, Streptococcus agalactiae
atgattgatctaagaacaacttggcccttcaagcctaagttaaaaataaaactttttgatgggagaattcttatgactgataattcaaacattcgtgtcgttgtaggcatgagtggaggtgttgattcatcagtaactgccctgcttttaaaagagcaaggttatgatgttattggtgtttttatgaaaaattgggatgacacagatgaatttggtgtttgtacggctactgaagattataaagatgttgctgctgttgctgatcagatcggcataccatactactctgtcaactttgaaaaagagtattgggacagggttttcgaatattttttagcagaatatcgagcaggtcgtacgccaaatccagatgttatgtgtaataaggaaattaaatttaaagcatttctagattatgcgatgacattaggtgctgactatgtagcaacaggtcattatgcacaagtaacacgtgatgagaacggaatagttcatatgcttagaggagcagataataataaggatcaaacttattttctaagtcaattatctcaggagcaattgcaaaaaacgttatttccacttggtcatttacaaaaaccagaagttcgccgtatagctgaagaagcaggacttgcgaccgctaagaaaaaagactctactggtatttgttttattggagaaaaaaatttcaaggatttcctgggtcaatatttaccggctcaaccaggtcgtatgatgactgttgatggtcgtgacatgggtgaacatgctggtttaatgtattatactattggtcaaagagggggccttggtattggtgggcaacatggtggagataataaaccttggtttgtagttggaaaggatttaagtaaaaacattctttatgtaggtcaaggtttctatcatgactcattgatgtcaactagcttgacagcttctgaaatccactttacacgtgatatgcctaatgaatttaagctagaatgtacagctaagttcagatatcgtcaacctgacagtaaagttacagtttacgtaaaaggtaatcaagcaagggttgtgtttgatgatttacaacgagcaatcacaccaggtcaagctgttgttttttataatgaacaagaatgtttaggcggtgggatgattgatcaggcttatcgtgatgataaaatctgtcaatacatt

SEQ ID NO: 3192 - protein, 397 aa, Streptococcus agalactiae
MIDLRTTWPFKPKLKIKLFDGRILMTDNSNIRVVVGMSGGVDSSVTALLLKEQGYDVIGVFMKNWDDTDEFGVCTATEDYKDVAAVADQIGIPYYSVNFEKEYWDRVFEYFLAEYRAGRTPNPDVMCNKEIKFKAFLDYAMTLGADYVATGHYAQVTRDENGIVHMLRGADNNKDQTYFLSQLSQEQLQKTLFPLGHLQKPEVRRIAEEAGLATAKKKDSTGICFIGEKNFKDFLGQYLPAQPGRMMTVDGRDMGEHAGLMYYTIGQRGGLGIGGQHGGDNKPWFVVGKDLSKNILYVGQGFYHDSLMSTSLTASEIHFTRDMPNEFKLECTAKFRYRQPDSKVTVYVKGNQARVVFDDLQRAITPGQAVVFYNEQECLGGGMIDQAYRDDKICQYI

SEQ ID NO: 3193 - DNA, 1137 bp, Streptococcus pyogenes
ttgatgggagaattttttatgacagataactcaaagatacgtgttgtcgttggtatgagtggtggcgttgattcatctgtaacagctctacttttaaaggagcaaggttatgatgttattggtgtcttcatgaaaaactgggacgatacagatgaatttggtgtttgcacagctactgaagattacaaagatgtagcagccgttgctgataaaatcggtattccttactattcagtcaattttgaaaaagaatattgggacagagtatttgaatatttcttggccgaataccgagcaggtcgtactccaaatcctgatgtcatgtgtaataaggaaataaaatttaaagctttccttgactatgccatgactttaggtgcagattatgtagcaacgggacactatgctcaagtcaagcgtgatgaaaatggtacggttcacatgttacgtggagctgataatggcaaagaccaaacctactttttaagtcaactatcacaggaacaactacaaaagactttattcccccttggtcatttgcaaaagtcagaagttagagaaatcgctgagcgagcagggcttgcaacggctaaaaagaaagattcaacaggtatttgttttattggtgaaaagaatttcaaacagtttttgagccagtacttaccggcacaaaaaggtcgcatgatgactattgatggtcgcgatatgggagaacatgccggccttatgtattatactattggtcagcgtgggggtctgggcattggtggtcagcatggtggggataatcaaccttggtttgttgtcggtaaagatttgtcgcaaaatattttatacgttggtcaaggtttctaccatgaagccctaatgtcaaatagtcttgacgcctcagtcatccattttacacgtgagatgccagaagagttcacatttgaatgtactgctaaatttcgctatcgtcaacccgattcacacgtggcggtgcatgttcgaggagataaggcagaagttgtttttgcagagccacagcgcgcgattactcctggtcaagctgttgttttctatgacggaaaagaatgccttggtggtggtatgattgacatggcttataaaaatgggcagccttgtcagtacatt

SEQ ID NO: 3194 - protein, 379 aa, Streptococcus pyogenes
LMGEFFMTDNSKIRVVVGMSGGVDSSVTALLLKEQGYDVIGVFMKNWDDTDEFGVCTATEDYKDVAAVADKIGIPYYSVNFEKEYWDRVFEYFLAEYRAGRTPNPDVMCNKEIKFKAFLDYAMTLGADYVATGHYAQVKRDENGTVHMLRGADNGKDQTYFLSQLSQEQLQKTLFPLGHLQKSEVREIAERAGLATAKKKDSTGICFIGEKNFKQFLSQYLPAQKGRMMTIDGRDMGEHAGLMYYTIGQRGGLGIGGQHGGDNQPWFVVGKDLSQNILYVGQGFYHEALMSNSLDASVIHFTREMPEEFTFECTAKFRYRQPDSHVAVHVRGDKAEVVFAEPQRAITPGQAVVFYDGKECLGGGMIDMAYKNGQPCQYI

SEQ ID NO: 3195 - DNA, 609 bp, Streptococcus agalactiae
atgatttcaaaatttattttagctttcatggcttttttcgccattatgaatcccatttctaatttgccagcttttatggctttagtagctgatgatgatcagaagatttcacgtcggattgcagcaaaaggagtattacttgcttttgtcattattgtaatctttgtattaagtggccacttactttttaacttatttgggattaccctagccgccctaaaaatatctggtggaatattggtaggcattataggttataaaatgattaatggtatacattcaccaaccaataaaaacctagaggagcataaggatgatccaatgaatgtggcagtttcaccattagcaatgccccttttggcaggtccgggtactattgcaactgctatggggttatcaagtggtggtttatctggcaaactcattactatacttgcttttgccatattatgtgtgataatgtatgttattttaataagtgcaaacgaaattactaaatttcttggaaaaaatgcaatgactataatcaccaaaatgatgggacttattttgatgactatcgggatagagatgctaataacaggcataaaaattggttttcatttaaca

SEQ ID NO: 3196 - protein, 203 aa, Streptococcus agalactiae
MISKFILAFMAFFAIMNPISNLPAFMALVADDDQKISRRIAAKGVLLAFVIIVIFVLSGHLLFNLFGITLAALKISGGILVGIIGYKMINGIHSPTNKNLEEHKDDPMNVAVSPLAMPLLAGPGTIATAMGLSSGGLSGKLITILAFAILCVIMYVILISANEITKFLGKNAMTIITKMMGLILMTIGIEMLITGIKIGFHLT

SEQ ID NO: 3197 - DNA, 1839 bp, Streptococcus agalactiae
gtggaagctagtctagctgctagtcgtatgggatgtaagacacttctagccactatcaacttagaaatgttagcatttatgccttgtaatccttctataggtggctctgctaaaggtatcgttgtcagagagattgacgctttaggtggtgaaatgggtaaaaacattgataaaacctatatacaaatgaaaatgcttaatacaggtaaggggcctgctgtccgtgccttaagagcacaagctgataaagccctctatgcacaaacaatgaagcaaactgtagaaaagcaagaaaatcttaccttaagacaagctatgattgacgaaatacttgttgaagatggaaaggttgtgggggttcgtacagcaactaatcagaaattttcagcaaaatctgttgttataacaacaggtactgctcttcgaggagagattatattaggtgatcttaagtactcctcgggccctaataatagtttagcttctgtgacattggcagataatttaagagacctaggattagaaattggtcgtttcaaaactggaacacctcctcgtgtaaaagcctcctctattaattatgaaaagacagagatacaacctggggatgagcaaccaaatcatttttcatttatgtctagggatgaagattatattactgaccaggtaccgtgctggttgacctatacgaatactttgagtcatgacatcatcaatcaaaatctacaccgtgctcctatgttttctggaatcgttaagggagttggtcctagatattgtccgtcaattgaagataaaattgtgcgttttgctgataaagagcgccaccaactcttcttagaaccagaaggtagatacactgaagaagtttatgttcaagggctatcaacgagtcttcctgaggatgttcaagttgatttattacgttctataaaagggcttgaaaatgctgaaatgatgcgtacaggctatgctattgagtatgatattgtattgcctcatcaattaagagcaacactcgaaacaaaagtaattgctggtttgtttactgcaggacagactaatggtacttcaggttatgaagaagctgctggtcaagggttggttgctgggatcaacgctgctcttaaagttcaagggaagccagaacttattttaaaacgaagtgatgcttacattggtgtcatgattgatgatttagttaccaaagggactctagaaccatatcgtctgttgacaagtcgcgcagaatatcgtctgattcttcgtcatgataatgcagatatgcgtttaacagaaatcggttatgagattggcctagtagatgaagagcgttatgcgatatttaaaaagcgtcaaatgcaatttgaaaatgaattagaacgtttagactctataaagttaaagccagtttctgagacaaataaacggattcaagaattgggctttaaacctttgacagatgctttaactgccaaagaatttatgcgccgcccacaaatcacatatgcagtagcaacggattttgttggttgtgctgatgagccattagacagtaaggttattgaacttttggaaactgaaattaaatacgaaggctatattaaaaaggctttagatcaagttgcaaaaatgaaacgaatggaagaaaaacgtattccccctcatattgactgggacgacattgattctatcgcaacagaagctagacaaaaattcaaaaaaattaacccagaaacgctaggtcaggctagtcgtatttcaggagttaatccagccgatattagtattttaatggtttaccttgaaggaagacaaaaaggtcgtaaaaatatcaat

SEQ ID NO: 3198 - protein, 613 aa, Streptococcus agalactiae
MEASLAASRMGCKTLLATINLEMLAFMPCNPSIGGSAKGIVVREIDALGGEMGKNIDKTYIQMKMLNTGKGPAVRALRAQADKALYAQTMKQTVEKQENLTLRQAMIDEILVEDGKVVGVRTATNQKFSAKSVVITTGTALRGEIILGDLKYSSGPNNSLASVTLADNLRDLGLEIGRFKTGTPPRVKASSINYEKTEIQPGDEQPNHFSFMSRDEDYITDQVPCWLTYTNTLSHDIINQNLHRAPMFSGIVKGVGPRYCPSIEDKIVRFADKERHQLFLEPEGRYTEEVYVQGLSTSLPEDVQVDLLRSIKGLENAEMMRTGYAIEYDIVLPHQLRATLETKVIAGLFTAGQTNGTSGYEEAAGQGLVAGINAALKVQGKPELILKRSDAYIGVMIDDLVTKGTLEPYRLLTSRAEYRLILRHDNADMRLTEIGYEIGLVDEERYAIFKKRQMQFENELERLDSIKLKPVSETNKRIQELGFKPLTDALTAKEFMRRPQITYAVATDFVGCADEPLDSKVIELLETEIKYEGYIKKALDQVAKMKRMEEKRIPPHIDWDDIDSIATEARQKFKKINPETLGQASRISGVNPADISILMVYLEGRQKGRKNIN

SEQ ID NO: 3199 - DNA, 1896 bp, Streptococcus pyogenes
atgacacatgaatttacagaaagctatgacgtcattgtcataggtgcaggtcatgctggtgttgaagccagtttggccactagtcgtatgggttgtaaaactttattggcaacaatcaaccttgatatgttggcttttatgccgtgtaatccttctattggaggatctgccaaagggatagtggttagagagattgatgctcttggcggcgaaatgggtaaaaatattgataaaacttatatccagatgaaaatgcttaatacaggtaagggaccagctgtacgcgctctccgagctcaagcagataaatccctgtatgcgcgtgaaatgaaacatacggttgaaaaacaggctaatttgactcttcgccaaacgatgattgatgatattctagttgaagatggacgagttgtaggtgttttaacagccacaggacaaaaatttgcagctaaggcagttgtagtgacaacaggaacagctctgcgtggcgaaattattttaggagaactcaaatattcttctgggcctaataatagtttggcatcagtaaccttagcagataatttaaaaaaactcggcttagaaattggcagattcaaaacaggaacgcctcctcgtgtcaaagcatcttctattaattacgatcaaacggaaattcagccaggtgatgacaaacctaatcatttttcatttatgtcaaaagatgctgattatctcaaagatcaaattccctgctggttgacttatacgaatcaaactagtcatgatatcattaatcagaacctttacagagcaccgatgttttctggcattgttaaaggtgtaggccctcgttactgcccatctattgaagataagattgttcgctttgctgataaagaacgtcatcaacttttcttagagccagaggggcgtgatacagaagaagtgtatgttcaagggttgtcaacgagtcttccagaagatgtccaaaaagatttgattcattcgatcaaaggacttgaaaaggctgaaatgatgcgcactggttatgctattgaatatgatattgttttacctcaccagctacgtgccacacttgaaaccaagctaatttcaggactctttacggctgggcaaactaatggaacttctgggtatgaagaggctgctggccaaggacttattgctggaatcaatgctgctttgaaagttcaaggtaagccagaacttattttgaaacggagcgatgcctatattggcgttatgattgacgatttggttaccaaaggaaccttggaaccttatcgattgttgacatcgcgagctgagtatcgtttgattttacgtcatgacaacgctgatatgcgtttgacagagattggtcgcgacattgggttggttgatgatgagcgttggaaggccttcgaaattaagaaaaaccaatttgataacgaattaaaacgtctgaacagtatcaaattaaaaccgattaaagaaaccaatgaccgcgttcaagatctaggcttcaaaccgttaaccgatgcgatgactgctaaagaattcatgcgtcgtccagaaattgattatgcgactgcagtctcttttgttggtcctgcggctgaagatttagatgctaaaatcattgaacttttagaaacagaaatcaagtacgaaggctatattcgcaaagctttagatcaggttgctaagatgaaacgcatggaagaaaaacgtattcctacaaatattgattgggatgctattgattctattgcaactgaggcgcgtcagaaatttaagaaaattaatcctgaaacaattggacaagctagtcgtatttcaggagtcaatcctgcggacatcagtatcttgatgatttatttagaaggaaacggaaaagctcatcgaaaatat

SEQ ID NO: 3200 - protein, 632 aa, Streptococcus pyogenes
MTHEFTESYDVIVIGAGHAGVEASLATSRMGCKTLLATINLDMLAFMPCNPSIGGSAKGIVVREIDALGGEMGKNIDKTYIQMKMLNTGKGPAVRALRAQADKSLYAREMKHTVEKQANLTLRQTMIDDILVEDGRVVGVLTATGQKFAAKAVVVTTGTALRGEIILGELKYSSGPNNSLASVTLADNLKKLGLEIGRFKTGTPPRVKASSINYDQTEIQPGDDKPNHFSFMSKDADYLKDQIPCWLTYTNQTSHDIINQNLYRAPMFSGIVKGVGPRYCPSIEDKIVRFADKERHQLFLEPEGRDTEEVYVQGLSTSLPEDVQKDLIHSIKGLEKAEMMRTGYAIEYDIVLPHQLRATLETKLISGLFTAGQTNGTSGYEEAAGQGLIAGINAALKVQGKPELILKRSDAYIGVMIDDLVTKGTLEPYRLLTSRAEYRLILRHDNADMRLTEIGRDIGLVDDERWKAFEIKKNQFDNELKRLNSIKLKPIKETNDRVQDLGFKPLTDAMTAKEFMRRPEIDYATAVSFVGPAAEDLDAKIIELLETEIKYEGYIRKALDQVAKMKRMEEKRIPTNIDWDAIDSIATEARQKFKKINPETIGQASRISGVNPADISILMIYLEGNGKAHRKY

SEQ ID NO: 3201 - DNA, 1980 bp, Streptococcus agalactiae
atgaaaagatttcgttttgcaaccgtccatttagttttaataggcctgattttatttggactattagctatttgtgttaggttatttcaatcctatacggctctattattggctatttttgttgctttatcttttgttgttgccttattatattaccaaaagataacttatgaactatctgaagttgaacaaattgaattacttaatgatcaaacagaagtttctcttaagagtcttcttgaacaaatgccagttggtgttatacaatttgatcttgaaacaaatgatattgagtggtttaacccttatgcagaattgatttttactggggataatggtcattttcagtctgctactgttaaagatatcattactagtagacgtaatggaacggctgggcaatcatttgaatacggtgataacaaatattcagcttatttggatacagagacgggtgttttctatttcttcgataatttcatggggaatagaagaaactatgatagttcaatgctacgtccagttattggtattatttccattgataactacgatgatattatggatactatgttagaggctgatatgtcaaagattaacgccttcgtgactagttttatttctgattttacacagtctaaaaatattttttatcgtcgtgtcaatatggatcgatactatatttttaccgactatagcgttttaaatacattgataaaagataaatttgatattttaaatgagtttcgaaaacgcgctcaggaaaaccatttatcattaacattaagtatgggaatttcttatggtgatggtaaccataatcaaattgggcaaattgctttagaaaatcttaatacagcactcgttcgcggaggagatcaaatagtagtacgtgaaaatgatagtagtaaaaaagcactttactttggtggtggtgctgtttcaactattaaacgttcacgaacacgtaccagagctatgatgactgctatttctgaccgtttgaaagtagttgatagtgtctttattgtgggacacaggaaattggacatggatgcactaggtgcatctgtagggatgcaattttttgctagtaatattgttaatgccagttatgtagtttatgacccaaatgacatgaattctgatattgaaagagcaattgattacttgcaagaagacggcgaaacacgtctcgtaagtgttgagagagcttttgaattaattactcaaaattctttattagtcatggtagaccattctaaaacagctttaaccttatctaaggaattctttaacaagtttgcagatgttattgtggtagatcatcatagaagagatgaagattttccaaaaaatgctgttctttcatttatagaaagtggcgcaagtagtgccagcgaattagttacagaattgattcaatttcaacaagctaaagataaattaagccgcagtcaagcaagtattttaatggctggtatcatgcttgatacaagaaattttgcatctaatgtaacgagtagaacttttgatgtggcaagctatttacgcggtttaggtagtaatagtatggctattcaaaaaatatcagctacagattttgatgaatatcgtttaattaatgaattgattttaaaaggtgagcgtatttatgataacatcattgttgctaccggagaagaacataaagtttactcgcatgttatagctagtaaagcagctgacaccatgttgacaatggcaggtattgaggctacttttgttattactaaaaacagttcaaatattggtatttcagcgcgcagtagaaataatatcaatgtccagcgtattatggaaaaacttggtggtggcggacattttagttttgctgcttgtcaaatacaagacaagtctgtaaagcaagttagacgtatgttactggaaataattgacgaagatttaagagaaaatagtacagtcgaaaatagaagggat

SEQ ID NO: 3202 - protein, 660 aa, Streptococcus agalactiae
MKRFRFATVHLVLIGLILFGLLAICVRLFQSYTALLLAIFVALSFVVALLYYQKITYELSEVEQIELLNDQTEVSLKSLLEQMPVGVIQFDLETNDIEWFNPYAELIFTGDNGHFQSATVKDIITSRRNGTAGQSFEYGDNKYSAYLDTETGVFYFFDNFMGNRRNYDSSMLRPVIGIISIDNYDDIMDTMLEADMSKINAFVTSFISDFTQSKNIFYRRVNMDRYYIFTDYSVLNTLIKDKFDILNEFRKRAQENHLSLTLSMGISYGDGNHNQIGQIALENLNTALVRGGDQIVVRENDSSKKALYFGGGAVSTIKRSRTRTRAMMTAISDRLKVVDSVFIVGHRKLDMDALGASVGMQFFASNIVNASYVVYDPNDMNSDIERAIDYLQEDGETRLVSVERAFELITQNSLLVMVDHSKTALTLSKEFFNKFADVIVVDHHRRDEDFPKNAVLSFIESGASSASELVTELIQFQQAKDKLSRSQASILMAGIMLDTRNFASNVTSRTFDVASYLRGLGSNSMAIQKISATDFDEYRLINELILKGERIYDNIIVATGEEHKVYSHVIASKAADTMLTMAGIEATFVITKNSSNIGISARSRNNINVQRIMEKLGGGGHFSFAACQIQDKSVKQVRRMLLEIIDEDLRENSTVENRRD

SEQ ID NO: 3203 - DNA, 1974 bp, Streptococcus pyogenes
atgaaaaaatttcgttttgaaaccattcatttgattatgatgggattgattttatttggactgctggcactttgtgtcagtattatgcaatcaaaaatattaatattattagctatttttctcgttttgctatttgttgttgctcttttatggtatcaaaaagaagcttatcaattatcagacttagctcatattgagctcttaaatgaacaaacagaagataacctaaaaacgctacttgataatatgcctgttggagtagttcaatttgatcaagagaccaacgctgtagaatggtataatccttatgcagaattaatttttacaactgaagagggttttatacaaaacggtttgattcagcaaattattacggaaaaacgtcgtgaagatatttctcaaacatttgaagtttctggtaataaatacacttcttatattgatgtatcatcaggaattttttatttttttgatagctttgtgggaaacaggcaattagctgatgctagtatgttaagaccggttgttggcattatttcggttgataattatgatgatatcactgatgatttatcagatgcagatacctcaaaaattaattcatttgtagctaacttcattgatgagtttatggagtcaaaacggattttttaccgtcgtgttaatatggatcgctactatttctttacagactttaaaacattaaatgatttgatggataataaattttctgtcttagaagagtttcgtaaagaagctcaagatgctcagcgccctttaacactcagcataggaatttcttttggtgaagaaaatcatagccagattggacaggtagctcttgagaatcttaatattgcgcttgttcgtggtggtgatcagattgtcattcgtgaaaatgcggatcatacgaatccaatttatttcgggggagggtctgtttctacagttaaacgttcaagaacacgtacccgtgctatgatgacagctatttcagatcgaatcaagatggtggacaatgtttttattgttggacataggaaacttgatatggatgcactaggttcagctgttggtatgcaatttttcgcaggtaacattattgaaaatagttttgccgtttacaatccagatgagatgagtccagatattgaaagggctattgagcgattgcaggctgacggaaagactcgtctaatcagtgtttctcaagcaatgggtttagtgactccaagatcacttttagtaatggttgaccattctaagatatctttaacactttctaaagaattttatgaacagtttcaaaatgttattgtagttgatcatcacagaagagatgatgattttcctgataatgctatcttaacttttattgaaagtggagcaagtagtgctgcggagctcgtcactgagttaattcaatttcaaaatgctaaaaaatgtttaaataagatccaagccagtgttttaatggcaggtattatgcttgatactaaaaatttttctacgcgagtgacaagtcgtacctttgatgtcgctagttacttaagaagcaaaggaagtgatagtgttgaaattcaaaatatatccgcaacagattttgaagaatataagcaaataaatgaaattattttacaaggagaacgtcttggtgacagtatcattgtagctgcaggagaaaaaaatcatctttatagcaatgttattgctagtaaagctgcagatacgatactgtcaatggctcacgttgaggctagctttgtattagttgaaacagcttctcataagattgctatttcagctagaagtcgtagtaaaatcaatgttcaacgtgtgatggaaaaattaggtggaggaggccactttaatcttgctgcctgtcagttaacggatatcagtcttccccaagcgaagtacttattattgaaaactattaatatgacaatgaaagaaacaggagaagtagaatca

SEQ ID NO: 3204 - protein, 658 aa, Streptococcus pyogenes
MKKFRFETIHLIMMGLILFGLLALCVSIMQSKILILLAIFLVLLFVVALLWYQKEAYQLSDLAHIELLNEQTEDNLKTLLDNMPVGVVQFDQETNAVEWYNPYAELIFTTEEGFIQNGLIQQIITEKRREDISQTFEVSGNKYTSYIDVSSGIFYFFDSFVGNRQLADASMLRPVVGIISVDNYDDITDDLSDADTSKINSFVANFIDEFMESKRIFYRRVNMDRYYFFTDFKTLNDLMDNKFSVLEEFRKEAQDAQRPLTLSIGISFGEENHSQIGQVALENLNIALVRGGDQIVIRENADHTNPIYFGGGSVSTVKRSRTRTRAMMTAISDRIKMVDNVFIVGHRKLDMDALGSAVGMQFFAGNIIENSFAVYNPDEMSPDIERAIERLQADGKTRLISVSQAMGLVTPRSLLVMVDHSKISLTLSKEFYEQFQNVIVVDHHRRDDDFPDNAILTFIESGASSAAELVTELIQFQNAKKCLNKIQASVLMAGIMLDTKNFSTRVTSRTFDVASYLRSKGSDSVEIQNISATDFEEYKQINEIILQGERLGDSIIVAAGEKNHLYSNVIASKAADTILSMAHVEASFVLVETASHKIAISARSRSKINVQRVMEKLGGGGHFNLAACQLTDISLPQAKYLLLKTINMTMKETGEVES

SEQ ID NO: 3205 - DNA, 450 bp, Streptococcus agalactiae
atgaaagttatttttttacaagatgttaaggggaaaggaaaaaaaggtgaggttaaggaagtacctactggttatgctcaaaacttcttattaaaaaagaatctagctaaagaagcaacgacacaagctatcggtgaattaaaaggaaaacaaaagtccgaagaaaaagcacaagcagaaattttagcacaggcaaaggagctgaaaacacaattagaatccgaaactacccgagtgcaatttattgaaaaggtaggtccagatggtcgtacgtttggttctatcacagccaaaaagattgctgaagagttacaaaaacaatacggcattaaaattgacaaacgtcatattgatttagatcatactattagagcgattggtaaggttgaagtaccagtaaaattacataaacaggtttcttcacagattaagcttgatatcaaagaagcg

SEQ ID NO: 3206 - protein, 150 aa, Streptococcus agalactiae
MKVIFLQDVKGKGKKGEVKEVPTGYAQNFLLKKNLAKEATTQAIGELKGKQKSEEKAQAEILAQAKELKTQLESETTRVQFIEKVGPDGRTFGSITAKKIAEELQKQYGIKIDKRHIDLDHTIRAIGKVEVPVKLHKQVSSQIKLDIKEA

SEQ ID NO: 3207 - DNA, 450 bp, Streptococcus pyogenes
atgaaagttatttttttagcagatgtaaaaggaaaaggtaaaaaaggagaaatcaaagaggtcccaacaggctatgctcaaaatttccttattaagaaaaatttagctaaagaagcaactagtcaaagcatcggtgaattaaaaggaaaacaaaaagctgaagaaaaagctcaagctgaaatattagcagaagctcaagctgtcaaggctgttttggatgaggacaaaacacgtgttcaatttcaagaaaaagttggtccagatggacgtacatttggttccatcacagctaaaaagatttcagaagaattgcaaaagcaatttggtgtaaaagttgataaacgtcatattgttttagatcatcctatccgcgccattggtctaattgaagttcctgtgaaattacataaggaagtaacagctgagattaaattggctatcacagaagca

SEQ ID NO: 3208 - protein, 150 aa, Streptococcus pyogenes
MKVIFLADVKGKGKKGEIKEVPTGYAQNFLIKKNLAKEATSQSIGELKGKQKAEEKAQAEILAEAQAVKAVLDEDKTRVQFQEKVGPDGRTFGSITAKKISEELQKQFGVKVDKRHIVLDHPIRAIGLIEVPVKLHKEVTAEIKLAITEA

SEQ ID NO: 3209 - DNA, 1353 bp, Streptococcus agalactiae
ttggtagaagtatctgagctaagagtacaacctcaagacctgttggcagaacaggccgttctaggatctatctttatctcaccagagaaactgattatggtgagagaatttataagtccagatgatttttataaatattcacacaaagttatcttcagagcgatgattaccttagctgatagaaatgatgcaattgatgctgctactgttagaaatattttagatgaccaaggtgatcttcaaaacattggtgggttgggctatattgttgaattagttaatagtgttccaacaagtgctaatgcggagttttatgccaaaatagtttctgagaaagccatgttgcgagatatcatttctaagttgacagatactgtcaacatggcctatgaaggaaatgattctgatgaaattattgccaccgctgagaaggctttagttgatattaacgaacacagtaatcgtagcgggtttagaaagatatctgatgttttaaaagttaattacgaaaacttagaattacgttcacagcaaacctcagatgtcacaggtttaccaactggatttagagatttagacaggattactacaggtttacatccagatcaattaatcatcttagcggcccgtcctgcagtaggtaaaacagcctttgttttaaatattgctcaaaatgttggaactaaacaaaatagacctgtagctattttttcacttgaaatgggggctgagagtttagttgaccgtatgttggcagcagagggaatggttgattctcatagtttacgaactggtcagttgacggatcaagattggaataatgtaacgattgctcaaggagctttggcggatgcgccaatttatattgatgatacgcccgggattaaaattacagaaattagagcacgctctaggaagttatctcaagaagttgatgatggtttaggtttaatcgtcattgactacctccaattaatttcaggaactagaccagaaaatcgtcagcaagaagtttctgaaatttcaaggcagttgaagattttagctaaagaattaaaggttcctgttatcgcattaagccagctctctcgtggggttgagcaaaggcaggataaacgaccggtcttatctgatattcgtgaatctggatcgattgaacaagatgctgacattgttgctttcttatatcgagatgattattatcgtagagagggcgaagaagcagaggaaattgtagaagataatactgttgaggttattttagaaaagaaccgtgctggtgcgcgtgggacagtaaaattaatgtttcaaaaggaatataataaattttctagtatagctcaatttgaagaa

SEQ ID NO: 3210 - protein, 451 aa, Streptococcus agalactiae
MVEVSELRVQPQDLLAEQAVLGSIFISPEKLIMVREFISPDDFYKYSHKVIFRAMITLADRNDAIDAATVRNILDDQGDLQNIGGLGYIVELVNSVPTSANAEFYAKIVSEKAMLRDIISKLTDTVNMAYEGNDSDEIIATAEKALVDINEHSNRSGFRKISDVLKVNYENLELRSQQTSDVTGLPTGFRDLDRITTGLHPDQLIILAARPAVGKTAFVLNIAQNVGTKQNRPVAIFSLEMGAESLVDRMLAAEGMVDSHSLRTGQLTDQDWNNVTIAQGALADAPIYIDDTPGIKITEIRARSRKLSQEVDDGLGLIVIDYLQLISGTRPENRQQEVSEISRQLKILAKELKVPVIALSQLSRGVEQRQDKRPVLSDIRESGSIEQDADIVAFLYRDDYYRREGEEAEEIVEDNTVEVILEKNRAGARGTVKLMFQKEYNKFSSIAQFEE

SEQ ID NO: 3211 - DNA, 285 bp, Streptococcus agalactiae
atgagtgatgcatttgcagatgttgcaaaaatgaaaaaaataaaagaagatatcaagtcacatgagggacagatggtcgaacttactctcgaaaatggtcgtaagagggaaaaaaataaaattgggcgcctaattgaagtttacccatctttgtttatcgtagagtataaggatactgcagctgtaccaggagcaattgataatacttatgtagagtcttacacttattcagatattttaactgagaaaactttaattcgttattttgatgacgagtcagcagaa

SEQ ID NO: 3212 - protein, 95 aa, Streptococcus agalactiae
MSDAFADVAKMKKIKEDIKSHEGQMVELTLENGRKREKNKIGRLIEVYPSLFIVEYKDTAAVPGAIDNTYVESYTYSDILTEKTLIRYFDDESAE

SEQ ID NO: 3213 - DNA, 300 bp, Streptococcus pyogenes
ttgaagaaagataagaaagagagacaaaaaatgagcgatgcatttacagatgttgcaaaaatgaaaaaaattaaagaggacataagagcccatgaaggacagttagtagaattaacccttgagaatggacggaaacgggaaaaaaataaaattggtaggcttattgaagtttacagttcactctttatcattgagtatagtgatagctctgatactccaggagcaattgataattcttatgtcgaatcatacacctattcagatattttgacagaaaaaacattaattcgttatttagat

SEQ ID NO: 3214 - protein, 100 aa, Streptococcus pyogenes
LKKDKKERQKMSDAFTDVAKMKKIKEDIRAHEGQLVELTLENGRKREKNKIGRLIEVYSSLFIIEYSDSSDTPGAIDNSYVESYTYSDILTEKTLIRYLD

SEQ ID NO: 3215 - DNA, 609 bp, Streptococcus agalactiae
atgtcacgttatactggtccatcatggaaacaatcacgtcgccttggtttatcacttacaggcacaggtaaagaattggcacgtcgtaactacgtacctggtcagcacggtcctaataaccgtagcaagctttcagaatatggcttgcagttagctgagaaacaaaaacttcgtttttcatacggacttggtgaaaaacaattccgtaacttgttcgtacaagctactaaagcaaaagaaggaactcttggtttcaactttatggttcttttagagcgtcgtcttgataacgttgtttatcgtttaggacttgcaacaactcgtcgccaagctcgtcaatttgttaaccatggtcatatccttgttgatggtaaacgtgttgatatcccatcataccgcgttactccaggacaagttatttcagttcgtgaaaaatcaatgaaagtacctgcaatccttgaagctgttgaagctactttaggacgtccagctttcgtatcatttgatgctgaaaaacttgaaggttcattgactcgccttccagaacgcgatgaaattaacccagaaatcaatgaagcacttgtcgttgaattctacaacaaaatgctt

SEQ ID NO: 3216 - protein, 203 aa, Streptococcus agalactiae
MSRYTGPSWKQSRRLGLSLTGTGKELARRNYVPGQHGPNNRSKLSEYGLQLAEKQKLRFSYGLGEKQFRNLFVQATKAKEGTLGFNFMVLLERRLDNVVYRLGLATTRRQARQFVNHGHILVDGKRVDIPSYRVTPGQVISVREKSMKVPAILEAVEATLGRPAFVSFDAEKLEGSLTRLPERDEINPEINEALVVEFYNKML

SEQ ID NO: 3217 - DNA, 609 bp, Streptococcus pyogenes
atgtcacgttatactggtccatcatggaaacaatcacgtcgccttggtttatcacttacaggcacaggtaaagaattggcacgtcgtaactacgttcctggtcaacacggtccaaacaaccgtagcaaactctcagaatatggtttgcagttagctgagaaacaaaaacttcgtttctcatacggtttaggtgaaaaacaattccgtaacttgttcgttcaagctacaaaaatcaaagaaggaactcttggtttcaactttatggttcttttagaacgtcgtcttgacaacgttgtttaccgtctaggtttagcaactactcgtcgtcaagcacgtcaattcgttaaccacggtcacatccttgttgacggtaaacgcgttgatatcccttcataccgcgttgatccaggtcaagtgatttcagttcgcgaaaaatcaatgaaagtacctgcaatccttgaagctgttgaagctactcttggacgtccagctttcgtatcatttgatgctgaaaaacttgaaggttcattgactcgccttccagaacgcgatgaaattaacccagaaatcaatgaagcacttgtcgttgaattctataacaaaatgctt

SEQ ID NO: 3218 - protein, 203 aa, Streptococcus pyogenes
MSRYTGPSWKQSRRLGLSLTGTGKELARRNYVPGQHGPNNRSKLSEYGLQLAEKQKLRFSYGLGEKQFRNLFVQATKIKEGTLGFNFMVLLERRLDNVVYRLGLATTRRQARQFVNHGHILVDGKRVDIPSYRVDPGQVISVREKSMKVPAILEAVEATLGRPAFVSFDAEKLEGSLTRLPERDEINPEINEALVVEFYNKML

SEQ ID NO: 3219 - DNA, 294 bp, Streptococcus agalactiae
atgaatctaaatgatagattaaaaatagaagaaatggaagagaagtatgatagcttcaaacctagaatcaatgcattagtagaagctatagatgattttcaaaagcactatgaagattacgtgaaattaagagaattttatggtagcgaagactggtttagactatcagaacaaacagaaaataatctcaaatgcggtgtactgagtgaggatcagctctttgattttataggagaacataacgagcttgtaggccaatttttagatatgtcttctcaaatgtatcgtcattta

SEQ ID NO: 3220 - protein, 98 aa, Streptococcus agalactiae
MNLNDRLKIEEMEEKYDSFKPRINALVEAIDDFQKHYEDYVKLREFYGSEDWFRLSEQTENNLKCGVLSEDQLFDFIGEHNELVGQFLDMSSQMYRHL

SEQ ID NO: 3221 - DNA, 294 bp, Streptococcus pyogenes
atgacaaagcaagatcagttaatcgttgaaaaaatggaacaaacctatgaggcctttagcccaaagctagcaaatctcatagaagccctagatgcctttaaagagcattatgaggaatatgccacacttagaaatttttacagtagtgacgaatggtttcggcttgcaaaccaaccttgggatgatatcccgtgcggtgtcctatctgaagacctcctctttgatatgatcggtgaccataaccaactactagctgatatcttagacttggcccctatcatgtacaagcatatg

SEQ ID NO: 3222 - protein, 98 aa, Streptococcus pyogenes
MTKQDQLIVEKMEQTYEAFSPKLANLIEALDAFKEHYEEYATLRNFYSSDEWFRLANQPWDDIPCGVLSEDLLFDMIGDHNQLLADILDLAPIMYKHM

SEQ ID NO: 3223 - DNA, 537 bp, Streptococcus agalactiae
atggtaaacgatacgaggagagaaaaaacaaaaagagctattgaagcagctatgattacgttattaaaagatcagagcttcgatgaaatttcaacgattaatctaactaaaacagctggaatcagtcgttctagtttttatactcattataaagataaatatgaaatgattgatcaataccaacagtcactcttcaataaagtcgaatatatttttgatcgcaatcaatttaaaaaagaagatgccttgctcgaaatttttcaattcttagatagagaatcattatttgctgctctcttaacccaaaatggaacaaaagaaattcagacctacatccttaataaattacaattaatgctttctaaagaattacctgtggtcaatccagatgcaacaaagtctgatatcaaccgtttgtattatagtgtctatctcagtcatgctatttttggagtctatcaaatgtggataacacgaggaaaaaaagaaagccctcaacaaattacacaagtgctactcagtttattacctcaaact

SEQ ID NO: 3224 - protein, 179 aa, Streptococcus agalactiae
MVNDTRREKTKRAIEAAMITLLKDQSFDEISTINLTKTAGISRSSFYTHYKDKYEMIDQYQQSLFNKVEYIFDRNQFKKEDALLEIFQFLDRESLFAALLTQNGTKEIQTYILNKLQLMLSKELPVVNPDATKSDINRLYYSVYLSHAIFGVYQMWITRGKKESPQQITQVLLSLLPQT

SEQ ID NO: 3225 - DNA, 531 bp, Streptococcus pyogenes
atggtcaaccgtaaagaaaatacgaagcaagcaattttaaaagcaatggttatgttactaaaaaccgaaagttttgacgatattaccacagttaaattatctaaaagagctggaattagtcgctctagtttttacacacactataaagataaatatgaaatgattgactattatcagcaaaccttttttcacaaattagaatatatttttgagaaaaaatatcaaaataaagaacaagccttccttgaagtatttgaatttctccaaagagaacagcttctctcttcccttttgtctgctaacggtactaaagaaatacaggcctttatcatcaataaagttcgcctactcatcactactgatttacaggacaagttcagtaccgaagagttatctcaaacggaaaaagaataccaaagtatctacttagcccatgctttttttggtgtctgtcaaagttggattgctaaaggtaaaaaagaatcacctcaagaaatgacacaattcgttctcaaaatgcttacgagtacc

SEQ ID NO: 3226 - protein, 177 aa, Streptococcus pyogenes
MVNRKENTKQAILKAMVMLLKTESFDDITTVKLSKRAGISRSSFYTHYKDKYEMIDYYQQTFFHKLEYIFEKKYQNKEQAFLEVFEFLQREQLLSSLLSANGTKEIQAFIINKVRLLITTDLQDKFSTEELSQTEKEYQSIYLAHAFFGVCQSWIAKGKKESPQEMTQFVLKMLTST

SEQ ID NO: 3227 - DNA, 2433 bp, Streptococcus agalactiae
ttgtacatttttaaacacagtgtccaaaaacgagatttttatcttgaaattatctatcatcactgtataatatattttatcaaaaaaatgaacaatatgtccaaaataggagaaaaaatgttagacgaattaaaagcaatcataaaaagcccaaaattatggattacgatggctggggttgcactgattccaacgctatataatgttatctttctaagctcaatgtgggatccttatgggaatactaaaaatttacctgtggcagtcgttaaccaagataaatcggctaaattaaatggaaaaactatttcaattggcaaagatatggaggacaatttgtctaaaaatgatagcttagatttccattttacaacagctaaaagagcagaaaaagaattagaaaagggtcactattatatggttattacctttcctaaagatctttctagaaaagcgacaactctcatgacagaaaaaccagaaaggttaaatattacttataaaactactaaggggcgtagttttgtagcttcaaaaatgagtgagacagcagctaataaactaaaagatgaggtagcagaatctattacagggacttatactgaatcagtttttaaaaatatgggttctatgaaaacaggtatcaataaagctgctgatgggagtcaagaattattaaatggttctaataagctacaggatgggagccaaaccttgacaagtaatttagatgttttagcaagctctagtcaaactttttctggaggagctaataaactaaatagtggaataaacctttatacagatggtgtggggaccctatctaacgggttagaaacattatcagatggtgttactgcttacacaacaggtgtgcataagttgagtgaaggtagtcaaaaattagatgataagtctcaagcattggtggaaggatcagaaaagttgacggatggtttacaacaattgtcacaagcaactcaactaaaaccagagcaagaacgtactttgcagaacctttcagatggattaaagaatctaaatcagattattacaaatttacaatcgacagcaactactgatagcgatactaatagtaagttatttaattttttatcaactattgaatcaagtacaaaggctttgatgaatacggctgctgctgataaacaaaagcaaatgactgcggtacaatcaacgtcagcttttaaaagtttaacccctgaacaacaatctcaaatcacctcagcggttactggaacacctacttcagctgagacaattgcagcaaatatttcttcaaatatagaaaatatgaaaactgtgcttagtgaagcatctagttcagccccttctaataatggatcacaaaatcttcaaactttgtcaggaacagctaacaatttagtattaaaagctatctcagatttagataaaattcaaaaattgccaacggctactaagcagttatatcaaggtagtcaaaccttgacaaaaggaatcacggattatacgaatgctgtagggcaattacgcaaaggtgcagtaactttagatagtaaatccaatcaattgatttcaggaacacaaaaagcaagtcagggagctcaaactttagatagtaaatcggatcaattgagagacggagcggggcaattagctagtggttctgatagaattgcagatggttctaataagcttgctgggggaggacatcagttgacagatgggttgacagagttgtcaggtggtgtttctcaattatcaagttctttggggaaagctggggaccagttgtccatggtttctgtaaataaagataatgccaatgcagtatctagcccagtcactatcaagcatgaagattatgatagcgttgatacgaatggtgttggaatggcaccatacatgatttcagttgcgttgatggtggtagctttatcagccaatgttatttttgcgaaagctttatctggcaaagagccagctaatcgttttagttgggctaaaaataaattattaatcaatggattcattgcaactctagcagcaactatcttattttttgcagttcaattcataggtcttaaaccagattaccctggaaaaacctactttattatcctattgacagcatggactttgatggcattagtaactgctttagtgggatgggataataggtatggttccttcttgtcgttattaatattattattccagcttggttcaagcgcaggaacttacccaatagaattgagtcctaagttctttcaaacaattcaaccatttttaccgatgacttactctgtttcaggattaagagagaccatctcgttgacgggagacgttaaccatcaatggagaatgctagtaatctttttagtatcatcgatgatacttgctcttcttatttatcgtaaacaagaagat

SEQ ID NO: 3228 - protein, 811 aa, Streptococcus agalactiae
MYIFKHSVQKRDFYLEIIYHHCIIYFIKKMNNMSKIGEKMLDELKAIIKSPKLWITMAGVALIPTLYNVIFLSSMWDPYGNTKNLPVAVVNQDKSAKLNGKTISIGKDMEDNLSKNDSLDFHFTTAKRAEKELEKGHYYMVITFPKDLSRKATTLMTEKPERLNITYKTTKGRSFVASKMSETAANKLKDEVAESITGTYTESVFKNMGSMKTGINKAADGSQELLNGSNKLQDGSQTLTSNLDVLASSSQTFSGGANKLNSGINLYTDGVGTLSNGLETLSDGVTAYTTGVHKLSEGSQKLDDKSQALVEGSEKLTDGLQQLSQATQLKPEQERTLQNLSDGLKNLNQIITNLQSTATTDSDTNSKLFNFLSTIESSTKALMNTAAADKQKQMTAVQSTSAFKSLTPEQQSQITSAVTGTPTSAETIAANISSNIENMKTVLSEASSSAPSNNGSQNLQTLSGTANNLVLKAISDLDKIQKLPTATKQLYQGSQTLTKGITDYTNAVGQLRKGAVTLDSKSNQLISGTQKASQGAQTLDSKSDQLRDGAGQLASGSDRIADGSNKLAGGGHQLTDGLTELSGGVSQLSSSLGKAGDQLSMVSVNKDNANAVSSPVTIKHEDYDSVDTNGVGMAPYMISVALMVVALSANVIFAKALSGKEPANRFSWAKNKLLINGFIATLAATILFFAVQFIGLKPDYPGKTYFIILLTAWTLMALVTALVGWDNRYGSFLSLLILLFQLGSSAGTYPIELSPKFFQTIQPFLPMTYSVSGLRETISLTGDVNHQWRMLVIFLVSSMILALLIYRKQED

SEQ ID NO: 3229 - DNA, 144 bp, Streptococcus agalactiae
atgatatggtatgtcaaagtatttaggaggagaagatatgtctactttaacaataattattgcaacattaactgctttggaacatttttatattatgtatttggagacgttagccacccagtcaaatatgactgggaagatttt

SEQ ID NO: 3230 - protein, 48 aa, Streptococcus agalactiae
MIWYVKVFRRRRYVYFNNNYCNINCFGTFLYYVFGDVSHPVKYDWEDF

SEQ ID NO: 3231 - DNA, 264 bp, Streptococcus agalactiae
atgactgggaagatttttagtatgtctaaagaagagttgtcatatttacccgttattaaactttttaagaatcaaggtgtatacaacggcttgattggcctattcctcctttatgggttatatatttcacagaatcaagaaattgtagctgtttttttaatcaatgtattgctagttgctatttatggtgctttgacagttgataaaaaaatcttattaaaacagggtggtttacctatattagctcttttaacattcttattt

SEQ ID NO: 3232 - protein, 88 aa, Streptococcus agalactiae
MTGKIFSMSKEELSYLPVIKLFKNQGVYNGLIGLFLLYGLYISQNQEIVAVFLINVLLVAIYGALTVDKKILLKQGGLPILALLTFLF

SEQ ID NO: 3233 - DNA, 753 bp, Streptococcus agalactiae
gtgactttgattatgactgagaactggttacatactaaagatggttcagatatttattatcgtgtcgttggtcaaggtcaaccgattgtttttttacatggcaatagcttaagtagtcgctattttgataagcaaatagcatatttttctaagtattaccaagttattgttatggatagtagagggcatggcaaaagtcatgcaaagctaaataccattagtttcaggcaaatagcagttgacttaaaggatatcttagttcatttagagattgataaagttatattggtaggccatagcgatggtgccaatttagctttagtttttcaaacgatgtttccaggtatggttagagggcttttgcttaattcagggaacctgactattcatggtcagcgatggtgggatattcttttagtaaggattgcctataaattccttcactatttagggaaactctttccgtatatgaggcaaaaagctcaagttatttcgcttatgttggaggatttgaagattagtccagctgatttacagcatgtgtcaactcctgtaatggttttggttggaaataaggacataattaagttaaatcattctaagaaacttgcttcttattttccaaggggggagttttattctttagttggctttgggcatcacattattaagcaagattcccatgtttttaatattattgcaaaaaagtttatcaacgatacgttgaaaggagaaattgttgaaaaagctaat

SEQ ID NO: 3234 - protein, 251 aa, Streptococcus agalactiae
MTLIMTENWLHTKDGSDIYYRVVGQGQPIVFLHGNSLSSRYFDKQIAYFSKYYQVIVMDSRGHGKSHAKLNTISFRQIAVDLKDILVHLEIDKVILVGHSDGANLALVFQTMFPGMVRGLLLNSGNLTIHGQRWWDILLVRIAYKFLHYLGKLFPYMRQKAQVISLMLEDLKISPADLQHVSTPVMVLVGNKDIIKLNHSKKLASYFPRGEFYSLVGFGHHIIKQDSHVFNIIAKKFINDTLKGEIVEKAN

SEQ ID NO: 3235 - DNA, 2541 bp, Streptococcus agalactiae
ttgttgaaaaagctaattgaaaaagtcaaatcactgacttctgtgattaaaattgtattttttatatctgttttagtgcttattattgttgaaatgattcatttgaaacgaactatttctgttgagcaactaaagagtgtttttgggcaattatctccaatgaatcttttcttaattatccttgtgggggttatcgctgtcttaccgacaaccggatatgactttgtactgaatggacttttacgtacagataaaagcaaaaggtatattttacagactagttggtgtatcaacacttttaataacttgtcaggattcggtggcttaatcgatattgggttgcgcatggctttttatggtaaaaaaggtcaagagaagagtgacctaagagaagtgactcgttttttaccctatcttatttctggtctgtcatttattagtgtgattgccttaatcatgagccatatttttcatgccaaagctagtgttgattactattatttggtattaattggtgctagtatgtattttcctgttatttattggatttctggtcataaaggaagccattatttcggagatatgccatctagtactcgtataaaattaggtgttgtttctttttttgaatggggatgtgcggccgcagcatttataattatcggttatttaatgggcattcatctaccagtttataaaattttaccactattttgtattggttgtgccgtcgggattgtatcccttattcccggtggattaggaagttttgaattagttctatttacagggtttgctgccgagggactacctaaagaaactgtggttgcatggttattactttatcgtttagcctactatattattccattctttgcaggtatctatttctttatccattatttaggtagtcaaataaatcaacgttatgaaaatgtcccgaaagagttagtatcaactgttctacaaaccatggtgagccatttgatgcgtattttaggtgcattcttaatattttcaacagcattttttgaaaatattacttatattatgtggttgcagaagctaggcttggacccattacaagaacaaatgttatggcagtttccaggtttattgctgggggtttgttttattctcttagctagaactattgatcaaaaagtgaaaaatgcttttccaattgctattatctggattactttgacattgttttatcttaatttaggtcatattagttggcgactatctttctggtttattttactattgttaggcttattagtcattaagccaactctctataaaaaacaatttatttatagctgggaagagcgtattaaggatggaatcattatcgttagtttaatgggagttctattttatattgcaggactactattccctatcagggctcatattacaggtggtagtattgaacgcctgcattatatcatagcatgggagccgatagcattggctacgttgattcttactctcgtttatttatgtttggttaagattttacaaggaaaatcttgtcagattggtgatgtgttcaatgtggatcgttataaaaaactacttcaagcttacggtggttcttcggatagcggtttagcctttttaaatgataaaaggctctactggtaccaaaaaaatggagaagattgcgttgcgttccaatttgtaattgtcaataataaatgtcttattatgggggaaccagccggtgatgacacttatattcgtgaagctattgaatcgtttattgatgatgctgataagctagactatgaccttgttttttacagtattggacagaagttgacactacttttacatgagtatggttttgactttatgaaagttggtgaggatgctttagttaatttagaaacgtttactcttaaagggaataagtacaaacctttcagaaatgccctaaatagagttgaaaaggatggtttctatttcgaagttgtacaatcgccacatagtcaagagctactaaatagtttggaagagatttctaatacttggttagaaggacgtcctgaaaaaggtttctcactaggatattttaataaagattatttccaacaagccccaatagctttggtaaaaaatgctgaacacgaagttgttgcttttgctaatattatgccaaactatgaaaagagtattatctctattgatttaatgcgtcacgataaacagaaaattccgaatggcgttatggatttcctctttttatcattattctcttattatcaagagaagggataccactattttgatttggggatggcacctttatcaggagttggtcgcgttgaaacaagttttgctaaagagagaatggcgtatcttgtctatcatttcggtagtcatttctactcatttaatggtttacacaagtataagaagaagtttacaccattgtggtcggaacgttatatttcttgttctcgttcgtcctggttaatttgtgctatttgtgccctattaatggaagatagtaaaattaagattgttaaa

SEQ ID NO: 3236 - protein, 847 aa, Streptococcus agalactiae
MLKKLIEKVKSLTSVIKIVFFISVLVLIIVEMIHLKRTISVEQLKSVFGQLSPMNLFLIILVGVIAVLPTTGYDFVLNGLLRTDKSKRYILQTSWCINTFNNLSGFGGLIDIGLRMAFYGKKGQEKSDLREVTRFLPYLISGLSFISVIALIMSHIFHAKASVDYYYLVLIGASMYFPVIYWISGHKGSHYFGDMPSSTRIKLGVVSFFEWGCAAAAFIIIGYLMGIHLPVYKILPLFCIGCAVGIVSLIPGGLGSFELVLFTGFAAEGLPKETVVAWLLLYRLAYYIIPFFAGIYFFIHYLGSQINQRYENVPKELVSTVLQTMVSHLMRILGAFLIFSTAFFENITYIMWLQKLGLDPLQEQMLWQFPGLLLGVCFILLARTIDQKVKNAFPIAIIWITLTLFYLNLGHISWRLSFWFILLLLGLLVIKPTLYKKQFIYSWEERIKDGIIIVSLMGVLFYIAGLLFPIRAHITGGSIERLHYIIAWEPIALATLILTLVYLCLVKILQGKSCQIGDVFNVDRYKKLLQAYGGSSDSGLAFLNDKRLYWYQKNGEDCVAFQFVIVNNKCLIMGEPAGDDTYIREAIESFIDDADKLDYDLVFYSIGQKLTLLLHEYGFDFMKVGEDALVNLETFTLKGNKYKPFRNALNRVEKDGFYFEVVQSPHSQELLNSLEEISNTWLEGRPEKGFSLGYFNKDYFQQAPIALVKNAEHEVVAFANIMPNYEKSIISIDLMRHDKQKIPNGVMDFLFLSLFSYYQEKGYHYFDLGMAPLSGVGRVETSFAKERMAYLVYHFGSHFYSFNGLHKYKKKFTPLWSERYISCSRSSWLICAICALLMEDSKIKIVK

SEQ ID NO: 3237 - DNA, 1512 bp, Streptococcus agalactiae
atgacaacactaatcactacctttcaagagcgttttggagattggactcaaagtcttattgaacacctccagctatcactactaacacttattttagcaactttaattgctattccactcggtatcatcattagtcattataaaaaaatcagtcatgttgtccttcagataactgggatatttcaaacaattccttctttagccttgcttggtttatttataccttttatgggaattggaactgtaccagctgtcgttgcactaattatttacgctctatttccaattttacaaaatactgtaacagtactgatgcaaattgatgctaatctcattgaggcagcaaccgcttttggaatgacacgttgggaaaggcttaaaaagtttgagttagctttaagtatgcctgttatcatctcaggcattagaactgcctctgttatgattattggtacagctacattagctagtcttatcggagctggtggccttggatcatttattttgttagggattgatcgcaacaatccttctctaattctcataggggcaatctcttctgctgtcttagctattatatttagtggtttaattggattactagaaaaggctagattacgaaccatagccgtttctggtatacttttactagcaggcttaggactatcctatgctccaaaatggatgcctggaacaaatactgcaacgataactgttgcagggaagttaggaactgaaccagatattttaattaatatgtacaaagaacttattgaggatcagacagatatcaaagttaagcttaaacctaatttcggaaaaacaactttcttatatcaagccctaaaatctggtgatattgatctttacccagagtttacaggtactattacatcaagtttacttaaaaatcctcctaaagtaagtaataaccctaaacaggtttacaacttagccaaaaacggtattttaaaacaagataagttgtcacttttgtcacctatggcttatcaaaacacctacgctgtagctgttaaaaaagattacgctgaagctaatcaactcaaaaatatcagcgacctaaaaaaattagataaactaaaagctggtttcactttagaatttaaggatagagaggatgggagtattggtttacagaaacattatggtttaaaccttgatatctcaaccttagaacctgctttacgataccaagctatcaatagtaaagatgtcaatattattgacgcttactctaccgatagtgaattaatccagtatcaacttcaaattctcaaagacgataagcatctatttccgccatatcaaggagcaccgctactaaggcaagatacgattaaaaaataccctcaagtaaaaaaagctctcaataaacttgctggtcatatcactgaaaaagaaatgcaagaaatgaactaccaagtagctgtaaagcataaatcagcagctacagtagctaaacaatatttaaaagcacatcatattataaag

SEQ ID NO: 3238 - protein, 504 aa, Streptococcus agalactiae
MTTLITTFQERFGDWTQSLIEHLQLSLLTLILATLIAIPLGIIISHYKKISHVVLQITGIFQTIPSLALLGLFIPFMGIGTVPAVVALIIYALFPILQNTVTVLMQIDANLIEAATAFGMTRWERLKKFELALSMPVIISGIRTASVMIIGTATLASLIGAGGLGSFILLGIDRNNPSLILIGAISSAVLAIIFSGLIGLLEKARLRTIAVSGILLLAGLGLSYAPKWMPGTNTATITVAGKLGTEPDILINMYKELIEDQTDIKVKLKPNFGKTTFLYQALKSGDIDLYPEFTGTITSSLLKNPPKVSNNPKQVYNLAKNGILKQDKLSLLSPMAYQNTYAVAVKKDYAEANQLKNISDLKKLDKLKAGFTLEFKDREDGSIGLQKHYGLNLDISTLEPALRYQAINSKDVNIIDAYSTDSELIQYQLQILKDDKHLFPPYQGAPLLRQDTIKKYPQVKKALNKLAGHITEKEMQEMNYQVAVKHKSAATVAKQYLKAHHIIK

SEQ ID NO: 3239 - DNA, 720 bp, Streptococcus agalactiae
atgatttcatttgaaaatgttagtaaatcatatggtgatcataccatcattgataatattagttgccatattcaaagaggagaattctttgtccttgtgggggccagtggcagtggtaaaactaccatcctcaagatgattaatcgtctcatcgaaccaagccaaggcgctattactttagatggggaaaacattacatcacttgatttgcgacaattacgcttagaaactggttatgtcttgcaacaaattgcacttttccctaatttaacagttggagaaaatatagaacttatccctgaaatgaagggctggtcaaaaggtgaccaaaaaaaagccgctagcgaccttcttgataaggtgggtttacctgctaaggactactttaatcgctatcctcatgagctctctggtggggaacaacaacgcataggtatcctacgagcaatcgttgctaaacctaaggtactacttatggatgagccattttctgctttagaccctatctcaagacgtcaattacaagatatcaccaaacaattacagtctgaattgggtattacattagtgtttgtcacccatgacatgaaggaagctatgcgtcttgcagatagaatttgtgttattaaggaaggtaagatagtgcaattggatagaccagaaataattcaaaataatccctctgaccaatttgttagaaccctatttgaagaggagaac

SEQ ID NO: 3240 - protein, 240 aa, Streptococcus agalactiae
MISFENVSKSYGDHTIIDNISCHIQRGEFFVLVGASGSGKTTILKMINRLIEPSQGAITLDGENITSLDLRQLRLETGYVLQQIALFPNLTVGENIELIPEMKGWSKGDQKKAASDLLDKVGLPAKDYFNRYPHELSGGEQQRIGILRAIVAKPKVLLMDEPFSALDPISRRQLQDITKQLQSELGITLVFVTHDMKEAMRLADRICVIKEGKIVQLDRPEIIQNNPSDQFVRTLFEEEN

SEQ ID NO: 3241 - DNA, 831 bp, Streptococcus agalactiae
gtgaaattctatattattgatgatgaccccactatcactatgattttacaagatattattgaagaagatttcaataatacagtagtcagagtgaataatgtctccagtaaagcatacaacgaattgctgattgcagatgttgatatcgtattgattgatttattaatgccaatattagacggtgtaacattagtccaaaaaatctataaacagcgttccgatttaaaatttattatgatttcccaagtcaaagataatgatttacgacaagaagcatataaagcaggaatcgaattttttattaataaacccattaatattattgaagtaaaaagcgtcgtgaaacgtgtcactgatactatcgaaatgcaaaaaaaattaaatacaatccaaaatctcctagaaaatacgccatcatatcaaaagcctataacgactagtaacctcactaaaatccgttcaatactcagttatttaggtattacttcagagacagcctacacagatattcttaacatctgtgaacttttattaaaacaagaattaaattttgcccaatttgattttcaaaaagaactttctatcgatgaacaccaacaaaaaatcattttacaacgtattcgtcgtgccgttaaaaaagctatgataaatatggctcatctgtacattgatgattttgaaaatgaattaacactgcaatatgctaatgcattgtttggatttcagaatatccataatgaggcacaacttattcaaggaaaaagcatgtatggtggtaaaatttcacttaaacattttttcgatgaacttattttacagagtaaaacgttt

SEQ ID NO: 3242 - protein, 277 aa, Streptococcus agalactiae
MKFYIIDDDPTITMILQDIIEEDFNNTVVRVNNVSSKAYNELLIADVDIVLIDLLMPILDGVTLVQKIYKQRSDLKFIMISQVKDNDLRQEAYKAGIEFFINKPINIIEVKSVVKRVTDTIEMQKKLNTIQNLLENTPSYQKPITTSNLTKIRSILSYLGITSETAYTDILNICELLLKQELNFAQFDFQKELSIDEHQQKIILQRIRRAVKKAMINMAHLYIDDFENELTLQYANALFGFQNIHNEAQLIQGKSMYGGKISLKHFFDELILQSKTF

SEQ ID NO: 3243 - DNA, 1293 bp, Streptococcus agalactiae
atgctagatatattatcagaaaaacatctagaaagaaggcagcgtattattatctctgcaatagctatcgccttagctgctcaaatcaatatctcaatacttgctgatgggtttattatgaccttatctttgttcattttgcctgtctttttatattttaatgacgacattaatccaattcttctctgtctaggaattacttttgcttctcctatcttcagaggaatcatattaagtatcgctggcgaggctgagattcatcaaataattgaattcgttttaactgatatggcgttttatatttgttatggcatcaccttttatactatttattggcatcgttcctaccgtaataaaggtacttttttcttttctatcattatttgtgattattttgccaaccttgtagaaattagttttctcataaagtttaacaattatactataactatattcgctactttatttgccatagcacttttgcgagcttttattagttgcgctgtggcttatacttatagttatctatcacttctcttacaaaaagacgatcacgaacgtcgatactattattttatgtggtcaacttcagccgttaaaagcgaggtttattttatgcaaaaaaatatcattgaaattgaaaacatcatgaaaaatgcttatttattagataaagagttatccaaatatcatctacctaaagaataccaacacctctctctagatatttcgcgggacgttcacgaagttaagaaagattaccaaaatattattaaaggcttaggaacctattttagtgtaaaaaatgaatcaactatggcattgaaagatatctttcaaattgttttatcttatactaggagtattattcaatttcggcatcaagatatcattattctcgaaaataataaatgtaatttgataatatcaaactattactatttactaaccattatttccaatatcgttttaaatgcagtagaagctattgataaacaaaaaaagggtacaatcagtgttcacacagaagaattagaagattttattaaaattgagattagtgataacggaccaggaatacctgataaaatgaaacacatgattttcaaacctggattttcgactaaatttgatgctaatggtgatatctatcgaggaatcgggctatcccacgtgcgtattttaatggaagagcaatatcaaggaacgataactgtttgtcctaatcagccaaatggaacaacatttacactgttattccgtaaaaatcgatttaagttaggagataatacg

SEQ ID NO: 3244 - protein, 431 aa, Streptococcus agalactiae
MLDILSEKHLERRQRIIISAIAIALAAQINISILADGFIMTLSLFILPVFLYFNDDINPILLCLGITFASPIFRGIILSIAGEAEIHQIIEFVLTDMAFYICYGITFYTIYWHRSYRNKGTFFFSIIICDYFANLVEISFLIKFNNYTITIFATLFAIALLRAFISCAVAYTYSYLSLLLQKDDHERRYYYFMWSTSAVKSEVYFMQKNIIEIENIMKNAYLLDKELSKYHLPKEYQHLSLDISRDVHEVKKDYQNIIKGLGTYFSVKNESTMALKDIFQIVLSYTRSIIQFRHQDIIILENNKCNLIISNYYYLLTIISNIVLNAVEAIDKQKKGTISVHTEELEDFIKIEISDNGPGIPDKMKHMIFKPGFSTKFDANGDIYRGIGLSHVRILMEEQYQGTITVCPNQPNGTTFTLLFRKNRFKLGDNT

SEQ ID NO: 3245 - DNA, 996 bp, Streptococcus agalactiae
atgaaaaatttacgtaaccgtagttttcttactttattggattttagtacagcagaagttgaatttcttttaaaactttcagaagatttaaaacgtgctaaatacgcaggaattgaacaacaaaaacttgttggtaaaaatatcgctttgatttttgaaaaagattctacacggacacgttgcgcttttgaagttgctgctcacgatcaaggagctcatgttacttatttaggtccaacaggcagtcagatgggtaaaaaagagacctcaaaagacactgcgcgtgtgctaggtggtatgtatgatggtattgagtatcgtggattttctcaagaaacagttgagactttagccgaattttcaggagttcctgtgtggaatggtttaaccgatgctgatcatccaacgcaagtactagccgattttctgaccgctaaggaatgcttacataagccctataaagatattcgctttacgtatgtgggtgatggacgtaacaatgtcgctaatgccttgatgatcggtgcttctattgtaggcatgacttatcatttggtttgtcctaaagaattagagccagatcctgaactactctctaaatgtcaagaaattgcgaaaactactggtgcttctattgaaatcactgctgatattgcagaaggcgtcagagattcagacgtcctatatacagatgtttgggtttcaatgggagaaccggatgaagtttggaaagaaagaatagctcttttagaaccctatcgtattacccaagaaatgcttaatatgacagaaaatccaaacgttattttcgagcattgcttgccctcatttcataatatagatactaaagttggatacgacatttatgaaaaatatggtttgaaggaaatggaagtatcagatgaagtttttgaaggccctcactcagttgttttccaagaagctgaaaatcgtatgcatactattaaagcagttatggtagcaactttaggtgat

SEQ ID NO: 3246 - protein, 332 aa, Streptococcus agalactiae
MKNLRNRSFLTLLDFSTAEVEFLLKLSEDLKRAKYAGIEQQKLVGKNIALIFEKDSTRTRCAFEVAAHDQGAHVTYLGPTGSQMGKKETSKDTARVLGGMYDGIEYRGFSQETVETLAEFSGVPVWNGLTDADHPTQVLADFLTAKECLHKPYKDIRFTYVGDGRNNVANALMIGASIVGMTYHLVCPKELEPDPELLSKCQEIAKTTGASIEITADIAEGVRDSDVLYTDVWVSMGEPDEVWKERIALLEPYRITQEMLNMTENPNVIFEHCLPSFHNIDTKVGYDIYEKYGLKEMEVSDEVFEGPHSVVFQEAENRMHTIKAVMVATLGD

SEQ ID NO: 3247 - DNA, 924 bp, Streptococcus agalactiae
atggcaaaaattgttgttgcactaggaggaaatgccttaggaaattctccagaagaacaattaagattagtaaaacatactgcaaaatcattggtggccttgataaaaaagggacacgaaattgttgtaagtcatggtaatggaccacaagttggtgccattaatttaggaatgaattttgcggctgagagtggtcaaggaactaattttccttttccagaatgtggagcaatgagccaaggatacataggctatcatctccaacagagccttttaaatgaattacgtcaagagggaataaataaggaagttgctacaattattacccaaattgaggtggatgaatcagaccaagcatttagcgcacctaccaagcctataggcaccttttatgataaggagacatcagaaaagattgctatagagaaagggtatactttcgtagaagacgctggacgagggtatcgtcgtgttgttgcttcacctgaacctaaaaaaatcatcgaaattaatagcattaaaacacttattgaaaatgataccctagttatcgcaggtggaggtggaggcatccctgtcattaataagggaggttatgaaggtattgcagctgttattgataaagacaaatctagtgcactgttagcaggagaactagctgcggatcaattgattattctcactgcagttgattatgtttatactcaatttggtaaagaaaatcaaaaagctttaacagaggttaatgagaatcaaatgattgattacgttaaccaaggtgagtttgcaaaaggaagtatgttacctaaagtaatagcctgtatgagtttcttagatcacaatccgaaaggaacagccttaatcacctcattaaatggtttagaagatgcattagatgggaaattaggaacacgtataactaag

SEQ ID NO: 3248 - protein, 308 aa, Streptococcus agalactiae
MAKIVVALGGNALGNSPEEQLRLVKHTAKSLVALIKKGHEIVVSHGNGPQVGAINLGMNFAAESGQGTNFPFPECGAMSQGYIGYHLQQSLLNELRQEGINKEVATIITQIEVDESDQAFSAPTKPIGTFYDKETSEKIAIEKGYTFVEDAGRGYRRVVASPEPKKIIEINSIKTLIENDTLVIAGGGGGIPVINKGGYEGIAAVIDKDKSSALLAGELAADQLIILTAVDYVYTQFGKENQKALTEVNENQMIDYVNQGEFAKGSMLPKVIACMSFLDHNPKGTALITSLNGLEDALDGKLGTRITK

SEQ ID NO: 3249 - DNA, 117 bp, Streptococcus agalactiae
gtgaaactaataccagctgcatttgaagcaataacagaagaaaacggattaattgttgaaaatgatgtcccaacagaacttgctaagaaaatagcacctacacaaatgatagaatca

SEQ ID NO: 3250 - protein, 39 aa, Streptococcus agalactiae
MKLIPAAFEAITEENGLIVENDVPTELAKKIAPTQMIES

SEQ ID NO: 3251 - DNA, 1551 bp, Streptococcus agalactiae
atgccagaaaaaatgacaaacagtgaaaacaaaaggagtaaaggttttcgaatgccaggtgcctttacaatattattcattttaacaatcttttcggttttggctacatggtggatacctgctgggtcctattcaaaattacaatttgatacagcatcatccaaactagtagtaacagatccaaatggtaagacagttcatgttccagcaacgcaaacacagttggataagatgaatgtcaaaattaaaattaaagaatttacttctggtgctattagtaagccagtttcagttccaaatacttacaaacgtttgaagcaaaatccagcaggcattggctccgtgacgactagtatggtaaatggaaccattgaagctgttgatattatggtatttatcatggtacttggaggcatgataggagtagttagaaagagtggcgcttttgagtctggtcttctagctttaacaaagaaaaccaaaggtagagagtttttattgatatttttagtttccttattgatggttttaggcggtactctatgtggtattgaagaagaagcagttgctttttatcctattttagttccaatctttttagccatgggttatgattctatcatttgtgtaggtgctattttcttagcaagttctgttgggacatcattttcaacaattaatccgttttcttctgttattgcttcaaatgcagctggtattagtttcacagaaggcttatcatggcgtacagcagggtgtattgcaggtgctatttttgttgtggtgtatctacattggtatgctaaaaaaataaaagcgaatccagagttttcatattcctatgaagatagagtagaatttaatgctaaatggggcatgacaactaaccatacaccctcactctttactattagacaaaaaattattttaagtttatttgttatttcatttcctttgatggtttggggagtaatgtcacagggatggtggtttccaaccatggcttcttcctttttagctattacaattattattatgtttttaacagcaactggggcaaatggtattggagaaagggatgttgttgatgagtttgttaatggtgcatcaagccttgttggggtttcattaatcattggtttagcgcgtggtatcaatattattttgagccaaggttatatatcagatacgatgctttacacagcttcaaaattagcttcacatgttagtggctctgtctttatcattgttatgatgtttatctactttgtgttaggatttgttgttccatcctcgtcgggtttagcagtactttcaatgccaattctagcacctcttgcagatactgttgggattcctcgttcagtagtagtaatggcttatcaatttgggcagtatgcaatgttgtttttagcacctactggactagttatggcaaccttgcagatgttagatatgaagtactcccattggctaaaatttgtgtggccggttgttttattcctcctaatatttggtggcggtttgttagttctacaagttttaatactt

SEQ ID NO: 3252 - protein, 517 aa, Streptococcus agalactiae
MPEKMTNSENKRSKGFRMPGAFTILFILTIFSVLATWWIPAGSYSKLQFDTASSKLVVTDPNGKTVHVPATQTQLDKMNVKIKIKEFTSGAISKPVSVPNTYKRLKQNPAGIGSVTTSMVNGTIEAVDIMVFIMVLGGMIGVVRKSGAFESGLLALTKKTKGREFLLIFLVSLLMVLGGTLCGIEEEAVAFYPILVPIFLAMGYDSIICVGAIFLASSVGTSFSTINPFSSVIASNAAGISFTEGLSWRTAGCIAGAIFVVVYLHWYAKKIKANPEFSYSYEDRVEFNAKWGMTTNHTPSLFTIRQKIILSLFVISFPLMVWGVMSQGWWFPTMASSFLAITIIIMFLTATGANGIGERDVVDEFVNGASSLVGVSLIIGLARGINIILSQGYISDTMLYTASKLASHVSGSVFIIVMMFIYFVLGFVVPSSSGLAVLSMPILAPLADTVGIPRSVVVMAYQFGQYAMLFLAPTGLVMATLQMLDMKYSHWLKFVWPVVLFLLIFGGGLLVLQVLIL

SEQ ID NO: 3253 - DNA, 1491 bp, Streptococcus pyogenes
atgacagaagaaaaaaaacggggttttagaattccttcttcttacaccgttctttttatcattatagccatcatggcagtgttaacttggtttattccagctggcgcctacgaaaccgctaagggcggtggtgttatttcaggaacctacaaaacagtagcatccaatcctcaaggattttttgacatcttgatggctcccgttcgaggcatgttaggtgttgaaggcactgatggtgctattcaagtgtctttctttatcttaatggttgggggctttttaggagttgtcaacaaaacaggtgctcttgacacagggattgcgtcagtggttcgtaaaaacaaaggtagagaaaaaatgctgattgctattttaatccctttgtttgctctaggtggaacgacctatggtatgggggaagaaaccatggccttttacccacttttaattcctgttatgattgcggttggttttgacagtattgttgctgtagccattattttgattggttctcaaattgggtgtctagcctccactattaacccatttgcaactggtgtagcagctgatgctgctggtgtcagcattgcagatggaatgatttggcgtgttatccaatgggttattcttgtcggcatgtctatttggtttgtttacaattacgctagtaagattgaagaagacccaagtaaatcattggttgcagacaaggaagaagagcataaggaactcttccagttgcaaaattctggagaagacttaaacaagcgccaacgaaacgttttgaccatttttactttgacctttgtcattatgattcttagtttgattccgtgggaagattttggcatcaaattctttactaatatcaatacttggttaaccacaatgcctatcttagggggagttattgggaaaaccatgggagcatttggtacttggtatttcccagaaatcaccatgctctttatcatgatgggtgtcttagttgctattgtttatcgtatgagtgaagaagacttttttagctcttttttgactggtgcaggtgaatttttaggtgttgccatgatctgtgctattgcacgcggtattcaagttatcatgaatggtggtatgattacagccactatcttacacttaggtgaaacaagtctttctggtttatcttctcaagtttttgtgatattagcttatattttctacctcccaatgtccttcttgattccatcaacatcaggacttgctggggctacaatgggaattatggcaccgcttggacaattctcaaatgtccctgctcaccttgttattacagccttccagtcagcttctggaatcttaaacatgatttctccaacttcagcaatcgttatgggagcacttgcgcttggtcgcgttgaccttggtacttggtggaaattcattggtaaatttattgtaatggtgatgcttgtaagcgtgctattacttgtagttgcaacattcttt

SEQ ID NO: 3254 - protein, 497 aa, Streptococcus pyogenes
MTEEKKRGFRIPSSYTVLFIIIAIMAVLTWFIPAGAYETAKGGGVISGTYKTVASNPQGFFDILMAPVRGMLGVEGTDGAIQVSFFILMVGGFLGVVNKTGALDTGIASVVRKNKGREKMLIAILIPLFALGGTTYGMGEETMAFYPLLIPVMIAVGFDSIVAVAIILIGSQIGCLASTINPFATGVAADAAGVSIADGMIWRVIQWVILVGMSIWFVYNYASKIEEDPSKSLVADKEEEHKELFQLQNSGEDLNKRQRNVLTIFTLTFVIMILSLIPWEDFGIKFFTNINTWLTTMPILGGVIGKTMGAFGTWYFPEITMLFIMMGVLVAIVYRMSEEDFFSSFLTGAGEFLGVAMICAIARGIQVIMNGGMITATILHLGETSLSGLSSQVFVILAYIFYLPMSFLIPSTSGLAGATMGIMAPLGQFSNVPAHLVITAFQSASGILNMISPTSAIVMGALALGRVDLGTWWKFIGKFIVMVMLVSVLLLVVATFF

SEQ ID NO: 3255 - DNA, 1362 bp, Streptococcus agalactiae
atgttattccaaagtaaaataaattaccctaaaaagtctagcatcatcactcaaattaccctctggtacagctcttttatttttatccttgttatcggtgtattaattggttcattttttatttcaaaaagcattgctgaaaacaaatctaaaaaaaatttagaagctaaagctgtgcaaatgagtcaagcgttagctaaaggtcatcggtatgaggcttttgaagatggaatattttattcagtctatgaccaaaatggaaaagttatctattctggttttccaaaaggatttaaaagggatttagaccatcaacataaacataaaaagaaattatctctattttccatggagaatcgtacctttcagtatgttgatattccaatttctgggaaaaatcagtggttacgtgctatccgtactgttgacagactggataagcaattaactgaattgttatttagtttgggtatcgttcttcctcttatgttgattataataactgttggtggctatttaattttaaagcgcacttttagaccgattcaagaaattactgaaaccgctcaatttattacccaaaatgaagactatactaagcgaattatcactaaaaataacgaaaatgaattaactgagctagcagctgttatcaatactatgttggcttctattgaatcatcatttgttcgggaaaaacaatttaacaatgatgtttctcatgaactacggactcctgtaacagttatactttctgaaagtgaatacggaaaaaactacgcagaaaatttaagtgaagcaaaagaatcctttgaggttatacaccgtcagtcactatcaatgaaaaaattagttgagcaacttctagaattgactaaggcagaaaatccattatcaattcagttagaacctcttaatttctcaattatgatgaagcaactagtatccgattcgagtagattattagataatacccctatacaccttgactctcaaatcgaagatgacctttggattataggtcaacaaacactactcaaacggctttttgataatctattttcaaatgctattaaatttacaaacaatcatatttctattagtctaagacagtccgataatcaaattgtcttctctattaaagataatggtctaggtatctcagttgatgaccaaagtaaaatttggaaccgtttctatcaagtggactctgctcgaaccaaggatagtcagtctggaattggtttagggctatctttagtaaaacaaatcgctacaatacaccgtgctaaaatatgggttgattctaaacctgatgatggcagtcagtttacgctcacctttccaaaattgaagaaagac

SEQ ID NO: 3256 - protein, 454 aa, Streptococcus agalactiae
MLFQSKINYPKKSSIITQITLWYSSFIFILVIGVLIGSFFISKSIAENKSKKNLEAKAVQMSQALAKGHRYEAFEDGIFYSVYDQNGKVIYSGFPKGFKRDLDHQHKHKKKLSLFSMENRTFQYVDIPISGKNQWLRAIRTVDRLDKQLTELLFSLGIVLPLMLIIITVGGYLILKRTFRPIQEITETAQFITQNEDYTKRIITKNNENELTELAAVINTMLASIESSFVREKQFNNDVSHELRTPVTVILSESEYGKNYAENLSEAKESFEVIHRQSLSMKKLVEQLLELTKAENPLSIQLEPLNFSIMMKQLVSDSSRLLDNTPIHLDSQIEDDLWIIGQQTLLKRLFDNLFSNAIKFTNNHISISLRQSDNQIVFSIKDNGLGISVDDQSKIWNRFYQVDSARTKDSQSGIGLGLSLVKQIATIHRAKIWVDSKPDDGSQFTLTFPKLKKD

SEQ ID NO: 3257 - DNA, 669 bp, Streptococcus agalactiae
atgaaaatccttgttgttgaagatgagtttgacttgaaccgtagtattgtaaaacttttaaaaaagcaacactacagtgttgacagtgcttcaaatggtgaagaagccttacaatttgtttcagtggcagaatatgatgtgattatcttagatgtaatgatgccaaaaatggacggcttcacctttttaaaactgcttcgcaacaaaggaagtcaagtatctattcttatgttgactgctcgagatgccgttgaagatcgtatcgcaggtctagattttggtgcggatgattaccttgtaaaaccatttgaatttggagaactcatggcccgaattcgagctatgttacgacgtgcaaatagacaagtatcttctgatgatattcaaattcaagatataacaatcaatttatctacaaagcaagtttggagaaacgacaatttgattgatttaacagctaaggaatacgaagtccttgagtatttggcacgtcacagagaccaagtcctctctcgtcatcaaattcgtgaacacgtttgggattatgattattatggagagtccaatattattgatgtccttatcaaaaaccttcgtcgaaaactagataacaatcgagatggatcactaataaaaactaaacgaggtttaggatatgttattccaaag

SEQ ID NO: 3258 - protein, 223 aa, Streptococcus agalactiae
MKILVVEDEFDLNRSIVKLLKKQHYSVDSASNGEEALQFVSVAEYDVIILDVMMPKMDGFTFLKLLRNKGSQVSILMLTARDAVEDRIAGLDFGADDYLVKPFEFGELMARIRAMLRRANRQVSSDDIQIQDITINLSTKQVWRNDNLIDLTAKEYEVLEYLARHRDQVLSRHQIREHVWDYDYYGESNIIDVLIKNLRRKLDNNRDGSLIKTKRGLGYVIPK

SEQ ID NO: 3259 - DNA, 684 bp, Streptococcus pyogenes
atgacaaagaaaattttaattattgaagatgaaaagaatctggctagattcgtttctcttgagctgcaacatgagggttatgaagtcattgttgaggtcaatggtcgtgaagggttagaaactgctttggaaaaagagtttgatttaatcctgcttgacttaatgttaccagagatggatggttttgaagtgacccgtcgtttgcaaaccgaaaaaacaacgtatatcatgatgatgactgcgcgtgattctattatggatgtggttgcaggtttagaccgcggtgcagacgactatattgttaaaccgtttgccattgaagaactacttgcccgtattcgtgctattttccgccgtcaagatattgaatctgagaagaaagtgcctagtcaaggcatttatcgagatctagttttaaatccacaaaaccgttcagttaatcgtggcgacgatgagatttctctcactaaacgtgaatatgatttgcttaatattttgatgactaatatgaatcgtgtcatgacacgtgaagaattattgtcaaatgtttggaaatatgatgaagccgttgagactaatgttgtagatgtctatattcgttatctccgcggcaaaattgacattccaggcaaggaatcttatatccaaacagtgcgtggcatgggatacgttattcgtgagaaa

SEQ ID NO: 3260 - protein, 228 aa, Streptococcus pyogenes
MTKKILIIEDEKNLARFVSLELQHEGYEVIVEVNGREGLETALEKEFDLILLDLMLPEMDGFEVTRRLQTEKTTYIMMMTARDSIMDVVAGLDRGADDYIVKPFAIEELLARIRAIFRRQDIESEKKVPSQGIYRDLVLNPQNRSVNRGDDEISLTKREYDLLNILMTNMNRVMTREELLSNVWKYDEAVETNVVDVYIRYLRGKIDIPGKESYIQTVRGMGYVIREK

SEQ ID NO: 3261 - DNA, 669 bp, Streptococcus agalactiae
atgacaaactataaaaacaactttaaaaaattcatgagcaataaattatacgtagggttagcttccattacgctacttggtattgggggagctataggagtaagtggagctgcattagcgcataaccatcactcagaacacatgtcttttgaacataagcatgaaggacacgataaacatcacgatcatagagaaaaatactcactaaaaacattaaagaatatctcgacaaaaatcgattataagactgccttagaaactgccaaaaaagaagctcgctcaggctttatttcacaaattgaattaaataccaaaggtgatacacctttttatgaaatcaaagttattgataataaaatagctaaaaaatataaaattgatgctaattctgggaagatcctttcaacaacatcagataatcaactcaattcaaaagatgcccaattaaaacaaccaagtaaagatattcagactgcattacaagctattcaagcaaaatataaaaatgcaaaaataaaagaaatttctcttgcgaataacaaatcaaataagctagtttataaagtaaaactacttgatggaaatactcctaagattgcccaatttgatagtgataaagcatcatttataaaggcaaataagcttaatacaactcataaaaatcacgac

SEQ ID NO: 3262 - protein, 223 aa, Streptococcus agalactiae
MTNYKNNFKKFMSNKLYVGLASITLLGIGGAIGVSGAALAHNHHSEHMSFEHKHEGHDKHHDHREKYSLKTLKNISTKIDYKTALETAKKEARSGFISQIELNTKGDTPFYEIKVIDNKIAKKYKIDANSGKILSTTSDNQLNSKDAQLKQPSKDIQTALQAIQAKYKNAKIKEISLANNKSNKLVYKVKLLDGNTPKIAQFDSDKASFIKANKLNTTHKNHD

SEQ ID NO: 3263 - DNA, 807 bp, Streptococcus agalactiae
atgcccaagaataggataaacaatttcatcaatataggaggcttaatcttagtaatctcttttctactattagtccttgatatagttaatcttccaacgaaatttggttttaatataaagactttaaatattgaaatttggaatatttacgctacgcttttaggaagcgggttaactctgtatggtgtaattataacaattaacagtcagtatgagtcacagatagaggatactaaacggattgtaaagcctatgattaatgtgtcacctgttgacgagtatagctacaaggataagtatattcaatttgactttatattccccaaagcatatccaaaccttttaagaaaggataatattgacactccaaatgtcaccatctctctggaaaatcttggaactagagaattgtataatttatatataggaaattttgaagctacttattttgatgatggtggctattattatcaacttaatccaattttatattcaaaccataaggtacaacttaatcttatgttctatgaaaaaaatggttatcttaaagaatttaatcaggaagataaatttcatttgctcatttctcctatcaaattttcaatctattttcaggattgcttgaataattggtacgaacaatcgtttaaattacgtattttccaccaagttcaagcagacaggtcagatgaagaaaattcactaacagttagtattgaaagagtagagatatattctgcccctaaagaaatttctcccgattcacttccgtggataactaatccaagtaagttatgccagtttggg

SEQ ID NO: 3264 - protein, 269 aa, Streptococcus agalactiae
MPKNRINNFINIGGLILVISFLLLVLDIVNLPTKFGFNIKTLNIEIWNIYATLLGSGLTLYGVIITINSQYESQIEDTKRIVKPMINVSPVDEYSYKDKYIQFDFIFPKAYPNLLRKDNIDTPNVTISLENLGTRELYNLYIGNFEATYFDDGGYYYQLNPILYSNHKVQLNLMFYEKNGYLKEFNQEDKFHLLISPIKFSIYFQDCLNNWYEQSFKLRIFHQVQADRSDEENSLTVSIERVEIYSAPKEISPDSLPWITNPSKLCQFG

SEQ ID NO: 3265 - DNA, 1143 bp, Streptococcus agalactiae
atgattttagaaaggaagatgcaaatggataacaaattcaaaaatatcccaaaacggcatttaccacaaaaactcccatttgactacacgtcaatatatactgacccacaaatcattaaattaactactagggcaaatattgcaatcggtacttacgaaggatttctagagtctatcattaaccctatgctactaatctcccctttgcttagccaagaagccgttctctcttcaaaacttgaagggacccatgccaccttgaaagacttacttaattatgaagctggtaataaagtagatattgagcgtgatgaattgcatgaaatcattaactaccgaaaggctctcttttatgctctagaaaacatttccaccatcaacaacatcgattctaaaggattaccgttatccaatagaattattaaagaaatgcacaaaattcttctagataatgttagaggtagtagtaaaaatcctggtaattttaagagaagtcaaaactatatcggtagtgtatcctcgatttcatacactcctgtccccgcggaaaaaacaccagaatacatgtctaatttggagcaatatatccattatgatgacttagacttattggttcagtcagcaattatccatgctcaatttgaaatgattcacccttttgaagacggtaatggacgaattggacgattgcttataccactattcctgtactatcaggaactactttcttatccaacattttatatgagttcgtattttgaaagagataggtctctttacatatcacacctatcaaacatttcaaaagacaacaactggaaagactggtttgagtattacctagaaggagtgatattgtccgcagaagagagtacaaaaaaagctcaggacatactaagcctatataacattatgaaggaacaagtcatccctaaacttaattctgtttcaggtatccagcttcttgactttatattctcggctccaatctttaaggcagaacaagttagtgaacacctaaaaatttctaagagaactacctatactttactaaataagttaattgatgaaggttatctttcaacagataatgctcaaaggaatagaacctactattgtcctcaacttctttcaatcgttcaa

SEQ ID NO: 3266 - protein, 381 aa, Streptococcus agalactiae
MILERKMQMDNKFKNIPKRHLPQKLPFDYTSIYTDPQIIKLTTRANIAIGTYEGFLESIINPMLLISPLLSQEAVLSSKLEGTHATLKDLLNYEAGNKVDIERDELHEIINYRKALFYALENISTINNIDSKGLPLSNRIIKEMHKILLDNVRGSSKNPGNFKRSQNYIGSVSSISYTPVPAEKTPEYMSNLEQYIHYDDLDLLVQSAIIHAQFEMIHPFEDGNGRIGRLLIPLFLYYQELLSYPTFYMSSYFERDRSLYISHLSNISKDNNWKDWFEYYLEGVILSAEESTKKAQDILSLYNIMKEQVIPKLNSVSGIQLLDFIFSAPIFKAEQVSEHLKISKRTTYTLLNKLIDEGYLSTDNAQRNRTYYCPQLLSIVQ

SEQ ID NO: 3267 - DNA, 918 bp, Streptococcus agalactiae
atgtttgaaatacttaaacctgataaaaaggctgttgggaaaagattgaggcaagtcaaggatgagttaaatttgtcttttacagattttggaaatcgtcttggactaaaaaaatcaaccatcaacgcatatgtaagaggagataacttagcgcctcttgaagttttagaaaaagtatcaaaaatctatggaaaacctgtaggttggttttactatggagaattggaagaatatattgaactttaccttagaaaacttggttatggtacattcctagatgaatatcctgagacaccgttaaagataaaggatgagctttttaggattaaagcaaatccaaaacaattaatcacaactaacgggggagtaaccattggaacatttgagaatcctaattgggaaaatgactttggttacccaaatgaaggctacctagatgatatcttttttgaaatgctttgtgaaactctaaagaactcaattagacaggaagctcaaacctacctaagtcagcaagaaggacttgacgatactaaaatcaaagaactctctaattactttgccaaccaaatctacatctcatatgattttgtcggaaatttagaaaatctttctaaagataaaatcaagcaagaagttaaagaaagctatgaacgtctgcttaaagattcacctcaagcaggtgtagaagttagctatgattccaattacctacttggttttctaataaatacacttgcggatagtcaaacaacaaggcaattactttcagatatgtcacaagcaacagtcggtatgcctttttcacaatttcatgagggacacgaattagttgaggttatccaatctgtcagaccacggctgatagaactttacaataacacgacctttgatgattggactgactgggcggagaaa

SEQ ID NO: 3268 - protein, 306 aa, Streptococcus agalactiae
MFEILKPDKKAVGKRLRQVKDELNLSFTDFGNRLGLKKSTINAYVRGDNLAPLEVLEKVSKIYGKPVGWFYYGELEEYIELYLRKLGYGTFLDEYPETPLKIKDELFRIKANPKQLITTNGGVTIGTFENPNWENDFGYPNEGYLDDIFFEMLCETLKNSIRQEAQTYLSQQEGLDDTKIKELSNYFANQIYISYDFVGNLENLSKDKIKQEVKESYERLLKDSPQAGVEVSYDSNYLLGFLINTLADSQTTRQLLSDMSQATVGMPFSQFHEGHELVEVIQSVRPRLIELYNNTTFDDWTDWAEK

SEQ ID NO: 3269 - DNA, 453 bp, Streptococcus agalactiae
atgaatgaatatgattatcaagaagttgtggatagggttgacggtcttaactcagtttcaacactgaaaaagtggcgattaaaaattgaaagcttgactggtactcaatttaaagaaagtagagtgagaacgggtcggaaatcttattctaaaatctatctctttacagatgatgaccttgcctactttcaagcggtcgcggataagaagtcctcattagggcttgagagggcaattctaagcgtttatgggagttccaagggaaaagaccatcagaaacccattagagagcttgtagacgagctagaagtttcttttatggaaattcaagaggattaccaaagaaacctaactgagttgaaacagaagttagaagtgcttcttgtcagaattcagaacttagagaaagagacaggggataaaacatctaagagaattggtttcttcaaacga

SEQ ID NO: 3270 - protein, 151 aa, Streptococcus agalactiae
MNEYDYQEVVDRVDGLNSVSTLKKWRLKIESLTGTQFKESRVRTGRKSYSKIYLFTDDDLAYFQAVADKKSSLGLERAILSVYGSSKGKDHQKPIRELVDELEVSFMEIQEDYQRNLTELKQKLEVLLVRIQNLEKETGDKTSKRIGFFKR

SEQ ID NO: 3271 - DNA, 207 bp, Streptococcus agalactiae
atgaagacggttcgccaccccaccgctgggcgagtggtcaatacggtagcccagagcaggtggggaaggtggcaaacggctgaaatcgaaattgaaattgcaccccgttccctattagggggtgcacacatacacgaaatgtggtcaaaacccttgataagcaaggggttcagcgatttgaagcaaatttcacgaaaaaaatcttta

SEQ ID NO: 3272 - protein, 69 aa, Streptococcus agalactiae
MKTVRHPTAGRVVNTVAQSRWGRWQTAEIEIEIAPRSLLGGAHIHEMWSKPLISKGFSDLKQISRKKSL

SEQ ID NO: 3273 - DNA, 429 bp, Streptococcus agalactiae
atgacaaaatttaacttaacagacgaaaccataaaagttggtgatttgaaattagataaatcacaatttgacattccaaagaaagtgactatcctttcttcacgggttgcaccagtctataaaaatgtcaatggcgaaagcattgcgacagatgaagtggctaaaatcacttgctctgtacaagatacagacaaaattcaagccttgaaagacttgggctattcttctgatgaccttaagggcattcgcttggagattgtagacaatcttgacaagttggctaaatccgttgaaaaggatgggttaaactcccttgtggtagaacttgtcaatccagaagtccatcttggttggcgagccaacaataatggtggagggaattggggtggcttaaagctagtggcaaccgatattaaatttattggagcc

SEQ ID NO: 3274 - protein, 143 aa, Streptococcus agalactiae
MTKFNLTDETIKVGDLKLDKSQFDIPKKVTILSSRVAPVYKNVNGESIATDEVAKITCSVQDTDKIQALKDLGYSSDDLKGIRLEIVDNLDKLAKSVEKDGLNSLVVELVNPEVHLGWRANNNGGGNWGGLKLVATDIKFIGA

SEQ ID NO: 3275 - DNA, 1026 bp, Streptococcus agalactiae
atggataactcagtgatgttagactatttagccgtaacgattaaaggcttggctccagatgatgtcattgagaaaatcctcattcttcctaaagacaagtttgtcctcaatgaatgggggataaacaagtatcaacggcattattccttctcagagataaaggtttacttcaataaggactggcaatcaaagatgggagtctttatcgaactgagagggcaggggtgccgtcagtatgaagaatatatggaaaacaatgtcaataactgggtaaccttgatgaaacgcatttctgaatgtcatagtaacgttacgagactagatattgccaacgatatctttgatgacagtctatccgtcccactcatttacagttattgtaaaaagcaactctgcatatcaaccgctaaaacctttgattaccatgaaaagagccttcttgaaaatggtgaaaaggtcggtgaaatggttacgattggtgttagaggtactcagcaatggtgtgtctataacaaattgttagaacaaaagctagaccaagaattgccaaatacgcccttatcatggacaagagcagagctgaggtgctggcaggaaaaagcaaatttactagccaaacagattaaagaggggcgaccgctcaaagagatttactttgaagttattaacggacactaccgttttgtcagcccgagggacaaggattctaaccgttggcgaagaaagacggtaaaatggtggaatgactatctagagacacaagaaaagacggtcttaagcgtaaaacggacaaaacctaccctaaaacgttctgagaagtggacagagaaacaagtctcacgaacactcggaaaactctatgtcgctaaggcggaatctcacgggcaagaaaaggcagatagctatatccagcacttacttgaattggggatttctaagctaaccgaaacagacgagactgacattcagcagtacaaacaagagcaactaagctcagcctattggggcataagaaaagacgacctg

SEQ ID NO: 3276 - protein, 342 aa, Streptococcus agalactiae
MDNSVMLDYLAVTIKGLAPDDVIEKILILPKDKFVLNEWGINKYQRHYSFSEIKVYFNKDWQSKMGVFIELRGQGCRQYEEYMENNVNNWVTLMKRISECHSNVTRLDIANDIFDDSLSVPLIYSYCKKQLCISTAKTFDYHEKSLLENGEKVGEMVTIGVRGTQQWCVYNKLLEQKLDQELPNTPLSWTRAELRCWQEKANLLAKQIKEGRPLKEIYFEVINGHYRFVSPRDKDSNRWRRKTVKWWNDYLETQEKTVLSVKRTKPTLKRSEKWTEKQVSRTLGKLYVAKAESHGQEKADSYIQHLLELGISKLTETDETDIQQYKQEQLSSAYWGIRKDDL

SEQ ID NO: 3277 - DNA, 1482 bp, Streptococcus agalactiae
atgagagataatggttcaagagtacttatcatcagttcttggcgaccagacccttataaggcgggtaatgtcttggtgaaattcgctatgcgattcacccaccctattactaaaaaatctcataagaaatacctttctacaggtgctagtaaagggtggtttaccaccaaggcaacaccgagcaaaaagttaccttctgggaaagaacgtctcttggtcagcgatattaaaaacacacaattaattactcaggtcacgcaagaactgaataaattagttgatgactatatcgccgagctaatgggcattaagcctaagaaagccaagaaacttttaaccctagaagaaatcgccaagccatttgataaagatggaaatttttacggtaaagcctttaaagcatggcatgaaagggtcaagccagccaataatacccttaaaacaagggttactatctataatcgctatattgagccgaactttgataccagaatgtccatcacgaaatttgcctttatgacagatgaaattcaaaatcttatcaatgcttcttctatgcacatggcgagaaatctgcatatctaccttaagatgatttttgactggtcagttgaaaatggacagataactcttacacaagacccgattgccagcaataaggttaaaaggcgagttctgacaaagagtgaggagcaggacaagaagcgtgaagatatagcagagaagtatctagaagcaagtgaggttaaccatgttctccgcctgatagagagctggactaatcgacctgataaccaacttatcgcagatgtattgagaatgatttttctaacaggcatgcgaccaagtgaggttttaggcttaaatgaagacatgcttgattttgagaaaaagtggataaaagttcattggcagagggcaagtaagaataaatcggatgatatgatggaagcactcaatcttgacgaaaaggaacgctaccgagcagaccttaagaccaaggaaagtgtccgcacgattccaatgagccctgaggttgagaagattctacgtcactatattgacagaaataaatttcaagctcaattcagtccgacttaccaagacttagggtatctctttactagaacctatattagggcaggtaatcgacaaggctctccgctttatcacaacgaactctcacaattcctgagaggtggctctagtcagtcagcaaagtataacaagaaagcaggcaagccctataaggatatcgatagctttctagactttggcagaccgattcatgtcatccctcatatgttccgccatagctttatctctattatggctagcgaaggtattgacctccctactattcgagaatttgtcggacactcggaggattccaaggagattgagcgtgtctatctccatgtgattaagaagcaaaaagataccatgagaggggcagttgaaaagctagaaaagttgattgaa

SEQ ID NO: 3278 - protein, 494 aa, Streptococcus agalactiae
MRDNGSRVLIISSWRPDPYKAGNVLVKFAMRFTHPITKKSHKKYLSTGASKGWFTTKATPSKKLPSGKERLLVSDIKNTQLITQVTQELNKLVDDYIAELMGIKPKKAKKLLTLEEIAKPFDKDGNFYGKAFKAWHERVKPANNTLKTRVTIYNRYIEPNFDTRMSITKFAFMTDEIQNLINASSMHMARNLHIYLKMIFDWSVENGQITLTQDPIASNKVKRRVLTKSEEQDKKREDIAEKYLEASEVNHVLRLIESWTNRPDNQLIADVLRMIFLTGMRPSEVLGLNEDMLDFEKKWIKVHWQRASKNKSDDMMEALNLDEKERYRADLKTKESVRTIPMSPEVEKILRHYIDRNKFQAQFSPTYQDLGYLFTRTYIRAGNRQGSPLYHNELSQFLRGGSSQSAKYNKKAGKPYKDIDSFLDFGRPIHVIPHMFRHSFISIMASEGIDLPTIREFVGHSEDSKEIERVYLHVIKKQKDTMRGAVEKLEKLIE

SEQ ID NO: 3279 - DNA, 1137 bp, Streptococcus pyogenes
atgtggtcagaaaaacacaaaagcggaaaagtaaattttgtagaacggtacaaacacccatacactggcaagtggtgcagagcttctgtccttatggaaaaagacacgccacgaatacgaaaagaagcccaaaaatatcttgacgaaaaaatatctgaaatcttaacaagtcttaccacaaccgatgcctacctactagatgtcatgaacgaatggtgggaacatcatcagaaatcactcaaatcaacttctgtccgctctcttgattttagaataagagaattgcgaaacttaattgatccagaagtgatgattgccaagataaccacgaaatacctgcaaagtattatcgacaaaataccaggtagttatgacaaacgtaaacgagcacggcagctgctcaaacaaaccttcgactacgctatcgctttagagtatgtctcaatcaatccagttattagtacccaactcgcaaaacctgttaagaccatcaaagactttgaagacgttgcccagaagtttttagaaaaagatgaactcaaaaggctattagatgaaatgtatagacgtaaaggatcgattaaaatggcttatctggcagaatttatgagcttaaatggctgccgcattggagaagctctagctatacagccagacaatatcaaaaatgatatcattgaaatccacggaactcttgactacacctcaaatggctatagaaacgctatcaaaaccacccctaaaacaaattccagttggcgtgaaacattgataaccaaacgtgaaaaagaaattattcaggatatactgaaaattaatgctcttgaaaaaaatactaatcctaattacaaggacatgggctacatcttcatttccagaaatggtgttcctattcaagacaacgccctcaacacctctatcagagcggcaaataagagactagaaaaaccgattcaaaaagaactcaccagccacatcttccgtcacaccctggtgagtcgccttgcagaaaacaaagtgcccttaaaaactatcatggatagagttggacatgctgactcgaaaactactcaacaaatctatacccacgtcacgaaaagcatgaaaaatgaagtcgtcgacatcttaaaccggcta

SEQ ID NO: 3280 - protein, 379 aa, Streptococcus pyogenes
MWSEKHKSGKVNFVERYKHPYTGKWCRASVLMEKDTPRIRKEAQKYLDEKISEILTSLTTTDAYLLDVMNEWWEHHQKSLKSTSVRSLDFRIRELRNLIDPEVMIAKITTKYLQSIIDKIPGSYDKRKRARQLLKQTFDYAIALEYVSINPVISTQLAKPVKTIKDFEDVAQKFLEKDELKRLLDEMYRRKGSIKMAYLAEFMSLNGCRIGEALAIQPDNIKNDIIEIHGTLDYTSNGYRNAIKTTPKTNSSWRETLITKREKEIIQDILKINALEKNTNPNYKDMGYIFISRNGVPIQDNALNTSIRAANKRLEKPIQKELTSHIFRHTLVSRLAENKVPLKTIMDRVGHADSKTTQQIYTHVTKSMKNEVVDILNRL

SEQ ID NO: 3281 - DNA, 624 bp, Streptococcus agalactiae
ttgaataaaattcatttgatatatagaattataaaagctgtacttcctaagaaaaagagaaaagaatatgatacaatgaacttgactaaattaaagaggaaagaaatgagaacatattcagataaaaacgaacttaaggaagaagtactaaaatcatataaaaaatatattgctgaattcaatgacattcctgagaagttgaaagatttaagaattgatgaggttgataggacaccagcggagaatctagcctatcaggttggctggactaccctgatactaaaatgggagtcagatgaacagagtggcttagaagttaaaacaccaactgagacgtttaaatggaatcaacttggagagctatatcagcattttactgagacctacgctagtctaaccatcaaagaacttacggctcaactcaatgataatgtagatgctataggtaacatgattgattcaatgagcgacgaagtcctatttaaacctcatatgagaaattgggctgatagtgcgactaagaatgcagtctgggaagtttataagtttattcatattaatacggtagctcctttcggaacatttagaactaagattcgcaagtggaaaaaagttgctttaaag

SEQ ID NO: 3282 - protein, 208 aa, Streptococcus agalactiae
MNKIHLIYRIIKAVLPKKKRKEYDTMNLTKLKRKEMRTYSDKNELKEEVLKSYKKYIAEFNDIPEKLKDLRIDEVDRTPAENLAYQVGWTTLILKWESDEQSGLEVKTPTETFKWNQLGELYQHFTETYASLTIKELTAQLNDNVDAIGNMIDSMSDEVLFKPHMRNWADSATKNAVWEVYKFIHINTVAPFGTFRTKIRKWKKVALK

SEQ ID NO: 3283 - DNA, 147 bp, Streptococcus agalactiae
atgcgcgtaaatattacacttgaacataaagaatctggtgaacgcttgtaccttacttcaaaaaacaaacgtaacactccagaccgtcttcaattgaaaaaatactcaccaaaacttcgtaaacacgttgttttcactgaagttaaa

SEQ ID NO: 3284 - protein, 49 aa, Streptococcus agalactiae
MRVNITLEHKESGERLYLTSKNKRNTPDRLQLKKYSPKLRKHVVFTEVK

SEQ ID NO: 3285 - DNA, 147 bp, Streptococcus pyogenes
atgcgcgtaaatattacacttgaacataaagaatctggtgaacgcttgtaccttacttcaaaaaacaaacgtaacactccagaccgtcttcaattgaaaaaatactcaccaaaattacgtaaacacgttacatttacagaggttaag

SEQ ID NO: 3286 - protein, 49 aa, Streptococcus agalactiae
MRVNITLEHKESGERLYLTSKNKRNTPDRLQLKKYSPKLRKHVTFTEVK

SEQ ID NO: 3287 - DNA, 180 bp, Streptococcus agalactiae
atggcaaaacctgcacgtcacacttcaaaagcgaagagaaacaaacgtcgtacacactacaaattgacagctccatctgtacaattcgacgaaactactggagattactcacgttcacaccgtgtatcactcaaaggatactacaaaggacgtaaaatcgctaaagctaacgaagctaaa

SEQ ID NO: 3288 - protein, 60 aa, Streptococcus agalactiae
MAKPARHTSKAKRNKRRTHYKLTAPSVQFDETTGDYSRSHRVSLKGYYKGRKIAKANEAK

SEQ ID NO: 3289 - DNA, 117 bp, Streptococcus pyogenes
atgacagctccatctgtacaattcgacgaaactactggagattactcacgttctcaccgtgtatcccttaaaggatactacaaaggacgtaaaatcgctaaagctaacgaagctaaa

SEQ ID NO: 3290 - protein, 39 aa, Streptococcus pyogenes
MTAPSVQFDETTGDYSRSHRVSLKGYYKGRKIAKANEAK

SEQ ID NO: 3291 - DNA, 1314 bp, Streptococcus agalactiae
atgtttaaagagaaaactaatcgaagaggtaaacttatgaaacttcaaaaaccaaaagggactcaggatatcttacctggagaatcagcaaagtggcaatacgttgaaaatgttatacgcaatctctttaaacaatatcattatgatgaaattcgtacaccaatgtttgaacattacgaggttattagtcgctcagttggggatacaacggatatcgttacaaaagagatgtatgattttcatgataaaggagatcgtcacattacgcttcgtccagaaggaacagcacctgttgtacgttcttatgttgaaaataaactatttgcaccagaagttcaaaaaccaaccaaaatgtattatattggatcaatgttccgatatgagcgcccacaggctggtcgtttacgagaatttcatcaagtaggcgttgagtgctttggatcaaataatccagcaactgatgttgaaacaatcgcaatgggacatcatctatttgaagatttaggtatcaaaaacgttaaacttcatcttaatagtttagggaatccagaaagtcgtcaggcctatcgccaagctcttattgattacttaacacccatacgtgaacaattgtctaaggatagtcaacgtcgtttgaatgaaaatccattgcgcgtactagactctaaggagccagaagacaaactagcagttgaaaatgctccttctattttagattatttagatgagtcaagccaagcccactttgatgctgtgtgtcatatgcttgatgctctaaatattccatacatcattgatactaatatggttcgtggtcttgattattataatcatactatttttgagtttatcactgagattgaagataatgaattaacgatctgtgctggaggccgttatgacggcttagtatcctattttggtggaccagaaacaccagcatttggttttggattaggattagaacgcttgctcttaatattagataagcaagggatttctttaccaatagaaaatactatagatctgtatatagctgtattaggatcagaggctaatctagctgccttagatttggcacaatcaatacgtcatcagggttttaaagtagagcgtgattatttgggtcgtaaaatcaaagcacaatttaagtctgcagatacttttaatgctaaagtgattatgacattaggtagcagtgaagtagattcgaaagaggtcggtttaaaaaataatcaaacacgtcaagaagttaaagttagttttgaaaacattaaaacagatttttcatctgtgcttaaacaattaggattg

SEQ ID NO: 3292 - protein, 438 aa, Streptococcus agalactiae
MFKEKTNRRGKLMKLQKPKGTQDILPGESAKWQYVENVIRNLFKQYHYDEIRTPMFEHYEVISRSVGDTTDIVTKEMYDFHDKGDRHITLRPEGTAPVVRSYVENKLFAPEVQKPTKMYYIGSMFRYERPQAGRLREFHQVGVECFGSNNPATDVETIAMGHHLFEDLGIKNVKLHLNSLGNPESRQAYRQALIDYLTPIREQLSKDSQRRLNENPLRVLDSKEPEDKLAVENAPSILDYLDESSQAHFDAVCHMLDALNIPYIIDTNMVRGLDYYNHTIFEFITEIEDNELTICAGGRYDGLVSYFGGPETPAFGFGLGLERLLLILDKQGISLPIENTIDLYIAVLGSEANLAALDLAQSIRHQGFKVERDYLGRKIKAQFKSADTFNAKVIMTLGSSEVDSKEVGLKNNQTRQEVKVSFENIKTDFSSVLKQLGL

SEQ ID NO: 3293 - DNA, 1278 bp, Streptococcus pyogenes
atgaaacttcaaaaaccaaaaggaacccaggatattctgcctggggatgctgcgaaatggcagtatgtggaatctgttgcgcgtgatacgtttagccaatataattatggagaaattcgtactcctatgtttgaacactacgaggtaatctcgcggtctgtaggtgatacgactgatattgtgacgaaggaaatgtatgatttctatgataaaggagatcgtcacattaccttgcgaccagagggtacagctccagtggtgcgttcttatgttgaaaataaattgtttgcgccagaggtccaaaaacccgtcaaactttattatatcggttccatgttccgctacgaacgtcctcaagctggtcgtttacgtgaatttcaccagattggggtagaatgtttcggcgctgctaatccagcaacagatgttgaaaccattgcgatggcctatcacctctttgaaaaattgggcattaaggatgtcacccttcatttaaatagtttggggagtcctgagagtcgtgcagcttatcgtcaagccttgattgactacttaacaccaatgcgtgatcaattatctaaagatagtcaacgtcgcttggatgaaaacccactgcgcgtgcttgattctaaagaaaaagaagataaactagccgttgaaaaagcgccttctattttggattacttagatgaggaaagtcaggcgcactttgaggcggtcaaagatatgcttgaagcacttgacattccttatgtgattgacaccaatatggtgcgtggccttgattactatagccacactatttttgaattcatcacgtctgtggaaggttctgacttaactatctgtgcgggtggacgttatgatagtttggtaggttattttggtgggcctgagactccaggatttggctttggtcttggtttagaacgtctcttgatgattattgaaaagcagggcattaccttgccaattgagacagagatggatatttaccttgctgtgttaggtgatggtgctaatagcaaagctttagaattggttcaagccattcgccgtcaagggtttacagctgaacgagattaccttggccgtaagattaaggctcagtttaaatcagccgatacctttaaagcaaaattggtaatgactttaggagaaagtgaagttgaagcaggcaaagctgtgattaagaataatcgtagtcgtcaagaagtggaagtcagttttgaagatatgatgacaaactttgcgaacatctcagagcaattattatct

SEQ ID NO: 3294 - protein, 426 aa, Streptococcus pyogenes
MKLQKPKGTQDILPGDAAKWQYVESVARDTFSQYNYGEIRTPMFEHYEVISRSVGDTTDIVTKEMYDFYDKGDRHITLRPEGTAPVVRSYVENKLFAPEVQKPVKLYYIGSMFRYERPQAGRLREFHQIGVECFGAANPATDVETIAMAYHLFEKLGIKDVTLHLNSLGSPESRAAYRQALIDYLTPMRDQLSKDSQRRLDENPLRVLDSKEKEDKLAVEKAPSILDYLDEESQAHFEAVKDMLEALDIPYVIDTNMVRGLDYYSHTIFEFITSVEGSDLTICAGGRYDSLVGYFGGPETPGFGFGLGLERLLMIIEKQGITLPIETEMDIYLAVLGDGANSKALELVQAIRRQGFTAERDYLGRKIKAQFKSADTFKAKLVMTLGESEVEAGKAVIKNNRSRQEVEVSFEDMMTNFANISEQLLS

SEQ ID NO: 3295 - DNA, 1800 bp, Streptococcus agalactiae
gtgctttttgttataataggttggaatgaatattttaaatggagaaaacagatgaaacgtagtatgtatgctgggcgtgttcgtagtgagcacataggaacatcgattactttaaaaggatgggttggtcgtcgtcgtgaccttggaggccttatttttattgatcttcgcgatcgcgagggaatcatgcaattagttattaatcctgaagaagtatcagcctcagttatggcaaccgcagaaagtctccgtagtgaatttgttatagaggttagcggtgtagtgacagcacgagaacaagctaatgataatttaccaacaggagaagttgaattaaaagtgcaagaattatcgattcttaatacctcgaaaacaacaccatttgaaattaaagatggtattgaggcaaatgatgatacacgcatgcgttaccgttacttggatcttcgtcgtccggaaatgcttgaaaatttcaaattacgtgcgaaagtaacacactcaatccgtaattaccttgacaacttagagtttattgatgtcgaaactccgatgctaacaaaatcaactccagagggggcacgagactatttggttccatcacgtgtcaaccaaggacatttttatgcccttccacaaagccctcaaattacaaaacagctattgatgaatgcgggatttgatcgttattatcaaattgtcaaatgtttccgtgatgaggatttacgtggagaccgtcaacctgagtttacacaagttgacttagagacatcattccttagtgatcaagaaattcaagacattgttgagggtatgattgctaaagtaatgaaagacactaaaggtttagaggtttctttaccattcccaaggatggcatatgatgatgcaatgaataactacgggtctgataagcctgatacaaggtttgatatgcttttacaagacttgacagaaattgtcaaagaagttgacttcaaggtgttctcagaagcttcagtagttaaagcgattgttgtcaaagataaggcggacaagtactctcgaaaaaatattgataaattaacagaaattgcaaaacaatacggtgccaaaggtttagcatggctaaaatatgcagataatactatttcaggtccggttgctaagttcttgacagctattgaaggtaggttgacagaagctttacagctagagaataatgacttaattctatttgtagcagatagtcttgaagtagctaacgagactttaggagcgcttcgtacacgcattgcaaaagaacttgaactcattgattattctaaatttaatttcctatgggttgttgattggccaatgtttgagtggtcagaagaagagggacgatatatgtcggctcatcatccattcaccttgccaacagcggagacagcgcatgagttggaaggggatttggctaaagtacgtgcagttgcctatgatattgttttgaatggatatgagttaggcggtggtagcctacgtattaaccaaaaagatacacaagagcgtatgttcaaggctttaggatttagcgctgaatcagctcaggaacagtttggtttcttacttgaagctatggattacggcttcccaccacatggtggattggcaataggccttgaccgctttgttatgttgttagcaggcaaggacaatattcgagaagttattgcattccctaaaaacaataaggctagtgatccaatgactcaagctcctagtctcgtttcagaacaacaattagaagaattatcacttactgtagaaagttatgaaaac

SEQ ID NO: 3296 - protein, 600 aa, Streptococcus agalactiae
MLFVIIGWNEYFKWRKQMKRSMYAGRVRSEHIGTSITLKGWVGRRRDLGGLIFIDLRDREGIMQLVINPEEVSASVMATAESLRSEFVIEVSGVVTAREQANDNLPTGEVELKVQELSILNTSKTTPFEIKDGIEANDDTRMRYRYLDLRRPEMLENFKLRAKVTHSIRNYLDNLEFIDVETPMLTKSTPEGARDYLVPSRVNQGHFYALPQSPQITKQLLMNAGFDRYYQIVKCFRDEDLRGDRQPEFTQVDLETSFLSDQEIQDIVEGMIAKVMKDTKGLEVSLPFPRMAYDDAMNNYGSDKPDTRFDMLLQDLTEIVKEVDFKVFSEASVVKAIVVKDKADKYSRKNIDKLTEIAKQYGAKGLAWLKYADNTISGPVAKFLTAIEGRLTEALQLENNDLILFVADSLEVANETLGALRTRIAKELELIDYSKFNFLWVVDWPMFEWSEEEGRYMSAHHPFTLPTAETAHELEGDLAKVRAVAYDIVLNGYELGGGSLRINQKDTQERMFKALGFSAESAQEQFGFLLEAMDYGFPPHGGLAIGLDRFVMLLAGKDNIREVIAFPKNNKASDPMTQAPSLVSEQQLEELSLTVESYEN

SEQ ID NO: 3297 - DNA, 1797 bp, Streptococcus pyogenes
ttggaaacgagcaggtttcacaggattctgtttgttttagggaatttatttatgaaacgtagcatgtatgcagggcgtgttcgcgaagaacacattggaacgacaatcacattgaaaggatgggtcagtcgtcgtcgtgacttgggtggtctcatctttattgatttgcgtgaccgtgagggtgtgatgcaattagtcattaaccctgaggaagtttccagtgatgtgatggcaactgctgaacgcttacgtagtgaatatgtgattgaagtggaaggttttgttgaagctcgacaacaagccaatgataagttggcgacaggaatggttgagttaaaagtatctgctttgaccattttaaacacagctaaaacgacgccttttgaaattaaagatgacgttgaagtaagtgatgacacgcgtttacgttaccgttacttagatttacgacgtccagaaatgttagaaaacttcaagctacgtgcaaaagtgactcattctatccgtaattaccttgatgaccttgagtttatcgatgtcgagacacctatgttgacaaaatcaactccagaaggtgcgcgtgactatctggtaccaagtcgtgttagccaagggcatttctatgctttgccacaaagtccgcaaataaccaaacagttattgatgaatgctggctttgatcgctattatcaaattgtgaaatgtttccgcgatgaagatctacgtggtgaccgtcaacctgagtttacacaagttgacttggaaacgtcattcctttctgaacaagaaattcaagacatcgttgaaggcatgattgctaaagtgatgaaagagacaaaagaaatagatgtaaccctaccattcccacgtatgagctacgatgtagcaatgaatagctacggctctgataaaccagacacacgttttgaaatgcttttacaagacttgacagtaactgtcaaaggaaatgacttcaaggttttctcagaagcaccagctgtcaaggcgattgtggtgaagggaaatgcagatcgatactctcgtaaagatattgacaaattaactgagtttgccaaacaatttggtgctaaaggccttgcctgggttaaggtgacagatggtcaattggcaggcccagtagccaagttcttgacagctattgagacagagttgtcaagccaattaaaacttgctgagaatgatttggttttatttgtagcggatactcttgaggttgctaataatacattaggtgcccttcgtaatcgtattgccaaggaccttgacatgattgatcagtcgcagtttaatttcctttgggtggttgattggccaatgtttgagtggtcagaagaagaaggacgttatatgtcagctcatcaccccttcactcttccaacgccagaatctgctcatgagttagagggtgatttggctaaggtacgggctattgcttacgacatcgttttaaatggttacgagcttggtggtggtagcctgcgtatcaatcaaaaagagatgcaagagcgcatgttcaaggctcttggctttaccgctgatgaagctaacgaccaatttggtttcttactagaagcgatggactacggctttcctcctcatggtggcttggcaattggtcttgaccgttttgtcatgttgcttgctggaaaagacaatattcgagaagttattgccttccctaaaaataacaaagcctctgatccaatgacgcaagcacctagtcttgtttctgaaaaccaattagaagaactcagtcttcaaatagaaagtcatgat

SEQ ID NO: 3298 - protein, 599 aa, Streptococcus pyogenes
LETSRFHRILFVLGNLFMKRSMYAGRVREEHIGTTITLKGWVSRRRDLGGLIFIDLRDREGVMQLVINPEEVSSDVMATAERLRSEYVIEVEGFVEARQQANDKLATGMVELKVSALTILNTAKTTPFEIKDDVEVSDDTRLRYRYLDLRRPEMLENFKLRAKVTHSIRNYLDDLEFIDVETPMLTKSTPEGARDYLVPSRVSQGHFYALPQSPQITKQLLMNAGFDRYYQIVKCFRDEDLRGDRQPEFTQVDLETSFLSEQEIQDIVEGMIAKVMKETKEIDVTLPFPRMSYDVAMNSYGSDKPDTRFEMLLQDLTVTVKGNDFKVFSEAPAVKAIVVKGNADRYSRKDIDKLTEFAKQFGAKGLAWVKVTDGQLAGPVAKFLTAIETELSSQLKLAENDLVLFVADTLEVANNTLGALRNRIAKDLDMIDQSQFNFLWVVDWPMFEWSEEEGRYMSAHHPFTLPTPESAHELEGDLAKVRAIAYDIVLNGYELGGGSLRINQKEMQERMFKALGFTADEANDQFGFLLEAMDYGFPPHGGLAIGLDRFVMLLAGKDNIREVIAFPKNNKASDPMTQAPSLVSENQLEELSLQIESHD

SEQ ID NO: 3299 - DNA, 942 bp, Streptococcus agalactiae
atgaaaactagacgaacccctttagaaaaaaaggtaaaatatattatcagtgtatgggctaaaaaatttggtctcttacacactttaaaaagtatctcacgagaaaaatatgcagagaaaatttcggcttcattgctgtatggtattctatccagtgttgctgtcaatttcttttttcaacctggacatgtttattcaagtggagcaactggtttagctcaggttatttcagctgtcagtaaacactggttttcttttgaaataccagttgctttagctttttatgccattaatatccctttgctgatattatcttggcgtaagattggacataaatttactatttttacgtttatcacagtaactgtaagctctatcttcattcaactaatgcctcaaatcacccttacaactgatcccttaatcaatgctatctttggtggtttaattatgggagctggtgttggttttagctttaagtctagaatttctagtgggggaacagatattatcagtttgacaattagaaagaaaacaggcagagatgtaggtagtatttcttttattattaatggtattattttattatttgcaggtcttttatttggttggaagtacgctttgtactcgatggtgaccatttttgtatcaagtagagttacagatgccatttttacaaagcaaaaaaagatgcaagcgatgattgttaccagtaagccttattgcgtcattaaacgtatccatcgtgatttacatcgtggtgtaacctgtatcaatgatgctgaaggtacttataatcatgagaaaaaagcagttttaataactatattaacacgtgaagaatttagtgattttaaatatttaatgctaaaagcggatccaaaagcctttgtttccgttgcagaaaatgttcatattattggacgattcgttgatgatgat

SEQ ID NO: 3300 - protein, 314 aa, Streptococcus agalactiae
MKTRRTPLEKKVKYIISVWAKKFGLLHTLKSISREKYAEKISASLLYGILSSVAVNFFFQPGHVYSSGATGLAQVISAVSKHWFSFEIPVALAFYAINIPLLILSWRKIGHKFTIFTFITVTVSSIFIQLMPQITLTTDPLINAIFGGLIMGAGVGFSFKSRISSGGTDIISLTIRKKTGRDVGSISFIINGIILLFAGLLFGWKYALYSMVTIFVSSRVTDAIFTKQKKMQAMIVTSKPYCVIKRIHRDLHRGVTCINDAEGTYNHEKKAVLITILTREEFSDFKYLMLKADPKAFVSVAENVHIIGRFVDDD

SEQ ID NO: 3301 - DNA, 939 bp, Streptococcus pyogenes
atgattaagaaaacaacctataagaaaaaagttaaatatgtcattagtagaggggccaagaaagttggcctactccacgctctaagaagtatttcaagagaaaaatatgcagagaagatttcggcttctctgctttatggcattctctctagtattgctgtgaattttttcttccagcctgggcatgtttattcaagtggagcaactggtctagcacaggttttttcagctcttagtcatcgtcttttaggctatgattttcccatcgcctttgcgttttatttgattaatattcctttgcttattttagcttggtataaaattgggcatcaatttaccatttttacctttatcacagtcagcatgagttctttctttattcaaatcatgcctcaagtgacgctgacgactgatcctcttatcaatgctatttttggtggtttggttatgggaatgggaattggtacaggtctcaaatcacgtatctctagtggggggactgatattgtcagtttgacccttaggaaacgaacaggcaaggatgtgggcagtctctcattgatggttaatggtgcaattttagcctttgcagggattttatttggctggcagtacgccctttattctatggtctctatctttgtatcaagtcgtgttacggatgccattttcaccaagcaaaagaaaatgcaggcaactattgttaccagccatccagagcgtgtgattcatatgatccataaacgtctgcatcgcggagtgaccagtatcaacgacgcagaagggacttacaagcatgaacaaaaagcagttttgattaccattttgacatgtgaagaatacccagaattcaaatggctgatgttaaaaacagacccacaagcctttgtttcagtggctgagaatgttagaattatcggtcgttttgtggaagatgat

SEQ ID NO: 3302 - protein, 313 aa, Streptococcus pyogenes
MIKKTTYKKKVKYVISRGAKKVGLLHALRSISREKYAEKISASLLYGILSSIAVNFFFQPGHVYSSGATGLAQVFSALSHRLLGYDFPIAFAFYLINIPLLILAWYKIGHQFTIFTFITVSMSSFFIQIMPQVTLTTDPLINAIFGGLVMGMGIGTGLKSRISSGGTDIVSLTLRKRTGKDVGSLSLMVNGAILAFAGILFGWQYALYSMVSIFVSSRVTDAIFTKQKKMQATIVTSHPERVIHMIHKRLHRGVTSINDAEGTYKHEQKAVLITILTCEEYPEFKWLMLKTDPQAFVSVAENVRIIGRFVEDD

SEQ ID NO: 3303 - DNA, 870 bp, Streptococcus agalactiae
atgttgaaactggatttaaaaacaaagataaaagaaactattttaattgcctttggtgtggctctctatactttcggctttgtcaaatttaatatggctaatcatttggctgaaggaggtatttccggtgtcactttgattatccatgcacttttcggagttaatccagcactttcatcacttctccttaatatcccgttatttatattaggggctaggattttagggaaaaaatccttattgttaactatatatggtacagtgttaatgtcttttttcatgtggttttggcaacaaatccctgtaacagtccctttgaaaaacgatatgatgttagttgcagtagctgctggaattttagcaggaactggtagtggtttagtatttagatatggtgcaactacaggtggtgcagatattattggtcgtattgtagaggaaaaatctggaataaaattagggcaaaccttattgtttattgatgctatagttctaacgtcttcacttgtttatattaatttacaacagatgctatatacgttagtagctagctttgtatttagtcaagtgttaacaaatgttgaaaatgggggctacactgttcgtggaatgatcattattaccaaagaatcagaatctgcagcagcaaccattttgcatgaaattaataggggtgtaacttttttacggggccaaggtgcctactcaggtagagagcatgatgtcttgtacgtagctcttaacccaagtgaagtgcgtgatgtgaaagaaatcatggctgatttagacccagatgcttttatttctgttataaatgtagatgaagttattagctcagattttaaaattcgacgaagaaattacgataaa

SEQ ID NO: 3304 - protein, 290 aa, Streptococcus agalactiae
MLKLDLKTKIKETILIAFGVALYTFGFVKFNMANHLAEGGISGVTLIIHALFGVNPALSSLLLNIPLFILGARILGKKSLLLTIYGTVLMSFFMWFWQQIPVTVPLKNDMMLVAVAAGILAGTGSGLVFRYGATTGGADIIGRIVEEKSGIKLGQTLLFIDAIVLTSSLVYINLQQMLYTLVASFVFSQVLTNVENGGYTVRGMIIITKESESAAATILHEINRGVTFLRGQGAYSGREHDVLYVALNPSEVRDVKEIMADLDPDAFISVINVDEVISSDFKIRRRNYDK

SEQ ID NO: 3305 - DNA, 870 bp, Streptococcus pyogenes
atggcacatcacgataaattgactaaactactaaaactgtttttgattgccctaggtgtagccatttataccttcggttttgttaattttaacatggctaatgctttggctgaaggtggtgtggcaggaataaccttgattttacacgcgcattttgggattaatcctgcttactcttctctcttatttaatcttccactttttattttaggggcaaagatttttgggaagcgttctttggctctaaccatctatggaacagttctgatgtccgcttttatctggatgtggcaaaaagttcctatcgaacttggcttggaaaatgacatgatgttggtggctgtagtggcaggtctcttttcagggattgggagtggcattgtttttcgctatggtgcaaccacaggtggaacggatattattggtcgcattgcagaagaaaaatttggagctaagctaggtcaaactttgcttttggtggatgctcttgtattgacagcttcgttgacttatgtggatttaaaacacatgctttacactttggtggcaagctttgtttttagccaaatgattagtgtggttcaaaatggtggttacactatccgtggaatgattattattaccaagcattcagaggctgccgctcaagctatcctaaccgaaatcaatcgtggagtgacttacttgaaaggtcaaggagcttactctggtaatgattacaatatcatgtatgtgaccttgaacccaactgaagttcgggaagtcaaacgtattttagctggtttggatccagatgcctttatctccattattgatgtggacgaagttattagctctgattttaaaattcgccgaagaaattatgataaa

SEQ ID NO: 3306 - protein, 290 aa, Streptococcus pyogenes
MAHHDKLTKLLKLFLIALGVAIYTFGFVNFNMANALAEGGVAGITLILHAHFGINPAYSSLLFNLPLFILGAKIFGKRSLALTIYGTVLMSAFIWMWQKVPIELGLENDMMLVAVVAGLFSGIGSGIVFRYGATTGGTDIIGRIAEEKFGAKLGQTLLLVDALVLTASLTYVDLKHMLYTLVASFVFSQMISVVQNGGYTIRGMIIITKHSEAAAQAILTEINRGVTYLKGQGAYSGNDYNIMYVTLNPTEVREVKRILAGLDPDAFISIIDVDEVISSDFKIRRRNYDK

SEQ ID NO: 3307 - DNA, 306 bp, Streptococcus agalactiae
atgccatcagaaaaagaaatattagatgctcttagtaaagtttatagcgaagaagtaatacaagcagatgattattttcgtcaagctattttcgagctcgctagtcaacttgaaaaagaggggatgaactcactcctagctacaaaaattgactcacttatcaatcaatacgtcttaacacatcaatttgatgctcctaaaagcatatttgatcttagtcgcttggtaaaaacaaaagctagccattacaagggaactgctatctcagctattatgcttggtagtttcttaagtggaggaccaaaa

SEQ ID NO: 3308 - protein, 102 aa, Streptococcus agalactiae
MPSEKEILDALSKVYSEEVIQADDYFRQAIFELASQLEKEGMNSLLATKIDSLINQYVLTHQFDAPKSIFDLSRLVKTKASHYKGTAISAIMLGSFLSGGPK

SEQ ID NO: 3309 - DNA, 324 bp, Streptococcus pyogenes
atgttacaggagaatgccatgccatcagaaaaagaaatattagatgctcttagtaaagtttatagcgaacaagtaatacaagcagatgattattttcgtcaagcgatcttcgagctcgccagtcaacttgaaaaagaggggatgagctcactcctagctacaaaaattgactcacttatcaatcaatacatcttaacacatcaatttgatgctcctaaaagcatatttgatcttagtcgcttggtaaaaacaaaagctagccattacaagggaactgctatatcagctattatgcttggtagtttcttaagtgggggaccaaaa

SEQ ID NO: 3310 - protein, 108 aa, Streptococcus pyogenes
MLQENAMPSEKEILDALSKVYSEQVIQADDYFRQAIFELASQLEKEGMSSLLATKIDSLINQYILTHQFDAPKSIFDLSRLVKTKASHYKGTAISAIMLGSFLSGGPK

SEQ ID NO: 3311 - DNA, 1722 bp, Streptococcus agalactiae
gtgactatattactaattaaaataggagataccatggatacaaaacatctaattgcgagtgaaattcaaaaagttgttccagatatggaacaatcgaccattctttctttattagaaaccccaaaaaattcgagcatgggagatttagctttcccagcattctctttggctaaaactctacgcaaagcacctcaaataattgctagtgacattgctgaacaaattaaaagcgaccaatttgaaaaggtggaagctgttggaccttacgttaactttttccttgataaagccgcaatctcaagtcaagttttaaaacaagtcttatctgatggttctgcctatgctactcaaaatattggtgaaggacgaaatgttgccattgacatgtctagtccaaatattgctaagccattctcaattggacaccttcgttcaacagttattggtgatagtttagctaatatttttgataaaattggctatcatcctgttaaaattaatcaccttggcgactggggtaaacaatttggaatgttaatcgttgcctataaaaaatggggcaatgaagaggctgtccgtgctcatcccatcgatgaacttttaaaactttatgtccgtattaatgctgaagccgagacagaccctagcgttgatgaagaggcacgtgagtggtttcgtaaacttgaagctaacgatcctgaagcaactgaattatggcaatggttccgtgacgagtcattattagaattcaaccgtctttacgatcaaatgaatgttacatttgatagctataacggcgaggcattctacaacgacaaaatggatgaagtgcttgaactgctagaatctaaaaacctcctagtcgaatctaaaggtgcacaagttgttaacctagaaaaatacggtattgaacatcctgccctcattaaaaaatccgatggagcaactctctacattacacgtgacttagctgctgcactttaccgtaaacgtacctacgattttgcaaaatcaatctacgttgtaggaaacgaacagtctgcacactttaagcaactaaaagctgtgcttaaagaaatggactacgattggtccgatgatatgactcatgttccttttggccttgtaacaaaaggaggagcaaaattatcaactcgtaaaggaaatgtaattctacttgaacctactgttgcagaagctattaatcgtgcggcatctcagattgaagctaaaaaccctaacctagcagataaagataaagttgctcaagcagttggtgtaggtgctattaaattttacgatttgaaaactgatcgtacaaatggttatgactttgacttagaagcaatggtatcatttgaaggtgaaactgggccatatgtacaatatgcacatgctcgtattcaatcaatcttacgtaaagctaactttagcccatctaatagcgataattacagtctcaacgatgttgaaagctgggaaatcatcaaactcatccaagattttcctcgtattattgtacgtgcggcagataattttgagccctctattattgcaaaattcgctattaatttagctcagtgcttcaataaatattacgcccacacacgtattttagatgaagacgctgaaatcagtagtcgtctagcactttgctatgcaactgctacagtattaaaagaatctcttcgcctcctaggagttgatgctccgaatgaaatg

SEQ ID NO: 3312 - protein, 574 aa, Streptococcus agalactiae
MTILLIKIGDTMDTKHLIASEIQKVVPDMEQSTILSLLETPKNSSMGDLAFPAFSLAKTLRKAPQIIASDIAEQIKSDQFEKVEAVGPYVNFFLDKAAISSQVLKQVLSDGSAYATQNIGEGRNVAIDMSSPNIAKPFSIGHLRSTVIGDSLANIFDKIGYHPVKINHLGDWGKQFGMLIVAYKKWGNEEAVRAHPIDELLKLYVRINAEAETDPSVDEEAREWFRKLEANDPEATELWQWFRDESLLEFNRLYDQMNVTFDSYNGEAFYNDKMDEVLELLESKNLLVESKGAQVVNLEKYGIEHPALIKKSDGATLYITRDLAAALYRKRTYDFAKSIYVVGNEQSAHFKQLKAVLKEMDYDWSDDMTHVPFGLVTKGGAKLSTRKGNVILLEPTVAEAINRAASQIEAKNPNLADKDKVAQAVGVGAIKFYDLKTDRTNGYDFDLEAMVSFEGETGPYVQYAHARIQSILRKANFSPSNSDNYSLNDVESWEIIKLIQDFPRIIVRAADNFEPSIIAKFAINLAQCFNKYYAHTRILDEDAEISSRLALCYATATVLKESLRLLGVDAPNEM

SEQ ID NO: 3313 - DNA, 1689 bp, Streptococcus pyogenes
atggatactaaaactctaatcgcaagtgaaatagctaaagttgttccagaattagaacaagatgctatttttaacttgcttgaaaccccaaaaaattctgacatgggagaccttgcctttccagcttttagcttagcaaaagtccttcgcaaagcccctcaaatgattgctagcgagttagctgaacagattgatgagagccaatttgaaaaagtcgtagctgtcggcccttacatcaactttttccttgataaagctaagatttcctcacaggtccttgaacaagtgattacagcaggttcagactatgctcagcaagacgaaggtcaagggcgaaatgttgctattgacatgtcaagcccaaacatcgctaagccattttcaatcggtcacctccgctcaacagttattggtgatagtctcgctcacatttttgccaaaatgggctataaacctgtaaaaatcaatcaccttggtgactggggtaaacaatttggtatgctcattgttgcctacaaaaaatggggagatgaagctgctgttcaggcacatcctattgatgaactcttaaaactttacgttcgtatcaatgctgaagctgaaactgatcccaccgttgatgaagaagctcgtgaatggttccgtaaattggaagatggcgacaaagaagctactgaattatggcaatggttccgtgatgaaagtttacttgagttcaaccgactttatgaccaattacatgtcaccttcgatagttacaacggtgaggccttctataatgacaaaatggatgaggttcttgacttattagaagctaaaaaccttcttgtagaatctaaaggtgcccaagttgttaatcttgaaaaatatggtattgaacaccctgccttgatcaaaaaatcagatggcgctactctttacattacccgtgacctagctgccgcactttaccgtaaacgcacttatgactttgctaaatccgtttatgttgttggtaatgagcaagctgctcacttcaaacaattaaaagcagtgctaaaagaaatgggttacgattggtcagatgatatgacacacgttgcttttggacttgtcacaaaaggcggtgctaaattatcaacacgtaaaggtaatgttattcttcttgaacctacggttgctgaagccattaaccgtgcagcttctcaaattgaagcgaaaaatccaaaccttgctgacaaagaagctgttgcacacgctgttggtgtcggcgccatcaagttttacgatctcaaaacagatcgtatgaatgggtatgactttgaccttgaggccatggtttcctttgaaggagaaactggaccttatgttcaatacgctcacgctcgtatccaatctattctacgtaaagctgactttacgccatctgcaaccaccacttacagtttagctgatgctgaaagctgggaaattatcaaacttatccaagatttcccacgcattatcaagcgaacatcagataactttgagccttctattatggctaaatttgctattaacttagcccaaagctttaacaaatattatgctcacactcgcattctcgacgacaactcagaacgtgataaccgcttagctctctgctatgcaactgctactgttcttaaagaagcgcttcgcttactcggtgttgacgcaccaaatgaaatg

SEQ ID NO: 3314 - protein, 563 aa, Streptococcus pyogenes
MDTKTLIASEIAKVVPELEQDAIFNLLETPKNSDMGDLAFPAFSLAKVLRKAPQMIASELAEQIDESQFEKVVAVGPYINFFLDKAKISSQVLEQVITAGSDYAQQDEGQGRNVAIDMSSPNIAKPFSIGHLRSTVIGDSLAHIFAKMGYKPVKINHLGDWGKQFGMLIVAYKKWGDEAAVQAHPIDELLKLYVRINAEAETDPTVDEEAREWFRKLEDGDKEATELWQWFRDESLLEFNRLYDQLHVTFDSYNGEAFYNDKMDEVLDLLEAKNLLVESKGAQVVNLEKYGIEHPALIKKSDGATLYITRDLAAALYRKRTYDFAKSVYVVGNEQAAHFKQLKAVLKEMGYDWSDDMTHVAFGLVTKGGAKLSTRKGNVILLEPTVAEAINRAASQIEAKNPNLADKEAVAHAVGVGAIKFYDLKTDRMNGYDFDLEAMVSFEGETGPYVQYAHARIQSILRKADFTPSATTTYSLADAESWEIIKLIQDFPRIIKRTSDNFEPSIMAKFAINLAQSFNKYYAHTRILDDNSERDNRLALCYATATVLKEALRLLGVDAPNEM

SEQ ID NO: 3315 - DNA, 444 bp, Streptococcus agalactiae
ttgaataacatgaataaaatagaacgccaaaaacgtattaaacgtttgatccaatcagggcagattggcacacaagaagaaattaaattacatttaaaaaatgaaggaatcgatgtcacgcaagcgactctatcaagagacttgcgtgagattggtcttttaaaattacgtagcccagaaggtaagctatattatagtttatcaacagctacttcaaatcgatttagcccagccttacgctcatatattttgaaagtatcgcgagcaagttttatgttagttttaaatactaatttaggggaggctagcgttttagcaaactttattgatgagaaagggctgccagagattttaggaacaatggcaggagcagacaccttgttggtgatttgtcaaaatgaagatattgccaaagtttttgaaaaagaactatcagtaggttta

SEQ ID NO: 3316 - protein, 148 aa, Streptococcus agalactiae
MNNMNKIERQKRIKRLIQSGQIGTQEEIKLHLKNEGIDVTQATLSRDLREIGLLKLRSPEGKLYYSLSTATSNRFSPALRSYILKVSRASFMLVLNTNLGEASVLANFIDEKGLPEILGTMAGADTLLVICQNEDIAKVFEKELSVGL

SEQ ID NO: 3317 - DNA, 435 bp, Streptococcus pyogenes
atgaataaaatggagcgtcaacagcagattaagcgaatcattcaagcagagcatattggcacacaagaagatattaaaaatcaccttcaaaaagaaggcattgtggtcacccaagcaactctatctcgggacttaagagaaattggccttttgaaattgagagatgaacaaggcaaactctattatagtttgtctgaacccgttgcaacaccatttagtcctgaggtgcgtttttatgttttgaaagttgatcgagcaggttttatgctggttctccataccaatttaggagaggctgatgttctagctaatttgattgacaatgatgccattgaagatattctaggaaccattgctggtgcggataccttgcttgtgatttgcagagacgaagagattgctaaacgctttgaaaaagatttggctgcaggccta

SEQ ID NO: 3318 - protein, 145 aa, Streptococcus pyogenes
MNKMERQQQIKRIIQAEHIGTQEDIKNHLQKEGIVVTQATLSRDLREIGLLKLRDEQGKLYYSLSEPVATPFSPEVRFYVLKVDRAGFMLVLHTNLGEADVLANLIDNDAIEDILGTIAGADTLLVICRDEEIAKRFEKDLAAGL

SEQ ID NO: 3319 - DNA, 2574 bp, Streptococcus agalactiae
atggccaagccaacgatatcaccgggaatgcaacagtatctggatataaaagagaattatccagatgcttttttgctttttagaatgggtgatttttatgaattattttatgatgatgcggtaaaagcagcacaaatcctggaaattagcttgactagtcgaaataagaacgcagaaaagccaatcccaatggcaggagttccctatcactcagctcaacagtatattgacgttttagttgaattaggttacaaagtagccattgctgagcagatggaagatcctaaaaaagctgtgggagtggtcaagcgtgaggtagtgcaagttgttaccccaggaacggttgtggagtcaacgaagccggatagtgctaataatttcttagtagcgattgattcgcaagatcaacaaacatttggtctagcatatatggatgtctcaactggagagtttcaggcaacccttttaacagattttgagtccgtccgtagtgaaatactaaatttaaaagctcgtgagattgtagtaggatatcaattgacggacgaaaaaaatcacctactgacgaagcagatgaacttgcttttatcatacgaagacgaacgacttaatgatattcatttgattgatgagcagttaactgatttggaaatatctgctgcggaaaaacttttacaatatgtgcatagaacacaaaagcgtgaacttagtcatttacagaaagtagttcattatgaaataaaggactatttacaaatgtcatatgcaacgaaaaatagtctagatttactggagaatgctagaacaagcaagaagcatggaagtctttactggttgttagatgagactaaaacagcgatgggaactcgaatgctgagaacttggattgacaggcctttggtaagtatgaatcgaatcaaggaacgtcaagatattattcaagtgtttcttgattatttttttgagagaaacgatctcacagaaagtttaaagggtgtatatgatattgaacgcctagcaagtcgagtatctttcggaaaagccaaccctaaagatctattgcaactcggacagaccttatcacaaattcctcggattaaaatgattttacagtccttcaatcaacctgagcttgacatcattgtcaacaaaattgacactatgcctgaattagaaagtttaattaatacggcgatagccccagaagcacaggctactatcactgagggaaacattatcaagtctggatttgataagcaattggataattatcgaacagtgatgcgtgaaggtacaggttggattgctgatattgaagctaaggaaagagcagcaagtggtatcggtactcttaaaattgattataataaaaaagacggttattacttccatgttaccaattccaatttatcactagtaccggagcattttttccgtaaagcgacattaaaaaattctgaacgctatggaacagctgaactagccaaaattgaaggtgaaatgctcgaagctcgcgagcaatcttcaaatttagaatatgatatttttatgcgtgttcgtgcccaagtagaatcttatattaaacgtcttcaagagttagcaaagacgattgcaaccgttgatgttctacagagtttggcagtagttgcagaaaattatcactatgttcgtcccaaatttaatgatcaacatcagattaagattaagaatgggcgtcatgcaactgttgaaaaagtgatgggagtgcaagaatatattcccaatagcatctattttgatagtcagacagatatccagttgattacaggaccaaatatgagtggtaagtcgacctatatgcgccagttagctttgacagttattatggcacaaatgggaggttttgtatcggcagacgaagttgatttgcctgtatttgatgcaatatttactaggattggtgctgctgacgacttaatttctgggcaatcaacctttatggtagaaatgatggaagcgaatcaagctgtaaaacgagccagtgataaatctttgattctttttgatgaattaggtcgagggacagccacttatgatggtatggcattagctcaatcgattatagaatatattcatgaccgtgttagggcaaaaacaatgtttgcgactcattaccatgagttgacagatttatctgaacagttgacaaggcttgtcaatgtacacgtggctactttagagagagatggagaagttaccttcttacataaaattgaatctggacctgcggataagtcttatgggatacacgtcgcaaaaatagctggtttaccaattgacttattggatagggcaactgatattttatcacagttggaagctgatgcagtacagttgatcgtatcgccctcccaagaagctgttactgctgacttaaatgaggaactagattctgagaagcaacaaggacaattatcgctttttgaagaaccttcaaatgcaggtagggttattgaggagttagaagcgatagatataatgaatctaactccaatgcaagctatgaatgctatatttgacttaaagaaattatta

SEQ ID NO: 3320 - protein, 858 aa, Streptococcus agalactiae
MAKPTISPGMQQYLDIKENYPDAFLLFRMGDFYELFYDDAVKAAQILEISLTSRNKNAEKPIPMAGVPYHSAQQYIDVLVELGYKVAIAEQMEDPKKAVGVVKREVVQVVTPGTVVESTKPDSANNFLVAIDSQDQQTFGLAYMDVSTGEFQATLLTDFESVRSEILNLKAREIVVGYQLTDEKNHLLTKQMNLLLSYEDERLNDIHLIDEQLTDLEISAAEKLLQYVHRTQKRELSHLQKVVHYEIKDYLQMSYATKNSLDLLENARTSKKHGSLYWLLDETKTAMGTRMLRTWIDRPLVSMNRIKERQDIIQVFLDYFFERNDLTESLKGVYDIERLASRVSFGKANPKDLLQLGQTLSQIPRIKMILQSFNQPELDIIVNKIDTMPELESLINTAIAPEAQATITEGNIIKSGFDKQLDNYRTVMREGTGWIADIEAKERAASGIGTLKIDYNKKDGYYFHVTNSNLSLVPEHFFRKATLKNSERYGTAELAKIEGEMLEAREQSSNLEYDIFMRVRAQVESYIKRLQELAKTIATVDVLQSLAVVAENYHYVRPKFNDQHQIKIKNGRHATVEKVMGVQEYIPNSIYFDSQTDIQLITGPNMSGKSTYMRQLALTVIMAQMGGFVSADEVDLPVFDAIFTRIGAADDLISGQSTFMVEMMEANQAVKRASDKSLILFDELGRGTATYDGMALAQSIIEYIHDRVRAKTMFATHYHELTDLSEQLTRLVNVHVATLERDGEVTFLHKIESGPADKSYGIHVAKIAGLPIDLLDRATDILSQLEADAVQLIVSPSQEAVTADLNEELDSEKQQGQLSLFEEPSNAGRVIEELEAIDIMNLTPMQAMNAIFDLKKLL

SEQ ID NO: 3321 - DNA, 2553 bp, Streptococcus pyogenes
atggcaaaaactaacatttctcctggaatgcaacagtatctggacatcaaaaaagattatccagatgcttttttgctttttaggatgggtgacttttatgaattattttacgaggacgctgtcaaagcagcacaactcttagaaattggtttgaccagtcgcaacaagaatgcggaaaatccaattcctatggcaggcgtgccacatcattctgcccaacaatacattgatgtgttaattgagttgggttacaaggttgctgtcgcagaacaaatggaagacccaaagcaagctgttggggtggtgaagcgtgaggtcgttcaagtcataactcctggaacggttgtggattcagctaagccagatagcgccaataactttttggtagctgttgactttgatggttgccgttatggattggcttatatggatgtatccacaggtgaattttgcgtgacagatttggcggactttacgagtgttcgtagcgaaatccaaaacctcaaggcgaaagaagtcttactaggttttgatttatctgaagaagaacagacgattttggtcaagcagatgaatttgctgctttcttatgaagaaacggtctatgaagataaatctttaattgacggccaattgacaacggtagaactgacagcggcaggaaaactcttgcaatacgttcacaaaacacaaatgcgagaactcagccacttgcaagcattggttcactatgagatcaaggattatttgcagatgtcgtatgccactaagtcaagtttagatttggtagaaaatgctaggactaataaaaaacatggaagtctctattggctgttagatgaaaccaagacagctatggggatgaggcttttgcgctcatggattgatcgacctttggtttctaaagaagctattttagagcgtcaagaaattattcaagtttttctgaatgcttttattgagcgaaccgatttaagcaatagtttaaaaggtgtttacgacatcgaacgcttatctagtcgcgtgtcttttggcaaggcaaatccgaaagatttacttcaattggggcataccttagctcaagtgccttatatcaaagctatcttagagtcttttgacagtccttgtgttgacaaacttgtcaatgatattgacagtttgcctgagttggaatacttgattagaacagccattgatccagatgcaccagcaactattagtgaaggaagtattatccgcaatggttttgatgagcgcttggaccattatcgtaaagtaatgcgagaggggacaggctggattgcggatattgaggccaaagagcgtcaagcaagtggcattaataacctaaaaattgattacaataaaaaagatggttattattttcacgttacgaattcaaatcttagcttagttcccgagcattttttcagaaaggcaactttaaaaaattctgaacgttatggaacagcagaattggctaagattgaaggtcagatgttagaggctagggaagagtcatctagtttagaatacgatatttttatgtgtattcgagctcaagttgaaacctatattaatcgtttacagaaactggctaaaattttggcaacggtagatgttttgcaaagtttagcagtcgttgctgaaaccaatcattatatccggccgcagttcaatgataatcatgtgattacaattcaagaaggtcgtcacgcggttgttgaaaaggttatgggagtgcaggaatacattcccaatagtatctcttttgaccaacagaccagtattcagctgattacaggtccaaatatgagtggtaagtcgacttatatgagacagctggccttaacggttatcatggcccagatgggttcatttgtggctgctgatcatgttgatttacctttatttgatgcgatttttacgcgtattggggctgctgatgatttgatttctgggcaatcaacctttatggtggagatgatggaagcaaaccaagcaatcaaacgcgcaagtgacaactctcttattctatttgatgaactgggacgaggcacggcaacttatgatggtatggctttagcccaggcaattattgaatatatccatgatagagttggtgctaagaccatatttgcaacgcattatcatgaattgacagacttgtcaactaacttgacaagtctagtcaatgttcatgtagcaacgcttgaaaaagatggcgatgttaccttccttcataagattgctgagggaccggcggataaatcttacggtattcatgtggcaaaaatagcaggactgccaaaatccctattaaagagagcagacgaagttctgacccgtttagaaacacagtcacgatctactgagataatatcagtcccttcacaagttgagtcaagcagcgctgttagacaggggcaattatccctttttggtgatgaagagaaagctcatgagattaggcaagcactggaagttattgatgtcatgaacatgaccccgcttcaagcaatgacaactctttacgaattgaaaaagttgtta

SEQ ID NO: 3322 - protein, 851 aa, Streptococcus pyogenes
MAKTNISPGMQQYLDIKKDYPDAFLLFRMGDFYELFYEDAVKAAQLLEIGLTSRNKNAENPIPMAGVPHHSAQQYIDVLIELGYKVAVAEQMEDPKQAVGVVKREVVQVITPGTVVDSAKPDSANNFLVAVDFDGCRYGLAYMDVSTGEFCVTDLADFTSVRSEIQNLKAKEVLLGFDLSEEEQTILVKQMNLLLSYEETVYEDKSLIDGQLTTVELTAAGKLLQYVHKTQMRELSHLQALVHYEIKDYLQMSYATKSSLDLVENARTNKKHGSLYWLLDETKTAMGMRLLRSWIDRPLVSKEAILERQEIIQVFLNAFIERTDLSNSLKGVYDIERLSSRVSFGKANPKDLLQLGHTLAQVPYIKAILESFDSPCVDKLVNDIDSLPELEYLIRTAIDPDAPATISEGSIIRNGFDERLDHYRKVMREGTGWIADIEAKERQASGINNLKIDYNKKDGYYFHVTNSNLSLVPEHFFRKATLKNSERYGTAELAKIEGQMLEAREESSSLEYDIFMCIRAQVETYINRLQKLAKILATVDVLQSLAVVAETNHYIRPQFNDNHVITIQEGRHAVVEKVMGVQEYIPNSISFDQQTSIQLITGPNMSGKSTYMRQLALTVIMAQMGSFVAADHVDLPLFDAIFTRIGAADDLISGQSTFMVEMMEANQAIKRASDNSLILFDELGRGTATYDGMALAQAIIEYIHDRVGAKTIFATHYHELTDLSTNLTSLVNVHVATLEKDGDVTFLHKIAEGPADKSYGIHVAKIAGLPKSLLKRADEVLTRLETQSRSTEIISVPSQVESSSAVRQGQLSLFGDEEKAHEIRQALEVIDVMNMTPLQAMTTLYELKKLL

SEQ ID NO: 3323 - DNA, 201 bp, Streptococcus agalactiae
atgacacaaggtacagtgaaatggtttaactcagaaaaaggttttggctttatttctagcgaaactggaacagacgtcttcgctcatttttcagagattaaagttgatggcttcaaaactcttgaagaaggacaaaaagtaacatttgatattcaagatggtcaacgtggaccacaagcaacaaatatcaatcttgttaaa

SEQ ID NO: 3324 - protein, 67 aa, Streptococcus agalactiae
MTQGTVKWFNSEKGFGFISSETGTDVFAHFSEIKVDGFKTLEEGQKVTFDIQDGQRGPQATNINLVK

SEQ ID NO: 3325 - DNA, 207 bp, Streptococcus pyogenes
atgtatatggcacaaggtacagtaaaatggtttaatgctgaaaaaggttttggttttatttcaactgaaaacggtcaagatgtctttgcacatttttcagccatccaaactaatggttttaaaacgttagaagaaggacaaaaagtggcatttgacgtcgaagaaggtcaacgtggacctcaagcagtcaatatcactaaattggcc

SEQ ID NO: 3326 - protein, 69 aa, Streptococcus pyogenes
MYMAQGTVKWFNAEKGFGFISTENGQDVFAHFSAIQTNGFKTLEEGQKVAFDVEEGQRGPQAVNITKLA

SEQ ID NO: 3327 - DNA, 99 bp, Streptococcus agalactiae
gtgtcatttgtttattacctttctaaaaatgttactgtaaaaaataaaaaaggtaaaaatgttaaacaaaaatacaacttcaaaacttattacgctccc

SEQ ID NO: 3328 - protein, 33 aa, Streptococcus agalactiae
MSFVYYLSKNVTVKNKKGKNVKQKYNFKTYYAP

SEQ ID NO: 3329 - DNA, 2028 bp, Streptococcus agalactiae
atggctaagatatcacaaaaaaagttacaaaaaatcataaaaaaaggagggatgaacttgtctaaaattattgaattaccggatatattagctaaccagattgctgctggtgaggttgttgaaaggcctagtagcgtcgttaaagaattagttgaaaatgccatagatgcaggaagtagccaaattaccatagaggttgaagaatctggtcttaaaaagattcaaataacggataacggtgaagggatgactagtgaggatgccgttctcagtttacgacgtcacgctacatccaaaatcaaaagccagagtgacctttttcgtattcggaccttaggttttcgtggtgaagctctaccatcaatcgcttcgattagtttaatgacgataaaaacagctacagagcaagggaaacaagggacgttacttgttgctaaagggggaaacattgaaaaacaggaagttgtttcaagtcctcgtggaacaaaaattttagttgaaaatttattctttaacacgcctgccagattgaaatacatgaagagtttacagtctgaactagctcatattattgatattgttaatagactcagtctagcgcatccggaagttgcttttacactgataaatgatggtaaagaaatgactaaaactagtgggactggcgatttgagacaggcgattgcaggtatttatggtttaaatactgcaaaaaaaatgattgagatttcaaatgcagatttagattttgaaatttcgggttatgtaagtttgcctgaattgacacgagctaaccgaaactatattaccctattaattaacggtcgttacattaaaaattttcttttgaaccgctcaattctagatggttatggttcaaagttgatggttggaagatttccaattgctgtcattgatattcagatagatccttatctagcagatgtcaacgttcatccgactaagcaagaggtgagaatttctaaggaacgagaattaatgagtttaataagcacagcaatttctgagagtcttaaacaatatgacttgattccggatgctttagagaatttagctaaaactagtacccgaagtgtagataagcctatacaaacaagcttctcactaaaacagcctggtttgtattacgatagggctaaaaatgacttttttataggtgcagatactgtatctgaacctattgctaactttacaaaccttgacaaaagtgacggttcagttgacaatgatgtaaaaaactctgttaatcaaggagcaacgcagtctcctaatataaagtatgctagtagagatcaagctgatagtgagaacttcattcattctcaggattaccttagtagtaaacagtcacttaacaaacttgttgaaaaattagattcggaagaaagttcgacttttccagagctcgaattttttggtcaaatgcatgggacctacttatttgctcaagggaatggtgggttgtatattattgatcaacatgcagctcaagagcgtgtaaaatacgagtattaccgtgaaaagataggtgaggttgataatagtcttcaacaattgttagtaccatttctatttgaattttcaagttcagattttcttcaattacaagaaaaaatgtcattattacaagatgttggtattttcttggaaccgtatggtaataatactttcattttaagggaacatccaatttggatgaaagaagaagaggtagagtctggcatttatgaaatgtgtgatatgttgttgctcactaatgaagtatcagtgaaaaaatatcgcgcagagttggctattatgatgtcttgcaagcgatctattaaagcaaaccatacgctagacgattactcagcacgtcatttattagatcagttagcgcaatgtaaaaatccttataattgccctcatggaagacctgttttagttaattttacaaaagctgatatggagaaaatgtttaaacgaatccaagaaaatcatacaagcctcagggatttaggaaaatat

SEQ ID NO: 3330 - protein, 676 aa, Streptococcus agalactiae
MAKISQKKLQKIIKKGGMNLSKIIELPDILANQIAAGEVVERPSSVVKELVENAIDAGSSQITIEVEESGLKKIQITDNGEGMTSEDAVLSLRRHATSKIKSQSDLFRIRTLGFRGEALPSIASISLMTIKTATEQGKQGTLLVAKGGNIEKQEVVSSPRGTKILVENLFFNTPARLKYMKSLQSELAHIIDIVNRLSLAHPEVAFTLINDGKEMTKTSGTGDLRQAIAGIYGLNTAKKMIEISNADLDFEISGYVSLPELTRANRNYITLLINGRYIKNFLLNRSILDGYGSKLMVGRFPIAVIDIQIDPYLADVNVHPTKQEVRISKERELMSLISTAISESLKQYDLIPDALENLAKTSTRSVDKPIQTSFSLKQPGLYYDRAKNDFFIGADTVSEPIANFTNLDKSDGSVDNDVKNSVNQGATQSPNIKYASRDQADSENFIHSQDYLSSKQSLNKLVEKLDSEESSTFPELEFFGQMHGTYLFAQGNGGLYIIDQHAAQERVKYEYYREKIGEVDNSLQQLLVPFLFEFSSSDFLQLQEKMSLLQDVGIFLEPYGNNTFILREHPIWMKEEEVESGIYEMCDMLLLTNEVSVKKYRAELAIMMSCKRSIKANHTLDDYSARHLLDQLAQCKNPYNCPHGRPVLVNFTKADMEKMFKRIQENHTSLRDLGKY

SEQ ID NO: 3331 - DNA, 2019 bp, Streptococcus pyogenes
ttgttatatcaacgtttagaaagtgttaaaaacaaaattatgacaaacattattgaattaccggaagttctcgccaaccaaattgcagctggtgaagttgtagaaaggccagcgagtgttgtcaaggaattggttgagaatgctattgatgctaaaagtagccagattaccgttgaaattgaagagtctggccttaagatgatacaggttacagacaacggtgagggaatgtctcatgaagatttacctttaagtctgcgtcgccacgctactagtaaaattaagagtcagagtgatttgtttagaattagaacacttggcttccgtggagaggctttaccgtctgttgcctctatcagtaaaatcacgataaaaacagcaacaaaagaagtcactcacggttctcttcttatagctactggtggggaaattgagacacttgaagcgatctcaactcctactggaaccaaaattaaggttgaaaaccttttttacaacacgcctgctcgtctcaaatatatgaaaagtttacaggcagaattagctcacattgtagatgtggtcaaccggttgagtttggcacatccagaagttgctttcacactgattagtgatggtcgccaattaactcagacatcaggaactggcgatttacgccaagcaattgcagggatttatggtttgaatactaccaaaaaaatgctggctatctctaatgctgatttggattttgaagtttccggctatgttagcttgccagagttgacacgcgccaaccgtaattacatgacgattttggttaatgggcgttacatcaagaatttcttgcttaatcgagcaattcttgatggttacggttctaagctcatggttggacgtttcccaattgttgtgattgatattcagattgatccctatttggccgatgtcaatgttcaccccacaaaacaagaggttcgtatttcaaaagagcgtgaattaatggctttaattagcacggctatttcagagagtcttaaggaacaagatttgattccagatgctctggaaaatttagccaaatcaagcacacgacatttctctaaaccagagcaaacacaacttcctttacagtctaggggactttattatgatcctcaaaagaatgacttttttgtcaaagagtcggctgtctcggaaaaaatacctgaaactgatttttattccggcgctgttgacaacagtgtaaaggttgaaaaagtagagctgttaccccactcagaagaagttataggaccttcttcggttaaacacgcaagtcgtccccagaatacctttaccgagactgatcatcctaatcttgacttaaaaaacagacaaaagttatctcaaatgctaacccgtttggaaaatgaagggcaatcagtgtttcccgaattggattattttggtcagatgcacggaacttatctctttgctcagggaaaagatggtttatttataattgaccaacacgctgcccaggagcgggttaaatacgaatattatcgtgataagataggtgaggttgacagtagtttacagcaattgttggtgccctatttgtttgagttttctggttctgatttcattaacttacaggagaaaatggcactcttaaatgaagttggtatcttcttagaagtttatgggcacaatactttcattttgagggagcatcctatctggatgaaagaagaagagattgcatctggtgtctatgaaatgtgtgacatgttacttctaaccaatgaggtatctattaaaacttaccgagcagagttagctattatgatgagttgtaaacgatctatcaaggcaaatcatagcttggatgattattcagcaagaaatctgctactgcaattggcccaatgtcaaaatccttataactgccctcatggtagacccgtattgattaattttagtaaggcagatatggaaaaaatgttccgtcgaattcaagaaaatcacactagcctgcgagagctaggaaaatat

SEQ ID NO: 3332 - protein, 673 aa, Streptococcus pyogenes
LLYQRLESVKNKIMTNIIELPEVLANQIAAGEVVERPASVVKELVENAIDAKSSQITVEIEESGLKMIQVTDNGEGMSHEDLPLSLRRHATSKIKSQSDLFRIRTLGFRGEALPSVASISKITIKTATKEVTHGSLLIATGGEIETLEAISTPTGTKIKVENLFYNTPARLKYMKSLQAELAHIVDVVNRLSLAHPEVAFTLISDGRQLTQTSGTGDLRQAIAGIYGLNTTKKMLAISNADLDFEVSGYVSLPELTRANRNYMTILVNGRYIKNFLLNRAILDGYGSKLMVGRFPIVVIDIQIDPYLADVNVHPTKQEVRISKERELMALISTAISESLKEQDLIPDALENLAKSSTRHFSKPEQTQLPLQSRGLYYDPQKNDFFVKESAVSEKIPETDFYSGAVDNSVKVEKVELLPHSEEVIGPSSVKHASRPQNTFTETDHPNLDLKNRQKLSQMLTRLENEGQSVFPELDYFGQMHGTYLFAQGKDGLFIIDQHAAQERVKYEYYRDKIGEVDSSLQQLLVPYLFEFSGSDFINLQEKMALLNEVGIFLEVYGHNTFILREHPIWMKEEEIASGVYEMCDMLLLTNEVSIKTYRAELAIMMSCKRSIKANHSLDDYSARNLLLQLAQCQNPYNCPHGRPVLINFSKADMEKMFRRIQENHTSLRELGKY

SEQ ID NO: 3333 - DNA, 96 bp, Streptococcus agalactiae
gtgaaaaacgtcatggcaatcaaaatagctccaaaagtgtttagagaaatattaaaaagcattccaaaaccacaaatcaagctccctaatattagt

SEQ ID NO: 3334 - protein, 32 aa, Streptococcus agalactiae
MKNVMAIKIAPKVFREILKSIPKPQIKLPNIS

SEQ ID NO: 3335 - DNA, 1254 bp, Streptococcus agalactiae
ttgttagggaagaagggagaaaaagtgaaagagttttttgctttgccaaaacagctacagttaagagaattattgcgttttatttccattacggttggttcagctatttttccttttatggcaatgtattatgttcaatattttggaaatctagttacaggaatcttgatcatcataactcaactatcagggtttgtagcgaccttatatggaggccatttgtcagatgctatggggaggaaaaaagttgtgattataggttcactgctggcaaccattggttgggctataactatagctgcaaatgttccaaatcatattacgccacacttgacctttgtaggtatccttatcattgaaatagctcaccaattttatttccctgcctatgaagctatgaccattgatttgacgaacgaacagaatcgtcgctttgtttacactataggttattggttggttaacatcgctgtaatgctaggttctggaattgctgggattttctatgatcaccatttttttgaattattaatagttcttcttattatttcagcgatttgttgtttcgtggtctacttcaagtttgatgagacaaaaccacaggagggaaccttcaagcatgataaaggagttttaggaacttttaaaaattatagtcaggttttagtggataaagcgtttgttgtttatactttaggagcaattggttccagtgttgtctggctccaggttgataattatttctcggtcaatcttaagcaaaattttgaagtagtgtccattttaggacatacaatcacaggtgctaaaatgcttagtttagcagtctttacaaacactctattaattgtcttactaatgacaactataaataaattcatagagaattggcctttgaaacgtcaactaatattagggagcttgatttgtggttttggaatgctttttaatatttctctaaacacttttggagctattttgattgccatgacgtttttcacctttggcgaaatgatttatgttccagctagtcaggttctaagggcggagatgatggtggagggaaaaattggatcatattctggatttttagctatcgcacaacctgttgcaagtgtattagcaggtgccatggtttcgctcagctattttacaggaaaaataggtgttcaaataacattgaccatttttatgttagcaggtctggttttaatcttatatgctaccaaaatgaaaaatattgagataggaaaa

SEQ ID NO: 3336 - protein, 418 aa, Streptococcus agalactiae
MLGKKGEKVKEFFALPKQLQLRELLRFISITVGSAIFPFMAMYYVQYFGNLVTGILIIITQLSGFVATLYGGHLSDAMGRKKVVIIGSLLATIGWAITIAANVPNHITPHLTFVGILIIEIAHQFYFPAYEAMTIDLTNEQNRRFVYTIGYWLVNIAVMLGSGIAGIFYDHHFFELLIVLLIISAICCFVVYFKFDETKPQEGTFKHDKGVLGTFKNYSQVLVDKAFVVYTLGAIGSSVVWLQVDNYFSVNLKQNFEVVSILGHTITGAKMLSLAVFTNTLLIVLLMTTINKFIENWPLKRQLILGSLICGFGMLFNISLNTFGAILIAMTFFTFGEMIYVPASQVLRAEMMVEGKIGSYSGFLAIAQPVASVLAGAMVSLSYFTGKIGVQITLTIFMLAGLVLILYATKMKNIEIGK

SEQ ID NO: 3337 - DNA, 1218 bp, Streptococcus pyogenes
atgcaagagtttttaaaccttcctaagcagattcagctgaggcaactggtacgctttgtgaccattaccttaggcagtagtatctttccctttatggccatgtattatacgacttactttggtacgttttggacaggcctcttaatgatgattaccagtttgatgggatttgttggaactttatacggtgggcatctgtcagatgctcttggtcgcaaaaaagtcattatgattgggtcagtaggaacaacactaggctggtttctgactattttagctaatttgcctaatgcggctattccttggttaacctttgcgggtattttattggtagagattgcttctagtttttatggtcctgcctatgaagctatgttgattgatttgactgatgagagtaatcgtcgatttgtttacaccatcaattattggtttatcaatattgccgtcatgtttggtgcagggctatctgggcttttttatgaccatcattttttagccttgttagtagccttattactcgtcaatgtactttgttttggcgttgcttactactgttttgatgaaactagaccagaaacacacgcttttgaccatggtaaaggattactggcgagttttcagaactaccgtcaggtgtttcatgatcgtgcctttgtcttgtttaccttaggtgccatcttttctggtagtatctggatgcagatggataactatgtgccagtccatttgaaactgtattttcagccaacggctgtattaggtttccaagtaactagttctaaaatgttatcattaatggttttaactaatacattgctgattgtccttttcatgacagtagtaaataaattaacggaaaaatggaaactattacctcagcttgtggttggttctttactatttactctagggatgctcttgtcatttacctttacgcagttctatgctatctggttatcagttgttttgttaacttttggggaaatgataaatgtttctgctagtcaagtcctacgtgctgatatgatggatcattcccaaataggatcttatacaggttttgtgtcaatggcacaacccctaggtgctattttggctagtctactagtatctgtcagccattttacaggtcctttaggcgtgcaatgcttatttgcagtcattgctttgctagggatttattttacggttgtttctgcaaaaatgaaaaaggtg

SEQ ID NO: 3338 - protein, 406 aa, Streptococcus pyogenes
MQEFLNLPKQIQLRQLVRFVTITLGSSIFPFMAMYYTTYFGTFWTGLLMMITSLMGFVGTLYGGHLSDALGRKKVIMIGSVGTTLGWFLTILANLPNAAIPWLTFAGILLVEIASSFYGPAYEAMLIDLTDESNRRFVYTINYWFINIAVMFGAGLSGLFYDHHFLALLVALLLVNVLCFGVAYYCFDETRPETHAFDHGKGLLASFQNYRQVFHDRAFVLFTLGAIFSGSIWMQMDNYVPVHLKLYFQPTAVLGFQVTSSKMLSLMVLTNTLLIVLFMTVVNKLTEKWKLLPQLVVGSLLFTLGMLLSFTFTQFYAIWLSVVLLTFGEMINVSASQVLRADMMDHSQIGSYTGFVSMAQPLGAILASLLVSVSHFTGPLGVQCLFAVIALLGIYFTVVSAKMKKV

SEQ ID NO: 3339 - DNA, 588 bp, Streptococcus agalactiae
atgtacgattatattaaaggaaaattgagtaaaataacggctaaatttattgttgtggaaacagctggattgggatacatgatatatgtggcaaatccctactctttttcaggttacgttaatcaagaagttaccatctacttacatcaagtcattcgcgatgatgcacatcttttatttggctttcatacggaaaatgaaaaagaaatttttcttaatttaatttcagtatcaggaattggtccaacgaccgctttagcaattattgcagtcgatgacaatgaaggtctcgtaagtgccattgataatagtgatattaagtatttgactaaatttccaaagataggaaaaaaaacagcacaacagatgatccttgatttgtcagggaagtttgtagaagcttctggtgagagtgcgactagtcgtaaggttagctctgagcagaatagcaatcttgaagaagctatggaagctttgttagcgttggggtataaggcgactgaattgaaaaaagtaaaagccttttttgaaggtacgaacgagactgtggagcaatacatcaaatctagtttgaagatgttgatgaaa

SEQ ID NO: 3340 - protein, 196 aa, Streptococcus agalactiae
MYDYIKGKLSKITAKFIVVETAGLGYMIYVANPYSFSGYVNQEVTIYLHQVIRDDAHLLFGFHTENEKEIFLNLISVSGIGPTTALAIIAVDDNEGLVSAIDNSDIKYLTKFPKIGKKTAQQMILDLSGKFVEASGESATSRKVSSEQNSNLEEAMEALLALGYKATELKKVKAFFEGTNETVEQYIKSSLKMLMK

SEQ ID NO: 3341 - DNA, 594 bp, Streptococcus pyogenes
atgtacgattatattaaaggtcaattgaccaaaattacggcaaaatacattgtcgttgaagctaatggattgggctacatgattaatgttgccaatccttatagctttacagatagtgtcaaccaattggtaaccatttatctgcatcaagtgattcgtgaggatgctcacctgttgtttgggtttcacacggaagatgaaaaagatgtttttctgaaattaatttctgtatcaggtattggtccgacaacagctcttgctattgtggcagttgatgataatgagggacttgtgaatgccattgataacagtgacattaagtacctaatgaaatttcctaaaattggtaaaaaaacagcgcagcaaatggttcttgacttagctggcaaatttgtggaggctccacaagagactggtcataccaaagcgcgcagcaataaagcaggcaatactcaactggacgaagcgattgaagccctccttgctctcggttataaagcaaaagagctgaaaaaaattcgtgccttctttgaggggacctctgagacggcagagcaatacatcaaatcagcattgaaactgttaatgaaaggg

SEQ ID NO: 3342 - protein, 198 aa, Streptococcus pyogenes
MYDYIKGQLTKITAKYIVVEANGLGYMINVANPYSFTDSVNQLVTIYLHQVIREDAHLLFGFHTEDEKDVFLKLISVSGIGPTTALAIVAVDDNEGLVNAIDNSDIKYLMKFPKIGKKTAQQMVLDLAGKFVEAPQETGHTKARSNKAGNTQLDEAIEALLALGYKAKELKKIRAFFEGTSETAEQYIKSALKLLMKG

SEQ ID NO: 3343 - DNA, 561 bp, Streptococcus agalactiae
atgaggtttcacatgaaacgatgttcttgggtgaatttagataatccattatatgtagcttaccatgataaagagtgggggagagctgttcatgacgatcatgtactctttgagttactatgtttagaaacttatcaatcgggtttatcttgggaaacagtattaaataaacgtcaggagttcagacaagtttttcatcactataatattgaaaaggtagctgcaatgtcagatgcggatttagagataatcttacaaaatcctagggttattcgtcatcgtctaaaacttttctcaacacgacaaaatgctaggtcaattatattaattcagaaagaattcggaagttttgatcgctacatttggtcttttgtagataataaagtacaggttaactcagttaacaactacaacgatgtgcctgcaagtactaccttatccgaacgcttatctaaggatttaaaaaaacgcggttttaaatttgttggtccaacttgcctctattcttttattcaggccgcgggtatggttaatgaccatgaaaatatatgtgatttcaag

SEQ ID NO: 3344 - protein, 187 aa, Streptococcus agalactiae
MRFHMKRCSWVNLDNPLYVAYHDKEWGRAVHDDHVLFELLCLETYQSGLSWETVLNKRQEFRQVFHHYNIEKVAAMSDADLEIILQNPRVIRHRLKLFSTRQNARSIILIQKEFGSFDRYIWSFVDNKVQVNSVNNYNDVPASTTLSERLSKDLKKRGFKFVGPTCLYSFIQAAGMVNDHENICDFK

SEQ ID NO: 3345 - DNA, 567 bp, Streptococcus pyogenes
gtgtttcacatgaaacgttgctcatgggttcctaaggataaccagctttactgtgattaccacgatttagaatggggtcaacccctggatgatgatagagatttttttgaattgctgtgccttgaaagttaccagtcaggcttatcctggctgactgttttgaaaaaacgccaagctttcagaactgtttttcatcattacgacattgcatcggttgcaacctttacctcggaggaaatggctgatgctttagagaatccatccattatccgccacaagctaaagctagcagcaactgtcaacaacgctatcgcagtacagaaaattcaaaaagagtttggtagtttttcaacttatctctggaattttgttgggggaaagccaattaacaaccttgtcaatcaagagaatcttgttcctgctcaaacagaattatctattcgcttagctaaggatttaaagaaaagaggatttaaatttttagggcctacaacggtttattcttttatgcaagcatcgggtctggtaaatgaccatgaagaggcttgtgttttcaatagaatcttc

SEQ ID NO: 3346 - protein, 189 aa, Streptococcus pyogenes
VFHMKRCSWVPKDNQLYCDYHDLEWGQPLDDDRDFFELLCLESYQSGLSWLTVLKKRQAFRTVFHHYDIASVATFTSEEMADALENPSIIRHKLKLAATVNNAIAVQKIQKEFGSFSTYLWNFVGGKPINNLVNQENLVPAQTELSIRLAKDLKKRGFKFLGPTTVYSFMQASGLVNDHEEACVFNRIF

SEQ ID NO: 3347 - DNA, 897 bp, Streptococcus agalactiae
ttggttgaaggctcaatacctctacaaaaccttactggtctagctgttggtggtatcgttacatctaagggagtccaatatatggttttaccaggtccgcctagtgaattaaagccaatggttatggagcaggtagtacctattttgtcaaataatggcacaaaattatattcacgtgtattgagattctttggtatcggtgagagtcagttagtcacaatcttagaagacataattaagaatcagacagacccaactatagcaccatatgcaaaggttggtgaggtaactttaaggttatcaacgaaagctgaaaatcaggatgaggccgactttaaattagatagcttagaaaaagaaatacttgctcttaagacattagataaccgtaaattaaaagatttattatatggttatggtgataataatagtatggcacgtactgttttagaattattgaaagtacaaaataaaacgattactgccgcagagagcttaacagcagggttatttcaatctcagttagcagaattttctggtgcttcgcaagtttttaatggtggttttacgacctatagtatggaagcaaaatcacaacttctcggcatccctaagaaaaaattgcaagaatatggagttgtcagtcattttacagctgaggcaatggctcagcaagctcgccaacttttaaaagcagattttggtatcggtttaacgggagttgctggtcctgatgagttggaaggataccctgcaggtacagtttttattgggattgcaacccctgaaggcgtttcttctattaaagtatcgattggagggaagagtcgctcagatgtccgtcatatcagtactttacatgcttttgacttggtgcgtagggctttattaaagata

SEQ ID NO: 3348 - protein, 299 aa, Streptococcus agalactiae
MVEGSIPLQNLTGLAVGGIVTSKGVQYMVLPGPPSELKPMVMEQVVPILSNNGTKLYSRVLRFFGIGESQLVTILEDIIKNQTDPTIAPYAKVGEVTLRLSTKAENQDEADFKLDSLEKEILALKTLDNRKLKDLLYGYGDNNSMARTVLELLKVQNKTITAAESLTAGLFQSQLAEFSGASQVFNGGFTTYSMEAKSQLLGIPKKKLQEYGVVSHFTAEAMAQQARQLLKADFGIGLTGVAGPDELEGYPAGTVFIGIATPEGVSSIKVSIGGKSRSDVRHISTLHAFDLVRRALLKI

SEQ ID NO: 3349 - DNA, 1269 bp, Streptococcus pyogenes
atgaaagctgaactgattgcagtaggtaccgaaattttgactggtcaaattgtgaataccaatgctcaatttctgtcggaaaaaatggcagagctaggtattgatgtctattttcaaacggctgttggggacaacgaggagcgtttactttcagtgattacaactgctagtcagcgtagtaacttggtaattttatgtggtggccttggtccaacgaaagatgatttaaccaaacaaactttagcaaagtaccttaggaaagacttggtttatgatgagcaagcttgtcagaaactagatgacttttttgctaagcgcaagccttcatcacggacaccaaataatgagcgacaggcacaagtgattgaagggtcaatccctttgccaaataaaactggtcttgcggttggtgggttcatcacagtcgatggtattagttatgttgtcttaccgggtcctccaagtgaattgaagccgatggtaaatgaagaattggtaccacttctgtcaaaacaatacagtacattgtattcaaaggtactacgcttttttggtattggggaaagtcagttggtaacagtcttgtcagattttattgagaatcaaactgatccaaccattgctccgtatgctaagactggcgaagtgactcttcgcttatcaacaaaaactgaaaaccaagctctggcagataaaaagttaggtcagctagaagcgcagctactatcccgaaaaactcttgaaggtcaacccttagctgatgtcttttatggctatggggaggataattccttagcgcgtgagacatttgagctcttagtaaaatatgataagacaattacagcagcagaaagtctaaccgcgggattatttcagtcaactttggcgagttttccaggagcttctcaagtattcaatggaggctttgtgacttatagcatggaagaaaaagcgaaaatgctaggccttcctttagaggagttgaaatcgcatggcgttgttagtgcttatacggccgaggggatggcggagcaagcaaggttattgactggtgctgatattggggtaagtttaacaggtgttgccggaccagatatgttggaggaacagcctgcaggtacagttttcattggtcttgccactcaaaataaggtagaatcaataaaggttttgattagcgggcgaagtcgtttggatgtgcgctatatcgctactttacatgcttttaatatggtccgtaaaactttattaaaacttgagaatttgcta

SEQ ID NO: 3350 - protein, 423 aa, Streptococcus pyogenes
MKAELIAVGTEILTGQIVNTNAQFLSEKMAELGIDVYFQTAVGDNEERLLSVITTASQRSNLVILCGGLGPTKDDLTKQTLAKYLRKDLVYDEQACQKLDDFFAKRKPSSRTPNNERQAQVIEGSIPLPNKTGLAVGGFITVDGISYVVLPGPPSELKPMVNEELVPLLSKQYSTLYSKVLRFFGIGESQLVTVLSDFIENQTDPTIAPYAKTGEVTLRLSTKTENQALADKKLGQLEAQLLSRKTLEGQPLADVFYGYGEDNSLARETFELLVKYDKTITAAESLTAGLFQSTLASFPGASQVFNGGFVTYSMEEKAKMLGLPLEELKSHGVVSAYTAEGMAEQARLLTGADIGVSLTGVAGPDMLEEQPAGTVFIGLATQNKVESIKVLISGRSRLDVRYIATLHAFNMVRKTLLKLENLL

SEQ ID NO: 3351 - DNA, 1137 bp, Streptococcus agalactiae
ttggctaaaaaaacgaaaaaagcagaagaaattactaagaaattcggtgatgaacgtcgaaaagccttagatgatgctttgaaaaatattgaaaaagattttggtaagggcgcagtgatgcgcttaggtgagcgagctgaacaaaaggttcaagtaatgagttcaggttctcttgctttagatatcgctttaggagcaggtggatatcctaaaggacgtatcgtcgaaatttatggaccagagtcatctggtaaaacaacggttgcccttcatgccgtagctcaagcccaaaaggaaggtgggattgctgcctttattgatgctgagcacgctcttgacccagcctatgctgcggctcttggagttaatattgatgagttacttttgtctcaacctgactcaggtgagcaaggtcttgaaattgcaggtaaattgattgattcaggcgcagttgatttagttgttgtcgattcagttgcagcccttgttcctcgtgctgagattgatggtgatattggtgacagccacgttggtttgcaagctcgtatgatgagtcaagcaatgcgtaaattgtcagcatccattaacaagacaaagacaatcgcaatttttatcaaccagttaagggaaaaagtaggcgttatgtttggtaaccctgaaacaacacctggtggtcgtgctttgaaattttattcatcggttcgtctagatgttcgtggtaatactcaaatcaagggaactggtgagcataaagatcataatgttggtaaagagacaaaaatcaaagttgttaaaaataaagttgctccaccattccgtgaagcttttgtcgaaattatgtatggtgaaggtatttctcgcacgggtgagttaattaaaattgctagtgatttggatattatccaaaaagcaggtgcatggtactcatataatggtgagaaaattggacaaggttctgaaaatgccaaaaaatatttagcagataatccagcaatttttgatgaaattgaccataaagtgcgcgtgcactttggaatgactgaagatgattcgccagttcagtctgagctcgttgaagaaaaaaatgaagctgatgatcttgttttagatttggacaatgctattgaaattgaggaa

SEQ ID NO: 3352 - protein, 379 aa, Streptococcus agalactiae
MAKKTKKAEEITKKFGDERRKALDDALKNIEKDFGKGAVMRLGERAEQKVQVMSSGSLALDIALGAGGYPKGRIVEIYGPESSGKTTVALHAVAQAQKEGGIAAFIDAEHALDPAYAAALGVNIDELLLSQPDSGEQGLEIAGKLIDSGAVDLVVVDSVAALVPRAEIDGDIGDSHVGLQARMMSQAMRKLSASINKTKTIAIFINQLREKVGVMFGNPETTPGGRALKFYSSVRLDVRGNTQIKGTGEHKDHNVGKETKIKVVKNKVAPPFREAFVEIMYGEGISRTGELIKIASDLDIIQKAGAWYSYNGEKIGQGSENAKKYLADNPAIFDEIDHKVRVHFGMTEDDSPVQSELVEEKNEADDLVLDLDNAIEIEE

SEQ ID NO: 3353 - DNA, 1134 bp, Streptococcus pyogenes
ttggcaaaaaaattaaaaaagaatgaagaaatcactaagaagtttggtgacgaacgtcgcaaagcccttgatgatgctttgaaaaatattgaaaaagattttggtaagggtgcagtgatgcgattaggagaacgtgcagagcaaaaagttcaggttatgagttcaggaagtctagctcttgatattgcgcttggagctggtggttatcctaaaggacgtatcatcgaaatctatggtccagagtcttccggtaaaacgactgtggctttacatgctgtagcacaagctcaaaaagaaggtggaatcgcagcctttatcgatgccgagcatgcgcttgatccagcttatgctgctgcgcttggggttaatattgatgaactcctcttgtctcaaccagattctggagaacaaggacttgaaattgcaggtaaattgattgattctggtgcggttgatctggttgttgtcgattcagtagcagctttagtgccacgtgctgaaattgatggtgatattggcgatagccatgtcggattgcaagcacgtatgatgagtcaggccatgcgtaaattatcagcttctattaataaaacaaaaactatcgctatctttattaaccaattgcgtgaaaaagttggtgtgatgtttggaaatcctgaaacaacaccaggtggtcgagctttgaaattctatgcttctgttcggctggatgtgcgtggaacaactcaaattaaaggaactggtgaccaaaaagatagcagtattggtaaggagaccaaaatcaaggttgttaaaaacaaggtcgctccgccatttaaggtagcagaagttgaaatcatgtatggggaaggtatttctcgtacaggggagcttgtgaaaattgcttctgatttggacattatccaaaaagcaggtgcttggttctcttataatggtgagaagattggccaaggttctgaaaatgctaagcgttatttggccgatcacccagaattgtttgatgaaatcgaccttaaagtacgtgttaaatttggtttgcttgaagaaagcgaagaagaatctgctatggcagtagcatcagaagaaaccgatgatcttgctttagatttagataatggtattgaaattgaagat

SEQ ID NO: 3354 - protein, 378 aa, Streptococcus pyogenes
LAKKLKKNEEITKKFGDERRKALDDALKNIEKDFGKGAVMRLGERAEQKVQVMSSGSLALDIALGAGGYPKGRIIEIYGPESSGKTTVALHAVAQAQKEGGIAAFIDAEHALDPAYAAALGVNIDELLLSQPDSGEQGLEIAGKLIDSGAVDLVVVDSVAALVPRAEIDGDIGDSHVGLQARMMSQAMRKLSASINKTKTIAIFINQLREKVGVMFGNPETTPGGRALKFYASVRLDVRGTTQIKGTGDQKDSSIGKETKIKVVKNKVAPPFKVAEVEIMYGEGISRTGELVKIASDLDIIQKAGAWFSYNGEKIGQGSENAKRYLADHPELFDEIDLKVRVKFGLLEESEEESAMAVASEETDDLALDLDNGIEIED

SEQ ID NO: 3355 - DNA, 408 bp, Streptococcus agalactiae
gtgagaaggcacatgattaagatttatactatttcaagttgcacaagttgtaaaaaagcaaaaacttggctaaatgctcatcaacttccatataaagaacaaaacctaggtaaagaatcactaacacgtgatgaaattttagaaatattaacaaaaactgaaagtggtattgaaagtatcgtttcttctaaaaatcgttatgctaaggcgctcaattgtaatattgaggagttgagtgtaaatgaagttattgatcttattcaagaaaatccacgtattttaaagagtccaattctaattgatgacaaacgtcttcaagtaggttataaggaagatgatattcgtgcttttctacctcgctctattcgtaacgttgaaaatgcagaagctcgtcttcgtgcagcactt

SEQ ID NO: 3356 - protein, 136 aa, Streptococcus agalactiae
MRRHMIKIYTISSCTSCKKAKTWLNAHQLPYKEQNLGKESLTRDEILEILTKTESGIESIVSSKNRYAKALNCNIEELSVNEVIDLIQENPRILKSPILIDDKRLQVGYKEDDIRAFLPRSIRNVENAEARLRAAL

SEQ ID NO: 3357 - DNA, 396 bp, Streptococcus pyogenes
atgattaaaatttacacgatttcaagttgtacgagctgcaagaaagccaaaacttggctaaatgcccataagcttgcttataaagaacagaacttaggaaaagaaccgctaactaaagaagaaattttagcaattttatcaaaaaccgaaaatggagtggagagcattgtttcatctaaaaatcgttatgccaaagctctcgattgcgatattgaagaattaagtgttagtgaggttattgatttgattcaagataacccgcgcatccttaaaagtcccattttgattgatgataaacgtctgcaagtaggctacaaagaagacgatattcgtgcttttttacctcgctctattcgtaatattgaaaatactgaagcacgattacgtgctgcactc

SEQ ID NO: 3358 - protein, 132 aa, Streptococcus pyogenes
MIKIYTISSCTSCKKAKTWLNAHKLAYKEQNLGKEPLTKEEILAILSKTENGVESIVSSKNRYAKALDCDIEELSVSEVIDLIQDNPRILKSPILIDDKRLQVGYKEDDIRAFLPRSIRNIENTEARLRAAL

SEQ ID NO: 3359 - DNA, 264 bp, Streptococcus agalactiae
atgggatttacagatgaaactgttcgttttagattagatgatagtaacaaagtagaaattagtgaaacattaacagctgtttatcgttcattagaagaaaaaggttacaatcccatcaatcaaattgttggttacgtattgagtggggaccctgcttatgtacctcgttacaatgatgctcgcaatcaaattcgtaaatatgaacgtgatgagattgtagaagagctcgttcgttattatttacaaggaaatggaatagatttg

SEQ ID NO: 3360 - protein, 88 aa, Streptococcus agalactiae
MGFTDETVRFRLDDSNKVEISETLTAVYRSLEEKGYNPINQIVGYVLSGDPAYVPRYNDARNQIRKYERDEIVEELVRYYLQGNGIDL

SEQ ID NO: 3361 - DNA, 267 bp, Streptococcus pyogenes
atgggatttacagatgaaacagtccgctttaagttggatgatggcgacaaacgacaaattagtgaaacattaacagcagtctatcattcacttgatgaaaagggttataatccaattaatcaaattgttggttatgtcttgagtggggacccagcttatgttcctcgttataatgatgctcgaaatcagattcgtaaatatgaacgtgatgaaattgtagaagaacttgttcgctactatttacaaggaaatggaattgatgttaaa

SEQ ID NO: 3362 - protein, 89 aa, Streptococcus pyogenes
MGFTDETVRFKLDDGDKRQISETLTAVYHSLDEKGYNPINQIVGYVLSGDPAYVPRYNDARNQIRKYERDEIVEELVRYYLQGNGIDVK

SEQ ID NO: 3363 - DNA, 417 bp, Streptococcus agalactiae
atgagaataatgggacttgacgtcggctcgaaaactgtcggcgttgcaattagtgatccactcggtttcactgcacaaggtcttgaaatcattaagatcgatgaagaatctggaaattttggttttgaccgcttagcagagttagtaaaagagtacaaagttgataaatttgtagttggtctacctaaaaatatgaataatacaagtggtcctcgtgtagaggctagtcaggcatatggcgataaaatcactgaattattcaatcttccagttgaatatcaagatgaacgtttaacgactgttcaagcagagcgtatgctagttgagcaagctgatattagtcgtggtaagcgtaagaaagttatcgataaattagcagctcaactaatcttacaaaattatttagaccgcatgttt

SEQ ID NO: 3364 - protein, 139 aa, Streptococcus agalactiae
MRIMGLDVGSKTVGVAISDPLGFTAQGLEIIKIDEESGNFGFDRLAELVKEYKVDKFVVGLPKNMNNTSGPRVEASQAYGDKITELFNLPVEYQDERLTTVQAERMLVEQADISRGKRKKVIDKLAAQLILQNYLDRMF

SEQ ID NO: 3365 - DNA, 417 bp, Streptococcus pyogenes
atgagaataatgggacttgatgttggctcgaaaacggttggtgtagctattagtgatcctcttggctttacagcccaaggacttgaaattatcaagattgatgaggaaaaagcagaatttggctttacacgtttagaagagcttgttaagcagtaccaagttgaacagtttgttattggattgccaaaaaatatgaataacaccaatggtccacgtgttgatgcaagtataacttatggaaaccacatagagcacctctttggacttccagtccattatcaagatgaacgattgacgactgttgaggcaaagcgtatgcttattgagcaagctgacattagtcgtggtaagcgaaaaaaagtcattgataaattagctgcacaactcattttacagaactatttaaatcggaatttt

SEQ ID NO: 3366 - protein, 139 aa, Streptococcus pyogenes
MRIMGLDVGSKTVGVAISDPLGFTAQGLEIIKIDEEKAEFGFTRLEELVKQYQVEQFVIGLPKNMNNTNGPRVDASITYGNHIEHLFGLPVHYQDERLTTVEAKRMLIEQADISRGKRKKVIDKLAAQLILQNYLNRNF

SEQ ID NO: 3367 - DNA, 315 bp, Streptococcus agalactiae
atggcacataatcataaccacgatcataaccatgaacatcaacatgaagtaatcactcttgtagatgagaatgggaacgaaacactttttgaaattctattaactattgatgggcgtgaagagtttggcaaaaactatgttctcctcgttcctgcaggtgcggaagaagacgaacaaggtgaaattgagattcaagcttactcatttacagaaaatgccgatggaactgaaggagaccttcagcctataccagaagattcagatgcagaatgggacatgattgaggaagttttcaacagctttctagatgaagaa

SEQ ID NO: 3368 - protein, 105 aa, Streptococcus agalactiae
MAHNHNHDHNHEHQHEVITLVDENGNETLFEILLTIDGREEFGKNYVLLVPAGAEEDEQGEIEIQAYSFTENADGTEGDLQPIPEDSDAEWDMIEEVFNSFLDEE

SEQ ID NO: 3369 - DNA, 303 bp, Streptococcus pyogenes
atgacacataatcatgaaaatgaccaccaacacgaagttatcacacttgtggatgaacaaggaaatgaaaccttgtttgaaattttattaacaattgatggtcgtgaagagtttggtaaaaattatgttctcttggttccagcgggatctgaagaagatgagtctggtgaaattgaaatccaagcctattcatttactgaaaatgaagatggtactgaaggggatttacaaccgattcctgaggattcagatgctgaatgggatatgattgaagaggtatttaatagttttctagatgagaac

SEQ ID NO: 3370 - protein, 101 aa, Streptococcus pyogenes
MTHNHENDHQHEVITLVDEQGNETLFEILLTIDGREEFGKNYVLLVPAGSEEDESGEIEIQAYSFTENEDGTEGDLQPIPEDSDAEWDMIEEVFNSFLDEN

SEQ ID NO: 3371 - DNA, 126 bp, Streptococcus agalactiae
ttgagcaattgttcagtcgtttttttttcgaataataatagtgatgatgtagtaaaaggaggtgatgttaatgtcagatactcagctaacactagaagaacaagaatttctcaaacaatatatgtc

SEQ ID NO: 3372 - protein, 42 aa, Streptococcus agalactiae
MSNCSVVFFSNNNSDDVVKGGDVNVRYSANTRRTRISQTIYV

SEQ ID NO: 3373 - DNA, 1554 bp, Streptococcus agalactiae
atgaggagaaaaatagtggtagaaaacctagaaaaaccaattggagtgagctataaaaatagcccatcaatgagtaaacgaacggctatcagaatgaagaaatctagtcgattttcaattttactatatagtgttttgtcaactctcttagcaattgcaaatcctttattgacttattttgcaaatggtttgcagactcagaatctctatacaggtttgatgatgaccaaaggacagatcccttatagtgatgtttttgctacaggaggatttttatactatgtaacgattgctctaagttaccttttagggtctagtatctggttacttattgtacagtttattgcttactatgtatctggaatttatttttataaattagtttattatgtggcacaaagtgaaattgtctcgataggcatgacgttgattttctatataatgaatattgtcttaggattcggtggtatgtacccaatacagtgggcattaccttttatgctcatttcgctatggtttttaattaaattttgtgtcgataatatcgttgatgaagcatttatattttatggcattttagcagcattctcactatttatagatccccaaacactgattttttggctttgctcttttgttctcttaacagcaaccaatattaagcaaaagcagtcactacgaggattttatcagtttttatgcgttgtttttggtatgattttaattgcttatactgttggttactttatgtttaatctacagattatctcttcttatattgacaaagctattttttacccctttacgtatttcgctaggacaaaccactcattccttcttagtttagcaattcaaattgttgtccttctagggtcaggttgtctctttggactatgggattttattcaaaatcgtaaaaaagcatcttatcaaatcggcttgaactttattgcctgtatttttattatttacgctataatggccattttttcaagagattttaacctttaccactttttacctgctttaccatttggtcttttgctaacgagtaataaaattactattctttaccaaaaagtgattgacagacgttcacatagacgtcagtatttctctggtaaatctcttatcgtagacctttttgtaaagaaaacatattatttgcccctcttactagtttccttatcgatagggttactagtttataatacttatcaaaatgttactcttagtaaagaaaggcgtgacatttcacattatttgactacaaaaattgatagagatggtaagatttatgtttgggacaaagttgctagcatttatagccagactcggttaaaatctgcttctcaatttgttttgccacatattaatacagcgcaaaaaaataatgagaaaattttgaaggacgagctgcttcagcatggggctaaatactttatcttaaataaaaatgagaagttaccaaatgaactgaaatctgatattaagaagcactaccaagaagttcctctatcaaatatcactcattttgttctatatcgtttcaaa

SEQ ID NO: 3374 - protein, 518 aa, Streptococcus agalactiae
MRRKIVVENLEKPIGVSYKNSPSMSKRTAIRMKKSSRFSILLYSVLSTLLAIANPLLTYFANGLQTQNLYTGLMMTKGQIPYSDVFATGGFLYYVTIALSYLLGSSIWLLIVQFIAYYVSGIYFYKLVYYVAQSEIVSIGMTLIFYIMNIVLGFGGMYPIQWALPFMLISLWFLIKFCVDNIVDEAFIFYGILAAFSLFIDPQTLIFWLCSFVLLTATNIKQKQSLRGFYQFLCVVFGMILIAYTVGYFMFNLQIISSYIDKAIFYPFTYFARTNHSFLLSLAIQIVVLLGSGCLFGLWDFIQNRKKASYQIGLNFIACIFIIYAIMAIFSRDFNLYHFLPALPFGLLLTSNKITILYQKVIDRRSHRRQYFSGKSLIVDLFVKKTYYLPLLLVSLSIGLLVYNTYQNVTLSKERRDISHYLTTKIDRDGKIYVWDKVASIYSQTRLKSASQFVLPHINTAQKNNEKILKDELLQHGAKYFILNKNEKLPNELKSDIKKHYQEVPLSNITHFVLYRFK

SEQ ID NO: 3375 - DNA, 1557 bp, Streptococcus pyogenes
gtgatcgagttaaacgatgaattcatccgaaaagagacgatagaactggccaacgatggcccacgagtacacaccactcaatatgaaactaaagtacctcggcttcataaatgctatctgcttttctttagcattattatcagttctttaacaattgcagtaccttttttaacagatgcagccaatggtcttcagtcccaaaacttatatataggaatgatgttaacgaaggggcaacttccctatagtgctgcttttacaacaggagggctcttttactttgttatcattgcattaagttattatttgggatcgacactttggctagtctttgttcaggtgttttgtttttacttatctggtttatatctttataaactcattaattatatgacaggctttcaaaaagtggctttaactttttcaattagctactatttattatctgttagtcttggttttgggggattgtatcctactcaactggctatgccatttatattaatatcggcttggtttttaactaagtattttgcctgtttagtgaaagatgaggcatttattctttttggctttgtaggtgctcttgcaatgctaattgacccgagtacccttatcttttggtcttttgcttgtgtgacagttttttcttataatataagccaaaagcatcttgcaagaggtttttatcaactgctagcttcgatttttggaatgattttagttttttacacagcaggatatttcattttgaacttacaagtgctaaatccttatttatcacaaacgatgatttatccttttactttttttaaatcaggaaacttatcgttgctttttggactggctattcagttgttcttcgctttggggcttggtcttttgacgggaatggagaatgtcattaggcgatttaaaaacaattctgatagggtcgtcaagtggctatttgtcatggtcattctagaatctatacttgtggctatattttcacaagactatcgcccctatcatcttttacctcttttaccttttggattaattttgactgctattcctgttggctatcagtatggtataggattaggtcagagtagtcatcgcagacgtcatggtaaaaatggtgttggtcgagtaatgatgatttatcttaagagacacttttatttgccaattttaattgtagggacaatactaatctgttctacttattgtttcattagtagtattcctcttaatcaggagcgtgatcatattgctagttatttagaacagaaactaaataaaactcaatctatttatgtttgggatgatacttctaaaatttatttggacagtaaagctaaatctgtttctcaatttagttctcctgacatcaatacgcaaaaagagagtcatcgaaaaatattagaagatgaactattagaaaataaggctgcttatatcgttgttaatcgctataaaaacctgcctaaaatcattcaaaaagtattatctactaattacaaagtagataaacagataacgacaaaaagttttattgtttatcagaaaaag

SEQ ID NO: 3376 - protein, 519 aa, Streptococcus pyogenes
VIELNDEFIRKETIELANDGPRVHTTQYETKVPRLHKCYLLFFSIIISSLTIAVPFLTDAANGLQSQNLYIGMMLTKGQLPYSAAFTTGGLFYFVIIALSYYLGSTLWLVFVQVFCFYLSGLYLYKLINYMTGFQKVALTFSISYYLLSVSLGFGGLYPTQLAMPFILISAWFLTKYFACLVKDEAFILFGFVGALAMLIDPSTLIFWSFACVTVFSYNISQKHLARGFYQLLASIFGMILVFYTAGYFILNLQVLNPYLSQTMIYPFTFFKSGNLSLLFGLAIQLFFALGLGLLTGMENVIRRFKNNSDRVVKWLFVMVILESILVAIFSQDYRPYHLLPLLPFGLILTAIPVGYQYGIGLGQSSHRRRHGKNGVGRVMMIYLKRHFYLPILIVGTILICSTYCFISSIPLNQERDHIASYLEQKLNKTQSIYVWDDTSKIYLDSKAKSVSQFSSPDINTQKESHRKILEDELLENKAAYIVVNRYKNLPKIIQKVLSTNYKVDKQITTKSFIVYQKK

SEQ ID NO: 3377 - DNA, 2196 bp, Streptococcus agalactiae
atgatggtattggaaagagaacgatttatgacagaatctgatatcaaagtgattaaacgtgacgggcgtttggtcagctttgataagtataaaatctacacggctctattaaaagctagtaataaagttatcaaaatgtctcctttagttgaggctaaacttgagatgattgcagatcatgtcatcgctgagatctacaatcgttttaaagataacatcaagatatatgaaatacaaaatatcgttgaacataaattattggaagctaatgagtacgctattgcacaagaatatatcaattatcgtacccaacgcgattttgagcgttcacaggctacagatatcaatttttctattggaaaattaattaataaggatcaaactgttgttaatgagaatgctaataaagactctgatgtgtttaatacccaacgtgatttaacagcaggtattgtagggaaatcaattggtctgaaaatgttaccttctcatgtagcaaatgcacatcaaaagggtgatatccattatcatgatttagattacagcccatacactcccatgacaaattgctgtttaatcgattttaagggaatgcttgcaaatggttttaagattggtaatgcagaagttgagagtccaaaatctattcagacagcgactgctcagatttcacagattattgcgaacgttgcttcaagtcaatatggtggctgtacagcagatcgcattgatgagtttttagctccttatgcacagttaaattatcaaaaacatttaaaagatgcaaaagaatgggttattgaagataaacaagaagactatgcgcgcgctaaaacacaaaaagatatatatgatgccatgcaatctttggagtatgaaattaatactttatttacttcaaatgggcaaacgccatttacttcgcttggttttggattaggaactaattggtttgaacgagaaattcaaaaagcgattttgaaaattcggattcaaggtttaggaagcgagcatcgtactgctatttttccaaaattaatttttacgcttaaaaaaggtcttaatttagaagaagatagccccaattatgatattaaacaattagcattagagtgtgcgacaaaacggatgtatccagatgtcctttcttatgataaaattattgacttaacgggctcttttaaagcccctatgggctgtcgttctttcctacaagggtggcgagatgcaaatggtcaggatgtaacatctggtcgtatgaatcttggagttgtaacagttaatctaccgcgtgttgccatggagtctaacggtgatatggataaattctgggagatatttaatgaacgtatgagtattgctagagatgccttggtttatcgtgtggaacgtgtcaaagaggctatcccagcaaatgcgcccattctttaccagtatggagcatttggagaacgtttaggaaaatatgacaatgttgatcgactctttaatcaccgccgtgcaacggtgtctcttggttatattggtttatatgaggtggcgagtgttttttatggtggtgactgggaagataaccatcaagctaaagcatttactgtagacatcgttcgtaagatgaagcagttatgtgcagattggtctgatgagtatgattatcatttttcagtttattcgacaccatcggagagcttgactgaccggttttgtcgtttagatactgaaaaatttggtatagtaactgatattactgataaggaatactacactaattcattccattatgatgtgcgtaagaatccaacaccttttgaaaaactagattttgagaaaatctatcctgaaacgggtgcatcaggaggatttattcactactgtgaataccctgttttgcaacagaatccaaaagctttagaagcagtttgggactatgcttatgatcgggtaggttatctaggtactaatacaccgattgataagtgttaccaatgtcaatttgaaggggattttacaccgacagatcgaggttttacttgtccaaattgtggtaacagcgaccctaagacagtagatgttgtcaaacgtacatgtggttatttaggtaatccacaggctcgtccgatggttaatggtcgtcataaggaaatctctgctcgtgtaaaacatatgaacggatcaagtattaaaaatcaaggtaat

SEQ ID NO: 3378 - protein, 732 aa, Streptococcus agalactiae
MMVLERERFMTESDIKVIKRDGRLVSFDKYKIYTALLKASNKVIKMSPLVEAKLEMIADHVIAEIYNRFKDNIKIYEIQNIVEHKLLEANEYAIAQEYINYRTQRDFERSQATDINFSIGKLINKDQTVVNENANKDSDVFNTQRDLTAGIVGKSIGLKMLPSHVANAHQKGDIHYHDLDYSPYTPMTNCCLIDFKGMLANGFKIGNAEVESPKSIQTATAQISQIIANVASSQYGGCTADRIDEFLAPYAQLNYQKHLKDAKEWVIEDKQEDYARAKTQKDIYDAMQSLEYEINTLFTSNGQTPFTSLGFGLGTNWFEREIQKAILKIRIQGLGSEHRTAIFPKLIFTLKKGLNLEEDSPNYDIKQLALECATKRMYPDVLSYDKIIDLTGSFKAPMGCRSFLQGWRDANGQDVTSGRMNLGVVTVNLPRVAMESNGDMDKFWEIFNERMSIARDALVYRVERVKEAIPANAPILYQYGAFGERLGKYDNVDRLFNHRRATVSLGYIGLYEVASVFYGGDWEDNHQAKAFTVDIVRKMKQLCADWSDEYDYHFSVYSTPSESLTDRFCRLDTEKFGIVTDITDKEYYTNSFHYDVRKNPTPFEKLDFEKIYPETGASGGFIHYCEYPVLQQNPKALEAVWDYAYDRVGYLGTNTPIDKCYQCQFEGDFTPTDRGFTCPNCGNSDPKTVDVVKRTCGYLGNPQARPMVNGRHKEISARVKHMNGSSIKNQGN

SEQ ID NO: 3379 - DNA, 2196 bp, Streptococcus pyogenes
atggtaagtttagaagaagacaaggtgactgttcaacctgatattaaagtgattaaacgagatggtcgccttgttaattttgatagtacaaaaatctatagtgctttattaaaagcaagcatgaaagtaactcggatgtcgccacttgttgaggctaaattagaggctatttctgatcgcattatagcagaaattattgagcgttttccaactaatatcaaaatttatgaaatccaaaatattgtagagcataagcttcttgcagctaatgaatatgctattgcaaaagaatacattaattatcgtactcagcgtgactttgcacgttcacaagcaacagatatcaatttttctattgataaattaattaataaagatcaaacagttgttaatgaaaatgctaacaaagatagcgatgtttttaatactcaacgagatttaactgctggaatcgtagggaaatcgattggtttaaaaatgttaccttcgcatgttgctaatgctcatcaaaaaggagatatccattaccatgatttggattacagtccttatacaccgatgacgaactgctgtttaattgactttaagggcatgttagccaatggctttaaaattggtaatgctgaagtggaaagtcccaagtctattcaaactgcaacagctcagatctcacagattattgcgaatgtagcatcaagtcagtacggcggatgcacagctgatcgcattgacgagtttttagccccatatgcggagcttaactttaaaaaacatatggctgatgctaagaaatggatcgttgagactaagagagaaagctatgcttttgaaaagactcaaaaagatatttatgatgcgatgcagtctttggagtatgaaattaatacgctctttacgtctaatggtcaaacaccatttacttctttaggatttggtttggggacgtcttggtttgaacgtgagattcaaaaagctattttgaccattcggattaatggtcttggtagtgaacatcgcacggctattttccctaaattaattttcacggttaaacgtggcttgaatttagaaccagattcaccaaactatgatattaagactttggctttagaatgtgcgactaagcggatgtacccggatatgttatcttatgataaaattattgatttgacaggatctttcaaatctccaatgggatgccgctctttccttcaaggctggaaagatgaaaatgggcaagatgtgacctcaggccgtatgaatcttggggttgtcaccctcaatttacctcgcattgccatggaatcaaatggcgatatggataagttttgggagctgtttaatgagaggatgctaattagtaaggatgctttaatttatcgtgtcgaacgtgtcacagaagcaaaaccagcaaatgctcctattctttatcaatatggtgcttttggaaagcgtttggagaagacagggaatgtaaatgatctctttaagaatcgtcgtgcaacagtctctcttggctatattggtctttatgaagtggcgtctgttttttatggtggtcaatgggaaggtaatccagatgctaaagcttttaccttgtcaattgtcaaggcaatgaaacaggcctgtgaggattggtcagatgaatatggttatcatttctctgtttattcgactccatcagaaagtttgacagatcgcttttgtcgtttagatacggaaaaatttggcattgtgacagatattacggataaagaatactatacaaattcttttcactatgatgtgcgtaagagtccgacaccttttgaaaaattagattttgaaaaagattatccagaagcaggtgcttcaggtggttttatccactactgtgagtatcctgttttgcaacaaaatccaaaggccttggaagcggtttgggactatgcttatgatcgtgtggggtatttgggaaccaatacgcctattgataaatgctataattgccaatttgaaggcgattttaccccaacagaacgtggttttacttgcccaaactgtggcaataatgaccctaaaacagttgatgtggtcaaacgtacatgtggttacttggggaatcctcaggcccgcccaatggttaacggtcgccataaggaaatctctgcgcgtgtaaaacatatgaatggttctactataaaatacccaggcctg

SEQ ID NO: 3380 - protein, 732 aa, Streptococcus pyogenes
MVSLEEDKVTVQPDIKVIKRDGRLVNFDSTKIYSALLKASMKVTRMSPLVEAKLEAISDRIIAEIIERFPTNIKIYEIQNIVEHKLLAANEYAIAKEYINYRTQRDFARSQATDINFSIDKLINKDQTVVNENANKDSDVFNTQRDLTAGIVGKSIGLKMLPSHVANAHQKGDIHYHDLDYSPYTPMTNCCLIDFKGMLANGFKIGNAEVESPKSIQTATAQISQIIANVASSQYGGCTADRIDEFLAPYAELNFKKHMADAKKWIVETKRESYAFEKTQKDIYDAMQSLEYEINTLFTSNGQTPFTSLGFGLGTSWFEREIQKAILTIRINGLGSEHRTAIFPKLIFTVKRGLNLEPDSPNYDIKTLALECATKRMYPDMLSYDKIIDLTGSFKSPMGCRSFLQGWKDENGQDVTSGRMNLGVVTLNLPRIAMESNGDMDKFWELFNERMLISKDALIYRVERVTEAKPANAPILYQYGAFGKRLEKTGNVNDLFKNRRATVSLGYIGLYEVASVFYGGQWEGNPDAKAFTLSIVKAMKQACEDWSDEYGYHFSVYSTPSESLTDRFCRLDTEKFGIVTDITDKEYYTNSFHYDVRKSPTPFEKLDFEKDYPEAGASGGFIHYCEYPVLQQNPKALEAVWDYAYDRVGYLGTNTPIDKCYNCQFEGDFTPTERGFTCPNCGNNDPKTVDVVKRTCGYLGNPQARPMVNGRHKEISARVKHMNGSTIKYPGL

SEQ ID NO: 3381 - DNA, 141 bp, Streptococcus agalactiae
atggggaaataccaattagattacaaagggcaagcacaagtacagaagttccatgagaagcactctactggagagaatgctaatcaaaaatcacgtctaaaagatttaaggaaacaatttttggaaaaggcaaagaaaaaa

SEQ ID NO: 3382 - protein, 47 aa, Streptococcus agalactiae
MGKYQLDYKGQAQVQKFHEKHSTGENANQKSRLKDLRKQFLEKAKKK

SEQ ID NO: 3383 - DNA, 144 bp, Streptococcus pyogenes
atgggaaaatatcaattagactataaaggaatgcagcaggtagaacgctttcatgagaagcattctaaaaaaaagacggataaaaaatcccgcgttcaagaacttaaggctcggtttttagagaagtcaaaaaaacaggataac

SEQ ID NO: 3384 - protein, 48 aa, Streptococcus pyogenes
MGKYQLDYKGMQQVERFHEKHSKKKTDKKSRVQELKARFLEKSKKQDN

SEQ ID NO: 3385 - DNA, 930 bp, Streptococcus agalactiae
atgttgcaacttggaattgtcggtttaggaggtatttcacagaaagcttatctaccttatatgcgtcaagtgacaggtgtgcactggcatctttttacacgccaaaaacagattttagaagaagttaatatgctttttggttcttctacagcttatgacagtttagatagtctagccgagcatcctttggatggagtcttcattcatgtcgcgactagtgctcactttgatatagcaaagctttttttaaaaaagggtattccagtttttatggataagcctttgacagaagattatacttcaactaaagcattgtatgatttggcgaaggatcataaaacatttttaatggcaggttttaatcgtcgctttgcaccacgtattatggaaatgaaaaaagtagaagataaaaaccatattcgcacctttaaaaatgctgtcaatgcaccagcggattttcaatataagctttttgatatgtttatccatcctttagatacggcgctatttttgacaaataatgttgttaaaagaggatactttgtgactaaacgtgatgggaataagatattacaagtatcagtaacgctagaaacagacagtgagataatagaagcaagcatgaacctgcagtcggggtctcgtcgagaaataattgaaatagagtcgccagaagtaacctattcattagatgatttgtcaaatctttctgttattgatggctttgaccgtcgtgctatcggttttggttcttgggcaagcactctagagaaacgtggttttgaaccaatgattgatgcttttattcaagctatcactacaggtgtcaatcctatatcaccaaagtctagtttattgagtcattttatttgtgaccagattaataaagcgaatgctccttttggaatgcttaacttgaagataatggaa

SEQ ID NO: 3386 - protein, 310 aa, Streptococcus agalactiae
MLQLGIVGLGGISQKAYLPYMRQVTGVHWHLFTRQKQILEEVNMLFGSSTAYDSLDSLAEHPLDGVFIHVATSAHFDIAKLFLKKGIPVFMDKPLTEDYTSTKALYDLAKDHKTFLMAGFNRRFAPRIMEMKKVEDKNHIRTFKNAVNAPADFQYKLFDMFIHPLDTALFLTNNVVKRGYFVTKRDGNKILQVSVTLETDSEIIEASMNLQSGSRREIIEIESPEVTYSLDDLSNLSVIDGFDRRAIGFGSWASTLEKRGFEPMIDAFIQAITTGVNPISPKSSLLSHFICDQINKANAPFGMLNLKIME

SEQ ID NO: 3387 - DNA, 939 bp, Streptococcus pyogenes
ttgagtatgcttaatattgggattgtgggactaggtgctatttcacaaaaagcctatttaccatatatgagacagctgagtgacattacttggcatctatcaacgcggaatgcagcagtacgtcagcaggtcggtcagttatttggtcacgctattctttacagtgatgtcaaggagttgtcaaaaacaaacttagatggggtctttattcatgcggccacatcggcccacgcagagttggctagtttatttttaaatcaggggatcccagtctttatggataaacctatagctgacaattacctgatgacaaagaacctctatgacttagccaaagaaaatcagacttttctgatggcaggatttaacaggcgttttacacctcgtgtcaagaagttgtcaagtttgtcaactaagcgtaaagtggctgttgaaaaaaatgacttgaaccggccaggagatatgacttttaagctctttgatttctttatccatcctttagatacagccttattcttgacagaagggaccttactaaaagggcattttcaatatcatctggaagcaggcttactgagtcaagttatggtaaccttgatgaccgaaagcatgacgactacagcttctatgaatttacaatcagggagtcgccgtgaggtaatggaagttcaacgggctgaagaaacttatcatttagagaacttagacgagttatctatttataaaggtactgaaaaaagggtgcttggctttgcttcttgggacactaccttgcacaaaagaggttttgaaacaatgatcgatgcctttttagaagctattagcacaggcgtcaatcctgtcagccctgagtctagtcttttaagccactggatttgtcaacagattgctgactctcagctttcttatggagagttaacggtagagttgcctaaggat

SEQ ID NO: 3388 - protein, 313 aa, Streptococcus pyogenes
LSMLNIGIVGLGAISQKAYLPYMRQLSDITWHLSTRNAAVRQQVGQLFGHAILYSDVKELSKTNLDGVFIHAATSAHAELASLFLNQGIPVFMDKPIADNYLMTKNLYDLAKENQTFLMAGFNRRFTPRVKKLSSLSTKRKVAVEKNDLNRPGDMTFKLFDFFIHPLDTALFLTEGTLLKGHFQYHLEAGLLSQVMVTLMTESMTTTASMNLQSGSRREVMEVQRAEETYHLENLDELSIYKGTEKRVLGFASWDTTLHKRGFETMIDAFLEAISTGVNPVSPESSLLSHWICQQIADSQLSYGELTVELPKD

SEQ ID NO: 3389 - DNA, 489 bp, Streptococcus agalactiae
atgaaattacggcgcccagtgttagaagataaagaagaaattttagccatgtataaagagtttcaaaaagaaagtagttcagtggacggtggtttttatgaaccaactatgcattttgaagactggctagatcataacctaaatatggagttaggggtaggcgttcctgataattttgttccatatattcagtttgtgtcttttgacaatgacaataatgctataggtttcttaaatttacgtttaagactaaatgatactcttttagaaaaaggtggacatattggttattccatacgacctcgccagcgtggcaaaggttatgctaaagaacagttgaagctaggaattgagcaagcacatctaaaaaatattaatgaaatacttgtgacatgccatgtagacaatgatgccagcaagtcagtaatattagctaacggtggtgttttagaagattgtcttcatcagacagagcgttattggataacc

SEQ ID NO: 3390 - protein, 163 aa, Streptococcus agalactiae
MKLRRPVLEDKEEILAMYKEFQKESSSVDGGFYEPTMHFEDWLDHNLNMELGVGVPDNFVPYIQFVSFDNDNNAIGFLNLRLRLNDTLLEKGGHIGYSIRPRQRGKGYAKEQLKLGIEQAHLKNINEILVTCHVDNDASKSVILANGGVLEDCLHQTERYWIT

SEQ ID NO: 3391 - DNA, 507 bp, Streptococcus pyogenes
atggaaataagacgaccgactttaaaagataaagacgctgtattgtcaatgattaacgaatttttagagcagaaaagtgctacagatgggttatggcattttaacgtcaatgactttaactatgaaacatggttggaagattccttgcgacaggaaatgggtttgtccagtcaaggagtgcctgctattcaatacgtcgcatttgatgagagaagtcaggctatcgggttcttaaatcttcgtttacggttaaatgagagattacttgaaaaaggtgggcatattggttactctgtccgtcccagccagcgtgggaaaggttatgccaaggagatgcttaaacaagctgtcagctatgcgatttccaagaatatcacgacaattttggtaacttgtgatgagactaatgttgcaagccgagcagttattgtggctaacgtcggtatcttggaagatagtcgaggtggaacggaacgttattggattgaagaacaaagaggcgataag

SEQ ID NO: 3392 - protein, 169 aa, Streptococcus pyogenes
MEIRRPTLKDKDAVLSMINEFLEQKSATDGLWHFNVNDFNYETWLEDSLRQEMGLSSQGVPAIQYVAFDERSQAIGFLNLRLRLNERLLEKGGHIGYSVRPSQRGKGYAKEMLKQAVSYAISKNITTILVTCDETNVASRAVIVANVGILEDSRGGTERYWIEEQRGDK

SEQ ID NO: 3393 - DNA, 615 bp, Streptococcus agalactiae
atgtcagaagaagcaagttggaatactccaaagcctggggagtggaaaagcgaagaattaagtcatggccatatcattgattataaagcttttaattttgtagatggtgaaggtgttagaaactcactctacgtagctggatgtatgttccactgtaaagggtgttataatactgctacatggtcctttcgagccggaatcccttatacaaaagagcttgaagatcaaattatgacagatttagaacaaccttacgtccaaggtttaacgttattaggtggagagccgttcttaaatacaggtattttgttgccacttcttcagcgtatccgacgtgaattgccagaaaaagatatttggtcatggacggggtatacttgggaagaaatgatgctggagactcaagataaattggagatgttatctttgattgatattttagtggatggtaggtttgatcaaagtaagcgaaatttaatgctacaatttagaggatcttcaaatcaaagaatcattgatgtacaaaaatctttaaaagaaggtgaagtcgtgatttgggaaggattaaacgatggtgacaatagttatgaacaagtcaaacgagatgatttactc

SEQ ID NO: 3394 - protein, 205 aa, Streptococcus agalactiae
MSEEASWNTPKPGEWKSEELSHGHIIDYKAFNFVDGEGVRNSLYVAGCMFHCKGCYNTATWSFRAGIPYTKELEDQIMTDLEQPYVQGLTLLGGEPFLNTGILLPLLQRIRRELPEKDIWSWTGYTWEEMMLETQDKLEMLSLIDILVDGRFDQSKRNLMLQFRGSSNQRIIDVQKSLKEGEVVIWEGLNDGDNSYEQVKRDDLL

SEQ ID NO: 3395 - DNA, 615 bp, Streptococcus pyogenes
gtgatggcagaaaagtgttggaataatcctaagccaaaggaatggcaggcagaggagttaagtcaaggccggattattgactataaggcttttaactttgttgatggtgaaggggttcgtaattccctttatgtgtctggttgtttattccattgcaaggggtgttataatgctgcgacttggtcttttaaggcgggaatgccttatacgcaagaacttgaagagcagataatgacggatttggcacagccttatgttcagggactgacacttttaggtggagaaccctttttgaatacgggtatcttaattcctctgattaagcgtattcggcgtgaattgccagaaaaagatatttggtcttggacgggttatacttgggaagaaatgatgcttgaaacaccagacaaactggaaatgctgtccttaattgatattctggtagatggtcgttttgatatcacaaaaaagaacctcatgttgcaatttagaggctcttctaaccagcgaattatcgatgttcaaaagtctttggctgctaaagaagtgattatctgggataagttaaacgatggggaccaaacctttgaacaaattagtcgggaggatttgctt

SEQ ID NO: 3396 - protein, 205 aa, Streptococcus pyogenes
VMAEKCWNNPKPKEWQAEELSQGRIIDYKAFNFVDGEGVRNSLYVSGCLFHCKGCYNAATWSFKAGMPYTQELEEQIMTDLAQPYVQGLTLLGGEPFLNTGILIPLIKRIRRELPEKDIWSWTGYTWEEMMLETPDKLEMLSLIDILVDGRFDITKKNLMLQFRGSSNQRIIDVQKSLAAKEVIIWDKLNDGDQTFEQISREDLL

SEQ ID NO: 3397 - DNA, 729 bp, Streptococcus agalactiae
atgataaaaattttgatcccaactgcaaaagaaatgaaagtgtgtcaaaacattgcatggcctaaactgagtgctcaaacgaaaattataattgattatttttctactttaactgtttcagacttagaggatatctacagaattaatacaagtgcagctcgttgtgaggctcaaagatggcaagattttaaagctaaacaacttactctgaatcctgctattaagttattcaacggtcttatgtaccgcaatatcaaaaggcacaacttatccacaagtgaagcacaatttatggaaaattctgtttttattactagtgctctttatggcatcattcctgctatgacactaatatcccctcatcgtttagattttaacactaaaatcaaaatcaacaataactctcttaaagttttttggcgtgaaaattacgatacttttatgcagtcagatgacattatggtttctttgctttctaatgaatttgaaactgtcttttctcctaaagagcgtcaaaaactaatacatcttaactttattgaagatcgagatggccaattaaaaacccactctaccatatcaaaaaaagcaagaggaaagtgtttaactgctatgatggaaaataattgccaaactctagaacacttaaagcaattacgctttgatggcttctgttatgataatgaactctcagactctaagcaattaacttttgttaaaaaacagact

SEQ ID NO: 3398 - protein, 243 aa, Streptococcus agalactiae
MIKILIPTAKEMKVCQNIAWPKLSAQTKIIIDYFSTLTVSDLEDIYRINTSAARCEAQRWQDFKAKQLTLNPAIKLFNGLMYRNIKRHNLSTSEAQFMENSVFITSALYGIIPAMTLISPHRLDFNTKIKINNNSLKVFWRENYDTFMQSDDIMVSLLSNEFETVFSPKERQKLIHLNFIEDRDGQLKTHSTISKKARGKCLTAMMENNCQTLEHLKQLRFDGFCYDNELSDSKQLTFVKKQT

SEQ ID NO: 3399 - DNA, 729 bp, Streptococcus pyogenes
atgctaacctttttaattccaaccgcaaaagaaatgacgatccctaaggaatctcacccacacctccttccacaagacagccaagccattttaaaaatcatggcagctatgaccacggaggacttggccaaatcatatcgtatcaaagaagagtcagctaaaaaagaacagcaacgctggcaagacatggcctctcaacaaagcttggcttaccctgcctaccaactgttcaatggccttatgtaccgccatatcaagcgcgataagctcactacccaagaacaggcttacctcacccagcaggtttacatcacctcatccttttacggtatcattcccgctaatcatcctatcgcagagcaccgccatgattttcacaccagaataaaaattgaaggacaaagcctcaagtcttactggcggccctgttataatcagtttgccaaagagcatccccaagtgatttcccttttatccagtgaatttgacgatgtcttttccaaagactgtaaacaattgtggataagtcccaagtttatggcagaaaaagagggccaattcaaaacccattccaccatttcaaaaaaggcacgaggtgcatttctcactgcctgtatggaaaataattgccaaactgttgacagccttaaaagccttgtctttgctggtttttactaccatccagacctatcaacagatcatgaatttgtctatatcaaaaaagaggcc

SEQ ID NO: 3400 - protein, 243 aa, Streptococcus pyogenes
MLTFLIPTAKEMTIPKESHPHLLPQDSQAILKIMAAMTTEDLAKSYRIKEESAKKEQQRWQDMASQQSLAYPAYQLFNGLMYRHIKRDKLTTQEQAYLTQQVYITSSFYGIIPANHPIAEHRHDFHTRIKIEGQSLKSYWRPCYNQFAKEHPQVISLLSSEFDDVFSKDCKQLWISPKFMAEKEGQFKTHSTISKKARGAFLTACMENNCQTVDSLKSLVFAGFYYHPDLSTDHEFVYIKKEA

SEQ ID NO: 3401 - DNA, 906 bp, Streptococcus agalactiae
atgaacggtgtaatatgttactatatagtaataataggaggattaactatgtcgtatccatacaaagccaatcattccattgaatcaatcaccttaaaagtaaatgacctcgaaaacctcgtaaacttctatagcgatatcattgggttaactgttattgacaaatcaagcactagagccttactaggggtaaatcaaaaaatccctcttattatccttgaaaaaactgaacttgaaaagcatagtacctatggcctttatcacactgctattttagtaccagatgaataccatctcagtctagctctaaatcatttattatctcagcatatccctctagagggtggagctgaccatggctatagcaatgctatctatctaagtgatcctgaaggtaatggaattgaaatttataatgataaggatatctctatgtgggatatcagagagagtggacaaattattggtattactgaaagactagatattgacaatttacttgacagccttgtcaacgttcctaataattataagctttctgaaaaaactagtattggtcatattcatttgagtgttaaagatgctaagattagctcaaaactctatcaaaatgtttttggccttgatgagaaatttgcaatcccgacagctagttggattgcatccggcaactaccatcatcatctagcctttaataattgggctggtccaaatctttctaaaaaccaagaagatagacccggaatttccttattgacaattgcttacaatgatgacaacctttttagagatagcttaaaaaaagcgcaactttaccaactgactttccttgaaaaacaagatcattattatattattgaagattttgatggcatccgaattaaagttgttctaaaaccagagaat

SEQ ID NO: 3402 - protein, 302 aa, Streptococcus agalactiae
MNGVICYYIVIIGGLTMSYPYKANHSIESITLKVNDLENLVNFYSDIIGLTVIDKSSTRALLGVNQKIPLIILEKTELEKHSTYGLYHTAILVPDEYHLSLALNHLLSQHIPLEGGADHGYSNAIYLSDPEGNGIEIYNDKDISMWDIRESGQIIGITERLDIDNLLDSLVNVPNNYKLSEKTSIGHIHLSVKDAKISSKLYQNVFGLDEKFAIPTASWIASGNYHHHLAFNNWAGPNLSKNQEDRPGISLLTIAYNDDNLFRDSLKKAQLYQLTFLEKQDHYYIIEDFDGIRIKVVLKPEN

SEQ ID NO: 3403 - DNA, 855 bp, Streptococcus pyogenes
atgatatacccttacaactcaaccatctctttaggaacggtttctctaaatgttaccgatctagcaaagatgacaaccttttacacaagtattatcggtttacaggttctctcacaagacacgacatctcgtcaattgactacagacggtaaaaccgttatcttagagttacgacaaacacctttaccaggcgataaagcttatggtctttatcacacagcctttttagttcctgatcgtcatagcttgggacttgttctcaatcatttcttaaccagaagtatctctttagaaggagcagctgatcacggccatagcgaagctatctacctcagcgatcctgagggtaatgggattgaaatttatcatgacaaagctgttgagcattgggatatccgcgacaatggtcaaattattggtgtgactgagcccacggataccaaaagcatattggagcagttgacagatatccccaagcactttttactagctcaagacacacgcattcgccatgtccatctgagtgtcaaaaatgctctggcttcttcacttctctatcaaaaggtttttgatttaggcgataaaatgaccattccaagtgctagctggattgcttcagggaactactatcatcaccttgcattcaatcactggtcagccccttacctcaaaaaacaccaagaaggtgctccaggcttagccttcttgaccattcacattgagacgcccctgcttttttcagccactctcaaaaaagcaagattacacggcctagctattttacaagaagattcttcttctttcacgacagaagacgaggaaggtatccgtgtgaacgtcatccttggacaagac

SEQ ID NO: 3404 - protein, 285 aa, Streptococcus pyogenes
MIYPYNSTISLGTVSLNVTDLAKMTTFYTSIIGLQVLSQDTTSRQLTTDGKTVILELRQTPLPGDKAYGLYHTAFLVPDRHSLGLVLNHFLTRSISLEGAADHGHSEAIYLSDPEGNGIEIYHDKAVEHWDIRDNGQIIGVTEPTDTKSILEQLTDIPKHFLLAQDTRIRHVHLSVKNALASSLLYQKVFDLGDKMTIPSASWIASGNYYHHLAFNHWSAPYLKKHQEGAPGLAFLTIHIETPLLFSATLKKARLHGLAILQEDSSSFTTEDEEGIRVNVILGQD

SEQ ID NO: 3405 - DNA, 822 bp, Streptococcus agalactiae
gtgtacaattatattttggaggataatatggtaaggctaatatttagtgatattgatggtactttaattaacagtaattttaaagtaacacctaagacacggcagggaattaaacaaatagtagctcaaggggctactttcgttcccatatcagctaggatgcctgaggcaattactccgattatggaacaaattggaatagattcttatattatttcctataatggggctttaatacaagatatgcaacaaaaaacaattgcttcccacacaatggatggtcaagttgccttacaagtttgttcttatgtaagcaagcattattcgaaaattgcatggaatgtctatcgttatcatgaatggtattcctgtgataaagaaaatgagtgggtccaaaaagaggaggagattgttggtttacaatctaaagagatgagtttgatggagttagagaagcaagataggattcataaacttctcttgatgggagaaccatctctgatgggagaattggagaacactttgaaagctcaatatccacatttatcaatcgcacaatctgctccttactttattgaaataatggctccaggtattgaaaaaggaaaatctgctaaaactttagcagactatttagatatttctcttgcagactctattgcgtttggtgataactataatgatttaaatctgcttgaaattgtgggtaaaggttttgtcatggggaatgctcctaaagatttacaagagagaattggaaatgtaactcaggataatgataacgatggtatttattatgctttagtagagtatatggaaaat

SEQ ID NO: 3406 - protein, 274 aa, Streptococcus agalactiae
MYNYILEDNMVRLIFSDIDGTLINSNFKVTPKTRQGIKQIVAQGATFVPISARMPEAITPIMEQIGIDSYIISYNGALIQDMQQKTIASHTMDGQVALQVCSYVSKHYSKIAWNVYRYHEWYSCDKENEWVQKEEEIVGLQSKEMSLMELEKQDRIHKLLLMGEPSLMGELENTLKAQYPHLSIAQSAPYFIEIMAPGIEKGKSAKTLADYLDISLADSIAFGDNYNDLNLLEIVGKGFVMGNAPKDLQERIGNVTQDNDNDGIYYALVEYMEN

SEQ ID NO: 3407 - DNA, 807 bp, Streptococcus pyogenes
atgtctatcaaactggttgctgtcgatattgatggcacattactcactgatgaccgtcgaattacagatgatgtttttcaagctgtccaagaggctaaagcccaaggggttcatgtggtgattgctactggcagacctattgccggagtgatttcattactcgaacaattagaactcaaccacaaaggaaaccacgttatcacttttaatggtggcttggtgcaagatgccgagaccggcgaagaaattgttaaagaattgatgacttacgacgattatctggaaacggaatttttgagccgaaaattaggagttcacatgcatgccattaccaaagaaggtatttacactgccaatcggaatattggaaaatacacagttcatgaatcgactttggtaaacatgcctattttctatcgcactcccgaagaaatgaccaataaagaaatcatcaaaatgatgatgattgatgaacctgaccttttggacgcggccatcaagcaaattcctcaacatttctttgataagtacaccatcgtcaagtcaacccctttttatttagagttcatgccaaaaaccgtcagcaagggtaatgccatcaaacacttagctaaaaaactcgggctagatatgtcacaaaccatggccatcggggatgctgaaaatgatcgtgctatgttagaagtcgttgccaaccctgttgtcatggaaaatggggttcctgaattgaaaaaaatagccaaatacatcaccaaatccaacaatgacagtggtgtggcacatgctattcgcaagtgggtattaaac

SEQ ID NO: 3408 - protein, 269 aa, Streptococcus pyogenes
MSIKLVAVDIDGTLLTDDRRITDDVFQAVQEAKAQGVHVVIATGRPIAGVISLLEQLELNHKGNHVITFNGGLVQDAETGEEIVKELMTYDDYLETEFLSRKLGVHMHAITKEGIYTANRNIGKYTVHESTLVNMPIFYRTPEEMTNKEIIKMMMIDEPDLLDAAIKQIPQHFFDKYTIVKSTPFYLEFMPKTVSKGNAIKHLAKKLGLDMSQTMAIGDAENDRAMLEVVANPVVMENGVPELKKIAKYITKSNNDSGVAHAIRKWVLN

SEQ ID NO: 3409 - DNA, 960 bp, Streptococcus agalactiae
atgaaaaaaataacaaagatggtaattagcagcgttttagcaactgttctgatgacagcttgttcacaatcttctcaaaatggtcaatctgatgtaaaacatattggtattttacaatatgtagaacatccctctctaactgccactaggaaaggatttataaaagaattagctaaagaaggctataaagatggcaaaaatatcaaaattgagtataagaatgctcaaggggatcagtcaaatatccaatcaatttctgaaaaactcattaaagataataaattagtattgggaattgcgactccggcggctcaatcgttgacaacggtgtcaacagaaacacctattttatttacagcagtgacagatccggtatcagccgaattagtaaaatcaatgaaaaaacctgaaggtttagcgactggtacaagtgacatgtctccaattaaaaagcaagtatcccttttgagaaaagtaatgcctaaggttaaacgtgttggtattatgtataccactagcgagcgtaactcagaagttcaggtaaaacaagcaaaaaaaatcttccaagaggcggggattaaaacaagtgttaaaggtatttcttccactaatgatgtacaagatactgctaagagtttaatgtctaaaacagaggttatttttgtaccaacagataatattatagccagctcagtaacgctgttagggaatctatcgaaagaattaaaagtgcctgttgtgggaggttcagcagatatggtaccaagtggtttgctcttttcttatggggctgattatgaggctttaggtcgtcaaacggcaagacaagctgttaaaatcctcaaaggtaaagacgtcgctaaagttccttcagaatatcctcaaaatctaaaagtagtagttaatgaagatatggcaaaagagcttggaattgatgtttcaagtattaaaaataataaa

SEQ ID NO: 3410 - protein, 320 aa, Streptococcus agalactiae
MKKITKMVISSVLATVLMTACSQSSQNGQSDVKHIGILQYVEHPSLTATRKGFIKELAKEGYKDGKNIKIEYKNAQGDQSNIQSISEKLIKDNKLVLGIATPAAQSLTTVSTETPILFTAVTDPVSAELVKSMKKPEGLATGTSDMSPIKKQVSLLRKVMPKVKRVGIMYTTSERNSEVQVKQAKKIFQEAGIKTSVKGISSTNDVQDTAKSLMSKTEVIFVPTDNIIASSVTLLGNLSKELKVPVVGGSADMVPSGLLFSYGADYEALGRQTARQAVKILKGKDVAKVPSEYPQNLKVVVNEDMAKELGIDVSSIKNNK

SEQ ID NO: 3411 - DNA, 894 bp, Streptococcus agalactiae
atgttagatattatcttatccggaatttcgcaaggattactttggtcaattatggcaattggcgtgtttatcacttttcgtatcttagacatagccgatctctctgcagagggtgctttccctatgggggctgcagtttgcgctttatgtatcgttaatgatattaatccaattgtggcaaccatagcgggcatgttaggtggtatgttggcaggactagtatcgggttttcttcatactaaaatgaaaataccagccctcctcacaggtattattacgttgacaggactttactctattaatttacttgttttaggaagatcaaacgtctcttttgctctcaaaaatactttggttacaatggtaacaagattaggtttaaataaactttcagcagttttattaattggaattgtttgtgtaggcttggttatcttaattttgtatctctttttaaatacccaactaggattagctttaagagcgacaggtgataatgaggctatgggacaagccaatagtattaaagtagatcggatgaaaatgctaggatatatgattgggaatggcctgattgctttatctggtgcacttttagcgcaaaataatggctatgcagatttgaatatgggagtgggtacaatcgttattggattagcttcaattatcttggcagaagtaatgataaaatacttacctcttggcaaaaggttatggtcaattgtattagggtctgttttataccgtatgattattgttttcatattaacaaccgatattgatgcacagatgataaagttggtttcagcaattttgttggctctcattttgtatgtcccagaattacgagctaaactaggagtaaaaacctctaaatcacttacaaaggaagga

SEQ ID NO: 3412 - protein, 298 aa, Streptococcus agalactiae
MLDIILSGISQGLLWSIMAIGVFITFRILDIADLSAEGAFPMGAAVCALCIVNDINPIVATIAGMLGGMLAGLVSGFLHTKMKIPALLTGIITLTGLYSINLLVLGRSNVSFALKNTLVTMVTRLGLNKLSAVLLIGIVCVGLVILILYLFLNTQLGLALRATGDNEAMGQANSIKVDRMKMLGYMIGNGLIALSGALLAQNNGYADLNMGVGTIVIGLASIILAEVMIKYLPLGKRLWSIVLGSVLYRMIIVFILTTDIDAQMIKLVSAILLALILYVPELRAKLGVKTSKSLTKEG

SEQ ID NO: 3413 - DNA, 801 bp, Streptococcus agalactiae
atgtcattacttgaattagtcaatctgcacaaaacttttgaaaaaggaactgtcaatgagaaccatgttttacgtggtttagatttaacgattgaagacggtgattttatttcagtaattggaggtaacggtgcgggaaaatcaaccctccttaactgtatcgctggtctgatccctattgatcagggggcaatcacattagacaaccaatcaattactaaagactctgtagaaaaacgatctaaggatattagtcgagtcttccaggatcctagaatgggaactgcaacaaatttgacgattgaagaaaatatggcaattgcacataaaagaggcaataagcgtcacatttttagacagtcagtgactgacgatgaccgtcaactatttaaaaagtctctatcacaattaggtctaggcttagaaaatcgaatgaagactgatgctgcatttttatctggcggtcagcgtcaagccctcacgttagctatggcaactcttgttcgtcccaaattattattactggatgaacatacagcggctctagatcccaaaactagcgatatggttatggaattaacacagaaagtgatagaagaacaacgattgacagccttaatgattacgcacaatatggagcatgccattgcttatggtaatcgtctcgtgatgctctaccacgggaaaattgttgttgatgttaaaggagaagcaaagagaaacttaacagttgcagaattaatggaacttttccataaaaactcaggtcaacagttgatagatgatgcccttgtcttaggt

SEQ ID NO: 3414 - protein, 267 aa, Streptococcus agalactiae
MSLLELVNLHKTFEKGTVNENHVLRGLDLTIEDGDFISVIGGNGAGKSTLLNCIAGLIPIDQGAITLDNQSITKDSVEKRSKDISRVFQDPRMGTATNLTIEENMAIAHKRGNKRHIFRQSVTDDDRQLFKKSLSQLGLGLENRMKTDAAFLSGGQRQALTLAMATLVRPKLLLLDEHTAALDPKTSDMVMELTQKVIEEQRLTALMITHNMEHAIAYGNRLVMLYHGKIVVDVKGEAKRNLTVAELMELFHKNSGQQLIDDALVLG

SEQ ID NO: 3415 - DNA, 1008 bp, Streptococcus agalactiae
atgggtatcggtattattattgccagccatggtaaatttgctgaaggtattcatcaatcaggttcaatgatctttggtgaacaagaaaaagttcaagttgtaactttcatgccaaatgaaggaccagatgatttgtatggacacttcaacaatgctatcgcacaatttgatgctgatgatgaggtgcttgtgttagctgacctttggagtgggtcaccatttaaccaagcaagccgtgttatgggagaaaatcctgaacgtaaaatggctatcatcactggtctcaatttgccaatgcttatccaagcctatactgagcgtatgatggacgctaatgcaggtgttgaacaagttgccgcaaatattattaaagagtctaaggaaggtatcaaagcccttccagaagaacttaatcctgttgtagaagctactcctgtagcaggtgttcctgcagatgttcctgcggaagttaaacaaagtggatctatccctgaaggaactgttattggagatggcaagcttaaaattaatcttgctcgtattgacacacgtcttttacatggtcaagttgcaactgcatggactccagcatcaaaagcaaaccgtattatcgttgcttctgatgaagtttctaaagatgaacttcgtaaacaattgattaagcaagctgctcctggaggagtcaaagcaaacgttgtcccaattagtaaattaattgaagtagctaaagacccacgtttcggaaacacacgtgccttgatcttatttgaaactgtacaagatgcactccgtgcaattgaaggtggtgtggaaatccctgaattgaacgttggttcaatggctcactcaactggtaaaacaatggtaaacaacgttctttcaatggataaagacgatgttgctgcctttgaaaaattacgtgacttaggtgtatcatttgatgtacgtaaagtaccaaatgacgctaaaaagaatttgtttgatttaatcaacaaagcaaacgtaaaa

SEQ ID NO: 3416 - protein, 336 aa, Streptococcus agalactiae
MGIGIIIASHGKFAEGIHQSGSMIFGEQEKVQVVTFMPNEGPDDLYGHFNNAIAQFDADDEVLVLADLWSGSPFNQASRVMGENPERKMAIITGLNLPMLIQAYTERMMDANAGVEQVAANIIKESKEGIKALPEELNPVVEATPVAGVPADVPAEVKQSGSIPEGTVIGDGKLKINLARIDTRLLHGQVATAWTPASKANRIIVASDEVSKDELRKQLIKQAAPGGVKANVVPISKLIEVAKDPRFGNTRALILFETVQDALRAIEGGVEIPELNVGSMAHSTGKTMVNNVLSMDKDDVAAFEKLRDLGVSFDVRKVPNDAKKNLFDLINKANVK

SEQ ID NO: 3417 - DNA, 990 bp, Streptococcus pyogenes
atgggtatcggtattattattgccagccatggtaaatttgctgaaggtattcatcaatctggttctatgatttttggtgaacaagagaaagttcaagttgttactttcatgccaaacgaaggaccagatgatttgtatggacacttcaacaatgctatccaacaatttgatgctgatgatgaaatccttgtgctagctgacctttggagtggttctccatttaaccaagctagtcgtgtggcaggtgaaaatcctgaccgcaaaatggcgatcatcactggtctcaacttgcctatgcttattcaagcttacactgaacgtcttatggatgctggtgcaggtgttgaacaagttgctgcaaacatcattaaggaatctaaggacggtatcaaagcccttcctgaagaccttaacccagttgaagaaactgctgcaactgaaaaagttgttaacgcacttcaaggagctattcctgctggaactgtcatcggagatggtaaattaaagatcaatcttgctcgtgttgacactcgtcttttacacggtcaagttgcaacagcatggactccagcttctaaggctgaccgtatcattgttgcttctgatgaggttgctcaagatgaccttcgcaaacaattgatcaaacaggctgcacctggtggtgtcaaagctaacgttgttccaattagcaaattgattgaagcttctaaagatcctcgttttggtaacacacacgcacttattcttttccaaacccctcaagatgcccttcgagcggttgaaggtggtgttgaaatcaacgaattgaacgttggttcaatggctcactcaactggtaaaacaatggttaacaacgttttatcaatggacaaagaagacgttgctacttttgaaaaattacgcgacctaggtgttacattcgacgtccgtaaagttcctaacgattctaagaaaaacttatttgagcttatccaaaaaactaacattaaa

SEQ ID NO: 3418 - protein, 330 aa, Streptococcus pyogenes
MGIGIIIASHGKFAEGIHQSGSMIFGEQEKVQVVTFMPNEGPDDLYGHFNNAIQQFDADDEILVLADLWSGSPFNQASRVAGENPDRKMAIITGLNLPMLIQAYTERLMDAGAGVEQVAANIIKESKDGIKALPEDLNPVEETAATEKVVNALQGAIPAGTVIGDGKLKINLARVDTRLLHGQVATAWTPASKADRIIVASDEVAQDDLRKQLIKQAAPGGVKANVVPISKLIEASKDPRFGNTHALILFQTPQDALRAVEGGVEINELNVGSMAHSTGKTMVNNVLSMDKEDVATFEKLRDLGVTFDVRKVPNDSKKNLFELIQKTNIK

SEQ ID NO: 3419 - DNA, 810 bp, Streptococcus agalactiae
atgacaaagaaaattatcgccgtagatttagacggtactctattacataataataacactatttctgactacaccgctgatacacttcgaaaagttcaagctcaaggacacaaagtaattattacaaccggacgcccataccgtatggcactcgctcattatttacgcctagatttaaaaacaccaatgataaattttaatggtgctttaactcatatccccgaaaaaaagtgggcgtttgagcgtagtgcaacgattgataaaaaattactccttgaaaccttaaatttatcagatgctatccaagccgattttattgctagcgaataccgtaaaaatttttacattactatggataatcgtgataaaattaacccacaattattcggtgtcaatgaaattactgataaaatggcattagatgttactaaaatcacacgcaatccaaatgctctattgatgcaaacacgtcataaagataagtatgagttagctaaagagttacgacaacattttaatcacgaactagaagtagattcttggggtggtccattgaatatactcgaattttcacctaaaggtgttaacaaagcttatgctctcaaacatttattaaaatcactcaatctttcacaagaaaatttgattgcctttggagatgaacacaatgacaccgagatgctggcctttgcacatacaggatatgctatgaaaaatgctaatccaactctacttccatatgccgaccaacaaatccaatggacaaacgaagaagatggtgttgctaaaactctagaaaaattattattg

SEQ ID NO: 3420 - protein, 270 aa, Streptococcus agalactiae
MTKKIIAVDLDGTLLHNNNTISDYTADTLRKVQAQGHKVIITTGRPYRMALAHYLRLDLKTPMINFNGALTHIPEKKWAFERSATIDKKLLLETLNLSDAIQADFIASEYRKNFYITMDNRDKINPQLFGVNEITDKMALDVTKITRNPNALLMQTRHKDKYELAKELRQHFNHELEVDSWGGPLNILEFSPKGVNKAYALKHLLKSLNLSQENLIAFGDEHNDTEMLAFAHTGYAMKNANPTLLPYADQQIQWTNEEDGVAKTLEKLLL

SEQ ID NO: 3421 - DNA, 810 bp, Streptococcus pyogenes
atgactaaaaaattgattgccattgatttggatggaaccttattacatcatgacaacaccatctctacctatactcaaaaaaccatcaaagctgtccaagacaagggccaccacgtcattatttcaacaggccgtccttaccgcatggcactgggctactatctgcagctcaatttaaagaccccaatcatcacttttaatggggccttgacccacatgcctgaacaaaaatgggcctatgaacataatgtcactttggacaaaggctacctactaaggttactaaaatatcaggatgatttccagatggattttattgccagtgagtatcgaaaaaatgtctacatcaccatgaccaatccagaaagtatcgacccgcaactctttggtgttgatgaaattactcaggacatggcattagagattaccaaaatcactcgaaatccaaacgccttattgatgcaaacgcatcacgaagacaagtatgccttagctaaaaacatgcgtgcttgcttcaaagatgaaattgaaattgattcttggggaggccctctcaacattcttgaaatttcgtctaagaatgtcaataaagcttacgctctgaactatctccttggaatttacaatatggataaaaaggatttaatcgcctttggtgatgaacacaatgacactgagatgctagcttttgctggaactggttatgctatgaaaaatgctagccctgtgctactgccttatgctgatcagcagcttaatttttccaacgaagaagacggtgttgccaaaaaattggaagaacttttcttg

SEQ ID NO: 3422 - protein, 270 aa, Streptococcus pyogenes
MTKKLIAIDLDGTLLHHDNTISTYTQKTIKAVQDKGHHVIISTGRPYRMALGYYLQLNLKTPIITFNGALTHMPEQKWAYEHNVTLDKGYLLRLLKYQDDFQMDFIASEYRKNVYITMTNPESIDPQLFGVDEITQDMALEITKITRNPNALLMQTHHEDKYALAKNMRACFKDEIEIDSWGGPLNILEISSKNVNKAYALNYLLGIYNMDKKDLIAFGDEHNDTEMLAFAGTGYAMKNASPVLLPYADQQLNFSNEEDGVAKKLEELFL

SEQ ID NO: 3423 - DNA, 582 bp, Streptococcus agalactiae
atgaaaaagttaatttggagtcatctttttgccatagtcagtattttagggatatggtattatcatgtaaaaattgatcatttgatggtaattctattggcatcagtcttgtcgttagagatgggattcattgcttattatagtcgtaatatttttattcgtcttttagcaagtttaggtcttttatttttttacccacagagtttagggatttttcttagtttggtgagcttagagtggtcaacaaaagacatttggcagtctaatcactttatgcaatatatggcataccttcttgcaattctttttattatctcttcagctttactaagcttgaagctattggtaaatgcatatgatattagtaaaaggtatcaattagcaactgttatacctgtaatgctttttagtagttttgccttttgcttagaaaaatcaggatcattaggtttagaaggaatcattttaaatccgtcagcattttttaatggaatacagactaatatggctaaccttgattttaaagccttgtcttgcctttttttagtacaattattactttggggaatattaatggaagac

SEQ ID NO: 3424 - protein, 194 aa, Streptococcus agalactiae
MKKLIWSHLFAIVSILGIWYYHVKIDHLMVILLASVLSLEMGFIAYYSRNIFIRLLASLGLLFFYPQSLGIFLSLVSLEWSTKDIWQSNHFMQYMAYLLAILFIISSALLSLKLLVNAYDISKRYQLATVIPVMLFSSFAFCLEKSGSLGLEGIILNPSAFFNGIQTNMANLDFKALSCLFLVQLLLWGILMED

SEQ ID NO: 3425 - DNA, 108 bp, Streptococcus agalactiae
atggggaattattggaattgtatcattagtttcaagttttggtattcatattggtcgttatgcccgtctaaattcatgggatatcttaacgaagccacaagtggtaat

SEQ ID NO: 3426 - protein, 36 aa, Streptococcus agalactiae
MGNYWNCIISFKFWYSYWSLCPSKFMGYLNEATSGN

SEQ ID NO: 3427 - DNA, 621 bp, Streptococcus agalactiae
ttggaggttagaatgaaagtaaaactatttgcgatacatctattttttattgttatttcttttgggattaaatattatcatttgcagggaccaaatttgatttggaatatgactctagccctaatagcgttagattttgcataccttactagtttatttaagaaaaaaattcttatcggtctttttgcacttgcttggttttttttctatcctaataccttttatatgttgacggatatcattcatatgcattttgtcggagacgttctttataataagacaaatttaatactttatatcttgtatgtatctagtatcttgtttggttttttatcaggtatcgaaagtttttctgtgattatgcgtaaatttagaattagcaatatatttttaagatggggaattattggaattgtatcattagtttcaagttttggtattcatattggtcgttatgcccgtctaaattcatgggatatcttaacgaagccacaagtggtaattaacgaacttttagcggttccgagtagggattcattccactttattttaggatttacatttttacaggtattgtgtcttatttttatggattattctgcagggaaaaagcttgaaaag

SEQ ID NO: 3428 - protein, 207 aa, Streptococcus agalactiae
MEVRMKVKLFAIHLFFIVISFGIKYYHLQGPNLIWNMTLALIALDFAYLTSLFKKKILIGLFALAWFFFYPNTFYMLTDIIHMHFVGDVLYNKTNLILYILYVSSILFGFLSGIESFSVIMRKFRISNIFLRWGIIGIVSLVSSFGIHIGRYARLNSWDILTKPQVVINELLAVPSRDSFHFILGFTFLQVLCLIFMDYSAGKKLEK

SEQ ID NO: 3429 - DNA, 678 bp, Streptococcus agalactiae
atgagcgttccaatggtatcaaaaatatcagtcagtgaaaaagcaagaatggccattaatacacttggtagacgtgaaggattagaaaataaagaaattaatcctttctctcctaatgcaactccaaatacttgcttcaaatctctaaaagaggccgagaggttagttgcttcccaattaatagcatctaacttaaccactcccattaaaatacctaagagggtcgttgttaatatcgatagaataatccctccacggataccctttacaataaagaagatggtaatgcttaaaccaatcaaagataataaaatggctggattatcaaacgacactagccctggcgttgctgaagaatttgctgtaatagtagccaatcctttcgcagcaccctttccaacaacatcatacgtcccaggatcaattgaaaatttcaaaaaaccagcatttttaatcccaacgtatgctaaaaaagttccgattcctgctgtaatggctgattttaaagttgttgggatagactcaataatcatctttctaactttcgttaaagtaataatcagagaaatcaaaccacaaataaataccatagctaaggcttcttgccatgtatatcccaatgcaaagacaactgtatatgtaaagaaagcatttaatcccatcccaggagcttgtgca

SEQ ID NO: 3430 - protein, 226 aa, Streptococcus agalactiae
MSVPMVSKISVSEKARMAINTLGRREGLENKEINPFSPNATPNTCFKSLKEAERLVASQLIASNLTTPIKIPKRVVVNIDRIIPPRIPFTIKKMVMLKPIKDNKMAGLSNDTSPGVAEEFAVIVANPFAAPFPTTSYVPGSIENFKKPAFLIPTYAKKVPIPAVMADFKVVGIDSIIIFLTFVKVIIREIKPQINTIAKASCHVYPNAKTTVYVKKAFNPIPGACA

SEQ ID NO: 3431 - DNA, 1419 bp, Streptococcus agalactiae
atggaaaagttttttaagctaaaggaacacgggacgacaattcggactgaaatcactgctggtctaacgactttctttgcaatgtcgtacattttgtttgtaaatccagctattttatctcagactgggatgccagcacaaggagttttcttagcgacgattattggtgccgttgtagctacatctgttatggctttctatgctaaccttccctatgcacaagctcctgggatgggattaaatgctttctttacatatacagttgtctttgcattgggatatacatggcaagaagccttagctatggtatttatttgtggtttgatttctctgattattactttaacgaaagttagaaagatgattattgagtctatcccaacaactttaaaatcagccattacagcaggaatcggaacttttttagcatacgttgggattaaaaatgctggttttttgaaattttcaattgatcctgggacgtatgatgttgttggaaagggtgctgcgaaaggattggctactattacagcaaattcttcagcaacgccagggctagtgtcgtttgataatccagccattttattatctttgattggtttaagcattaccatcttctttattgtaaagggtatccgtggagggattattctatcgatattaacaacgaccctcttaggtattttaatgggagtggttaagttagatgctattaattgggaagcaactaacctctcggcctcttttagagatttgaagcaagtatttggagttgcattaggagagaaaggattaatttctttattttctaatccttcacgtctaccaagtgtattaatggccattcttgctttttcactgactgatatttttgataccattggaacgctcattggtaccggagaaaaagttggtatcttagcaacgactggtgataatcatgaatctaagagtttagacaaagcactctattcagacttaattgggacaacttttggtgctatttgtggaacatctaacgttacaacctatgttgagtcagcagcaggaatcggagctggtggtcgtacaggattgacagccttagtagttgctggtttgtttgctatatctagtttttttagtccactagtatctatcgttccgagtcaagctactgcaccaatattggttattgttggtattatgatgctttcaaatttaaaagatatcaaatgggatgatatgtcagaagctatcccagctttctttacttctctttttatggggtttacttatagcattacttatggtattgcagctggtttcttgacctatacactagctaaagtcatcaaaggacaagcaaaagatattcatgtggtactgtggattttagatatattatttattctaaactttatcagcttggctattttg

SEQ ID NO: 3432 - protein, 473 aa, Streptococcus agalactiae
MEKFFKLKEHGTTIRTEITAGLTTFFAMSYILFVNPAILSQTGMPAQGVFLATIIGAVVATSVMAFYANLPYAQAPGMGLNAFFTYTVVFALGYTWQEALAMVFICGLISLIITLTKVRKMIIESIPTTLKSAITAGIGTFLAYVGIKNAGFLKFSIDPGTYDVVGKGAAKGLATITANSSATPGLVSFDNPAILLSLIGLSITIFFIVKGIRGGIILSILTTTLLGILMGVVKLDAINWEATNLSASFRDLKQVFGVALGEKGLISLFSNPSRLPSVLMAILAFSLTDIFDTIGTLIGTGEKVGILATTGDNHESKSLDKALYSDLIGTTFGAICGTSNVTTYVESAAGIGAGGRTGLTALVVAGLFAISSFFSPLVSIVPSQATAPILVIVGIMMLSNLKDIKWDDMSEAIPAFFTSLFMGFTYSITYGIAAGFLTYTLAKVIKGQAKDIHVVLWILDILFILNFISLAIL

SEQ ID NO: 3433 - DNA, 1458 bp, Streptococcus pyogenes
atggaaaagttttttaagttaagcgaaaatgggacaactgtctcaactgagattatggctggtttaacgaccttttttgccatgtcctatattttgtttgttaacccaagtattttaggtgcagcggggatgccctctaatgctgtctttttggctacgattatcgcagcagccatatcaaccttaattatgggactatttgccaatgtgccttatgcgttggcaccaggaatgggacttaacgcttttttcacttatacagttgtttttgctttaaggttttcatggcaagaagccttggcaatggttttcatttgtggattattcaatatttttattaccgtaaccaagtttcgtaaaagtatcatcaaggcgattccagttagtttacagcatgctattggtgggggaattggtgtctttgtagcttatttaggatttaaaaacgcaaatatcattactttttctatctctgctgaaaatatagtaatggtaaatggtgttgaaccggctaaagcatcggctaaaacatttgcagatggtctattatttgtagacgccaatggtggagttgtacctacgatttctagttttacggattccggtgtattacttgctatttttggtttacttttgacgacagctcttgtgattcgaaattttagaggtgctattttaattggtattgtcgcaacaactcttgtaggtattcctttaggaatagtggatgtgtccaacctcaattttgggatcagccatattggtgaagcttggactgaattaggtacaactttccttgcagctttcgatggtttgagttctctttttagcgattcaagtcgtttaccgctagttttcatgactatttttgcttttagtctatcagatacttttgacacaattggtacctttatcggaactggtcgtcgaacaggtattttctctcaagacgatgagaatgctttggaaaatagtataggctttagttcaaaaatggaccgtgcgctttttgcagatgctatcggtacttctattggggctttggttggaacttcaaatacgactacctatgttgaatcagcagcaggaattgctgaaggtggacgtactggactaacagcagtctccaccgcagtatgcttcttattatcaatattgctattaccgcttgtaggtattgtcccagctgctgctacggctccagctttaattattgtgggtgtcatgatggtgtcttcttttcttgatgttaattggagtaaatttgcagatgctcttccagctttttttgcagctttctttatggcgctgtgttactctatttcctatggtattgccgctgcctttattttctattgtctagtaaaagttgttgagggaaaaacaaaagatattcaccctattatttggggagcaaccttcttgttcattgtaaatttcatcatattaactatctta

SEQ ID NO: 3434 - protein, 486 aa, Streptococcus pyogenes
MEKFFKLSENGTTVSTEIMAGLTTFFAMSYILFVNPSILGAAGMPSNAVFLATIIAAAISTLIMGLFANVPYALAPGMGLNAFFTYTVVFALRFSWQEALAMVFICGLFNIFITVTKFRKSIIKAIPVSLQHAIGGGIGVFVAYLGFKNANIITFSISAENIVMVNGVEPAKASAKTFADGLLFVDANGGVVPTISSFTDSGVLLAIFGLLLTTALVIRNFRGAILIGIVATTLVGIPLGIVDVSNLNFGISHIGEAWTELGTTFLAAFDGLSSLFSDSSRLPLVFMTIFAFSLSDTFDTIGTFIGTGRRTGIFSQDDENALENSIGFSSKMDRALFADAIGTSIGALVGTSNTTTYVESAAGIAEGGRTGLTAVSTAVCFLLSILLLPLVGIVPAAATAPALIIVGVMMVSSFLDVNWSKFADALPAFFAAFFMALCYSISYGIAAAFIFYCLVKVVEGKTKDIHPIIWGATFLFIVNFIILTIL

SEQ ID NO: 3435 - DNA, 519 bp, Streptococcus agalactiae
gtgaagaaatatatgctatggggctgtcagaatcagcaaactgttggaagacagagatatttctggtataatatctctatgttttatactcaaaatgaagaagagcttattgccctagggcaaaaactgggtactgttttaaagtcaggagatatcgtattattgactggtaatttaggtgcaggcaaaacaactcttacaaaaggtattgcaaagggattagacataaaacaaatgattaagagcccaacttacactattgttagagaatatgaagggcgtgtaccactttaccatttggatgtttatcgtattggagatgatcctgattctattgacttagatgacttcttgtttggtcaaggagtaacagttattgaatggggagagttgcttagtgataaccttatcaataactacttagaaattgttattacgaggagcaatcaaggacgtcaggttcagttagaagcttatgggcatcgcgcaagagaaattattgaggcgattcaagatgtc

SEQ ID NO: 3436 - protein, 173 aa, Streptococcus agalactiae
MKKYMLWGCQNQQTVGRQRYFWYNISMFYTQNEEELIALGQKLGTVLKSGDIVLLTGNLGAGKTTLTKGIAKGLDIKQMIKSPTYTIVREYEGRVPLYHLDVYRIGDDPDSIDLDDFLFGQGVTVIEWGELLSDNLINNYLEIVITRSNQGRQVQLEAYGHRAREIIEAIQDV

SEQ ID NO: 3437 - DNA, 459 bp, Streptococcus pyogenes
atgttttatagtgaaaatgaatatactcttaaagcttacggagaaaccctaggtacttatttgtctattggagatgtgattgtattgtctggcgacttaggtgccggtaaaacaacattggcaaaaggtattgctaaagggatggggattagtcaaatgatcaaaagcccaacttatactattgttagagaatatgaaggacgtctacctctttatcacttagatatttaccgtgttggtgatgatccagactctattgatttagatgattttctttttggtaatggtgttaccgttattgagtggggagaattattaggagagggattattacaagactatttgcaaattaccattactaaacgagacaaaggtcgtcaactagacttgttagcgcatggtgagcgctctcgtcagcttctggagataatgtcacatggttcagcaaagtctcgttat

SEQ ID NO: 3438 - protein, 153 aa, Streptococcus pyogenes
MFYSENEYTLKAYGETLGTYLSIGDVIVLSGDLGAGKTTLAKGIAKGMGISQMIKSPTYTIVREYEGRLPLYHLDIYRVGDDPDSIDLDDFLFGNGVTVIEWGELLGEGLLQDYLQITITKRDKGRQLDLLAHGERSRQLLEIMSHGSAKSRY

SEQ ID NO: 3439 - DNA, 558 bp, Streptococcus agalactiae
atgggcatcgcgcaagagaaattattgaggcgattcaagatgtctaaacaatttgctgttgattttatagaagcttcgagagaggaagcatctgcgatccttgaatttttaaatactgttactgaggaaacagattttattttgcatacggtgagcaatcaactatctttgtcagaaatggaaacgtttattgaaaataccttaatgacgaaaaattgcatttgtttgattgctaaattaaaaaataaagtgatcggcttgataacaatcattagtcagtctgatattgaaattgaacacgttggggatctttttattgccgttcagaaggattattggggatatggtattggtcatattctcatggaagaagcaatagaatgggcgtcagataacgatattacacgccgcttagaactatcagtccaaggacgtaatgaacgtgctattcacctctaccaaaaattcggttttgaaatagatgggcttcaaacaagaggtattaaaagagaaaatggagaatttctagacatttacagaatgagtaagttgatagat

SEQ ID NO: 3440 - protein, 186 aa, Streptococcus agalactiae
MGIAQEKLLRRFKMSKQFAVDFIEASREEASAILEFLNTVTEETDFILHTVSNQLSLSEMETFIENTLMTKNCICLIAKLKNKVIGLITIISQSDIEIEHVGDLFIAVQKDYWGYGIGHILMEEAIEWASDNDITRRLELSVQGRNERAIHLYQKFGFEIDGLQTRGIKRENGEFLDIYRMSKLID

SEQ ID NO: 3441 - DNA, 1305 bp, Streptococcus agalactiae
atgaaaatttggaaaaaaataaccttaatgttttctgcaattattttaacaacagtaattgcattgggagtctatgttgcctcagcttataatttttcgactaatgaattgtctaagacttttaaagattttaagctagctaaatcaaaaagtcatgctattgaagaaacaaagccgttttcaatactattaatgggggtggacacaggttcagagcatcgaaaatctaagtggtcaggaaatagcgattctatgatcttagtcactataaatcctaaaactaataaaacaacgatgacaagcttagaacgtgacgtattgattaaattgagtggtcccaaaaataatggacagactggagtagaagcaaagctaaatgcagcctatgcttctggtggtgcggaaatggcattgatgactgttcaagacttattagatattaatgttgattactttatgcaaattaatatgcaaggattagttgatttagtcaatgctgttggtggtataacagtaactaataaatttgactttccaatatcaattgctgccaatgaaccagagtacaaggctgttgttgaaccagggacacataaaataaatggagaacaagcacttgtttattctcgtatgcgctatgatgatccagagggagattatgggcgtcaaaaaagacaacgtgaagtaattcaaaaagtccttaaaaaaatattggcgttaaatagtattagttcatacaaaaaaattctttccgcagtaagtaataacatgcaaactaatattgagatatcatcaaaaacgattcctaatttgttagcttataaagattcattggaacatattaaatcttatcagttgaagggtgaagacgctactttatcagatggtggctcttatcaaattttaactaagaaacatctacttgcagttcaaaatagaattaagaaagaactggataaaaagcgtagtaaaactctgaagacaagcgcgattctatatgaagattactatggtactactgctagtaatgattcttctacttattcatcaacacaagagaataattataatacaacaccttattcagaagcaccaccaagttacagtggtaatactacttatagttctgagactaatcaaacaactcatcaaaattactataatagtagcactcctgctagtaactatagcagtaacactaacacaggtcaggctgattcaagtggaagtgtcaataatcataacggggctgcaacgcctaatccaaacacaggaacgcaaccagtaccaggtcaaactaatcca

SEQ ID NO: 3442 - protein, 435 aa, Streptococcus agalactiae
MKIWKKITLMFSAIILTTVIALGVYVASAYNFSTNELSKTFKDFKLAKSKSHAIEETKPFSILLMGVDTGSEHRKSKWSGNSDSMILVTINPKTNKTTMTSLERDVLIKLSGPKNNGQTGVEAKLNAAYASGGAEMALMTVQDLLDINVDYFMQINMQGLVDLVNAVGGITVTNKFDFPISIAANEPEYKAVVEPGTHKINGEQALVYSRMRYDDPEGDYGRQKRQREVIQKVLKKILALNSISSYKKILSAVSNNMQTNIEISSKTIPNLLAYKDSLEHIKSYQLKGEDATLSDGGSYQILTKKHLLAVQNRIKKELDKKRSKTLKTSAILYEDYYGTTASNDSSTYSSTQENNYNTTPYSEAPPSYSGNTTYSSETNQTTHQNYYNSSTPASNYSSNTNTGQADSSGSVNNHNGAATPNPNTGTQPVPGQTNP

SEQ ID NO: 3443 - DNA, 294 bp, Streptococcus agalactiae
atgaaaataggtcgtttaattgcactaggtttagttagtttaggagcgcttgaactttacaaaaatagaaaaactatcaaggattcctatcaaaatacaaaaaatgagacagattcagctaaattaaaattagaacgtatcaaaaatgatcttgctattattagtcaggaaaaagaaaaaatcagattaatttctcaagaactcaatcataaattccaagtgtttaataaagatattcaacctcgtttagaagaaattaatcaacgcatggctaaatatcaagagaaagacgaa

SEQ ID NO: 3444 - protein, 98 aa, Streptococcus agalactiae
MKIGRLIALGLVSLGALELYKNRKTIKDSYQNTKNETDSAKLKLERIKNDLAIISQEKEKIRLISQELNHKFQVFNKDIQPRLEEINQRMAKYQEKDE

SEQ ID NO: 3445 - DNA, 354 bp, Streptococcus pyogenes
atgaaagttaaaaccgtgatagccgtcggattattatcttttaccgcttacaaagcatatcaaaaacgttgtaccataaaagagctgttatccatcagtagacaagcaaaagatgctgcccaacttgatttagataacattaaagcaaaccttgacctcattcacagtcaaggaaaagtaattcaaaatattagtcaggacttggcccataaatggcgctactttaaccaagagacacaagcacacctcactgaaatccaaaatcgtatggccaaatatcaagaagatagtgagctaatttctagtgaatcacctacttgccaaaccgtcattttaactaacaaccattccaga

SEQ ID NO: 3446 - protein, 118 aa, Streptococcus pyogenes
MKVKTVIAVGLLSFTAYKAYQKRCTIKELLSISRQAKDAAQLDLDNIKANLDLIHSQGKVIQNISQDLAHKWRYFNQETQAHLTEIQNRMAKYQEDSELISSESPTCQTVILTNNHSR

SEQ ID NO: 3447 - DNA, 417 bp, Streptococcus agalactiae
atggataattgtattttttgtaaaatcatcagtggagaaatcccttcatcaaaagtttatgaagatgatgaagtattagcttttctcgacattacacaaactacgaccgggcacacccttcttattcctaaaaaacatgttcgaaatgtgttagagatggatgaaaaaactgcacagataacctttgaacgcttgcctaaagtggcgcgtgctgtccaagctgctacaaaagccaaaggaatgaatattattaacaacaatgaggaaattgctggacaaactgtttttcatgcacacgtccaccttgttccccgctttgatgaatcagacggtatcaaaattcactacactactcatgaacccgactttgaggcacttgcaaaattagccaaagaaattagaaaagagattcaatta

SEQ ID NO: 3448 - protein, 139 aa, Streptococcus agalactiae
MDNCIFCKIISGEIPSSKVYEDDEVLAFLDITQTTTGHTLLIPKKHVRNVLEMDEKTAQITFERLPKVARAVQAATKAKGMNIINNNEEIAGQTVFHAHVHLVPRFDESDGIKIHYTTHEPDFEALAKLAKEIRKEIQL

SEQ ID NO: 3449 - DNA, 417 bp, Streptococcus pyogenes
atggaaaattgtattttttgcagcatcattcaaggggatatcccctcttcgaaagtctacgaagatgagcaggtcctcgcctttttagatatctcacaaactacaaaagggcatactctagtcattcctaagcaacatgttcgtaacttactagagatgactgctgagacagctagtcatctctttgctcgtattcctaaaattgctcgtgctatccagtcagctactggcgctactgccatgaatatcattaacaataacgaagccttagcgggacaaactgttttccatgctcatgttcatctcgttcctcgttataatgaagaagacggtatctcaattcaatacaccactcatgagcctgactttcctgtcttggaaaagctcgcccgacaaatcaatcaggaggttagttca

SEQ ID NO: 3450 - protein, 139 aa, Streptococcus pyogenes
MENCIFCSIIQGDIPSSKVYEDEQVLAFLDISQTTKGHTLVIPKQHVRNLLEMTAETASHLFARIPKIARAIQSATGATAMNIINNNEALAGQTVFHAHVHLVPRYNEEDGISIQYTTHEPDFPVLEKLARQINQEVSS

SEQ ID NO: 3451 - DNA, 537 bp, Streptococcus agalactiae
atgataattgagatttatcatagaaggaaaactattttgaaattaaataaaataatattatctactgcagctcttactgctctctttttaggatataatagcgttactgcggatacatataataactatcagccacatagatcaaataatatggatttaactgaggaatataactataataaccagatagaacttcaggagcgtataaaaaaactaaatataccttttaaagaaaaacttgccttacttagaaaggttaaatcaagacaagattcttatgtattagacacattaagaaaagaagttgaaaataaaaacagtgagtattcagaactagagcaagaatatcaaagaatttcagctcttattgatgctaagtttccgcaagggaaatctagtttagcagaaaaattacataaagaactaatttgggacttggatggtgttaaatatgatgagggtatttctaagagaactgctctaaaaaaattagaaggtaaaatcaacgaatatactaaaaaatacagttatttattc

SEQ ID NO: 3452 - protein, 179 aa, Streptococcus agalactiae
MIIEIYHRRKTILKLNKIILSTAALTALFLGYNSVTADTYNNYQPHRSNNMDLTEEYNYNNQIELQERIKKLNIPFKEKLALLRKVKSRQDSYVLDTLRKEVENKNSEYSELEQEYQRISALIDAKFPQGKSSLAEKLHKELIWDLDGVKYDEGISKRTALKKLEGKINEYTKKYSYLF

SEQ ID NO: 3453 - DNA, 729 bp, Streptococcus agalactiae
atgacaatgttaaaaattgaaaatgttacaggggggtatgttaatatcccagttttaaaaaatatttcttttgaagtaaatgatggagagttagttggattaattgggcttaatggtgcaggaaaatcaaccactattaacgagattattggtattttgagaccctatcaaggagatattacaattgatggtattagtcttgaagccgaccaagaactttatagaaagaaaataggctttattcctgagacaccaagtctctatgaggagctaactctcagggaacatttagaaacggtagctatggcgtatgatattgccaccgatgaagttatggcacgtgcgcaaaaactattagagatgtttcgtctaacagataaattagactggtttccaatgcatttttcaaagggaatgaaacaaaaggttatgattatttgtgcttttgttgtatctccaagtttatttattgttgatgaaccatttttaggtttggatccactagctatttcagatttgattaatcttctagcagaagaaaaagctaaagggaaatctattttgatgtcaacacacgtattagattctgccgaaaaaatgtgtgatcgttttgttattttacataaaggagaaatacgggcagttggaaccctagaggaattacgggctatttttggagacagtaatgctaatttaaatgacatctacatagctctgacaaaagaggtg

SEQ ID NO: 3454 - protein, 243 aa, Streptococcus agalactiae
MTMLKIENVTGGYVNIPVLKNISFEVNDGELVGLIGLNGAGKSTTINEIIGILRPYQGDITIDGISLEADQELYRKKIGFIPETPSLYEELTLREHLETVAMAYDIATDEVMARAQKLLEMFRLTDKLDWFPMHFSKGMKQKVMIICAFVVSPSLFIVDEPFLGLDPLAISDLINLLAEEKAKGKSILMSTHVLDSAEKMCDRFVILHKGEIRAVGTLEELRAIFGDSNANLNDIYIALTKEV

SEQ ID NO: 3455 - DNA, 723 bp, Streptococcus pyogenes
atgttaaacattaaaaatctaacaggaggatatcacaatatccctgttttaaacgatgtctcattttctgtagacaatggagagttagtcggtttgatcgggctaaatggtgctggaaagtcaacaactatcaacgaaattattggctttttgaagccttatcaaggaagtatttctattgatggtttaactctagcagaaaatgcagttgcctaccgtcaaaaaataggttttatcccagaaactcctagtctctatgaagaattgaccttatcagagcatatcaacaccgtagctatggcttatgatatcgacttagaagtggcacaaaaacgagcacaacctttcttggaaatgtttcgtttaactgacaaacttgaatggtttcctgtcaatttttctaaagggatgaaacaaaaagtcatgattatttgtgcctttgtcattgatccaagtctatttattcttgatgaaccattcttagggttagaccctttagctatttcagacttaatccaaacgctagaagtcgaaaaagcaaaaggaaaatctattttgatgagtacacatgttttggactctgctgaaagaatgtgtgatcgttttgtgattttgcatcatggacaagttcgtgcccaaggaactcttgctgacttgcaagaagcttttggtgaccgttcagcgagcttaaatgatatctatcttgcattaacaaaagaggat

SEQ ID NO: 3456 - protein, 241 aa, Streptococcus pyogenes
MLNIKNLTGGYHNIPVLNDVSFSVDNGELVGLIGLNGAGKSTTINEIIGFLKPYQGSISIDGLTLAENAVAYRQKIGFIPETPSLYEELTLSEHINTVAMAYDIDLEVAQKRAQPFLEMFRLTDKLEWFPVNFSKGMKQKVMIICAFVIDPSLFILDEPFLGLDPLAISDLIQTLEVEKAKGKSILMSTHVLDSAERMCDRFVILHHGQVRAQGTLADLQEAFGDRSASLNDIYLALTKED

SEQ ID NO: 3457 - DNA, 147 bp, Streptococcus agalactiae
ttggttggttattcaaaccttatttttagtattaatatcaccaattttgataaagttaggcttgtcagtttttatgattacattgttaatttttggtctaggaataatcaaatggttggtaataacttacaaggtaaaggtctttta

SEQ ID NO: 3458 - protein, 49 aa, Streptococcus agalactiae
MVGYSNLIFSINITNFDKVRLVSFYDYIVNFWSRNNQMVGNNLQGKGLL

SEQ ID NO: 3459 - DNA, 1032 bp, Streptococcus agalactiae
atgaaaaagttatttaataaacgtcgaagtctctttttaactcaaaatagtaaatatttgagatacgtctttaacgatcattttgtattagtattaatgtttttgtcaggttttttgttatatcagtatagccagttactaaaagactttccaaaaacacattggccaattatcgtgattgtgtcaatcattatcttaatgttactagcgatggggggaatagccagctatttagaaccggctgataaacaatttttacttataaaagaagaagcaataaaggaaattataaattctgctaaaaaacggacttatatcttttggttggttattcaaaccttatttttagtattaatatcaccaattttgataaagttaggcttgtcagtttttatgattacattgttaatttttggtctaggaataatcaaatggttggtaataacttacaaggtaaaggtcttttataacaatcaaaatttgaactgggatgcagctataaatcatgagcaggaaagaaaacagagtatattaaaatttttctctttgtttacaaatgttaaaggaatttcgacaagtgtaaaacgtcgttcatttttagatggtattttaaaacttatttctaaaacgccatcgcgtttatggactaacttatttgtgagggcatttctaagaagctcagattatcttggtttaacaataaggttggtaactttaaatatcttatcagtcatctttgttaacgaaacctacctcgcccttgctctggcatttgtatttaactacttattattgttccaactattagctttaggtcaccattttgattatcaatacatgaatcagctctatccagttagattaaatgctaaagcaagtcagctaaaaggttttctcagagtattatcatatgctgtgacagtaattgatagcatacttataagagaattgaaacctgttatattattgatagttttgatgttaattgtgacggaatattacatcccttacaaaataaagaagatgattgac

SEQ ID NO: 3460 - protein, 344 aa, Streptococcus agalactiae
MKKLFNKRRSLFLTQNSKYLRYVFNDHFVLVLMFLSGFLLYQYSQLLKDFPKTHWPIIVIVSIIILMLLAMGGIASYLEPADKQFLLIKEEAIKEIINSAKKRTYIFWLVIQTLFLVLISPILIKLGLSVFMITLLIFGLGIIKWLVITYKVKVFYNNQNLNWDAAINHEQERKQSILKFFSLFTNVKGISTSVKRRSFLDGILKLISKTPSRLWTNLFVRAFLRSSDYLGLTIRLVTLNILSVIFVNETYLALALAFVFNYLLLFQLLALGHHFDYQYMNQLYPVRLNAKASQLKGFLRVLSYAVTVIDSILIRELKPVILLIVLMLIVTEYYIPYKIKKMID

SEQ ID NO: 3461 - DNA, 1032 bp, Streptococcus pyogenes
atgaaagcattatttctgaaacgccgtcaagactttcaaaaacaacaaaacaaataccttcgttacgtcttaaatgatcactttgttttggtgttgatgtttttattaggctttgctatggtgcagtatggtcagctactaaaccattttccaacgaatcatctacctattcaggtttgccttgggatattgatcccattattgctcagtatgggatctatagcaacgtatctagaagaggcagatcagcatttcttacttccaaaagaagaagaagtgatttcttatatcaaacaagctgagcgactctcttttttgctttggggaactttgcagactgctgtattgctctttttatatcctatttttagacgtttaggtctgtctttatttatttttattatcttagttttgatattattggcactaaaaagagtagtgcttagtcgaaagacaagatattttttgagaggaaatcgtttagattgggcaaaagctgtcgcatttgaaagcaatcgcaagcaaagtattttaaagttttattctctttttacaacagtcaaaggaatttctacaaaagtgaaagaaagaacttatctaaatcctcttttaaaattagttaagcaaactccttcaaacctttggctgtccctttatgctagagcctttttacgtagttcagattatttgggcttatttttacgactaatgctattaagctcattatctgtattttttatccataatctttatttgtcagtaagtttagcactcatttttaactatttagttgtattccaattactttccctttattatcactacgattaccattatatgactagtctttatcctgaaaatagtcggagcaagaagaaaaatatgttaagttttttacgaggtttaagctttttaatgttaatcgtcaatatgctgtgttgctcatcagcgccaaaagcactcattttgattgtaggtatggttttcatagcttgtatatatctaccttataagttaaagaagatcattgac

SEQ ID NO: 3462 - protein, 344 aa, Streptococcus pyogenes
MKALFLKRRQDFQKQQNKYLRYVLNDHFVLVLMFLLGFAMVQYGQLLNHFPTNHLPIQVCLGILIPLLLSMGSIATYLEEADQHFLLPKEEEVISYIKQAERLSFLLWGTLQTAVLLFLYPIFRRLGLSLFIFIILVLILLALKRVVLSRKTRYFLRGNRLDWAKAVAFESNRKQSILKFYSLFTTVKGISTKVKERTYLNPLLKLVKQTPSNLWLSLYARAFLRSSDYLGLFLRLMLLSSLSVFFIHNLYLSVSLALIFNYLVVFQLLSLYYHYDYHYMTSLYPENSRSKKKNMLSFLRGLSFLMLIVNMLCCSSAPKALILIVGMVFIACIYLPYKLKKIID

SEQ ID NO: 3463 - DNA, 798 bp, Streptococcus agalactiae
gtgacaatatcaaatcaagaattgacgcttactcccttaagaggaaaaagtggcaaagcctatattggtacttatccaaatggtgaacgtgtctttgtcaaatataatacgacacctattttgccagccttagctaaggaacagattgcgccacaactactgtgggcacgccgtacaagtaatggcgatatgatgagtgctcaagaatggttagatggtcgaacattgactaaagaagatatgggtagtaaacagattattcatattttattgcgcctgcacaagtctcgtcccttagtaaatcagctgttacaattagggtataaaattgaaaacccttatgatttgttgatggattgggaaaaacaaactcctattcaaatccgggaaaacacttatttgcaatctattgtgactgagttaaagcgtagtttacctgagtttcgaacagaggttgcaacaatcgttcacggagatatcaaacatagcaactgggttattacaacaagtggtttaatttatttggttgattgggattctgttcgtttaacagatcgcatgtatgacgttgcatatattttaagtcattatattccacaaaaacactggaaagattggctgtcttactacggttataaagataatgagaaagtctggagcaaaattatctggtatgggcaattttcatatttatcacagataatcaaatgttttgataaacgagatatggagcatgtcaatcaagaaatttatgaattacgaaagtttagagagttaattaaaaagcataatgcgagt

SEQ ID NO: 3464 - protein, 266 aa, Streptococcus agalactiae
MTISNQELTLTPLRGKSGKAYIGTYPNGERVFVKYNTTPILPALAKEQIAPQLLWARRTSNGDMMSAQEWLDGRTLTKEDMGSKQIIHILLRLHKSRPLVNQLLQLGYKIENPYDLLMDWEKQTPIQIRENTYLQSIVTELKRSLPEFRTEVATIVHGDIKHSNWVITTSGLIYLVDWDSVRLTDRMYDVAYILSHYIPQKHWKDWLSYYGYKDNEKVWSKIIWYGQFSYLSQIIKCFDKRDMEHVNQEIYELRKFRELIKKHNAS

SEQ ID NO: 3465 - DNA, 789 bp, Streptococcus pyogenes
gtgacaacgacggaacaagaacttaccttgactcccttacgtgggaaaagtggcaaagcttataaaggcacttatccaaatggggaatgtgtctttataaaattaaatacgacccctattctacctgccttagcaaaagaacagattgcgccacagttactttgggccaaacgcatgggcaatggtgatatgatgagtgcccaagaatggcttaacggccgtacattgaccaaagaagatatgaacagtaagcaaatcattcatattctattgcgccttcacaaatctaaaaaattagtcaatcaactgcttcagctcaattataagattgaaaacccatacgatttattggttgattttgagcaaaatgcacccttgcaaattcagcaaaattcatacttacaagctatcgttaaagaattaaaacggagcttaccagagttcaaatcagaagtagcaacgattgtgcatggagatattaaacatagcaattgggtgattactactagtggtatgatttttttagtagattgggattctgttcgtctaactgatcggatgtatgatgttgcttacctgttgagccactatattccacggtctcgttggtcagaatggctgtcttattatggctataaaaataatgacaaggttatgcaaaaaattatttggtatggtcaattttctcacctgacacaaattctcaagtgttttgacaagcgtgacatggagcatgtgaatcaggagatttatgccctcagaaaatttagagaaatatttagaaagaaa

SEQ ID NO: 3466 - protein, 263 aa, Streptococcus pyogenes
VTTTEQELTLTPLRGKSGKAYKGTYPNGECVFIKLNTTPILPALAKEQIAPQLLWAKRMGNGDMMSAQEWLNGRTLTKEDMNSKQIIHILLRLHKSKKLVNQLLQLNYKIENPYDLLVDFEQNAPLQIQQNSYLQAIVKELKRSLPEFKSEVATIVHGDIKHSNWVITTSGMIFLVDWDSVRLTDRMYDVAYLLSHYIPRSRWSEWLSYYGYKNNDKVMQKIIWYGQFSHLTQILKCFDKRDMEHVNQEIYALRKFREIFRKK

SEQ ID NO: 3467 - DNA, 633 bp, Streptococcus agalactiae
atgcgagttagaaaacgtaagggtgcagaggaacacttagaaaataatcctcactatgttatttcaaatccagaagaagccaaagggcgttggcatgagatttttggaaataataaccccattcacatagaagttggttccggaaaaggggcttttatcactggtatggcagagcaaaatccagatatcaattatattggaattgatattcaattgtcagtgctttcctatgctttggataaagttctagatagcggtgctaagaatatcaaattactattagttgatggttctagtctatcaaactactttgatactggcgaagttgatttgatgtatcttaactttagtgatccatggcctaagaaaaagcatgagaaacgtcgattgacctataagactttcttggatacctataaagacatacttcctgagcagggggaaattcattttaaaacagataatagaggtttatttgaatatagccttgctagcttttctcaatacggtatgactttaaaacaagtttggttagatttacatgcaagtgattaccagcaaaatatcatgactgagtacgaacgcaaattttcaaataaaggacaggttatctatcgtgtagaagcacgattt

SEQ ID NO: 3468 - protein, 211 aa, Streptococcus agalactiae
MRVRKRKGAEEHLENNPHYVISNPEEAKGRWHEIFGNNNPIHIEVGSGKGAFITGMAEQNPDINYIGIDIQLSVLSYALDKVLDSGAKNIKLLLVDGSSLSNYFDTGEVDLMYLNFSDPWPKKKHEKRRLTYKTFLDTYKDILPEQGEIHFKTDNRGLFEYSLASFSQYGMTLKQVWLDLHASDYQQNIMTEYERKFSNKGQVIYRVEARF

SEQ ID NO: 3469 - DNA, 633 bp, Streptococcus pyogenes
atgcgagttagaaaacgaaaaggtgctgaggagcacttagctaataacccacactatgtgatattaaatccagaagatgccaagggccgttggcatgacgtttttggaaatgaccgtcctattcatatcgaagttggttcaggaaagggcggatttatcacagggatggccttgaaaaatcctgatattaactacattggcattgatattcaattatctgtcctaagctacgccttggataaggtattagcttcagaagtacccaatgtcaaacttctgcgagtggatggatcaagtttaaccaactattttgaagatggtgaggtggatatgatgtacctcaacttttcagatccttggccaaaaaccaagcatgaaaaacgtcgtttgacctacaaggatttcttagacacttacaagcgtatcttgccagaacacggtgaaattcattttaaaaccgataatcggggcttgtttgagtacagtttagctagtttttctcaatacggcatgaccttgagacagatctggcttgacttacacgctagtaactatgaaggaaatgtcatgacagaatatgaagagaagttctctaataaaggtcaagtcatttaccgagttgaggcaaatttc

SEQ ID NO: 3470 - protein, 211 aa, Streptococcus pyogenes
MRVRKRKGAEEHLANNPHYVILNPEDAKGRWHDVFGNDRPIHIEVGSGKGGFITGMALKNPDINYIGIDIQLSVLSYALDKVLASEVPNVKLLRVDGSSLTNYFEDGEVDMMYLNFSDPWPKTKHEKRRLTYKDFLDTYKRILPEHGEIHFKTDNRGLFEYSLASFSQYGMTLRQIWLDLHASNYEGNVMTEYEEKFSNKGQVIYRVEANF

SEQ ID NO: 3471 - DNA, 381 bp, Streptococcus agalactiae
atgggtggcgactatgtgctcagtattttaattgataaacccggaggcattacggttgaagatacagcacaattgacagacgttgtaagtcccttacttgacacaattcaaccagatccatttccagaacagtatatgcttgaagtctcaagtcctgggttggaaagaccacttaaaacagcagaagcattatcaaatgctgttgggtcttatatcaatgtaagtctgtataaatccattgataaagttaaaatatttgaaggtgacttattatcatttgatggtgaaaccttgacaattgattatatggacaaaacacgtcataaaactgtagatattccctatcagacggttgcaaaagcccgtcttgcggttaaactt

SEQ ID NO: 3472 - protein, 127 aa, Streptococcus agalactiae
MGGDYVLSILIDKPGGITVEDTAQLTDVVSPLLDTIQPDPFPEQYMLEVSSPGLERPLKTAEALSNAVGSYINVSLYKSIDKVKIFEGDLLSFDGETLTIDYMDKTRHKTVDIPYQTVAKARLAVKL

SEQ ID NO: 3473 - DNA, 534 bp, Streptococcus pyogenes
gtggattcccaaggaccaattatcttagagaagagcataaaaatagaggaggtaatcaaaatagcaaatacatctattatcgatatcgtaaccaagacagtaacgcctgagattaaggcaccttatgaattagtagacgttgagtatgacaaaatgggtagtgactacatccttagtattttagtcgataaggaaggtggaatcacagtggaagatacatctgacttgacgaatattattagtccgctgttagatacgattgatccagatccttttccaaaccaatatatgctagaagtctctagtccaggtttggagcgtccgctcaagacagctgacagtttaaaagcagcagttggctcttatatcaatgtgagtctttatcaagctattgataaggtgaaagtttttcaaggagacttattagcctttgatggtgaaacgttgaccattgattatcttgataaaacacgtcataagatcgtgaatataccatatcaagcagttgctaaggtgagaatggctgtcaaatta

SEQ ID NO: 3474 - protein, 178 aa, Streptococcus pyogenes
VDSQGPIILEKSIKIEEVIKIANTSIIDIVTKTVTPEIKAPYELVDVEYDKMGSDYILSILVDKEGGITVEDTSDLTNIISPLLDTIDPDPFPNQYMLEVSSPGLERPLKTADSLKAAVGSYINVSLYQAIDKVKVFQGDLLAFDGETLTIDYLDKTRHKIVNIPYQAVAKVRMAVKL

SEQ ID NO: 3475 - DNA, 1158 bp, Streptococcus agalactiae
atggacactatgagcaaagaaatgctagaagccttccgtattttggaagaagaaaaacacattaataaagaagatattattgatgcagttactgagtcactaaaatctgcctataagcgtcgttatggtcaatcagaatcatgcgttattgaatttaacgagaagaaagcagactttaccgtctatactgttcgtgaagttgttgatgaagtttttgatagccgtttggaaattagcctaaaagatgcccttgctattagctcagcgtatgaacttggtgataagattcgctttgaggaatctgttacagaatttggacgcgtggcagctcagtcagcaaaacaaactattatggaaaaaatgcgtcgtcaaatgcgtgaagtaaccttcaatgaatacaaacaacacgaaggtgaaattatgactggtactgttgaacgatttgaccaacgttttatttatgtcaatctcggttcacttgaggcgcaattatcgcatcaagatcagattcctggagagagctttaaatctcatgatatgattgatgtttatgtctataaagtggagaataatcctaaaggagtcaacgtttttgttagccgtagtcatccagagtttatcaaacgcattatggagcgagaaattccagaagtatttgatggaactgttgagattatgagcgtctctcgtgaggctggagatcgtactaaagttgctgtacgcagtcataattcaaacgttgatgcgattggaacaattgttggacgcggtggaagtaacattaaaaaagttatcagtaatttccatcctaaacgcgttgatgctaaaacaggattggagatcccggttgaagaaaacattgatgttattcaatgggttgaagatccagcggaattcatttacaatgctattgcaccagccgaagttgatatggtactttttgatgatgaagatacaaaacgtgctactgtagttgttccagatagcaagttatcgctagctattggtcgccgaggacaaaatgtgcgtttagcagctcatttgactggctatcgtattgatattaaatctgcaagtgaatacgaaaaaatggaagcgcaagaacttcaaactgaggaagtagctcaagaatctgaagttatttcagataaggcagaa

SEQ ID NO: 3476 - protein, 386 aa, Streptococcus agalactiae
MDTMSKEMLEAFRILEEEKHINKEDIIDAVTESLKSAYKRRYGQSESCVIEFNEKKADFTVYTVREVVDEVFDSRLEISLKDALAISSAYELGDKIRFEESVTEFGRVAAQSAKQTIMEKMRRQMREVTFNEYKQHEGEIMTGTVERFDQRFIYVNLGSLEAQLSHQDQIPGESFKSHDMIDVYVYKVENNPKGVNVFVSRSHPEFIKRIMEREIPEVFDGTVEIMSVSREAGDRTKVAVRSHNSNVDAIGTIVGRGGSNIKKVISNFHPKRVDAKTGLEIPVEENIDVIQWVEDPAEFIYNAIAPAEVDMVLFDDEDTKRATVVVPDSKLSLAIGRRGQNVRLAAHLTGYRIDIKSASEYEKMEAQELQTEEVAQESEVISDKAE

SEQ ID NO: 3477 - DNA, 1188 bp, Streptococcus pyogenes
ttgccaagctttacaagcaaggtagataacattatgagcaaagaaatgctagaagccttccgtattttggaagaagaaaaacacattgataaagcagatattattgacgcagtgacagaatcattaaagtctgcctataaacgtcgctatggtcaatcagaatcatgtgttattgaatttaatgaaaaaacagctgattttcaagtatttacggttcgtgaggttgttgaagaagtttttgacagccggcttgagattagtttgaaagatgctcttgctatcagttctgcctatgaattgggtgataagattcgctttgaagaatctgtcaatgaatttggacgtgtcgcagctcaatcagctaaacagactattatggaaaagatgcgccgccaaatgcgtgaagtgatgttcaatgaatacaaagagcatgaaggtgaaattatgacaggaacagttgaacggtttgatcaacgttttatttatgtcaatcttggttccttagaagcacaattgtctcaccaagaccagattccaggtgaaactttcaaatcacatgaccgtattgacgtttatgtctacaaagttgaaaataatcctaaaggagttaacgtctttgttagtcgtagccatccagaattcatcaaacgtattatggagcaagaaattcctgaagtctttgatggtactgttgaaatcatgagtgtttctcgtgaagcaggtgaccgcaccaaggttgctgtgcgcagtcataatcctaacgttgatgccatcggaacaattgttggacgtggtggaagtaatattaaaaaggtcatcagcaagttccatccaaaacgtgtagatgctaagacggggcttgaaattccagttgaagaaaatattgacgtgattcaatgggtagatgatccagctgagttcatctacaatgccattgctccggctgaagtagacatggtactttttgacgatgaagatcttaaacgtgctacggtagtagttcctgatagcaaattatcattagctatcgggcgtcgcggccaaaatgttcgtttagcggcacatttgactggctaccgtattgatatcaaatcagctagcgaatatgatcgtcttgaggcggaaaaagaagcagcaacagctgtggaagagccagttgttgacgatgttatgactgccgaggaagta

SEQ ID NO: 3478 - protein, 396 aa, Streptococcus pyogenes
LPSFTSKVDNIMSKEMLEAFRILEEEKHIDKADIIDAVTESLKSAYKRRYGQSESCVIEFNEKTADFQVFTVREVVEEVFDSRLEISLKDALAISSAYELGDKIRFEESVNEFGRVAAQSAKQTIMEKMRRQMREVMFNEYKEHEGEIMTGTVERFDQRFIYVNLGSLEAQLSHQDQIPGETFKSHDRIDVYVYKVENNPKGVNVFVSRSHPEFIKRIMEQEIPEVFDGTVEIMSVSREAGDRTKVAVRSHNPNVDAIGTIVGRGGSNIKKVISKFHPKRVDAKTGLEIPVEENIDVIQWVDDPAEFIYNAIAPAEVDMVLFDDEDLKRATVVVPDSKLSLAIGRRGQNVRLAAHLTGYRIDIKSASEYDRLEAEKEAATAVEEPVVDDVMTAEEV

SEQ ID NO: 3479 - DNA, 294 bp, Streptococcus agalactiae
atggctaaaacaaaaaaaatacctttaagaaaatcagttgtttctggtgaagtgatcgataagcgagatcttttacgaattgttaaaaataaagaaggacaggtttttatagatcctaccggaaagcaaaatggtcgaggtgcctacataaaattggacaatgatgaagctatcctagcgaaaaagaaacgagtgtttgatcgcagtttttcgatggaagtttctgatgaattctatgatgaactattggcatatgtcgaccataaggtcaaaagaagagagttaggccttgaa

SEQ ID NO: 3480 - protein, 98 aa, Streptococcus agalactiae
MAKTKKIPLRKSVVSGEVIDKRDLLRIVKNKEGQVFIDPTGKQNGRGAYIKLDNDEAILAKKKRVFDRSFSMEVSDEFYDELLAYVDHKVKRRELGLE

SEQ ID NO: 3481 - DNA, 297 bp, Streptococcus pyogenes
ttgatgtctaaagtcaaaaaaatacctttacgaaaatcacttgtttctggtgaaattattgctaaacgagatcttcttaggattgtaaaaactaaggatggtcaagttttcattgatccaactggtaaacaaaatggtcgtggtgcttatatcaaattagacaatcaagaggccttaatggccaagaaaaaacaagttttcaacaggagtttctcaatggacattccagaaagtttttacgatgacttgattgcttatgttgatcacaaaatcaaaagaagagagttaggtcttgac

SEQ ID NO: 3482 - protein, 99 aa, Streptococcus pyogenes
LMSKVKKIPLRKSLVSGEIIAKRDLLRIVKTKDGQVFIDPTGKQNGRGAYIKLDNQEALMAKKKQVFNRSFSMDIPESFYDDLIAYVDHKIKRRELGLD

SEQ ID NO: 3483 - DNA, 300 bp, Streptococcus agalactiae
ttgaataattcagaaaaagtattaaatctcattgggttagcacagcgtgcggggcgccttattacaggtgaagaattggttattaaagcaattcaaaatcaacaagtatcgctaatctttctagcaaatgatgctggcccaaatttgacgaaaaaagtaactgataaaagtaattactacaaaacagaagtctccacagtgttttcaacactggaattaagtgatgcgttaggcaaaccaagaaaagtggttgctgtcgcagacgctggattttcaaagaaaatgaggactcttatggca

SEQ ID NO: 3484 - protein, 100 aa, Streptococcus agalactiae
MNNSEKVLNLIGLAQRAGRLITGEELVIKAIQNQQVSLIFLANDAGPNLTKKVTDKSNYYKTEVSTVFSTLELSDALGKPRKVVAVADAGFSKKMRTLMA

SEQ ID NO: 3485 - DNA, 300 bp, Streptococcus pyogenes
ttgactaatttagaaagattatctagtcttattggtccagctcaacgggctggaaaagtgatttcaggtgaagaactagtagtaaaagctattcaacaccagcaggtaatattagtatttttagccaatgatgctggtcctaatgtgacaaaaaaagtgacagataaaagtaattattataatgtagaagtctccacagtgttgaatgcactggaattaagtgctgcactaggtaaaccaaggaaggttgctgccattgcagatgctggattttcaaagaaaatgaggactcttatggaa

SEQ ID NO: 3486 - protein, 100 aa, Streptococcus pyogenes
LTNLERLSSLIGPAQRAGKVISGEELVVKAIQHQQVILVFLANDAGPNVTKKVTDKSNYYNVEVSTVLNALELSAALGKPRKVAAIADAGFSKKMRTLME

SEQ ID NO: 3487 - DNA, 2781 bp, Streptococcus agalactiae
ttgtcaaagaaaagattacacgaaatcgctaaggaaattggaaaaacgagtaaggaagtggttgagcaagctcaatcgcttggcttacctgtaaaaagtcatgcttctagcgttgaagaaaatgatgctacacgtattgttgagagttttagctcttctaaaactaaagctccaacaaattctgttcaaactaatcaaggtgtgaaaacagaatctaaaactgttgaaaccaaacaaggcttgtccgatgataaaccttcaactcaacctgtagctaaaccgaaaccacaaagtcgtaactttaaggcggagcgcgaggctcgtgctaaagctgaagcggagaagcgtcaacataatggggatcaccgtaagaataatcgccataatgatacacgctctgacgacagacgccatcaaggtcaaaagcgttcaaatggtaatcgtaatgataaccgacaaggtcagcaaaataaccgtaataaaaatgatgggcgttatgctgatcataaacagaaaccccaaacgcgtcctcagcaacctgcaggcaatcgcattgactttaaagctcgagcagcagctttgaaagctgagcaaaatgctgaatactcacgtcatagtgagcagcgtttccgtgaagagcaagaagccaaacgtcaagcagctaaggagcaagaactagctaaagcagcagcgttaaaagcgcaagaagaagctcaaaaagctaaggaaaaacttgcttctaaacctgttgctaaggtaaaagaaattgtcaataaagtagccgctacgccatcacagacagcagatagtcgtcgtaaaaaacaaactcgttctgataagtctcgtcaattttcaaatgaaaatgaagatggacaaaagcaaacaagaaataagaaaaactggaataatcaaaaccaagtgagaaatcaaagaaatagtaactggaatcataataagaaaaataaaaaaggtaagactaatggagctccaaaaccagtaacagagcgtaaattccatgaattaccaaaagaatttgaatatactgagggcatgaccgttgcggaaattgcaaaacgtattaaacgcgaaccagcggaaattgttaaaaaactctttatgatgggagttatggcaacgcagaatcaatcattagatggagacactattgagctattgatggttgactacgggattgaagcacatgctaaggttgaagttgatgaagctgatattgaacgcttctttgcagatgaggattaccttaatcctgataacttaacggaacgtccgcctgttgttactatcatgggacacgttgatcatggtaaaacaactcttcttgatactctacgtaattcacgtgtcgctactggcgaagctggtggaattactcaacatattggtgcttatcagattgaagaagctggcaagaaaattactttcttggatacaccagggcatgcggcctttacttctatgcgtgcgcgtggtgcatcagtaactgatattactatccttatcgttgccgctgatgatggtgttatgccgcagacagttgaggcaattaatcactctaaagctgcgggtgtcccaattattgttgctatcaacaaaattgataaacctggtgcaaatccagaacgcgttatcagtgaattagctgagcatggtgtcatctctactgcatggggtggtgagtctgaatttgttgaaatttcagctaagtttggtaaaaatattcaagaattacttgagacagttcttttagttgctgaaatggaagaattaaaagcagatgcagatgttcgtgctattggtactgttattgaagcccgtcttgataaaggtaagggagccgttgcaacgcttcttgtccaacaaggtactttaaatgtacaagatccaatcgttgttggtaatacatttggacgtgttcgtgcgatgactaatgatcttgggcgtcgtgtcaaagttgcgggtccatctacaccagtttctattactggtttgaacgaagctccaatggctggtgatcattttgctgtttatgcagatgagaaagctgcgcgtgctgcaggtgaagaacgtgcaaaacgtgctctcttaaaacaacgccaaaacacgcaacgtgttagcctcgagaacttatttgatacccttaaagctggtgaagttaagtcagttaatgttattatcaaagctgatgtgcaaggttctgtagaagcacttgcagcttctctccttaagattgatgttgaaggagtaaaagttaacgttgttcactcagcagttggtgctattaatgagtctgatgtaacacttgctgaagcatcaaatgctgttattataggatttaacgtacgccctactccacaagctcgtcaacaagcagatgctgatgatgtcgaaattcgtcaacatagcattatctataaagttatcgaagaagttgaagaagcgatgaaaggtaaacttgatcctgaataccaagaaaaaatccttggtgaagccattattcgtgagacctttaaagtttcaaaagtgggaactattggtggatttatggttatcaatggtaaagttactcgtgattcaagtgttcgtgttatccgtgatggtgttgtcatttttgatggtaaattagcaagtcttaaacactataaagatgatgttaaagaagtcggcaatgctcaagaaggtggtctaatgattgagaattataacgatctcaaagaagatgacactattgaagcatacattatggaagaaattaaacgtaaa

SEQ ID NO: 3488 - protein, 927 aa, Streptococcus agalactiae
MSKKRLHEIAKEIGKTSKEVVEQAQSLGLPVKSHASSVEENDATRIVESFSSSKTKAPTNSVQTNQGVKTESKTVETKQGLSDDKPSTQPVAKPKPQSRNFKAEREARAKAEAEKRQHNGDHRKNNRHNDTRSDDRRHQGQKRSNGNRNDNRQGQQNNRNKNDGRYADHKQKPQTRPQQPAGNRIDFKARAAALKAEQNAEYSRHSEQRFREEQEAKRQAAKEQELAKAAALKAQEEAQKAKEKLASKPVAKVKEIVNKVAATPSQTADSRRKKQTRSDKSRQFSNENEDGQKQTRNKKNWNNQNQVRNQRNSNWNHNKKNKKGKTNGAPKPVTERKFHELPKEFEYTEGMTVAEIAKRIKREPAEIVKKLFMMGVMATQNQSLDGDTIELLMVDYGIEAHAKVEVDEADIERFFADEDYLNPDNLTERPPVVTIMGHVDHGKTTLLDTLRNSRVATGEAGGITQHIGAYQIEEAGKKITFLDTPGHAAFTSMRARGASVTDITILIVAADDGVMPQTVEAINHSKAAGVPIIVAINKIDKPGANPERVISELAEHGVISTAWGGESEFVEISAKFGKNIQELLETVLLVAEMEELKADADVRAIGTVIEARLDKGKGAVATLLVQQGTLNVQDPIVVGNTFGRVRAMTNDLGRRVKVAGPSTPVSITGLNEAPMAGDHFAVYADEKAARAAGEERAKRALLKQRQNTQRVSLENLFDTLKAGEVKSVNVIIKADVQGSVEALAASLLKIDVEGVKVNVVHSAVGAINESDVTLAEASNAVIIGFNVRPTPQARQQADADDVEIRQHSIIYKVIEEVEEAMKGKLDPEYQEKILGEAIIRETFKVSKVGTIGGFMVINGKVTRDSSVRVIRDGVVIFDGKLASLKHYKDDVKEVGNAQEGGLMIENYNDLKEDDTIEAYIMEEIKRK

SEQ ID NO: 3489 - DNA, 2859 bp, Streptococcus pyogenes
ttgtcaaagaaaagattacatgaaattgccaaggaaattggtaaaagtagtaaagaggtggttgaacacgctaaatacttaggattagatgtgaaaagccatgcatcaagtgttgaagaagcggatgcgaaaaagattatttcaagtttttcaaaggcttctaaacctgatgtgacagcttctcaaacagtcaaacccaaagaagttgctcaaccctctgtaacagtggtcaaagaaacaggttctgagcatgtagagaaaacacaggtctctaagccaaagagtcgtaattttaaagctgaaagagaggctcgtgcaaaggaacaggctgctcgaaaacaagcaaatggctcttctcatcgttctcaagaacgtcgaggaggttatcgccagcccaataatcatcaaactaacgaacaaggagataagaggattacccatcgttctcaaggtgatacaaacgataagcgtattgagcgaaaagcatcgaatgtatcacctagacatgataatcatcagctagttggtgatcgtaaccgttcctttgctaaggagaatcacaagaatggtcgattcacaaaccaaaaaaagcaaggacgacaagagcctcaatcgaaaagtcctaaaattgatttcaaagctcgtgctgctgccttaaaagctgaacaaaatgctgaatactcacgccaaagtgaaacacgttttcgtgcacagcaagaagctaagcgtttagctgagttggcaagacaagaagctaaagaagcggctctaaaagcacaagctgaggagatgagccatcgtgaagcagcattgaaatctattgaagaagcagaaactaaattaaagtcatcaaatattagtgctaaatctactgctgataatcgccgtaaaaaacaagcacgtcctgaaaagaatcgtgagttaactcatcattcacaagaaggacaaaagaaaaataagaagagttggaatagtcaaaaccaagtgagaaatcaaaaaaatagtaactggaataaaaataaaaagaccaaaaaaggcaaaaatgttaagaataccaacaccgctccaaaaccagtaaccgagcgtaaattccatgaattgccaaaagaatttgaatatactgaaggcatgacagttgccgaaatcgcaaaacgtatcaaacgcgaacccgctgaaattgttaaaaagctgtttatgatgggtgttatggcaactcaaaaccaatctttagatggtgacactatcgaattattgatggtagattatggtattgaggctaaggctaaggtagaagtagatgatgctgatatcgagcgcttctttgaggatgaaaattacctcaatcctgaaaatattgtagaacgcgcacctgttgtaactatcatgggacacgtagaccacggtaagacaactttgcttgatactttgcgtaactcacgtgtggcaacaggagaagctggaggaattactcagcatattggtgcttaccagattgaagaagctggcaagaaaattaccttcttggatactcccggacacgcggcctttacaagtatgcgcgcacgtggagcttccgttaccgatatcaccattttgattgttgcagctgatgatggtgttatgccacaaacgattgaagcgatcaatcactcaaaagctgctggtgttccaattattgttgctatcaacaaaattgataaaccaggtgctaatccagaacgtgttatcgcagaattggcagaatatggtatcatctcaactgcttggggcggagagtgcgaatttgtagagatatctgctaaatttaataaaaatattgatgaactattagaaacagtccttttggttgctgaagtggaagaattgaaagctgatccgacggttcgtgctattggtactgtaattgaagcacgcttagataaaggtaaaggtgctatcgctacgcttcttgtccaacaaggaactcttcatgttcaagatccaatcgttgttggtaatacctttggtcgtgtccgtgccatggtaaatgaccttgggcgtcgtgttaaatctgcggagccatcaacaccagtttccattactggtttgaacgaaacaccaatggctggtgatcactttgctgtttacgctgatgaaaaagctgcgcgtgcagctggtgaggagcgatcaaaacgtgccctcctcaaacaacgtcaaaatacacagcgtgttagccttgataatctctttgatacccttaaagcaggagaaatcaagactgttaatgtcatcatcaaagcagacgttcaaggttctgttgaagcccttgcagcatctcttgtaaagattgaagtggaaggtgtccgtgtcaatgtcgttcactctgctgtaggtgctatcaatgagtctgatgtgacccttgctgaagcatcaaatgctgttattatcggtttcaacgttcgccctaccccacaagctcgtcaacaagcagatacggatgatgtggaaattcgtcttcatagtattatctataaagtcattgaagaagtagaagaagccatgaaagggaaacttgaccctgtttaccaagaaaaaattcttggtgaagccattatccgtgaaaccttcaaagtttctaaagtgggaacaattggtggctttatggtaatcaacggtaaggtgacacgtgattcgagtgttcgtgttatccgtgatagtgtcgttatttttgatggtaaactggccagcttgaaacattacaaagatgacgttaaagaagtcggtaatgctcaagaaggtgggttgatgattgaaaactttaacgatcttaaagttgacgatactattgaagcctatattatggaagaaattgtgagaaaa

SEQ ID NO: 3490 - protein, 953 aa, Streptococcus pyogenes
LSKKRLHEIAKEIGKSSKEVVEHAKYLGLDVKSHASSVEEADAKKIISSFSKASKPDVTASQTVKPKEVAQPSVTVVKETGSEHVEKTQVSKPKSRNFKAEREARAKEQAARKQANGSSHRSQERRGGYRQPNNHQTNEQGDKRITHRSQGDTNDKRIERKASNVSPRHDNHQLVGDRNRSFAKENHKNGRFTNQKKQGRQEPQSKSPKIDFKARAAALKAEQNAEYSRQSETRFRAQQEAKRLAELARQEAKEAALKAQAEEMSHREAALKSIEEAETKLKSSNISAKSTADNRRKKQARPEKNRELTHHSQEGQKKNKKSWNSQNQVRNQKNSNWNKNKKTKKGKNVKNTNTAPKPVTERKFHELPKEFEYTEGMTVAEIAKRIKREPAEIVKKLFMMGVMATQNQSLDGDTIELLMVDYGIEAKAKVEVDDADIERFFEDENYLNPENIVERAPVVTIMGHVDHGKTTLLDTLRNSRVATGEAGGITQHIGAYQIEEAGKKITFLDTPGHAAFTSMRARGASVTDITILIVAADDGVMPQTIEAINHSKAAGVPIIVAINKIDKPGANPERVIAELAEYGIISTAWGGECEFVEISAKFNKNIDELLETVLLVAEVEELKADPTVRAIGTVIEARLDKGKGAIATLLVQQGTLHVQDPIVVGNTFGRVRAMVNDLGRRVKSAEPSTPVSITGLNETPMAGDHFAVYADEKAARAAGEERSKRALLKQRQNTQRVSLDNLFDTLKAGEIKTVNVIIKADVQGSVEALAASLVKIEVEGVRVNVVHSAVGAINESDVTLAEASNAVIIGFNVRPTPQARQQADTDDVEIRLHSIIYKVIEEVEEAMKGKLDPVYQEKILGEAIIRETFKVSKVGTIGGFMVINGKVTRDSSVRVIRDSVVIFDGKLASLKHYKDDVKEVGNAQEGGLMIENFNDLKVDDTIEAYIMEEIVRK

SEQ ID NO: 3491 - DNA, 375 bp, Streptococcus agalactiae
atgagcacaatgaagaaaggattaattatggctaatcatcgtattgatcgcgttggaatggaaattaaacgtgaagtcaatgagattttgcgtctccgagttaatgatccacgtgtacaagatgtcacaattactgatgttcagatgttgggtgacctttcaatggctaaagtattttatactattcattcgacacttgcttctgataatcaaaaagcacaaattggtttagaaaaagcaactggtactattaagcgtgaacttggcaaaaaccttactatgtataaaataccagatttacaatttgttaaagatgaatctattgaatacggaaataagattgatgaaatgttgcgcaatctagataaaaaagat

SEQ ID NO: 3492 - protein, 125 aa, Streptococcus agalactiae
MSTMKKGLIMANHRIDRVGMEIKREVNEILRLRVNDPRVQDVTITDVQMLGDLSMAKVFYTIHSTLASDNQKAQIGLEKATGTIKRELGKNLTMYKIPDLQFVKDESIEYGNKIDEMLRNLDKKD

SEQ ID NO: 3493 - DNA, 354 bp, Streptococcus pyogenes
atggctatggctaatcatcgtattgaccgcgttgggatggaaatcaagcgcgaagtaaatgatattcttcagaaaaaagtgcgtgatccacgcgttcagggagtaacgattacagaagtgcaaatgcagggtgacttgtcacttgctaaagtttattacactattatgagtgacttggcatctgataatcaaaaagcacaaacagggcttgaaaaagcgactggaacgattaaacgtgaacttggcaaacaattgaccatgtacaaaattccagatttggtgtttgaaaaagacaattccatcgcctatggtaataaaattgatcaactcttacgagatcttgacaacaaatcc

SEQ ID NO: 3494 - protein, 118 aa, Streptococcus pyogenes
MAMANHRIDRVGMEIKREVNDILQKKVRDPRVQGVTITEVQMQGDLSLAKVYYTIMSDLASDNQKAQTGLEKATGTIKRELGKQLTMYKIPDLVFEKDNSIAYGNKIDQLLRDLDNKS

SEQ ID NO: 3495 - DNA, 1002 bp, Streptococcus agalactiae
ttgaaaccgtccttcaaaaaactattgctactatttagtattatcaccattttatccatcgcctgtacaccacatgcaaaagcaagtgggcgttcatggaaaagttggtttatcgaacaatacttttggctaaagcgcgataaaagttattataaagttcaagatgaaagctcatttcaaaagtacttaaatgctagccgtgaacaatctgataagggttattacttagacccaaactctgttaatggagggcttgttcaagagagactttttgatatgcaagtctattcttggaatgacaacggtaaagctaatcaaaagaccattttctatttagctggtggctcttacttaaataatccaacgccttaccatatcagcatgcttaagacgctctcaactagtcttgatgcaaaaattattttaccaatttatccaaaaactcctcgttatacctatgattatgctatccctagattggttaacctttatagacactttcatgaaaaaaacgctaatctcactttgatgggtgattcagctggcggaggattagcactaggattagcgcatgcattgtctcaccaatcagggcaagaggctattcctcaacctaaaaatattatcctcttatctccatggctagatgtgacaatgaaacatccagaaattcccaaatacgaagatactgatcctatcctatctgcttggggtctcgcacgtgtaggtgaaatttgggcaaatggttctaataatactaaccatacatatgttagtcctaaaaatgcccctgctactaaactcgctcctattacgttatttactggaacacgagaaatattcttcccagatattcgcgattatgctgcacaactccaagcagctaatcaccccgttaactatattgcacaagagggaatgaatcatgtttatccaatttaccctattgaagaagctaaaacagcacagtatcaaatgattgatatcatcaataaaactcct

SEQ ID NO: 3496 - protein, 334 aa, Streptococcus agalactiae
MKPSFKKLLLLFSIITILSIACTPHAKASGRSWKSWFIEQYFWLKRDKSYYKVQDESSFQKYLNASREQSDKGYYLDPNSVNGGLVQERLFDMQVYSWNDNGKANQKTIFYLAGGSYLNNPTPYHISMLKTLSTSLDAKIILPIYPKTPRYTYDYAIPRLVNLYRHFHEKNANLTLMGDSAGGGLALGLAHALSHQSGQEAIPQPKNIILLSPWLDVTMKHPEIPKYEDTDPILSAWGLARVGEIWANGSNNTNHTYVSPKNAPATKLAPITLFTGTREIFFPDIRDYAAQLQAANHPVNYIAQEGMNHVYPIYPIEEAKTAQYQMIDIINKTP

SEQ ID NO: 3497 - DNA, 984 bp, Streptococcus pyogenes
ttgaaacatcctattcgaaaaacacttgtcaccttaggtctattactgaccttatgcctgccgactccagttgcagctagttctcgttcttggaagagctggtttatcgagcaatatttctggttaaaacgtgacaagagttactattctaaacaagatgacccaagcttccaaagataccttgatgcctgtcgtgaacaatctgataaaccttatcaactagatactaatttagtcaatggtccccttgttcaagaaaatctttatggcatgcaggtttactcttggaatgataatggaaaacctgatcaaaaaacaattatttatcttgccggtggttcttatcttaacaatccaacgacataccatattaatatgttaaagacattatccacaagtcttgacgctaaaattgttttacccatttatcctaaagccccacgttatacctataactatactatgccaaaattggtcaatctttaccaacactattaccataaaaatcagaatgttttccttatgggagattcagcaggtggaggtttagccttaggtctagctcatgccctacacaatgaatcagtccctcaaccaaagcagctcgttcttttatcaccttggttagatgttactatgtcacacccagagattccagaatacgaagatgctgatcctattctatcttcttggggattaaaacgagtgggagaattgtgggcctactctgctgataataccaaccatatttatgtcagtcctaaaaatggtccgatcacttatctaccaccaattactttatttactgggacacgagagatcttttatcctgatattcgcgattatgccgcaaaactgaaagccgctaaccacaatattacctttattacccaagaaggcatgaaccacgtttacccaatttatcctatcgaagaggcaaaaacagctcaataccaaatcattgatgccatcaacaaaactcct

SEQ ID NO: 3498 - protein, 328 aa, Streptococcus pyogenes
LKHPIRKTLVTLGLLLTLCLPTPVAASSRSWKSWFIEQYFWLKRDKSYYSKQDDPSFQRYLDACREQSDKPYQLDTNLVNGPLVQENLYGMQVYSWNDNGKPDQKTIIYLAGGSYLNNPTTYHINMLKTLSTSLDAKIVLPIYPKAPRYTYNYTMPKLVNLYQHYYHKNQNVFLMGDSAGGGLALGLAHALHNESVPQPKQLVLLSPWLDVTMSHPEIPEYEDADPILSSWGLKRVGELWAYSADNTNHIYVSPKNGPITYLPPITLFTGTREIFYPDIRDYAAKLKAANHNITFITQEGMNHVYPIYPIEEAKTAQYQIIDAINKTP

SEQ ID NO: 3499 - DNA, 414 bp, Streptococcus agalactiae
atgactatttcaagcgcagaatgggaaattatgagagtggtttgggcacagcagaatacaaccagtaatgagatactagcagttttactagagaagtatgattggactccttcaactgtcaaaaccttattaagaaggctcttagataaaggctacgtgagcagagaaaaaatgggaaaaggatttagctattctcctttaattgatgaagatttagctatgatgtcagaggtagatagtgtatttcaaaaagtttgccagaccaaacatgttgctattgttagacacttattggaaagtataccaatgacagagaaggatcgattaaatttgcaatcatcactagaagctaagaaaggcaaaacacttgaacgtgtagcttgtaattgcattcctggtcagtgtcaatgccat

SEQ ID NO: 3500 - protein, 138 aa, Streptococcus agalactiae
MTISSAEWEIMRVVWAQQNTTSNEILAVLLEKYDWTPSTVKTLLRRLLDKGYVSREKMGKGFSYSPLIDEDLAMMSEVDSVFQKVCQTKHVAIVRHLLESIPMTEKDRLNLQSSLEAKKGKTLERVACNCIPGQCQCH

SEQ ID NO: 3501 - DNA, 450 bp, Streptococcus pyogenes
gtgaatgaaggtgacgttatgcaacagatatcagctgctgaatgggaagtcatgcgtgtggtgtgggccagtggtgatattaaaagtagcgatattattactattttaaggaaaaaatatcaatggtcagattccactattaagaccctcattggtaggctagttaaaaaaaattttttaacgtcttatcggcaaggaagagcttatatttatcaagctcttttggatgagactttgctacaaaaagaagcactagcgactgttttagacggtatttgtcagcggcaacacacgcgtctacttcttgaacggctttatcacttaccgatgaccttagaggaaatcggggcattccaagagctactagaagtcaaaaaagaaaatgcagttcttgaggtgccgtgtaattgtctgcctgggcagtgccactgtcagagaaaggagacgtat

SEQ ID NO: 3502 - protein, 150 aa, Streptococcus pyogenes
VNEGDVMQQISAAEWEVMRVVWASGDIKSSDIITILRKKYQWSDSTIKTLIGRLVKKNFLTSYRQGRAYIYQALLDETLLQKEALATVLDGICQRQHTRLLLERLYHLPMTLEEIGAFQELLEVKKENAVLEVPCNCLPGQCHCQRKETY

SEQ ID NO: 3503 - DNA, 2232 bp, Streptococcus agalactiae
atggctaatagaaaagaaacatttttgattgatgggatgacttgtgcatcttgtgctttaacgatagaaaaagctgtcaacaagttagaccatgtggatagtgcagtagtaaatttagcaacagagaaaatgacagttacgtttgatgatacaaccttatcgccaaatgtgattgaagagtgtgtttctgagagtggatacgaagcatcgcttttcaaagaggaaacttctaaaagccaatctgaacggcaccaattagccattgaaaagatgtggcatcgcttttggatgtcagcagttgcaactatacctcttctctatatttccatgggaccaatgattaacttatggttaccatcatttttgatgccagataagggacctctaaactatggtatgatacaattattgttaacactaccggtgatgtattttgggcgtatcttttaccaaaatggttttaaagcactttttaaaaggcatcccaatatggattcattagttgctatagccacaacagcggctttcatttatagcttatatggattgtacgaaatattacagggtgacatacactacgctcaccagctttatttcgaatctgttgcagttattttaacacttattactctaggaaaatattttgaaatattatccaaagggcgtacttcggcctcgattgaaaaattattaactttatcagcaaaagaagcaagagttatcaaagatggtgaagactatatggttcctttggataaagttaaaataggtgaaacaattcttgtcaaacctggagaaaaaattcctcttgatggccatgttgtagcaggagaatcaagtattgatgaatccatgttaacaggtgaaagtattccagttgaaaaaaaggttggtagtaaggtttacggtgccagcattaatgggcaaggtagcttaacgattttcgttgaaaaagaagctggcggttcccttctatcacaaattattaacttagtagaagctgcacagacaagtaaggctccaattgctaacttagcagacaaagtatcaggagtctttgtcccttttgttattgtcattgcaattttatcaggcttgagttggtacttaattctggggcaaagttttgccttctctctgaagattatgattgcagtcttagtgattgcttgtccatgtgctttagggttggcaactcctacagctattatggtggctagtggtaaagcagctgagaatggtattttatttaaaggtggtgaagtgttggaaaaggctcaccacattgatacaatagtttttgataaaacaggaaccttgaccaaagggaaaccagaagtagttgctatcaaaacatatgggggagataaagaggagtttttaggtcaggtagcatcagtagaaaaactttcaaatcatccacttagccaaacaattgttaataaagcaaaagagaaagaacttcccttaagggaagtcatggcttttaaaaatattttgggttacggtttgagtgcaactattaatggtaaaactatgcttgtaggtaatgctaacttaatgactaagaacgatgttaatttagatttagcaaaggctgatatagaaatagctcaagaagaagcacaaactgtggtttacgtttccgaaaatggagtgttgagcggtttaataactttaacggaccagctaaagacagatagccaagaaacagttaagcagttacaaagattaggatttaatttagttttacttactggtgataataaggctagtgcagatgccatagcacaaaaattgggtatcacgacagttgtttcagaagttttacctgatcagaaagcaaacgttattttagaacttaaagaaaaaggcggacagattgcgatggttggtgatggcatcaatgatgctcctgcgctagctagcagtgatgtaggtatctctatgagttctggaacagatattgctattgaatcagcagatatcgtgttgatgaaacctgagttaacagatctcttaaaagcaatgactatcagtaaacaaacgattcaaattattaaggaaaatttattttgggctttcttttataacgttttagcgattccagtggcaatgggtgttttacatctttttggtggtcccttactcaatcctatgttggcaggcttagctatggcgtttagttcagtttcagtagttttaaacgcacttcgcttaaaagtcttaaaa

SEQ ID NO: 3504 - protein, 744 aa, Streptococcus agalactiae
MANRKETFLIDGMTCASCALTIEKAVNKLDHVDSAVVNLATEKMTVTFDDTTLSPNVIEECVSESGYEASLFKEETSKSQSERHQLAIEKMWHRFWMSAVATIPLLYISMGPMINLWLPSFLMPDKGPLNYGMIQLLLTLPVMYFGRIFYQNGFKALFKRHPNMDSLVAIATTAAFIYSLYGLYEILQGDIHYAHQLYFESVAVILTLITLGKYFEILSKGRTSASIEKLLTLSAKEARVIKDGEDYMVPLDKVKIGETILVKPGEKIPLDGHVVAGESSIDESMLTGESIPVEKKVGSKVYGASINGQGSLTIFVEKEAGGSLLSQIINLVEAAQTSKAPIANLADKVSGVFVPFVIVIAILSGLSWYLILGQSFAFSLKIMIAVLVIACPCALGLATPTAIMVASGKAAENGILFKGGEVLEKAHHIDTIVFDKTGTLTKGKPEVVAIKTYGGDKEEFLGQVASVEKLSNHPLSQTIVNKAKEKELPLREVMAFKNILGYGLSATINGKTMLVGNANLMTKNDVNLDLAKADIEIAQEEAQTVVYVSENGVLSGLITLTDQLKTDSQETVKQLQRLGFNLVLLTGDNKASADAIAQKLGITTVVSEVLPDQKANVILELKEKGGQIAMVGDGINDAPALASSDVGISMSSGTDIAIESADIVLMKPELTDLLKAMTISKQTIQIIKENLFWAFFYNVLAIPVAMGVLHLFGGPLLNPMLAGLAMAFSSVSVVLNALRLKVLK

SEQ ID NO: 3505 - DNA, 2151 bp, Streptococcus pyogenes
ttgcctgaagtagaacaggctgttgtgaatttagcgactgagaagctcacggttacttatcaagatgacgatttagaaacggccaaagttattcaagcggtgaaagctgctggttatggtgcacaagtctttgatgaacatgcaaaacacatgcaaacaggtcgtcgtgacgaagacctaaaggttatttggtctcaggtcttgtggtctgccctattcaccattcctatattatacctagctatgggtcacatggtgggcttatggcttcctccatttctgcaaccagatcgctatcctttcgtttacagctttagtcagctactcttgacgattccagtcttagtattaaatcgtcattattaccataatgggtttaaagctttgtttaagggacatcctaatatggactccttggtagctttagcaaccagctttgcttttgcttatagtctttatggagtggttgaaatcagtctgggccgggcgcactttgtgcactccctttattttgaatcggtggtagtgattttgacactcatcggtctaggaaagtattttgaaagtcgttctaagggccgtacttctcaagctattcaaaagctcctatccttgaaggctactgttgtgagggtatggagaaacagccaatggcaattgttaccattagaagaagttagctatgatgaccttgtcctggttcaaccaggtgaaaaagtttctattgacggtattatcgtggaaggacatagcagtttggatgaatcctttttaaccggggaaagtttgcctgttgaaaagggagaaaaagataatgtctttgcgggcagcttgaatgggccaggcgccctcacgattaaaccagataagcttggaaatgataccttgttagcacaaattatccaactagttgagaatgctcaagaaaataaagcacctattgcagctattgctgatagagtctcaggtgtctttgttccggtggttttggtattagctctgttaacaggggtgttttggttggtattcatgcaggaaagtcttcgttttagtttgacaacagccatcgctgttctagtcattgcttgcccttgtgcgcttggtttagcaacgccgacagcgattatggttggaacagggcgtgcagctgaaaatggtattctttttaaaggtggtgacatcttagaacaagcacatcaggtagatacggttgtttttgataaaacggggacgattacggaggggaaaccaagtcttcaaaagctcctaactttttcgggagatgatcaccttatcttgcaagaagctgcttccttggaggcctattctcaacaccccttaggggaggctattgttcgtgctgctcaggaagctggttacgatagtctaccagtggaagagtttgagtctttaaccggcctaggagttactggtcagcttgaagggcgtcgtttggcgattggaaatgctgctttaatgggaattcttggtatcgatttatcttgtgttcagtcggtttgtgctaaggcttctgagaaaggccaaacccttgtatattatgctaaagaggggcagctacgagctcttttcagtattgctgacgctgtcaaagaagatagtcaagctaccgtcgaagctttgcatcaactgggaattcacaccatcatgctaacaggtgaccacgatgctaccgctaaggctattgcctctcaagtggggattacagatgtgatcagtcaagtcttacctgatcaaaaagcaggcgtgatagcagacctccgctctcaagggagaaaagttgcaatggtaggtgatggtattaatgatgctccggcattggctgtagcagacattgggatagctatggggtcagggacagatattgccattgaatcggcggatgtgattctgatgaaacctgatatgctggatttggtgaaagctatgtcattgagtcgagtgactatgagaattgtcaaggaaaatttattttgggcattcatttacaatgtcctcatgattccagtggccatgggcttacttcatctttttggaggtccactattgaacccgatgttagcaggttttgccatgagttttagttcagtatcagttgttttgaatgccctgcgattaaaaggaaaaaccatt

SEQ ID NO: 3506 - protein, 717 aa, Streptococcus pyogenes
LPEVEQAVVNLATEKLTVTYQDDDLETAKVIQAVKAAGYGAQVFDEHAKHMQTGRRDEDLKVIWSQVLWSALFTIPILYLAMGHMVGLWLPPFLQPDRYPFVYSFSQLLLTIPVLVLNRHYYHNGFKALFKGHPNMDSLVALATSFAFAYSLYGVVEISLGRAHFVHSLYFESVVVILTLIGLGKYFESRSKGRTSQAIQKLLSLKATVVRVWRNSQWQLLPLEEVSYDDLVLVQPGEKVSIDGIIVEGHSSLDESFLTGESLPVEKGEKDNVFAGSLNGPGALTIKPDKLGNDTLLAQIIQLVENAQENKAPIAAIADRVSGVFVPVVLVLALLTGVFWLVFMQESLRFSLTTAIAVLVIACPCALGLATPTAIMVGTGRAAENGILFKGGDILEQAHQVDTVVFDKTGTITEGKPSLQKLLTFSGDDHLILQEAASLEAYSQHPLGEAIVRAAQEAGYDSLPVEEFESLTGLGVTGQLEGRRLAIGNAALMGILGIDLSCVQSVCAKASEKGQTLVYYAKEGQLRALFSIADAVKEDSQATVEALHQLGIHTIMLTGDHDATAKAIASQVGITDVISQVLPDQKAGVIADLRSQGRKVAMVGDGINDAPALAVADIGIAMGSGTDIAIESADVILMKPDMLDLVKAMSLSRVTMRIVKENLFWAFIYNVLMIPVAMGLLHLFGGPLLNPMLAGFAMSFSSVSVVLNALRLKGKTI

SEQ ID NO: 3507 - DNA, 204 bp, Streptococcus agalactiae
atgaaacatacctatcgagttagtggcatgaaatgtgatggttgtgccaaaacagtttctgataagttatcaagtgtgattggtgttgacgaggttaatgttgatttgactaaaaatcaagttgtcgtaagtggaaaaacattcaaatggcttttaaaacgttctttaaaagacacaaagtattcactagaagaggaaataaat

SEQ ID NO: 3508 - protein, 68 aa, Streptococcus agalactiae
MKHTYRVSGMKCDGCAKTVSDKLSSVIGVDEVNVDLTKNQVVVSGKTFKWLLKRSLKDTKYSLEEEIN

SEQ ID NO: 3509 - DNA, 201 bp, Streptococcus pyogenes
atggaaaaacattatcaggttacaggaatgacatgtgacggttgcgcaagaacggtcactgaaaaattatcagctgtccccggtgtgcaatcggtccaggtaaatttggaaaaaggagaggctaaggtgacaggacgtcctttaacgttcctaatcaagcgtgctttgaaggataccaaatttgaattatataaatggtct

SEQ ID NO: 3510 - protein, 67 aa, Streptococcus pyogenes
MEKHYQVTGMTCDGCARTVTEKLSAVPGVQSVQVNLEKGEAKVTGRPLTFLIKRALKDTKFELYKWS

SEQ ID NO: 3511 - DNA, 618 bp, Streptococcus agalactiae
gtgcagatgtcaattgatatttggaacattttaagtttggttggaaccgtagcttttgcaagttcgggagctattgtggcgattgaggaagaatttgatattctagggctttttatcttaggttttgtaacggcatttggtggtggagctattagaaatgtactaattggcttgcctattgaaacactttggagtcaaggaattgctttttatgcagcagcagcagctattttatttattatgattttccctaatttgttgagtggtaagggacgggatgccgaagttgtatcagatgctattgggttagcagcgtttagtgttcaaggagcactatatgcgactcaatctcatcaacctcttagtgctgtcattgtcgcagcagtactaactggtgcaggtggtggtattgtcagagatgttctggctggccgaaaacctggagtactaagaagtgaaatatatgcaggttggtcaatattagtggggatcattttatattttaaaattgctaaaacaacaactgactattatttgttagtgttagttgtaactagcctaaggatgttgggttataagaaacaatggcacttgccagttgtcagaccacgtaagaaa

SEQ ID NO: 3512 - protein, 206 aa, Streptococcus agalactiae
MQMSIDIWNILSLVGTVAFASSGAIVAIEEEFDILGLFILGFVTAFGGGAIRNVLIGLPIETLWSQGIAFYAAAAAILFIMIFPNLLSGKGRDAEVVSDAIGLAAFSVQGALYATQSHQPLSAVIVAAVLTGAGGGIVRDVLAGRKPGVLRSEIYAGWSILVGIILYFKIAKTTTDYYLLVLVVTSLRMLGYKKQWHLPVVRPRKK

SEQ ID NO: 3513 - DNA, 615 bp, Streptococcus pyogenes
atgacaattgatatgtgggaaattttaaatatcatcgggaccattgcctttgctctttctggtgctattgttgccatggaagaagaatttgatattttagggatttttattttaggtttcgtgacagcctttggaggcggagccattcgaaacaccctaattggtttacctatagaggccttatgggggcaaaagccagaattcacttgcgctttctttgctatggttttgattatgctttttcctaagctaatggctagaggttgggtacgggcagctgttttgactgatgccattggtctggcagcttttagtgtccaaggagccttgcatgctgtccgtcttaaccagcctttaagtgctgtcattgtaacagctgtgttgactggtgcaggcggtggtgttgtcagagatattctggcagggcgaaaacctagtgttttgcgtagtgaaatctatgctgggtggtctattcttgcagctattgttttgcattttaaactagcagattcaacgattgaatgttatgccttggttgttttactcacgactttacgcatgattggcaaccgtaaaaaatggaacctccctaaaatcaaatggaaagaggaaaga

SEQ ID NO: 3514 - protein, 205 aa, Streptococcus pyogenes
MTIDMWEILNIIGTIAFALSGAIVAMEEEFDILGIFILGFVTAFGGGAIRNTLIGLPIEALWGQKPEFTCAFFAMVLIMLFPKLMARGWVRAAVLTDAIGLAAFSVQGALHAVRLNQPLSAVIVTAVLTGAGGGVVRDILAGRKPSVLRSEIYAGWSILAAIVLHFKLADSTIECYALVVLLTTLRMIGNRKKWNLPKIKWKEER

SEQ ID NO: 3515 - DNA, 828 bp, Streptococcus agalactiae
atgatagaggagaaaaagatgataaaattaattgctattgatatggatggaacgcttttaaatgatgaaaagaaaattccaaaggaaaatatccaagctattaaagaagcaactcaagcaggtattaaaattgtactgtgtactgggcgaccgatgtcaggtatacttccttattttaatgaactaggtttaacaaaagaggagtatattatcatgaataatggttgtagcacttatagcacgaaagattggcaattgattgattctgcaactttaacacatgatgaactcatctttcttgaggaggttgttaaagaatttcccaacgtttgtttaacattaacagctgaaaatacattttacgctgttggagaggaagttcctgaaattgttgcttatgatgctgatttagtttttacaaaagcaaagtcaacaagtttagatgctcttcgcaatcaagaagaaattgtctttcaagcaatgtacatgggattagatgcagatgtaactgcttttcaagaagctgttgaagaagccttaatctcgaaatttagtggagttcgaagccaagactatatttatgagattatgcctcaaggagtaacaaaagcaagaggcttaaaatccttgatagcaaaattaggactggatattaatcaagttatggccatcggtgatgctcctaacgatattgaattattagatttagttcccaatagcgttgctatggggaatgcatcagatgagattaaatctagatgtaaatatataacggtggataataacaaagcaggggttgctaaagctatttatgactatgctttacgt

SEQ ID NO: 3516 - protein, 276 aa, Streptococcus agalactiae
MIEEKKMIKLIAIDMDGTLLNDEKKIPKENIQAIKEATQAGIKIVLCTGRPMSGILPYFNELGLTKEEYIIMNNGCSTYSTKDWQLIDSATLTHDELIFLEEVVKEFPNVCLTLTAENTFYAVGEEVPEIVAYDADLVFTKAKSTSLDALRNQEEIVFQAMYMGLDADVTAFQEAVEEALISKFSGVRSQDYIYEIMPQGVTKARGLKSLIAKLGLDINQVMAIGDAPNDIELLDLVPNSVAMGNASDEIKSRCKYITVDNNKAGVAKAIYDYALR

SEQ ID NO: 3517 - DNA, 879 bp, Streptococcus pyogenes
ttggcaaccgtaaaaaatggaacctccctaaaatcaaatggaaagaggaaagataggatgattcaactaattgcaattgatttggacggcaccttattaaaccaggacaaacagattccaaaagagaatatcacagccatccaagaagcagctcagtcaggcttaaaaattgtcttatgcacaggccggcctcagtcagggacaagaccctattttgaccaattaggtttgacacaagaggaattcctcattatcaataatggctgtagtacttatagtagtcctgactggcaattacgccattcaaaaatgttgaaggtttcagatattgaattgctggaagagctaagccaaagttttccagatatttacctgactttaactgaggaaaacgattatttggtgcttgaagaagaagtgccagaccttgtgcaggaagatggagatttggtatttaccattgtcaagcctgtctccttagcagagctgtcggacactcctcgcctgatttttcaagccatgtacttaggagaaaaagctgcgctagatgcctttgaacgtgcggtgagaaatcagcttagtcagagttttcatgttgttcgtagccaagataatattttagaaattctccctcagggagtcagcaaggcatcggctctcaaagaattagtagaagatttgggtttaactgctgaccaagtgatggctattggggatgctcccaatgacattgagatgttaacttatgctggtttaggagttgctatggaaaatgcttcagcagctatcaagccattagctgacaaagtcactttgactaatgatatggcgggtgtggcccaggctatccgtcagtttgcacttgtagctcaaaaagac

SEQ ID NO: 3518 - protein, 293 aa, Streptococcus pyogenes
LATVKNGTSLKSNGKRKDRMIQLIAIDLDGTLLNQDKQIPKENITAIQEAAQSGLKIVLCTGRPQSGTRPYFDQLGLTQEEFLIINNGCSTYSSPDWQLRHSKMLKVSDIELLEELSQSFPDIYLTLTEENDYLVLEEEVPDLVQEDGDLVFTIVKPVSLAELSDTPRLIFQAMYLGEKAALDAFERAVRNQLSQSFHVVRSQDNILEILPQGVSKASALKELVEDLGLTADQVMAIGDAPNDIEMLTYAGLGVAMENASAAIKPLADKVTLTNDMAGVAQAIRQFALVAQKD

SEQ ID NO: 3519 - DNA, 2640 bp, Streptococcus agalactiae
atgacaaacaagaataaattacttttaattgatggctcatctgtagcctttcgtgctttttttgctctttataatcaaattgaccgctttaaaaacaattctggacttcatactaatgccatatatggtttccatttgatgttgaatcatattttaggtcgtgtccagcctagtcatattttagtggcttttgatgccggaaaaactactttccgtacggaaatgtatgcagattataaaggtgggcgtgctaaaactccggatgaatttcgtgaacaatttccttacattcgtcaacaattagatgtcttaggcatcaaacattatgaattggaacattatgaagccgatgatatcattggtactcttgcaaaacaagccgaagctagtaatgaacattttgatataacggtggtttctggggataaagatttaattcaattaacagacactaacacggtagtagaaatctctaaaaagggagttgctgagtttgaagaattcacgccagcttaccttatggaaaaaatgggaattacgccgagtcaatttattgatttaaaagctttgatgggagataaatcagataatattcctggggttactaaaatcggtgaaaaaactggcttgaagttgctatcagaatatggttccttagaagggatctatgaaaatattgaggctatgaaacagtctaagatgaaagaaaaccttatcaatgataaggagcaagctttcttatcaaagaccctagctacaatcaacatagcatcacctataacaatcggcttagaagatatcctttatagtggaccgcaagatataaaagccttgtctcaattttatgatgagatggattttaaacagtttaaagcagctctgggtgaggagacaagtcaggaagattttgaggttgactttactgaagtggagcaattaaaaacagaaatgttctccgataatgatttttattactttgagatgttgggtgataactaccatgtagaagatttaattgggatagcttggggaaatagcgatacaatctacgctactagtaatgtatcgttattgcaagaagctttatttaaaaaagctttatcaaaacctatcaaaacttatgattttaaaagaagtaaggtccttttaaatcgttttaatattgatttaccagagccagcctttgatactagattggccaagtaccttttgtctactactgaggataatctagtatcaacaattgctaggttatatacaaatctgccactggatactgatgatgctgtttatgggaaaggtgctaaacgcgctataccagaaaaaacacgatttcttgagcatctagctaaaaaagtaaaagttttagtggattctgaggctaatattatgcaacagcttaaagctaatgagcaagaagaattgctgtttgaaatggagcaacctttagcgaatgttttagctaaaatggaaattcgaggtattaaggttaagaaaaataccttgaatgaaatggccattgaaaatcaaaaagtcatcgaaacattaacacaagaaatctatgaattggctgggcaagagtttaatattaattctccaaaacagttaggaaagttgttgtttgaaacgttaggtcttcctgtagaaatgactaaaaaaacaaaaacaggttattcaactgcagtagatgtattagagcgcttagctccgatttctcctcttgtaactaaaattttagagtaccgtcaaatcactaaattgcaatcaacctatattattggtttacaagattatattttagaagatggtaaaattcatacacgttatgttcaagatttgactcagacaggtcgtctttcaagttctgacccaaaccttcaaaatataccagttagactagagcaaggacggcttatccgaaaagcttttgttccatcagaagacaatgctgttttattgagttcagattattctcaaatagaattgcgcgtgttagcacatatttcaaaagacgaacatttgatcgctgcctttaaagagggagctgatattcatacttcaacagctatgcgtgtttttggtatcgaaaaacctgagaatgtcactcccaatgatcgtcgaaatgctaaggctgttaattttggaattgtttatggtatttcagattttggtctatcgcataatttaggaatacctcgtaaactagcgaagcaatatattgacacctattttgagcgttatcctggaataaaaaactatatggaaacagttgttcgtgaagcaaaagataagggttacgttgaaacacttttccatcgtcgtcgttcattaccagatattaattctcgtaattttaacattcgccaatttgcagagcgcacagcaatcaattcaccaatccaaggaagtgcagctgatattcttaaaattgcaatgataaatttagatagggtacttgataaaggtggttataaatcaaaaatgctgttgcaagttcatgatgaaattgtacttgaagtccctaacgaggagataggagcaatcagggagttggttacaaaaacaatggagtcagcaattagtttatcggtacctttgattgcagatgagaacgcaggtgagacttggtatgaagcgaag

SEQ ID NO: 3520 - protein, 880 aa, Streptococcus agalactiae
MTNKNKLLLIDGSSVAFRAFFALYNQIDRFKNNSGLHTNAIYGFHLMLNHILGRVQPSHILVAFDAGKTTFRTEMYADYKGGRAKTPDEFREQFPYIRQQLDVLGIKHYELEHYEADDIIGTLAKQAEASNEHFDITVVSGDKDLIQLTDTNTVVEISKKGVAEFEEFTPAYLMEKMGITPSQFIDLKALMGDKSDNIPGVTKIGEKTGLKLLSEYGSLEGIYENIEAMKQSKMKENLINDKEQAFLSKTLATINIASPITIGLEDILYSGPQDIKALSQFYDEMDFKQFKAALGEETSQEDFEVDFTEVEQLKTEMFSDNDFYYFEMLGDNYHVEDLIGIAWGNSDTIYATSNVSLLQEALFKKALSKPIKTYDFKRSKVLLNRFNIDLPEPAFDTRLAKYLLSTTEDNLVSTIARLYTNLPLDTDDAVYGKGAKRAIPEKTRFLEHLAKKVKVLVDSEANIMQQLKANEQEELLFEMEQPLANVLAKMEIRGIKVKKNTLNEMAIENQKVIETLTQEIYELAGQEFNINSPKQLGKLLFETLGLPVEMTKKTKTGYSTAVDVLERLAPISPLVTKILEYRQITKLQSTYIIGLQDYILEDGKIHTRYVQDLTQTGRLSSSDPNLQNIPVRLEQGRLIRKAFVPSEDNAVLLSSDYSQIELRVLAHISKDEHLIAAFKEGADIHTSTAMRVFGIEKPENVTPNDRRNAKAVNFGIVYGISDFGLSHNLGIPRKLAKQYIDTYFERYPGIKNYMETVVREAKDKGYVETLFHRRRSLPDINSRNFNIRQFAERTAINSPIQGSAADILKIAMINLDRVLDKGGYKSKMLLQVHDEIVLEVPNEEIGAIRELVTKTMESAISLSVPLIADENAGETWYEAK

SEQ ID NO: 3521 - DNA, 2640 bp, Streptococcus pyogenes
atggaaaacaagaataaattactattaattgatgggtcatctgttgcctttcgtgccttttttgccctctacaatcaaattgaccgctttaaaaaccatagcggtcttcataccaatgccatttatggctttcatttgatgctagaccacatgatgaagcgagtccagcccacacacgtgctggtggcttttgatgcgggcaaaaccaccttccggacagaaatgtatgccgattataaggcgggtcgcgctaaaaccccagaggaatttcgtgagcagtttccttatattcgtgagatgttgacagcccttgggattgcttattatgagttggaacactacgaagcagacgatattatcgggacgcttgataaaatggcggagcgcacagaagtgccttttgatgtgaccattgtcagtggtgataaagatttgatccagttaactgacgaaaataccgtggttgaaatttctaaaaaaggggtagccgaatttgaagaattcacaccggcttacctcatggaaaaaatgggattgacgccaaaccagtttattgacctcaaagccttgatgggagataaatcggataatattccaggagtgaccaaaatcggtgaaaaaactgggctcaagctccttcatgaatttggtagtttagaaggtatctacgagcatattgatggattcaagacctcaaaaatgaaagaaaacttgattaatgatcgtgaccaagctttcctatctaaaacgctcgccactatcaatacagcatctcctatcacaattggcttagatgatattgtctacaatggtccagatgttgctagtctctctcaattttacgatgagatggattttgtgcaactcaagaaaggtcttgctagccagatgcctcaagagccagtagctgtcatttcctatcaagaagtgaccaatgtgtctgctgatttgtttagcgcagaagacatcttctactttgaaacgcttcgggacaattaccatcgtgaggccatcattggttttgcttggggacatggtgagcagatttacgcatccacagaccttggcctattagcgacggatagttttaagcaggtcttccaaaaacccattgccacttatgattttaaacgtagcaaggtcttgttgagccacttaggaattgagttggtagcacctagctatgatgctagattagctaattaccttctgtcaactgtagaagacaatgagcttagcaccattgcccgcatttttactgacatctctttggaagaagacgatacagtctatggtaaaggtgctaaacgggctgttcctgataaagacgtcttactagaacacttagctcgtaaggtcaaagtattattagatagcaagtctcaaatgctagacaagctcactgcccatgagcaactagacctctatcagaatattgaattgcctttggctaatgtccttgctaaaatggaaattgaagggatcaaggttaatagggcgactttgcaagatatggcagagcaaaacaaggtcattattgaagcgctcacccaagagatttatgatatggctggccaagaatttaatatcaattcgcctaaacagttaggcagtatcttgtttgagaagatgcaactacctcttgagatgactaagaagaccaaaacaggttattctacagctgttaatgttttggaacgtttggcaccgattgctccaattgtggctaaaattttggattaccgccagattaccaaattacagtctacttatgtgattggtttacaggattatattctggctgatggcaagattcatacccgctatgtgcaggatctcacgcagacagggcgtttgtctagtgtggaccctaatcttcaaaacattcccattcgtttggaacaggggcgtttgattcgtaaggcctttaccccatctcatgaagatgccgtcttgttgagttcagattactcacagattgaattgcgggtactggcacatatttcaggggatgagcatttgattgctgcctttaatgaaggggcagacattcatacctcaacggctatgcgtgtgtttgggattgacagggcagcagatgttactgccaatgaccgccgtaatgccaaggctgttaactttggaattgtgtatgggatttctgattttggtttgtcaaataaccttggtatcacccgtaaacaggccaagtcttacattgatacctattttgaacgctatcctgggattaaagcctatatggaaaatgtggtgcgtgaggctaaagacaagggctatgtagagaccctctttaagcgtcgtcgtgaattaccggatatcaactctcgtaatttcaacgttcgctcttttgcggagcgtacagccatcaactcgcccattcaaggaagcgcagctgatattctcaaaatcgctatgattaatctggataaggccttgcaagcaggtggttttagagctaaaatgctgcttcaagtgcatgatgaaatcgttttggaagtgccaaatgatgagttgactgctataaaaaaacttgtcaaagacaccatggaagctgctgttgatttagctgttcctttatgtgtcgatgaaagtactgggcatagctggtacgaagccaaa

SEQ ID NO: 3522 - protein, 880 aa, Streptococcus pyogenes
MENKNKLLLIDGSSVAFRAFFALYNQIDRFKNHSGLHTNAIYGFHLMLDHMMKRVQPTHVLVAFDAGKTTFRTEMYADYKAGRAKTPEEFREQFPYIREMLTALGIAYYELEHYEADDIIGTLDKMAERTEVPFDVTIVSGDKDLIQLTDENTVVEISKKGVAEFEEFTPAYLMEKMGLTPNQFIDLKALMGDKSDNIPGVTKIGEKTGLKLLHEFGSLEGIYEHIDGFKTSKMKENLINDRDQAFLSKTLATINTASPITIGLDDIVYNGPDVASLSQFYDEMDFVQLKKGLASQMPQEPVAVISYQEVTNVSADLFSAEDIFYFETLRDNYHREAIIGFAWGHGEQIYASTDLGLLATDSFKQVFQKPIATYDFKRSKVLLSHLGIELVAPSYDARLANYLLSTVEDNELSTIARIFTDISLEEDDTVYGKGAKRAVPDKDVLLEHLARKVKVLLDSKSQMLDKLTAHEQLDLYQNIELPLANVLAKMEIEGIKVNRATLQDMAEQNKVIIEALTQEIYDMAGQEFNINSPKQLGSILFEKMQLPLEMTKKTKTGYSTAVNVLERLAPIAPIVAKILDYRQITKLQSTYVIGLQDYILADGKIHTRYVQDLTQTGRLSSVDPNLQNIPIRLEQGRLIRKAFTPSHEDAVLLSSDYSQIELRVLAHISGDEHLIAAFNEGADIHTSTAMRVFGIDRAADVTANDRRNAKAVNFGIVYGISDFGLSNNLGITRKQAKSYIDTYFERYPGIKAYMENVVREAKDKGYVETLFKRRRELPDINSRNFNVRSFAERTAINSPIQGSAADILKIAMINLDKALQAGGFRAKMLLQVHDEIVLEVPNDELTAIKKLVKDTMEAAVDLAVPLCVDESTGHSWYEAK

SEQ ID NO: 3523 - DNA, 468 bp, Streptococcus agalactiae
gtggacaacatacgtaaaggagtcattaatatggtttatcattttcaaaatccaagtgattttatgttaaaaaattatttaacaaaagcaaagaccatcgcagttgtaggactgtcagaccgtcaagaaactgcagcttatcaagtatcaaaaataatgcaagaagcaggttatcaaattattccagttaatcctaaaaatgcaggacagaaaatacttgggcaaatgacatatgcctcacttaaggatgtcactgaacatattgatattgttaatatttttcgacgtagcgagtatttacctgatattgcaagagaatttttagaagtagacgctgatattttctgggctcagcttggacttgaaagtcaagaagcagagacaattctaaagcaagcaggacacaaacagattgtcatgaataaatgtctgaaagttgaatgccaaaaattacactcagaaactaac

SEQ ID NO: 3524 - protein, 156 aa, Streptococcus agalactiae
MDNIRKGVINMVYHFQNPSDFMLKNYLTKAKTIAVVGLSDRQETAAYQVSKIMQEAGYQIIPVNPKNAGQKILGQMTYASLKDVTEHIDIVNIFRRSEYLPDIAREFLEVDADIFWAQLGLESQEAETILKQAGHKQIVMNKCLKVECQKLHSETN

SEQ ID NO: 3525 - DNA, 453 bp, Streptococcus pyogenes
gtgatttattcgtttcaaaatccctcagaggatgtcctaaaagcttacttggagtcagccaaaaccattgcggttgttggtctttctgaccgcaaagacacagcagcttatggtgtcgccaaatttatgcaggctatggattatcggatcattccagtcaatcccaaattagcaggtcagcttattttgggagagaaggtctatgccagtatcaaggcaattccctttgaggttgacattgtagatgtctttcgcagaagtgagtttttaccagaagttgccagagactttttagcaggtcaggccaaagtcttttgggcgcaattaggccttgaaaaccaagaagcacaaaccattttacggtcggcaggcaaagaggctattgtgatgaaccgctgcctaaaaatagactatttgcaattagtcgctaaaccagaatgcatcacaaatcat

SEQ ID NO: 3526 - protein, 151 aa, Streptococcus agalactiae
VIYSFQNPSEDVLKAYLESAKTIAVVGLSDRKDTAAYGVAKFMQAMDYRIIPVNPKLAGQLILGEKVYASIKAIPFEVDIVDVFRRSEFLPEVARDFLAGQAKVFWAQLGLENQEAQTILRSAGKEAIVMNRCLKIDYLQLVAKPECITNH

SEQ ID NO: 3527 - DNA, 495 bp, Streptococcus agalactiae
gtgctggaaaggagtcctatggacagtcattcacatggtcatagacctctcgatgcttatgaaaacgtcctagagcatctccgtgaaaaacgtattcgaattactgagactcgaaaagctattatttcctatatggttaatagtcgtgagcatccgagtgcagaaaagatttacaatgatttattaccagaatatcctaacatgagcttggcaacagtttacaataaccttaaggtccttgtggatgaggggtttgtgacagagctaaaactttgcaattatagtacaacttattatgattttatggggcatcagcacctaaacattgcctgtgaagattgtgggaaaatcgttgattttgtcgatgttgacttattggatatttctagagaagcacaccaacaaacaggttttgaagtgactagagttcagttagtagcttatggtatctgtccggagtgtcagaggaagcgtaaggataaatataaaaaagat

SEQ ID NO: 3528 - protein, 165 aa, Streptococcus agalactiae
MLERSPMDSHSHGHRPLDAYENVLEHLREKRIRITETRKAIISYMVNSREHPSAEKIYNDLLPEYPNMSLATVYNNLKVLVDEGFVTELKLCNYSTTYYDFMGHQHLNIACEDCGKIVDFVDVDLLDISREAHQQTGFEVTRVQLVAYGICPECQRKRKDKYKKD

SEQ ID NO: 3529 - DNA, 465 bp, Streptococcus pyogenes
atggacattcattcacatcagcaagccctagatgcctatgaaaatgtcctagagcatctacgggaaaaacatattcgaattacagagacacgtaaagccattatttcttacatgattcagtccacagaacaccctagtgccgataagatttaccgtgacttacagcctaactttcctaacatgagccttgccacagtctataataatttgaaagttttagttgatgaaggttttgtctcagaattgaaaatcagcaatgatttaaccacctactatgactttatgggccatcaacacgtcaatgtggtttgtgaaatatgtgggaagattgctgactttatggatgttgatgttatggatattgccaaagaagcccatgagcaaacaggttataaggtcacgcgtatcccagttattgcttacgggatttgtccggattgccaagcaaaagaccaacctgatttt

SEQ ID NO: 3530 - protein, 155 aa, Streptococcus pyogenes
MDIHSHQQALDAYENVLEHLREKHIRITETRKAIISYMIQSTEHPSADKIYRDLQPNFPNMSLATVYNNLKVLVDEGFVSELKISNDLTTYYDFMGHQHVNVVCEICGKIADFMDVDVMDIAKEAHEQTGYKVTRIPVIAYGICPDCQAKDQPDF

SEQ ID NO: 3531 - DNA, 1563 bp, Streptococcus agalactiae
atgaaaatatcacaatacaataaatggtcaattcgccgattgaaagttggagctgcatctgtaatgattgctagtggaagcattgttgctttagggcaatctcatattgtttcagcagatgagatgtcccaacctaaaacaaccattacagctccaacagctaacacttctacaaatgtagaaagtagtactgataaggcattatcaaaagttactacgatggagacaagttcagaaatgcctaaaatgcaaaatatggcaaaagttgaaaaaacgagtgacaaacctatgatggtggctacctctgttagaaaaatgatggcaacgccgacacctgtagcgatgaccaaaacgactagtgtagatgaggtaaagaaatcaactgatactgcttttaaacagacagtagacgttccggctcattatgttaatgcagcaaaagggaatggcccatttctagcaggtgtaaatcaaacgattccatatgaagcgtttggtggagatggcatgttaacgcgtttaatccttaaatcttctgaaggagcaaaatggtcagataatggtgttgataaaaatagtccattattaccattgaaaggcttaactaaaggtaaatatttctatcaagtttctttaaatggtaatacgacaggtaaagagggacaagctctcttagatcaaattaaagctaatgataaacatagctaccaagccacaattagagtttatggtgctaaagatggtaaagttgatttaaaaaacatgattagcccaaaaatggtaaccattaacattcctcacattacaactgatatggaagtaaaaaattctctaaagatggcctttaaagaaaaagtagacgtcccagcaaaatatgttagtgctgcaaaagctaaaggtccatttttagcaggtgttaacgaaacgattccatatgaagcgtttggtggggatggcatgttaacgcgtttaatccttaaagcttcagagggagcaaaatggtcagacaatggtgttgataaaaatagtccattattaccgttaaaagatttaactaagggtaaatacttctaccaagtctctcttaatggcaatacagccggtaaaaaaggccaagctctcttagatcaaattaaggcaaatggaagccatacttatcaagcaactatcactatttatggtacgaaagatggcaaagttgatatgaatactattttaggacaaaagacagtgatgattcatattaatgtcgctaaaaaagatatgaatagcacatcaatgatgatgaaaaaagataagatgacaatgcctatgaagaaagaaatgacttcatctaaaataaataccggtatgatgatgtctaacaacaagatgtcagctaatatgcaaatgtcatcacaagccaaatcaaatgataaagctggtaaaaaaatgtctatgatgtctaaaaatttacctaatacaggtgaaacaaagcaacaaaatgtaggtgtgctaggtatgcttagtctagcctttgcgacaggtctaactgcgctaggtcttaaaaaatctaaacaaaga

SEQ ID NO: 3532 - protein, 521 aa, Streptococcus agalactiae
MKISQYNKWSIRRLKVGAASVMIASGSIVALGQSHIVSADEMSQPKTTITAPTANTSTNVESSTDKALSKVTTMETSSEMPKMQNMAKVEKTSDKPMMVATSVRKMMATPTPVAMTKTTSVDEVKKSTDTAFKQTVDVPAHYVNAAKGNGPFLAGVNQTIPYEAFGGDGMLTRLILKSSEGAKWSDNGVDKNSPLLPLKGLTKGKYFYQVSLNGNTTGKEGQALLDQIKANDKHSYQATIRVYGAKDGKVDLKNMISPKMVTINIPHITTDMEVKNSLKMAFKEKVDVPAKYVSAAKAKGPFLAGVNETIPYEAFGGDGMLTRLILKASEGAKWSDNGVDKNSPLLPLKDLTKGKYFYQVSLNGNTAGKKGQALLDQIKANGSHTYQATITIYGTKDGKVDMNTILGQKTVMIHINVAKKDMNSTSMMMKKDKMTMPMKKEMTSSKINTGMMMSNNKMSANMQMSSQAKSNDKAGKKMSMMSKNLPNTGETKQQNVGVLGMLSLAFATGLTALGLKKSKQR

SEQ ID NO: 3533 - DNA, 684 bp, Streptococcus agalactiae
atgacacaaaaattattattagttgacgatgaatttgaaattattgatattaatagacgttatctagagcaagcaggatatgaagtgtcagtagctgcggatggcatagaagcactcaaagaggtagatgagaatcgttttgacctaattattagtgatattatgatgcctaaaatggatggctatgattttattagtgaagttctagttcgagaacccaaccaaccttttctctttataaccgctaaagtatctgaaccagataaaatttactctttgagtatgggtgcagatgactttatttccaagcctttcagtcctagggaattagttttacgtgttaaaaatattctaagacgtatctatgggaatcatcaacaatctgaagtgttgacgattggtgatttggttatcgaccaaaaacaacgtttggtaatggtggactgcaatacaatttccttaaccaataaatcatttgacttgctttggatattagcaaatcatttgaatcgtgttttttcaaaaacagagctttatgaacgtgtctggggcgaagaatttttagatgacactaatactttgaatgttcatatccatgccttacgcaatgaccttgctaaatttagtacagacaataccccaactatcaaaacagtttggggattagggtataaattagaggaa

SEQ ID NO: 3534 - protein, 228 aa, Streptococcus agalactiae
MTQKLLLVDDEFEIIDINRRYLEQAGYEVSVAADGIEALKEVDENRFDLIISDIMMPKMDGYDFISEVLVREPNQPFLFITAKVSEPDKIYSLSMGADDFISKPFSPRELVLRVKNILRRIYGNHQQSEVLTIGDLVIDQKQRLVMVDCNTISLTNKSFDLLWILANHLNRVFSKTELYERVWGEEFLDDTNTLNVHIHALRNDLAKFSTDNTPTIKTVWGLGYKLEE

SEQ ID NO: 3535 - DNA, 1035 bp, Streptococcus agalactiae
atgaaattaaaatattatattgttattggttaccttatttctatgttaataactgtagcaggtgttttctttgggcttaatcatatgctgattgagactcgaggtgtttactacatcctttcagttacaattattgcctgtattgtaggtggtatagttaatttgttcttattatcaagtgtatttacatctttgaaaaagttaaaacaaaaaatgaaggatatttctcaaagatgttttgatacaaaagcacaaatttgttcaccacaagaattcaaggatttagagacagcctttaaccaaatgtcttcggagttagagtcaacgtttaaatctctaaacgagagtgaacgcgaaaaaacaatgatgattgcacaactttcacatgatatcaagactccaattacttctatacaatcaacagtagaaggtattttagatggtattatatctgaagaagaagttaactattatctcaataccatttctcgtcaaacaaaccgtcttaaccatctggttgaagaattaagttttattacattagagactatgtcagacacggctgaacctcataaagaagaaacaatttatctggataaactactgattgatattttatctgaatttcaattggtgtttgaaaaagaaaatcgccaagtaatgattgatgttgcgccagatgtttcgaaattatctagtcaatatgataaattatcacgaattttattgaatttgattagcaatgcagtcaaatattctgatcctggaagtcccttgactatcaaggcctattcaaatcgtcaagatatcgttatcgatattattgaccaaggctatgggataaaagatgaagatcttgcttctatttttaatcgtctttatcgtgtagaatcttcacgaaatatgaagacaggaggacatggtctaggtctttatattgcgcgacaacttgcacatcaactgaatggggatattttggtcgaaagtcagtatcaaaaaggcagtaagttctctttagtacttaaattacaaaaa

SEQ ID NO: 3536 - protein, 345 aa, Streptococcus agalactiae
MKLKYYIVIGYLISMLITVAGVFFGLNHMLIETRGVYYILSVTIIACIVGGIVNLFLLSSVFTSLKKLKQKMKDISQRCFDTKAQICSPQEFKDLETAFNQMSSELESTFKSLNESEREKTMMIAQLSHDIKTPITSIQSTVEGILDGIISEEEVNYYLNTISRQTNRLNHLVEELSFITLETMSDTAEPHKEETIYLDKLLIDILSEFQLVFEKENRQVMIDVAPDVSKLSSQYDKLSRILLNLISNAVKYSDPGSPLTIKAYSNRQDIVIDIIDQGYGIKDEDLASIFNRLYRVESSRNMKTGGHGLGLYIARQLAHQLNGDILVESQYQKGSKFSLVLKLQK

SEQ ID NO: 3537 - DNA, 783 bp, Streptococcus agalactiae
atgtgttataatgaaatgaattgtacttttgtgtatggaggagatatgacgaattcagaaattaaaaatgaggcaaaaactatattaagcaatcttcaaggtaagaatcaactttttttactcccgattctccttagtattattacgttatatatatcattttattatcaatataataatatgacactacttgatttttttgtacctcttccagtttatttcttttacacactttttattatttcagtcagttttgtaatgttagatgtcgtcaaaaatcagaaactaaacgttagattctcggacaatacttatgtattttcaagccatattttctggaaattactctcagtacttgttctaaaaggactaattttatctttcttttatctactaagtacttttggtctactaatcatcatttcaagttttaggctacttttgagtggtaaccttatccttgcccctgttttaatagttgttagtagcctaattactactaaggcagttataaaactcgttcaacaatattactcctatagtatctcaactttagtattttacactcaattagaaagtggaaactatgagggaccgtctaaagtactggttgctagtcgagaactaatgaatggtaataaacttagactcttccttttagacttaagttttattggttggcagttccttacaatcttcagtttcggattagtctatatctatctccttccttaccaaactactgcgcgcttaatcttttatagaaacattacaaaaaatagc

SEQ ID NO: 3538 - protein, 261 aa, Streptococcus agalactiae
MCYNEMNCTFVYGGDMTNSEIKNEAKTILSNLQGKNQLFLLPILLSIITLYISFYYQYNNMTLLDFFVPLPVYFFYTLFIISVSFVMLDVVKNQKLNVRFSDNTYVFSSHIFWKLLSVLVLKGLILSFFYLLSTFGLLIIISSFRLLLSGNLILAPVLIVVSSLITTKAVIKLVQQYYSYSISTLVFYTQLESGNYEGPSKVLVASRELMNGNKLRLFLLDLSFIGWQFLTIFSFGLVYIYLLPYQTTARLIFYRNITKNS

SEQ ID NO: 3539 - DNA, 861 bp, Streptococcus pyogenes
atgtcaattaaagcaatcaaaggccaggctagagacacgttaaaaaatctctctggcaagtatttactatttttaattccaacccttctctttatgtttcatttcggtattgagattcatcaaggttacgtcctatctagtggtattgaagtctcgctagcggctagttatttcccattactactaggacttatccttagccttttcattttatcagcatcctttacgatgattgatgttgttaggcattttcgtcagaaagtttcttttgccgaatcaacaacagccttctcaaaagaattctttgggaacctgctggttttagcgatcactaagtggctattctttctcatctggtcactaatttggttttttggcctctttattttcctttccggactttcagcgtttttggtcaatgctaaatcaggtagctcaacagtcatttcactgatctttttactatttggagcagttttgtccttaattggttttggtatttatatcaaccgttattacgcttatagtctatcagaataccttctctacgatgaggttaaagaggggacttatctaggagctatagccgtcattgaaacaagtgtagctatgatgaaaggttataaatggaagctttttttcctacaacttagcttcaccggttggtttctactgaatattgttacttttgggttacttaatatctatcttttaccatattttacaacagccaatgtcattttttatgatcaactcaagaaacgtttcaaagacaaagatgacccaattgaaggagaacatttaagccttcatcagcttaataaaaatcctactcctatgatgtatgacgatcaaaaagac

SEQ ID NO: 3540 - protein, 287 aa, Streptococcus pyogenes
MSIKAIKGQARDTLKNLSGKYLLFLIPTLLFMFHFGIEIHQGYVLSSGIEVSLAASYFPLLLGLILSLFILSASFTMIDVVRHFRQKVSFAESTTAFSKEFFGNLLVLAITKWLFFLIWSLIWFFGLFIFLSGLSAFLVNAKSGSSTVISLIFLLFGAVLSLIGFGIYINRYYAYSLSEYLLYDEVKEGTYLGAIAVIETSVAMMKGYKWKLFFLQLSFTGWFLLNIVTFGLLNIYLLPYFTTANVIFYDQLKKRFKDKDDPIEGEHLSLHQLNKNPTPMMYDDQKD

SEQ ID NO: 3541 - DNA, 1173 bp, Streptococcus agalactiae
atgactgtttttcatggaagcaaggagaaaacgatgactgatcatccaataaaatatcgattaattaaacaggaaaaacacacaggagccagacttggtgaaataatcacaccacatggtacatttccgacaccaatgtttatgcctgttgggacacaagcaactgttaagacacaatctcctgaagaactaaaagaaatgggttcaggaattattctatcaaatacctaccatttatggttacgtccaggtgatgaattgattgctaaagctggaggtttacataaattcatgaactgggatcaggctattctaacagacagtggaggctttcaggtttattctttggctgatagtcgaaacatcactgaagaaggagtaacctttaaaaaccatttaaatggtgcgaaaatgtttttatcaccagaaaaagctatttcaattcaaaataaccttggttctgatattatgatgagttttgatgagtgtccacaattttaccagccttatgattatgtaaaaaaatcaattgagcgaacaagccgttgggcagaacgtggattaaatgcccaccgccgtcctcatgatcaaggactatttggtattgttcaaggggcagggtttgaggatttacgtcgtcaatcagcacgagatttagtatcgatggattttccaggttattcaattggagggcttgcggtcggagaaacacatgatgagatgaatgcagttcttgattttactgttccaatgcttccgaatgataagcctcgttatttgatgggagttggtgcaccagatagtttaatagacgccgttatccgaggagtagatatgtttgattgcgtcttacctactcgtattgctcgaaatgggacatgtatgacaagtcaaggtcgcttagttgttaagaatgctaaatttgcagaagattttacgcctcttgatccaaattgcgattgctatacttgtaaaaattatacacgcgcttatattcgtcacttattgaaagcagatgaaacttttggtattcgtttgactagttaccataatctttatttccttgtcaatcttatgaaagatgtcagacaagctattatggatgataatcttctagaattccgtcaagattttatggagcgctatggctatggcatgaataaccgtaatttt

SEQ ID NO: 3542 - protein, 391 aa, Streptococcus agalactiae
MTVFHGSKEKTMTDHPIKYRLIKQEKHTGARLGEIITPHGTFPTPMFMPVGTQATVKTQSPEELKEMGSGIILSNTYHLWLRPGDELIAKAGGLHKFMNWDQAILTDSGGFQVYSLADSRNITEEGVTFKNHLNGAKMFLSPEKAISIQNNLGSDIMMSFDECPQFYQPYDYVKKSIERTSRWAERGLNAHRRPHDQGLFGIVQGAGFEDLRRQSARDLVSMDFPGYSIGGLAVGETHDEMNAVLDFTVPMLPNDKPRYLMGVGAPDSLIDAVIRGVDMFDCVLPTRIARNGTCMTSQGRLVVKNAKFAEDFTPLDPNCDCYTCKNYTRAYIRHLLKADETFGIRLTSYHNLYFLVNLMKDVRQAIMDDNLLEFRQDFMERYGYGMNNRNF

SEQ ID NO: 3543 - DNA, 1140 bp, Streptococcus pyogenes
atgacagattatccgattaagtatcgccttatcaaagcagaaaagcacaccggtgcacgcttgggcgaaattatcacccctcacgggacctttccgacaccaatgtttatgccagtgggaactcaggctactgttaaaacacagtctccagaagagttaaaagcaattggatcagggattattttatcaaacacttatcacctctggttgcgtccaggagatgagttgattgctcgctctggtggtctgcacaagtttatgaactgggatcagccaatcttaaccgattcgggtggttttcaagtttactctttagccgattcacgaaacatcactgaagaaggagtgactttcaaaaatcacttgaatggctcaaaaatgtttctatcacccgaaaaagccatttccattcagaataaccttggctcagacatcatgatgagttttgacgagtgcccgcaattttaccaaccttatgattacgtgaaaaaatccattgaacgtactagccgttgggcagaacgtggcttgaaagcccatcgtcgtcctcatgaccaaggattatttggaattgtgcaaggagctggatttgaggaccttcgtcgtcagtctgcggcagatttggtggctatggatttcccaggttattctattggtggtttagctgttggggagagccatgaagaaatgaatgccgtccttgactttacgactcccctcttaccagaaaataaacctcgttacctgatgggagtgggagcaccagatagcttgattgatggtgtgattcgtggtgtcgatatgtttgactgtgtcttgccaacgcgtatcgcccgtaacggaacttgtatgactagtgaggggcgtcttgtgattaaaaatgccaaattcgctgaagattttaccccacttgatcatgactgtgactgctacacttgtcaaaactatagccgtgcctacattcgtcacttgctaaaagcggacgaaacttttggtattcgtttgacaagctaccacaacctttatttcttggttaacttgatgaaaaaagtacgtcaggctattatggacgataacttacttgaattccgccaagattttcttgaacggtatggttataataaatcaaaccgtaatttc

SEQ ID NO: 3544 - protein, 380 aa, Streptococcus pyogenes
MTDYPIKYRLIKAEKHTGARLGEIITPHGTFPTPMFMPVGTQATVKTQSPEELKAIGSGIILSNTYHLWLRPGDELIARSGGLHKFMNWDQPILTDSGGFQVYSLADSRNITEEGVTFKNHLNGSKMFLSPEKAISIQNNLGSDIMMSFDECPQFYQPYDYVKKSIERTSRWAERGLKAHRRPHDQGLFGIVQGAGFEDLRRQSAADLVAMDFPGYSIGGLAVGESHEEMNAVLDFTTPLLPENKPRYLMGVGAPDSLIDGVIRGVDMFDCVLPTRIARNGTCMTSEGRLVIKNAKFAEDFTPLDHDCDCYTCQNYSRAYIRHLLKADETFGIRLTSYHNLYFLVNLMKKVRQAIMDDNLLEFRQDFLERYGYNKSNRNF

SEQ ID NO: 3545 - DNA, 297 bp, Streptococcus agalactiae
  misc_feature (1)..(297): n = a, c, g, or t
atgatgcaagagtactttggtattggtcttgatagtagcagccgctgttaccactatcatactaaattggatattgtcgctttaaaatgtgctgtttgtcaaaaatattatgcttgttataaatgtcatgatgcactcgaggagcattgttttgcagcaacaaaatctgatgaaacgtttcctgtcttatgcggttcttgtcgtcagatgttgacattaaaagagtataaaactggtttttgtccttattgtcgtatgctttttaatccaaattgtcaacgccnnnnnttaattaat

SEQ ID NO: 3546 - protein, 99 aa, Streptococcus agalactiae
  MISC_FEATURE (1)..(99): Xaa = Any Amino Acid
MMQEYFGIGLDSSSRCYHYHTKLDIVALKCAVCQKYYACYKCHDALEEHCFAATKSDETFPVLCGSCRQMLTLKEYKTGFCPYCRMLFNPNCQRXXLIN

SEQ ID NO: 3547 - DNA, 309 bp, Streptococcus pyogenes
atgacggactgttttggaattgaccttgaccaagagtatcggtgcctacattatcataccccgcttgatattgttgggctcaaatgtgcttcttgtcagacttattatgcttgttaccattgccatgaccagttaacagatcatgcctttgtgccaacaggacatcaagaaacatctcctgttatttgtgggcattgtcgaaagctcttgagtcgagctgagtatggttgtggatgctgtccttattgtcaaagtccctttaatccagcctgtcataggcacaaggatatctattttttaaaggagtcg

SEQ ID NO: 3548 - protein, 103 aa, Streptococcus pyogenes
MTDCFGIDLDQEYRCLHYHTPLDIVGLKCASCQTYYACYHCHDQLTDHAFVPTGHQETSPVICGHCRKLLSRAEYGCGCCPYCQSPFNPACHRHKDIYFLKES

SEQ ID NO: 3549 - DNA, 972 bp, Streptococcus agalactiae
atggattttttatacaaaggaggaatcgccatgaagcaaatgtttctttcaacggcaattgaatttaaagaaattgaaacattcgagccaggtgcttggataaatctggttaatccctcccaggaagaatccgaacaagtagctgatcaatttggtattgatattgatgatttacgtgctcccctcgatgtggaagaaacttcccgtatctcggttgaagatgattatactttagttattgttgacgttcctacctatgaagaacgcaataacaaaagttattatatgactattcctatgggcattatcgttactgacaacgctgttattactacttgcctagaacatttgacgctgtttgatcacttttatagacgacgtgtcaaaaatttttatacctttatgaagacacgttttgttttccaattgctttatcgcaatgccgaattatacttacaggctttgcgtactatcgataggcagagcgataaaattgaagcacaactagagagtgcaactcgaaatgagcaattgatcgatatgatggaattggaaaaatctattgtctatctaaaggcctctttaaaatttaatgagcgaatcgtcaaaaaattgaccagtagtaccagtagtttaaaaaaatacattgaagatgaagatctgcttgaagatacattgatcgaaactcagcaggctattgaaatggcaaatatctatgaaaatgtcttaaatgccatgacagaaacgactgcttcaatcatcggtaataatcagaataccattatgaaaaccttagccctagtaactatgacattggatattccaacggttattttttcggcgtatgggatgaactttcaaaataattggatgcctttgaatggtctcgcacatggctttatctatgttgttcttttggcctttttgatgagttcatttgttgtattttattttattcgtaaaaaatggttt

SEQ ID NO: 3550 - protein, 324 aa, Streptococcus agalactiae
MDFLYKGGIAMKQMFLSTAIEFKEIETFEPGAWINLVNPSQEESEQVADQFGIDIDDLRAPLDVEETSRISVEDDYTLVIVDVPTYEERNNKSYYMTIPMGIIVTDNAVITTCLEHLTLFDHFYRRRVKNFYTFMKTRFVFQLLYRNAELYLQALRTIDRQSDKIEAQLESATRNEQLIDMMELEKSIVYLKASLKFNERIVKKLTSSTSSLKKYIEDEDLLEDTLIETQQAIEMANIYENVLNAMTETTASIIGNNQNTIMKTLALVTMTLDIPTVIFSAYGMNFQNNWMPLNGLAHGFIYVVLLAFLMSSFVVFYFIRKKWF

SEQ ID NO: 3551 - DNA, 669 bp, Streptococcus agalactiae
atgactttacaagacttaactaaaaagaatcaagagtttgttcatattgcaactaatcaacttttagctgatggaaaatcagatgcagaaatcaaagctattttagaagaacatctcccagagattatagataatcagaaaaaaggaattaccgcacgctcactcttaggagcaccaactacttgggcagcctcattcactgagcgacctgaggataaagctagagtatctgtacaaaaaaataccaatccttggttgatgtggttagatacttccttactatttcttggcttagtaactgctttgaatggtttaatgttgctatttggtcaatctaatgtcaatacagggcttatttcaattttaactcttggttttggtggtggtgcggccatgtacgttacttattactatatttatcgccatatgggtaaaccaaaatctgaaagaccaggctggcttaaatctttcgcagtactggcactagttatgttagtttggtttgccttatttgcagtagtacctcttctacctgcaactattaatcctaaacttcctgaggttgttttgtttattattgctttagcatcgtttggtttgcgcttttatttacaacgtaaatataatattcaaagctcaatggcaccagtggcaccacaacaaagaaga

SEQ ID NO: 3552 - protein, 223 aa, Streptococcus agalactiae
MTLQDLTKKNQEFVHIATNQLLADGKSDAEIKAILEEHLPEIIDNQKKGITARSLLGAPTTWAASFTERPEDKARVSVQKNTNPWLMWLDTSLLFLGLVTALNGLMLLFGQSNVNTGLISILTLGFGGGAAMYVTYYYIYRHMGKPKSERPGWLKSFAVLALVMLVWFALFAVVPLLPATINPKLPEVVLFIIALASFGLRFYLQRKYNIQSSMAPVAPQQRR

SEQ ID NO: 3553 - DNA, 654 bp, Streptococcus pyogenes
atggaattacaagaacttaccaaaaaaaatcaagaatttatccacaccgctacgaacaaattaatccaagacggcaagtctgatgaggacattaagctgattctcgaagaagccattccagctattctcgaaaaccagaaaaaaggagtcaccgctcgaaatctattaggcactccgactgcttgggcagcttcttttagccaagaccctagtcaaaaagcagcagaaactgacaaaaacaccaatccttggttgatgtggctagatacctctttgctattcatcggaattgttgcccttttaaatggcatcatgaccttcttcaacacaaacgctacagttacaggattgatttccttactggcacttggttttggtggaggagcatccatgtacgctacttattactttatttaccgtcatctcggaaaagataagagccttcgtccaagttggttcaaaatcatcgcagccttatcattagccatgttgatttggattgccttgtactctgcaactgcctttttaccaacctctcttaacccacagttgcctcctcttgccttgctcattattggtggtgtttcccttgctttacgctattacctacaacgcaaatacaacattcaaaacactatgtcacctgttaacaaa

SEQ ID NO: 3554 - protein, 218 aa, Streptococcus pyogenes
MELQELTKKNQEFIHTATNKLIQDGKSDEDIKLILEEAIPAILENQKKGVTARNLLGTPTAWAASFSQDPSQKAAETDKNTNPWLMWLDTSLLFIGIVALLNGIMTFFNTNATVTGLISLLALGFGGGASMYATYYFIYRHLGKDKSLRPSWFKIIAALSLAMLIWIALYSATAFLPTSLNPQLPPLALLIIGGVSLALRYYLQRKYNIQNTMSPVNK

SEQ ID NO: 3555 - DNA, 99 bp, Streptococcus agalactiae
atgaaatttaaaactaaaaaaatactgactttattaaaatttgatataataagtcaacactattcaaaaaggagtgctgaggcacaacattatgcaaga

SEQ ID NO: 3556 - protein, 33 aa, Streptococcus agalactiae
MKFKTKKILTLLKFDIISQHYSKRSAEAQHYAR

SEQ ID NO: 3557 - DNA, 2844 bp, Streptococcus agalactiae
gtgctgaggcacaacattatgcaagataaattaatgataagaggagcaagagctcacaatttaaaaaatataagtgtcgacattccacgagacaagttagttgtcgttacgggactatcaggatcaggtaagtctagtttggcctttgacactatctatgcagaaggacaacgtcgttacgttgaaagtctttctgcttacgcgcgccaatttttgggaaatatggaaaagcctgatgtagattctattgatggccttagtccagctatttctattgatcagaaaacaacaagtaagaatcctcgctctactgttgggactgtaacagaaattaacgattatttacgtttgctttatgctcgtgttggaaccccatattgtatcaatggtcacggagccatcacagcatcttctgtagagcaaattgtggataaggtactagcgcttccagagcgaacaaagatgcaaattttagccccaattatacgtcgaaaaaaaggacaacacaaatcaacatttgagaaaatacaaaaagatggttacgttcgtgttcgtattgatggtgatattcacgatgttactgaggtgcctgaattatcaaaaagtaagatgcacaatattgatattgtagtagatcgattaattaataaagagggcattcgttcccgcttatttgattccgttgaagcggctctacgtttgtcggatggttatgtcgttattgatacaatggatggcaatgagttattgttttcagaacattattcttgtcctgaatgtggttttactgttcctgaattagagccacgccttttttcttttaatgctccctttggttcttgtccgacctgtgatggcttaggaattaagttagaagtagatatagatttggttattccagatagaagtaagacccttagagaaggggccttagttccttggaatccaatttcatcaaattattatccaacgatgctagagcaagctatgactcaatttggtgttgatatggatacgccatttgaaaaattaagcaaggcggagcaggacctagccctatatggttcaggcgaacgagagttccatttccattatattaacgattttggaggcgagagaaatattgatttgccttttgaaggggttgtcaataatattaatcgtcgttaccatgaaactaatagcgattacacacgcaatgttatgcgagaatatatgaacgagctaaaatgtaacacttgtcatggctatcgtctcaatgatcaagcactttgcgtaagagttgggggagaagaaggtcttaatattgggcaagtctcagatttatcgatagcagaccatttagaacttttagaaacattgcgtttatcttcaaatgaacaattaattgctcgaccaattatcaaagaaatccatgaccgtctaagtttcttaaataatgttggacttaattatttaaatctgtcacgttctgcaggaacactttccgggggcgagagtcaacgtattcgtttggctactcaaattgggtctaatttatcaggtgtcctttatgtacttgatgagccgtccattggacttcatcagcgagacaatgaccgtttgattgatagtcttaagaaaatgcgtgatttgggtaatacgcttattgttgttgaacatgatgaagatacaatgatggcagctgattggttaatcgatgtgggacctggcgctggtgcgtttggtggtgagattgtggcctctggtacaccgaagcaagtagctaaaaatactaaatctattacaggacaatatttgtcaggtaagaaagtgattcctgtgccatctgaacgaagagtaggtaatggtcgctttttagaaatcaaaggtgcggcagaaaacaacctacaaaatttagatgtcaagttccctctcggtaaatttattgccgtaactggtgtctcaggttctggaaaatcaaccttaattaatagtattttgaaaaaagctgttgcgcagaagcttaaccgtaactcagataaaccaggtaaatatgtttctttagaaggcattgaatatgttgatcgattgattgatattgatcaaagtccaattggtcggactccacgttctaatcccgcaacctatacaggtgtttttgatgatattcgtgatctttttgctcaaactaatgaggcaaagattcgaggttataaaaaaggacgcttctcatttaacgtcaaaggtggacgttgtgagtcttgttctggcgatggtatcatcaaaattgagatgcattttttaccagatgtctacgttccttgtgaagtatgccacggcacgcgctataatagtgagactctggaagtacattacaaagaaaaaaatattgcacaaattcttgatatgacagtgaatgatgcagttacattttttgcagctattcctaaaattgctcgtaagttacagactattaaggatgttggtttgggatatgtcactttggggcaaccagctacaaccttatcaggaggagaagctcagcgaatgaagctggcaagtgaattacataagcgttcgacaggtaagagtctttacatattagacgaaccaacaacggggcttcatgcagatgatattgctcgtttacttaaggttttggatcgttttgtagatgatggtaatacagtgcttgttattgagcataaccttgatgttattaaaactgctgaccacattattgatcttggccctgaaggaggtattggtggcggacaaattgtagctatcggaacaccagaagaagttgctgaaaatcctaaatcctatacaggatattatttaaaagagaagttagcaaga

SEQ ID NO: 3558 - protein, 948 aa, Streptococcus agalactiae
MLRHNIMQDKLMIRGARAHNLKNISVDIPRDKLVVVTGLSGSGKSSLAFDTIYAEGQRRYVESLSAYARQFLGNMEKPDVDSIDGLSPAISIDQKTTSKNPRSTVGTVTEINDYLRLLYARVGTPYCINGHGAITASSVEQIVDKVLALPERTKMQILAPIIRRKKGQHKSTFEKIQKDGYVRVRIDGDIHDVTEVPELSKSKMHNIDIVVDRLINKEGIRSRLFDSVEAALRLSDGYVVIDTMDGNELLFSEHYSCPECGFTVPELEPRLFSFNAPFGSCPTCDGLGIKLEVDIDLVIPDRSKTLREGALVPWNPISSNYYPTMLEQAMTQFGVDMDTPFEKLSKAEQDLALYGSGEREFHFHYINDFGGERNIDLPFEGVVNNINRRYHETNSDYTRNVMREYMNELKCNTCHGYRLNDQALCVRVGGEEGLNIGQVSDLSIADHLELLETLRLSSNEQLIARPIIKEIHDRLSFLNNVGLNYLNLSRSAGTLSGGESQRIRLATQIGSNLSGVLYVLDEPSIGLHQRDNDRLIDSLKKMRDLGNTLIVVEHDEDTMMAADWLIDVGPGAGAFGGEIVASGTPKQVAKNTKSITGQYLSGKKVIPVPSERRVGNGRFLEIKGAAENNLQNLDVKFPLGKFIAVTGVSGSGKSTLINSILKKAVAQKLNRNSDKPGKYVSLEGIEYVDRLIDIDQSPIGRTPRSNPATYTGVFDDIRDLFAQTNEAKIRGYKKGRFSFNVKGGRCESCSGDGIIKIEMHFLPDVYVPCEVCHGTRYNSETLEVHYKEKNIAQILDMTVNDAVTFFAAIPKIARKLQTIKDVGLGYVTLGQPATTLSGGEAQRMKLASELHKRSTGKSLYILDEPTTGLHADDIARLLKVLDRFVDDGNTVLVIEHNLDVIKTADHIIDLGPEGGIGGGQIVAIGTPEEVAENPKSYTGYYLKEKLAR

SEQ ID NO: 3559 - DNA, 2856 bp, Streptococcus pyogenes
atgaggagggtgcctttaggcacattcaagatgcaaaataaaataataattcatggggcaagagcccacaatttaaaaaatattgacgtggaaattccacgagacaaattagttgtcgtgacagggttatcagggtcaggaaaatctagtctagcctttgatactatttatgcggaagggcaacgtcgttacgtagaaagtttatcagcttatgctagacagttcttgggtaatatggaaaaaccagatgtggattccattgacggtcttagccctgctatttccattgaccaaaaaaccaccagtaagaaccctcgctcaacggttggtacggttacggaaatcaatgattatttacgtctactatatgcgcgtgtgggcacaccttactgtatcaatgggcatggtgctatcacggcgtcttctgcagaacaaattgtagagcaggtcttagccctccctgaacggacacgcatgcagattttagctcctgttgttcgtcggaagaaggggcaacacaaaacagtttttgagaaaattcaaaaagacggctatgtccgtgtgcgcgttgacggggatatttttgacgtgacagaagtgccagagttgtccaaaagtaagatgcacaacattgaggtggttattgaccgtctggttaataaggatggtattcgtagccgtttatttgattcggttgaagcagctttaaggctgggagatggctaccttatgattgacactatggatggcaatgaactgctcttttctgagcattattcctgtcctgtctgtggatttacggttcctgaattagaaccaagactcttctcttttaatgcgccgttcggctcttgtccgacctgtgatgggctaggcattaagttggaagtggatttggacttggttgttcctgacccaagtaagtctttgagagagggagctttggcgccttggaatcctatttcctccaattattacccaaccatgcttgagcaagctatggcaagttttggggtggatatggatacaccttttgaggccttgactgaggaagaaagagatttagtgctttatggttcaggtgatagagaatttcattttcactatgtgaatgattttggtggtgagcgtaacattgacattccttttgaaggtgttgtaactaatgttaatcgccgttatcacgaaactaatagtgattatacgcgcaatgtgatgcgtggttatatgaacgaattgacctgtgcgacttgtcatggttaccgtttgaatgaccaagctttgtgtgtgcatgtgggtggcgaagaaggaactcatattggtcaaatttcagaattatcgattgccgaccacttgcagttattggaagaattggaactcacagaaaatgaaagtaccattgctaaaccgattgtcaaagaaatccatgaccgtctgacattcttaaataatgtgggactgaattatctgaccttgtcacgggctgctgggactttatcaggtggtgaaagtcaacgaatcaggttagcaacacaaattggttctaacctatcaggggtgctctatatcttggatgagccttctattggattgcatcaaagagacaatgaccgtttgatcgagagcctgaaaaaaatgcgtgatttgggtaatacgttaattgtggtagaacacgatgaagacaccatgatgcaggcagactggctgattgatgtgggaccgggggcaggtgagttcggtggagaaattactgcctctggaacgccgaaacaagtggctaagaataaaaaatccatcacgggtcaatatttgtctggtaaaaaattcattccagtgcctttagagcgccgttctggtaatggccgattcattgaaataaaaggagcagcgcagaataatcttcaaagcctcgacgtgagattcccactgggtaaatttattgcggtcacaggggtatcaggctcagggaaatcaaccttggttaatagtattttgaaaaaggctgtcgcccaaaaattaaaccgtaatgctgataagcctggtaaatatcactctatttctggtattgaacatattgaacgcttgattgacattgaccaaagtccgattggaaggacgccacggtcaaatccagccacctatacgggtgtctttgatgatattcgagacttgtttgcccaaaccaacgaagctaagattcgtggttacaaaaaaggccgtttctcttttaatgtcaaaggtgggcgttgtgaggcttgttcaggtgatgggattatcaaaatcgaaatgcactttttgccagatgtttatgtgccttgtgaggtttgccacggcagacggtataattctgagacgcttgaggtgcattacaaaggaaaaaatatcgcagaagtccttgatatgactgtcgatgatgccttggtatttttctctgctattcctaaaatcgctcgaaaaattcaaacgattaaggatgttggacttggttatgtgaccttaggtcaaccagctaccaccctctctgggggagaagctcaacggatgaagttggctagtgaattgcacaaacgctcgacaggtaagagcttgtatatcctagatgagccaacgactggtttacacacagatgatattgcaaggctattaaaagttttggaacgctttgtagacgatggtaatacggttcttgtgattgagcataatttggacgttatcaaatctgctgaccatattattgacttaggaccagaaggtggtgacggaggtggtcagattgttgccacggggacaccagaagaggtagctcaagttaaagaaagctatactggtcattatttgaaagtaaaactacaacaa

SEQ ID NO: 3560 - protein, 952 aa, Streptococcus pyogenes
MRRVPLGTFKMQNKIIIHGARAHNLKNIDVEIPRDKLVVVTGLSGSGKSSLAFDTIYAEGQRRYVESLSAYARQFLGNMEKPDVDSIDGLSPAISIDQKTTSKNPRSTVGTVTEINDYLRLLYARVGTPYCINGHGAITASSAEQIVEQVLALPERTRMQILAPVVRRKKGQHKTVFEKIQKDGYVRVRVDGDIFDVTEVPELSKSKMHNIEVVIDRLVNKDGIRSRLFDSVEAALRLGDGYLMIDTMDGNELLFSEHYSCPVCGFTVPELEPRLFSFNAPFGSCPTCDGLGIKLEVDLDLVVPDPSKSLREGALAPWNPISSNYYPTMLEQAMASFGVDMDTPFEALTEEERDLVLYGSGDREFHFHYVNDFGGERNIDIPFEGVVTNVNRRYHETNSDYTRNVMRGYMNELTCATCHGYRLNDQALCVHVGGEEGTHIGQISELSIADHLQLLEELELTENESTIAKPIVKEIHDRLTFLNNVGLNYLTLSRAAGTLSGGESQRIRLATQIGSNLSGVLYILDEPSIGLHQRDNDRLIESLKKMRDLGNTLIVVEHDEDTMMQADWLIDVGPGAGEFGGEITASGTPKQVAKNKKSITGQYLSGKKFIPVPLERRSGNGRFIEIKGAAQNNLQSLDVRFPLGKFIAVTGVSGSGKSTLVNSILKKAVAQKLNRNADKPGKYHSISGIEHIERLIDIDQSPIGRTPRSNPATYTGVFDDIRDLFAQTNEAKIRGYKKGRFSFNVKGGRCEACSGDGIIKIEMHFLPDVYVPCEVCHGRRYNSETLEVHYKGKNIAEVLDMTVDDALVFFSAIPKIARKIQTIKDVGLGYVTLGQPATTLSGGEAQRMKLASELHKRSTGKSLYILDEPTTGLHTDDIARLLKVLERFVDDGNTVLVIEHNLDVIKSADHIIDLGPEGGDGGGQIVATGTPEEVAQVKESYTGHYLKVKLQQ

SEQ ID NO: 3561 - DNA, 1497 bp, Streptococcus agalactiae
atgactacaaaagcaaaacatgatattcatggcaaaccatataatcgtacagccatgatcaccttattgttgattgctacatttgcaggggtattaaatcagacaagtttgggaacggctatcccaactttgatgaatagctttaacatttcgttgtcaacggctcaacaagcaacaacatggtttttattagcgaatgggattatgattcctgtttcagcttatttagcgacacgtttttcaacaaaatggttgtatgtgacatcctacgttgttttacttattggactgttaatgacgacgttagcacctacatctaactggaacctttttttagtaggacgtattattcaagcgatttctgtagggatttctatgcctttgatgcaggttgttatggtgaatgtttttcctccagagcagcgtggtgccgctatgggacttaatggtttggtggttggtcttgccccagctattgggcctacattagcagggtggattttaaaacaagaatttcattttgcagggcatgatttaacatggcgtgcaattttccttcttcctttactaattttaacggtcactacaattttatccccctttgttctaaaagatgtggttgataataagtcagttaaattggaagtgccttcccttatcctttcaataattggctttggtagctttttgtggggcttcacaaatgtggcaacttatggatggggagatattggatatgttatttctcctattatggttggtattatttttatcgccttattcattcatcgtcaattaaaactagaaacaccgttcttagatatccgtgttttcaaaaataaacaattctcagtaacaacagcagctattgcactttcaatgatggcgatgatgggtgttgaaatgatgctaccgctttacttgcaaaatgttcatggtctctctgcacttgattctggtttagctttattaccaggtgccttgatgatggggatagttagtccaatttctggagctgtatatgataaagttggtgcaagacgtatggctatgattggttttaccatactaggtgtagcgacgttaccttttgttttcttaacgactacaacaccagatcattttattaccctcttatatgcagtacgtatgtttggtattgctatggttatgatgccattgacagcaagtgcgatgagcgcacttccaccacatgaggccgcacatggaacagcagctaataatactgctcgtcaaattgcttcagcagttgtagttgcattgctttcaagtgttgctcaaaatattatcaccaacaataaaccatcaaaagatttgctaacaatgaatcctttaaaatatgcaaatcagatgttgaatgctagtcttgatggcttccatgtttcttttgccattggttttgtatttgcggttcttggtttactggtatctcttttcctgagaaaagggaaaattattgagacggaaaaggaggta

SEQ ID NO: 3562 - protein, 499 aa, Streptococcus agalactiae
MTTKAKHDIHGKPYNRTAMITLLLIATFAGVLNQTSLGTAIPTLMNSFNISLSTAQQATTWFLLANGIMIPVSAYLATRFSTKWLYVTSYVVLLIGLLMTTLAPTSNWNLFLVGRIIQAISVGISMPLMQVVMVNVFPPEQRGAAMGLNGLVVGLAPAIGPTLAGWILKQEFHFAGHDLTWRAIFLLPLLILTVTTILSPFVLKDVVDNKSVKLEVPSLILSIIGFGSFLWGFTNVATYGWGDIGYVISPIMVGIIFIALFIHRQLKLETPFLDIRVFKNKQFSVTTAAIALSMMAMMGVEMMLPLYLQNVHGLSALDSGLALLPGALMMGIVSPISGAVYDKVGARRMAMIGFTILGVATLPFVFLTTTTPDHFITLLYAVRMFGIAMVMMPLTASAMSALPPHEAAHGTAANNTARQIASAVVVALLSSVAQNIITNNKPSKDLLTMNPLKYANQMLNASLDGFHVSFAIGFVFAVLGLLVSLFLRKGKIIETEKEV

SEQ ID NO: 3563 - DNA, 738 bp, Streptococcus agalactiae
ttgagacggaaaaggaggtatagcatgattattttgattattgcactggcaactattttgacatttgtcacatggatgttgattcgtccaaaagctctacggtatattctaggtcttctctcattagctttgttgtttgcctcagtttggatgttaacggatcactttattaatcatacaggtatgactattgaaactaagacaaagacacgtgagatttatagtgcgggtgatagtaaggctccatttggtctcatgatttataaagagattggtactcattcgagtaataatgttttagtttatcgaacagatttaaatcaaaaagaagcaaaagctcactttgttccaaatacaaaagaagtgacaagtgctgtgaaaaaatctgctagctaccaattagctgatgtgaaaaaagccacagtaacaacaaagactaaacgttatgtgtggaaagatagtctttcgaaactactttatggctttgcaggtgaaaatggagaattgatttctcagaaatcagttgctaaaataccacgaaaaacttggctagttttgactaaagagcagtccgaacacttagaatcggctgcggctaaactaaaagaacaaatgacttcgcaagcaaaagtaaacccagtgaaagctatggagataaagacattagctaagacaaatccagaagcttatgctgagatgcaagttaaagcattaaaagaagctcttaatataaaagaa

SEQ ID NO: 3564 - protein, 246 aa, Streptococcus agalactiae
MRRKRRYSMIILIIALATILTFVTWMLIRPKALRYILGLLSLALLFASVWMLTDHFINHTGMTIETKTKTREIYSAGDSKAPFGLMIYKEIGTHSSNNVLVYRTDLNQKEAKAHFVPNTKEVTSAVKKSASYQLADVKKATVTTKTKRYVWKDSLSKLLYGFAGENGELISQKSVAKIPRKTWLVLTKEQSEHLESAAAKLKEQMTSQAKVNPVKAMEIKTLAKTNPEAYAEMQVKALKEALNIKE

SEQ ID NO: 3565 - DNA, 399 bp, Streptococcus agalactiae
atgggttttgaacaacgtctaactagatgtcaaacagcaatttcacaattatcatgtgacgcactcttaataacaaatttaacaaatattttttatttgactggtttttcaggaactaatgcaacggtactcattagtccaaaacaccggatttttgttacagattcacgatatgccttgatagcaaagaatactgtaagagagtttgatattatcattagcagagaaccacttgcggctattttgaaaattattcgcgatgacgcattgatagcgattggttttgaaactgatatttcttatcatatgtacaaacatatggtggaagtttttgaagattatcgcttgatagaagctccatctgttgttgaaaagttacgtatgattaaagatgtaaca

SEQ ID NO: 3566 - protein, 133 aa, Streptococcus agalactiae
MGFEQRLTRCQTAISQLSCDALLITNLTNIFYLTGFSGTNATVLISPKHRIFVTDSRYALIAKNTVREFDIIISREPLAAILKIIRDDALIAIGFETDISYHMYKHMVEVFEDYRLIEAPSVVEKLRMIKDVT

SEQ ID NO: 3567 - DNA, 1110 bp, Streptococcus pyogenes
atgctacaatattctcaaaagttaccaaaggagttcgcgatgtcaggatttttagaacaacgattaggtcactgcctaaggcagatggcagagaaggggctagaggctcttctagtcacccatttaaccaatagttattacttgacaggtttttctggaactgcagcaactgttttgataacggccaaacgtcgtgttttgatcacagattcacgttataccttgcttgctaaagctagtgttgagggatttgatattatcgaaagccgcacgccgcttaaggttgtggcagaattgttagaggctgatcaaatagattgccttggttttgaggaccaggtatcgttttctttttaccaggccatgcaagcagaactgtcaggaataaccttgcttgctcagtcaggttttgtggagcatttacgtcttattaaggacgcctctgaaatcgataccattgctaaagcgtgctcgatctcagacaaagcatttgaagatgctcttgattttattaaaccagggacaaccactgaacgtgacctggctaattttttagattttcgtatgcgtcagtatggtgccagcggcacatcatttgatatcattgtagcttcaggctatctctctgccatgcctcatggacgcgccagtgacaaggttatccagaataaagagagcttgaccatggactttgggtgttactacaatcactatgttagtgatatgacgaggaccattcatattggccaagttactgatgaagaacgtgagatttatgctcttgttcttgctgctaataaggctttaattgctaaagctagcgctggcatgacttatagtgactttgacggtattccgcgccaactcatcactgaggcgggttatggcagtcgcttcacacatggcattggtcatggcatcgggcttgacatccatgagaatccattttttgggaaatctgagcaacttctccaagctggaatggtggtaacagatgagccaggtatctatttggataacaaatatggtgtccgtattgaagatgacttggttatcacaaaaactggttgtcaagtcttgaccttggcacccaaagaattaattgtattg

SEQ ID NO: 3568 - protein, 370 aa, Streptococcus pyogenes
MLQYSQKLPKEFAMSGFLEQRLGHCLRQMAEKGLEALLVTHLTNSYYLTGFSGTAATVLITAKRRVLITDSRYTLLAKASVEGFDIIESRTPLKVVAELLEADQIDCLGFEDQVSFSFYQAMQAELSGITLLAQSGFVEHLRLIKDASEIDTIAKACSISDKAFEDALDFIKPGTTTERDLANFLDFRMRQYGASGTSFDIIVASGYLSAMPHGRASDKVIQNKESLTMDFGCYYNHYVSDMTRTIHIGQVTDEEREIYALVLAANKALIAKASAGMTYSDFDGIPRQLITEAGYGSRFTHGIGHGIGLDIHENPFFGKSEQLLQAGMVVTDEPGIYLDNKYGVRIEDDLVITKTGCQVLTLAPKELIVL

SEQ ID NO: 3569 - DNA, 612 bp, Streptococcus agalactiae
gtgttggattttataaagcctgatcgaacaactgaattgcaagttgctaattttttagactttcgcatgagagaattaggagcaactggtccttcatttgattttattgtagcatctggatatcgatcagcgatgccacatggggttgcgagtcagaagactattcaatcgggagaaactctgactttagattttggttgttactatcagcactatgttagtgatatgacacgtacgattcatatcggtcatgtcactgatcaggaacgcgagatttacgatatcgttttgaaaagtaatcaagctattattggtaatgtaaaatcaggaatgaagcgttgtgattatgattacttggcgcgacaagtcattgaaaattctggatacggtaatcattttacccacggtatagggcatggtatggggcttgatgttcatgaaattccttattttggtaagtcagagggagtgattgcatctgggatggtagtgactgacgagccaggaatatatctcgataataaatacggtgttcgtattgaagatgatttattaataacggaaacaggttgcgaagtattgacatctgcacctaaagaattaattgtactt

SEQ ID NO: 3570 - protein, 204 aa, Streptococcus agalactiae
MLDFIKPDRTTELQVANFLDFRMRELGATGPSFDFIVASGYRSAMPHGVASQKTIQSGETLTLDFGCYYQHYVSDMTRTIHIGHVTDQEREIYDIVLKSNQAIIGNVKSGMKRCDYDYLARQVIENSGYGNHFTHGIGHGMGLDVHEIPYFGKSEGVIASGMVVTDEPGIYLDNKYGVRIEDDLLITETGCEVLTSAPKELIVL

SEQ ID NO: 3571 - DNA, 450 bp, Streptococcus agalactiae
atgaatagactttcttgggaagattattttatggcaaatgcagagttgatttctaaacgttctacctgtgaccgtgcttttgttggagctgttttagtcaaaaataatcgcatcattgctacaggttataacggaggagtctctgagacagataactgtaacgaagtgggacattatatggaagatggtcactgtattaggactgttcatgctgagatgaatgcccttattcagtgtgctaaagaaggtatttctactaataatacagaaatttatgtgacgcattttccttgtatcaattgcaccaaggcgctcttgcaagccggggttaagaaaattacttataaagctaattatcgcccacacccatttgctattgaacttatggaagcaaaaggagttgcttatgttcaacatgatgttccagaggtaacactagggatggaagag

SEQ ID NO: 3572 - protein, 150 aa, Streptococcus agalactiae
MNRLSWEDYFMANAELISKRSTCDRAFVGAVLVKNNRIIATGYNGGVSETDNCNEVGHYMEDGHCIRTVHAEMNALIQCAKEGISTNNTEIYVTHFPCINCTKALLQAGVKKITYKANYRPHPFAIELMEAKGVAYVQHDVPEVTLGMEE

SEQ ID NO: 3573 - DNA, 504 bp, Streptococcus pyogenes
ttgtattgtaaaagaatggttcaggaaaggattaggggagaagcaatgacaaatcgtttatcatggcaagactattttatggccaatgcagagctgatttccaagcgctctacctgtgatcgcgcctttgtgggagctgttttggtaaaggataaccgcattattgccacaggttacaatggcggagtttctgctacggataactgcaacgaagcgggtcattatatggaagacggacattgtattcgcactgttcatgctgaaatgaatgctttgattcaatgtgcgaaagaaggaatttcaacggacggaactgaaatttacgtgactcattttccttgtattaactgcactaaggcgcttttgcaggcggggattacaaagattacctataaagcacattaccgtccgcacccctttgccattgaactgatggagaaaaaaggggttgcctatgtgcaacatgatgtgcctcaaattgttttaggaggcgataaggaacaa

SEQ ID NO: 3574 - protein, 168 aa, Streptococcus pyogenes
LYCKRMVQERIRGEAMTNRLSWQDYFMANAELISKRSTCDRAFVGAVLVKDNRIIATGYNGGVSATDNCNEAGHYMEDGHCIRTVHAEMNALIQCAKEGISTDGTEIYVTHFPCINCTKALLQAGITKITYKAHYRPHPFAIELMEKKGVAYVQHDVPQIVLGGDKEQ

SEQ ID NO: 3575 - DNA, 162 bp, Streptococcus agalactiae
ttgttgctgacctcaatagatgtaaatccagtttatgctaatatggcatttgattgggtgtatgataactataaagatgatatcatcaattatggacaagaaactatcaaaaatattggtaaatccatttcagctaataatagtttaggtactttatataat

SEQ ID NO: 3576 - protein, 54 aa, Streptococcus agalactiae
MLLTSIDVNPVYANMAFDWVYDNYKDDIINYGQETIKNIGKSISANNSLGTLYN

SEQ ID NO: 3577 - DNA, 168 bp, Streptococcus agalactiae
ttgaataagatattagcaattggtactgaaattgcacctgtgataggagcagttgcttcgattggtgtaaaagcattgtataataattctaaatcatttagaaatgttataagtagtacaggaaatgtaattaacaatattgataaacattttacaaaaataaatagt

SEQ ID NO: 3578 - protein, 56 aa, Streptococcus agalactiae
MNKILAIGTEIAPVIGAVASIGVKALYNNSKSFRNVISSTGNVINNIDKHFTKINS

SEQ ID NO: 3579 - DNA, 297 bp, Streptococcus agalactiae
atgttattaccagtagggagtgttgtctatcttattgatggcaatcaaaaattagttattgtaaatagaggtgcaattgttgagcaagaaggacaagaagtttattttgattacctaggtggaatttttcctgagggtttaaatcttgaacaagtttactattttaatcaagaagatattgatgaggttgtttttgaaggttaccatgatgaggaggaagaaagagtttctcgtctcattgaaaaatggaaaaatacagagggaaagaatcttccaaagggaaagactagtgtagaa

SEQ ID NO: 3580 - protein, 99 aa, Streptococcus agalactiae
MLLPVGSVVYLIDGNQKLVIVNRGAIVEQEGQEVYFDYLGGIFPEGLNLEQVYYFNQEDIDEVVFEGYHDEEEERVSRLIEKWKNTEGKNLPKGKTSVE

SEQ ID NO: 3581 - DNA, 144 bp, Streptococcus agalactiae
gtgaatatgctattgatagatgtcatgatacacttatcagaagaaaacgaaaagggctttactaaattacaattctttactcgacaaattgtggttggtgtaaactggtatgtacttcccaaaattgataactatttcaacccc

SEQ ID NO: 3582 - protein, 48 aa, Streptococcus agalactiae
MNMLLIDVMIHLSEENEKGFTKLQFFTRQIVVGVNWYVLPKIDNYFNP

SEQ ID NO: 3583 - DNA, 558 bp, Streptococcus agalactiae
atgattgaagcaagtaagcttaaagcaggcatgacttttgaaacggctgatgggaaattaatccgtgttcttgaagctagccaccacaaaccaggtaaaggtaacacaatcatgcgtatgaaattgcgtgatgttcgtactggttcaacttttgatacaagttaccgtcctgaagaaaaatttgagcaagctattattgaaactgtacctgctcaatacctttataagatggatgatacagcttacttcatgaataatgaaacttacgatcaatatgaaattccaactgttaacattgaaaatgaattactctacattcttgaaaactcagaagtaaaaattcaattctatggaacagaagttattggtgttcaaattccaacaactgttgaattgacagttgctgaaactcaaccatcaatcaaaggtgctactgtaactggttcaggaaaacctgcaactatggaaacaggacttgttgttaacgttccagattttattgaagctggacaaaagttagtaatcaatacagcagaaggaacttacgtttcacgcgcc

SEQ ID NO: 3584 - protein, 186 aa, Streptococcus agalactiae
MIEASKLKAGMTFETADGKLIRVLEASHHKPGKGNTIMRMKLRDVRTGSTFDTSYRPEEKFEQAIIETVPAQYLYKMDDTAYFMNNETYDQYEIPTVNIENELLYILENSEVKIQFYGTEVIGVQIPTTVELTVAETQPSIKGATVTGSGKPATMETGLVVNVPDFIEAGQKLVINTAEGTYVSRA

SEQ ID NO: 3585 - DNA, 555 bp, Streptococcus pyogenes
atgattgaagcaagtaagcttaaagcaggtatgacatttgaagcagaaggaaaattaatccgtgtccttgaagctagccaccacaaaccaggtaaaggaaacactatcatgcgtatgaaactacgtgatgtgcgtacaggttctacttttgacacaacttaccgcccagatgaaaaatttgagcaagccatcattgaaactgtcccagcacaatacctatacaaaatggatgacactgcttacttcatgaacactgacacttatgatcagtacgaaattccagttgctaacgttgagcaagaattgctttacattcttgaaaactcagacgtgaaaatccaattttatggaagtgaagtgattggggtaacggttccaacaactgttgaattgaccgttgcggaaacacaaccatctattaaaggagcgacagtgacgggttcagggaaacctgcaactcttgagacaggacttgttgttaacgttccagactttatcgaagctggccaaaaactaatcattaacactgcagaaggtacttacgtttctcgtgct

SEQ ID NO: 3586 - protein, 185 aa, Streptococcus pyogenes
MIEASKLKAGMTFEAEGKLIRVLEASHHKPGKGNTIMRMKLRDVRTGSTFDTTYRPDEKFEQAIIETVPAQYLYKMDDTAYFMNTDTYDQYEIPVANVEQELLYILENSDVKIQFYGSEVIGVTVPTTVELTVAETQPSIKGATVTGSGKPATLETGLVVNVPDFIEAGQKLIINTAEGTYVSRA

SEQ ID NO: 3587 - DNA, 387 bp, Streptococcus agalactiae
atgacaactgaaaatcttggagaaattgtcatttcaccacgtgtacttgaggtaattacaggtattgctgcaactaaagttgatggtgttcattcgttacgtaacaaagcggtaacggatagccttagtaagaaatctctaggtagaggtgtctaccttaaaaatgaagaagatgatacagtagctgcagatatttatgtttacttgcagtatggtgtaaatgtaccagcagtttcaattgctattcaacaagctgtcaaaacagctgtatatgacatggcagaagtaaaaatttcttcggtcaatatccatgttgaaggtattgttccagagaaaacaccaaaaccagacttgaagtcattgtttgatgaggatttcttagatgac

SEQ ID NO: 3588 - protein, 129 aa, Streptococcus agalactiae
MTTENLGEIVISPRVLEVITGIAATKVDGVHSLRNKAVTDSLSKKSLGRGVYLKNEEDDTVAADIYVYLQYGVNVPAVSIAIQQAVKTAVYDMAEVKISSVNIHVEGIVPEKTPKPDLKSLFDEDFLDD

SEQ ID NO: 3589 - DNA, 387 bp, Streptococcus pyogenes
atgacaactgaatatatcggtgaaatcgtcatttcaccacgagtgcttgaggttattacggggattgctacgacacaagttgagggcgtccactcactccataacaagaaaatggcagatagctttaacaaagcaagtcttggtaaaggggtttatctccagacagaagaagatggaagtgttacagcagatatttatgtttacttgcaatatggagtcaaggtcccgactgtatctatgaatattcaaaaaacagtcaaatctgctgtgtacgatatggcagaagtgcctatttctgcagttaatatccatgttgaaggtattgttgcggaaaagacaccaaaaccagatttgaagtcactttttgatgaggatttcttggatgac

SEQ ID NO: 3590 - protein, 129 aa, Streptococcus pyogenes
MTTEYIGEIVISPRVLEVITGIATTQVEGVHSLHNKKMADSFNKASLGKGVYLQTEEDGSVTADIYVYLQYGVKVPTVSMNIQKTVKSAVYDMAEVPISAVNIHVEGIVAEKTPKPDLKSLFDEDFLDD

SEQ ID NO: 3591 - DNA, 432 bp, Streptococcus agalactiae
atgactagtgtatttaaagattcaagacgtgatttacgtgaacgtgcttttcaaacactatttagcttagaaactggtggagagtttattgatgcggctcactttgcttatggttatgataaaacagtatctgaagacaaagttttagaggttccaatctttttacttaatcttgttaatggtgttgtagatcacaaagatgaattagatactttgatttctagtcacttaaaatcaggatggagcttagaacgtctaacattggttgataaatctctcttacgcttaggcctctatgaaattaaatattttgatgaaacgcctgatcgtgtagctctaaatgagattatcgagattgctaaaaaatattcagatgagacgtcagcaaaatttgtcaatggtttattaagtcaatttataacaaatgaaaat

SEQ ID NO: 3592 - protein, 144 aa, Streptococcus agalactiae
MTSVFKDSRRDLRERAFQTLFSLETGGEFIDAAHFAYGYDKTVSEDKVLEVPIFLLNLVNGVVDHKDELDTLISSHLKSGWSLERLTLVDKSLLRLGLYEIKYFDETPDRVALNEIIEIAKKYSDETSAKFVNGLLSQFITNEN

SEQ ID NO: 3593 - DNA, 468 bp, Streptococcus pyogenes
ttgatgaggatttcttggatgactaacagctttcaaaattcaagaagagatttgcgtgaacgtgcctttcaggctttatttaacatagagatgggagctgagttattggcagcttctcagtttgcctatggttatgataaagtaacaggggaggacgctcaagtattggagctgccgatttttttattaagtcttgtgacgggtgtcaataatcataaagaagagttggataacttgatatcaactcatttgaaaaaaggttggtcgttagaacgcttgacactaacagacaaaacgttattacgactaggtctttttgaaatcaagtattttgacaaaacaccagatcgtgttgcactaaacgaaatcattgaagtagttaaaaaatattctgatgaaacctctgctaaatttattaatggcttacttagccaatatgtctcgggagctccttcagcaaataaatca

SEQ ID NO: 3594 - protein, 156 aa, Streptococcus pyogenes
LMRISWMTNSFQNSRRDLRERAFQALFNIEMGAELLAASQFAYGYDKVTGEDAQVLELPIFLLSLVTGVNNHKEELDNLISTHLKKGWSLERLTLTDKTLLRLGLFEIKYFDKTPDRVALNEIIEVVKKYSDETSAKFINGLLSQYVSGAPSANKS

SEQ ID NO: 3595 - DNA, 960 bp, Streptococcus agalactiae
atggttgcaaaattaacagatgttgctgcacttgccggtgttagcccaacgactgtatcacgcgttattaacaaaaaaggctatttatctcaaaaaacagtcaccaaagtcaatgaagccatgagaacccttggttataaacctaataatttagcacgtagcttacagggaaagtccgctaaattaattggactcattttccccaacatccgtaacattttttacgctgaattaattgaacaccttgaaattgagttgtttaagcatggttataaaactatcttatgtaatagtgaaaaggatcctatcaaagaaaaagaatacctcgaaatgctaggagcaaatcaagtagacggtatcatttcaagtagtcacaacctaggaattgatgattacgagaaagttgaggctcccatagtagcattcgatagaaatttagctccacacatccctatcgtctcatctgataatttctttggaggaaaaatggctgctcaaacccttaaaaaacatggctgtcaaaagatgattatgattacagggaatgataattcagattctcctactggacttaggcggctaggtttttcctatgaatcaaaggaatccaaagttatcacagtcacaaatgggctatctaacatgagacgtgagatggaattaaaatcaattatctcgactcacaaaccagatggtatttttacatcagacgacttaactgctttattagtaatcaaacttatcagccaactagggttgtccattccagaagatatcaaagtgattggatatgatggtacaagtttcattcaagattacgtcccacatctaaccactattaaacaacctattcgagaaattgcgcaattgatggttgagatactcctagctaagattgaggggcaaaagacaaataaggattatattttaccagtcagtctcatccctggtagtagcgtt

SEQ ID NO: 3596 - protein, 320 aa, Streptococcus agalactiae
MVAKLTDVAALAGVSPTTVSRVINKKGYLSQKTVTKVNEAMRTLGYKPNNLARSLQGKSAKLIGLIFPNIRNIFYAELIEHLEIELFKHGYKTILCNSEKDPIKEKEYLEMLGANQVDGIISSSHNLGIDDYEKVEAPIVAFDRNLAPHIPIVSSDNFFGGKMAAQTLKKHGCQKMIMITGNDNSDSPTGLRRLGFSYESKESKVITVTNGLSNMRREMELKSIISTHKPDGIFTSDDLTALLVIKLISQLGLSIPEDIKVIGYDGTSFIQDYVPHLTTIKQPIREIAQLMVEILLAKIEGQKTNKDYILPVSLIPGSSV

SEQ ID NO: 3597 - DNA, 963 bp, Streptococcus pyogenes
gtggtcgcaaaattaacagacgtggcagccttggcgggtgtcagtccaacaactgtttcgcgagtaatcaacaaaaaaggctacctttcccaaaaaacagtgaataaggtgaataaggccatgcgtgaattgggctacaagcctaacaatctcgctagaagtttgcaaggtaaatcaacccaactcattgggcttatcttccccaacattagcaatatcttttacgctgaattaattgaacatttggaaattgaattgtttaaacagggctacaaaactattatttgcaatagtgaacataatcccgtcaaagaacgcgaatatttagaaatgcttgcggccaatcaagtggacggcattatttcttccagtcataatttgggaattgaggattatgagcgtgtcgaagctcctattgtagcttttgaccgtaatctagcgccaaatatcccggttatttcttcagataattttgaaggtggtaaattagccgcacaaactttgcaaaaacacggttgtcaaaacattgtcatgattacaggtaatgacaattctgattcgcccacagggttgcgccagctagggtttaactaccagctcaaacgaagtgcagaaatcatcaaattaccaaataacctatctcctgttagacgcgaaatggaaattaaatccattttggcaacccgaaaacctgatggccttttcgtttctgatgatttaactgctatcctcattatgaaagtagccaaacaacttcacattactattccagaggatatgaaagtcataggttatgatggaacgacatttatccagcaatatgttcctcaattagcgaccattcgtcaacctattgatgagattgctaaattgagtgtcgaaatactcatcaaaaaaattaaaaaagaaaaaaccagtaaagactatattttaccgattacgctacttccaggagcaagtatt

SEQ ID NO: 3598 - protein, 321 aa, Streptococcus pyogenes
VVAKLTDVAALAGVSPTTVSRVINKKGYLSQKTVNKVNKAMRELGYKPNNLARSLQGKSTQLIGLIFPNISNIFYAELIEHLEIELFKQGYKTIICNSEHNPVKEREYLEMLAANQVDGIISSSHNLGIEDYERVEAPIVAFDRNLAPNIPVISSDNFEGGKLAAQTLQKHGCQNIVMITGNDNSDSPTGLRQLGFNYQLKRSAEIIKLPNNLSPVRREMEIKSILATRKPDGLFVSDDLTAILIMKVAKQLHITIPEDMKVIGYDGTTFIQQYVPQLATIRQPIDEIAKLSVEILIKKIKKEKTSKDYILPITLLPGASI

SEQ ID NO: 3599 - DNA, 1437 bp, Streptococcus agalactiae
atgaatttacccactgaaatccgctatcgtccttatgatgaatggactgaagaagataaggaaaatattgtaaagaatgtctcaaaatccccttggagagcaacttatcacttagaagctaaaacagggcttttaaatgacccaaatggcttctcttactttaatggaaaattccatcttttttaccaaaattggccctttggagctgcacatggtttaaaacaatgggtacatacagaatcagatgatttagttcatttcaaagaaacaggaatcaagcttaaacctgaccatgtcaatgatagccatggtgcatactccggttctgcattagccattgacgataagctttttcttttttatactggtaatgtccgtgacatgaaatggaaccgtgacccccgccaaattggagcatggatgacaaatgatggcaagattacaaaatttgataaagtccttatttcacaaccaaatgatgtcactgagcattttcgtgaccctcagattttcaattatgataatcaattctatgctgttatcggggcgcaaaatagtaaaaaatgcggattcattaaattatataaagcacttaataatgacatccatcattgggagtttgtgggagatttagattttggtggtactggatctgagtatatgattgaatgtccaaatattatttttgtcaaaggaaaacctgtattactttatagtcctcaaggactagataaaaacgaattggactaccaaaacatttatccaaatacctacaaaatcggacaatatttcgatgctaactcatctaagatagttgaaccatcccctatctataatttagattatggttttgaagcctatgctactcaaggatttaacacttctgatggtcgtgcctttatcgtgagttggataggcttgccagatattgattatcctagcgatcaatttgattatcaaggagctatgagtttagttaaagagttaagcataaaaaatgggaacctttatcaatatcccgttcctgctatgaaaaatcttcgtcaacatcaagcagaatttaaaacacaacttcaaactaacaacacctatgaattagaattactggttcctagaaatgatctttcttcatttgttctctttgctaatccgaaaggacaaggactatccattactattgatactgtaaaggggaaagttatcattgaccgctcacaagccggacagcagtacgccacagaatttggtactagtcgccagtgtgacattccaaaagatgctactagtatcaatatttttatcgataagtccatctttgaaatctttataaataaaggagaaaaagtatttacgggacgagtctttccagatgcagaacaatcagggattcaactaaaagaagggcacgttcatggtaaatattttgaattaaaatat

SEQ ID NO: 3600 - protein, 479 aa, Streptococcus agalactiae
MNLPTEIRYRPYDEWTEEDKENIVKNVSKSPWRATYHLEAKTGLLNDPNGFSYFNGKFHLFYQNWPFGAAHGLKQWVHTESDDLVHFKETGIKLKPDHVNDSHGAYSGSALAIDDKLFLFYTGNVRDMKWNRDPRQIGAWMTNDGKITKFDKVLISQPNDVTEHFRDPQIFNYDNQFYAVIGAQNSKKCGFIKLYKALNNDIHHWEFVGDLDFGGTGSEYMIECPNIIFVKGKPVLLYSPQGLDKNELDYQNIYPNTYKIGQYFDANSSKIVEPSPIYNLDYGFEAYATQGFNTSDGRAFIVSWIGLPDIDYPSDQFDYQGAMSLVKELSIKNGNLYQYPVPAMKNLRQHQAEFKTQLQTNNTYELELLVPRNDLSSFVLFANPKGQGLSITIDTVKGKVIIDRSQAGQQYATEFGTSRQCDIPKDATSINIFIDKSIFEIFINKGEKVFTGRVFPDAEQSGIQLKEGHVHGKYFELKY

SEQ ID NO: 3601 - DNA, 1440 bp, Streptococcus pyogenes
ttgatggatctaccacaagctattcgctaccgcccttacaaagagtggagctcaaaagactaccaagctattactgaaaaaatggcccaatccccatggcacagccaatttcatgtcgaacctaagacaggattactcaatgaccccaatgggttttcttatttcaacggtcgctaccatcttttttatcaaaactggccttatggcgctgcgcacggtctgaaacaatgggtacacatgacatccacagacctcgtccattttacggaaacaaggagccgccttctgccagaccacgctcacgatagtcatggggcttactcaggttctgcatatgctattgatgacaagctcttcctcttttacactggtaatgttcgcgatgccaattgggtcagaacaccattacaggttggcgcatggatggataaacaaggaaatatttccaaaataccacaggttttgattgaacagcccgatgatgttacagaacattttcgggatcctcagcttttttcttatcaaggtcaattctatgctattattggcgcccaaggtttagatggcaaaggaaaaatcaaactttacaaagctgtggacaatcatgtggacaactggcgatttatagccgatttggactttgacgattctggtacggaatacatgattgaatgccccaaccttgtgtttgtcgatgacaagcctgttttgattttcagcccacaaggactggctaaagctgatttagattatcaaaatatctaccccaatacctataaaatttttgaaagcttcaatccagaaactggccaattgctgggtggaggggcccttcaaaatcttgactttggttttgaagcttatgccactcaagcctttagtagtccagatggcagggttctagccgtgtcttggattgggttaccagatattgattatccgacagatcgttatgactatcaaggagctcttagtttagtgaaagaattaaggattaaagacggaattctctatcaaacacctgtttcagccctacaaaatcttcgagggccagcagaattatttcataataaaatagacagttctaactgttatgaattggaattgacgattccaggccaaaaaaagcttgacctgctcctatttgccgaccaaaaagggaatggcctaagattgaaagtggatacaacaaaaggacagttaagcattgaccgaagtcgggcaggggttcaatatgcccaagactatggtacggtgcgctcttgccaaatcccacaaggccatgttacacttaatgtctatgtggacaattccattcttgaaatctttattaaccaagggcaaaaagtcctaactagtcgggttttcccaacccacggacaaacaggtatccaagtagtagaaggacaagcttttggacattattatgaaatgaggtat

SEQ ID NO: 3602 - protein, 480 aa, Streptococcus pyogenes
LMDLPQAIRYRPYKEWSSKDYQAITEKMAQSPWHSQFHVEPKTGLLNDPNGFSYFNGRYHLFYQNWPYGAAHGLKQWVHMTSTDLVHFTETRSRLLPDHAHDSHGAYSGSAYAIDDKLFLFYTGNVRDANWVRTPLQVGAWMDKQGNISKIPQVLIEQPDDVTEHFRDPQLFSYQGQFYAIIGAQGLDGKGKIKLYKAVDNHVDNWRFIADLDFDDSGTEYMIECPNLVFVDDKPVLIFSPQGLAKADLDYQNIYPNTYKIFESFNPETGQLLGGGALQNLDFGFEAYATQAFSSPDGRVLAVSWIGLPDIDYPTDRYDYQGALSLVKELRIKDGILYQTPVSALQNLRGPAELFHNKIDSSNCYELELTIPGQKKLDLLLFADQKGNGLRLKVDTTKGQLSIDRSRAGVQYAQDYGTVRSCQIPQGHVTLNVYVDNSILEIFINQGQKVLTSRVFPTHGQTGIQVVEGQAFGHYYEMRY

SEQ ID NO: 3603 - DNA, 171 bp, Streptococcus agalactiae
atgggatgggcatcacctgaggccactgcccaagcgtttggaagggcagagttgaccatcatcaatcctaatacgagaccgataacaggatttccaccaaaaactctaaaagctgaccaagaaatcaaggcaggaaaaaaagcaaaggccgtgtcagtcaaaacgacagta

SEQ ID NO: 3604 - protein, 57 aa, Streptococcus agalactiae
MGWASPEATAQAFGRAELTIINPNTRPITGFPPKTLKADQEIKAGKKAKAVSVKTTV

SEQ ID NO: 3605 - DNA, 1917 bp, Streptococcus agalactiae
atggcttcaaatacagaaattgctaaacaagtcattaatgcgattggtggtgctagtaatgtgcgtagcgtagcacactgtgccactcgtcttcgcgttatggtaaaagatgagacagtcattgataaaaatactgttgaaaatatcgaaaaagttcagggagcatttttcaattcaggtcaatatcaaattatttttggaactggtactgttaataagatttatgatgaagtagtggctcaaggtttgccaacttcgtcaacctctgatcaaaaggcagaagcagctaaacaagggaatgctttccaacgagctattcgtactttcggtgatgtttttgttccattgttgccagccattgttgctactggtttatttatggggattcgcggtgcgattaataatgatacagttttagctttatttgggacgacttcaaaagcattttcaagttctaatttttatacctatactgtcgttttgactgacacggcctttgctttttttcctgccttgatttcttggtcagcttttagagtttttggtggaaatcctgttatcggtctcgtattaggattgatgatggtcaactctgcccttccaaacgcttgggcagtggcctcaggtgatgcccatcccataaaatttttcggttttattccagtagttggttatcaaaattcagtattgccggcattctttgtaggtttacttggtgctaaacttgaaaaatggttgcataagaaaatcccagatgttcttgatttactattagtgccgttcctaacttttacagttatgtcaattttagcactttttgtcattggtcctattttccattcagttgaaaactatgttttagcagggacaaaatttgtccttaatttacctcttggcctgtcaggtcttattttaggtggtgttcatcagataatcgttgttacaggtgttcatcatatctttaatttacttgaagctcagttaattgctgctgatgggaaagatccatttaatgctattattacagctgctatgacagcacaagcaggtgccactttggcagttggtgttaaaacaaaaaataaaaaattaaaagcccttgcttttccggcagcgctttcagctggacttggtattacagaaccggctatatttggagtaaacttacgttttggtaagccatttattatgggattaattgcaggagcagcaggtggctggttagcttcaatattgaaattagcaggaactggttttggtattaccattatcccaggaacattactttatttaaatggtcaaattgttaagtaccttattatggtaattggaactacgtctttggcttttgtattaacttatatgtttggatatgaagataaagatgaaaaagcagtagctgaagttagtcctttggttgaagaaacagatgacgatccaacaattactcaaactagccaattaagggcagaaacgattgttagccctcttgatggacaggttattgctcttgatacagtaagtgacccagttttttcatcaggtattatgggagatggccttgctattaaaccaagaggtaatacaatttactcacctgttgatggttttgtccaaattgcttttgaaacaggtcatgcttacggtatcaaatcagataaaggtgcagaaattttgattcatataggtattgatactgtcaccatgaatggcacagggtttacttctaaagtcaaggcagaccaaaaagtgaaaaaaggtgatattcttggcacctttgattcagccaagattgcagaagcaggtctggataatacagctatgattattgtgactaatacagctgattttgctgatgttgtaccattggtaaaagagggtgttgttactacaggtgacatgattattgatgttaag

SEQ ID NO: 3606 - protein, 639 aa, Streptococcus agalactiae
MASNTEIAKQVINAIGGASNVRSVAHCATRLRVMVKDETVIDKNTVENIEKVQGAFFNSGQYQIIFGTGTVNKIYDEVVAQGLPTSSTSDQKAEAAKQGNAFQRAIRTFGDVFVPLLPAIVATGLFMGIRGAINNDTVLALFGTTSKAFSSSNFYTYTVVLTDTAFAFFPALISWSAFRVFGGNPVIGLVLGLMMVNSALPNAWAVASGDAHPIKFFGFIPVVGYQNSVLPAFFVGLLGAKLEKWLHKKIPDVLDLLLVPFLTFTVMSILALFVIGPIFHSVENYVLAGTKFVLNLPLGLSGLILGGVHQIIVVTGVHHIFNLLEAQLIAADGKDPFNAIITAAMTAQAGATLAVGVKTKNKKLKALAFPAALSAGLGITEPAIFGVNLRFGKPFIMGLIAGAAGGWLASILKLAGTGFGITIIPGTLLYLNGQIVKYLIMVIGTTSLAFVLTYMFGYEDKDEKAVAEVSPLVEETDDDPTITQTSQLRAETIVSPLDGQVIALDTVSDPVFSSGIMGDGLAIKPRGNTIYSPVDGFVQIAFETGHAYGIKSDKGAEILIHIGIDTVTMNGTGFTSKVKADQKVKKGDILGTFDSAKIAEAGLDNTAMIIVTNTADFADVVPLVKEGVVTTGDMIIDVK

SEQ ID NO: 3607 - DNA, 1860 bp, Streptococcus pyogenes
atggataatcgtcagattgcagctgaagtgattgaggctttaggtggccgagaaaatgtgagaagtgttgcccactgtgcaactcgccttcgcgtgatggtttatgatgaaggaaagattgataaggaaaaagcagaagctattgacaaggttaaaggagctttctttaactctggtcaatatcagatgatttttggaactggtaccgttaataacatttatgacgaagttgttgctcttggtttacccacgtcatcaaccagtgagcaaaaggcagaagcaggcaaacatggcaatatcttccaacgggcgattcgtacgtttggagatgtctttgttcccattattccagctattgtagcaacgggtctctttatgggggttcgtggtttggtgacccagccagctattatggatttatttggggtgcatgagtacggggaaaattttctcatgtacactcgtattctaacggatacagcctttgtctacttgccagctttggtggcttggtcagcctttagggtctttgggggtaatcctattatcggtattgttttaggattgatgctggtttccaatgagttgcctaatgcttgggtagttgcctctggtggagatgttaagccgctaaccttctttggatttgttcctgttgttggttatcaaggtaccgttttacccgccttctttgttggtctggtaggagctaagttggagaaatggttgcacaaaaaggttccagaagctttggacttattggtcacaccgtttttaacgtttgctattatgagtaccttgggactatttgtgattggaccagttttccattctcttgaaaaccttgttctggctgggacacaggccgtcttgcatttgccgtttggcattgcaggcttgattgttgggggaatccaacaattaatcgtagtgactggtattcaccatatctttaacttcctagaagcgcagctgattgccaataccggaaaagatcctttcaatgcttacctaacagcagcaacagctgctcaagctggagctaccttagctgttgctgttaaaaccaaatcaacaaaactaaaaggtctggcctttccatcaaccttgtcagctcttttagggattactgaaccagctatttttggggtcaacctccgttatccaaaagtctttgtttcaggtcttattggtggtgccttaggtggttgggtcgctgggctctttggcattgcaggaactggttttgggattacggtcttaccaggaactctcctttacttgaatggccaattattacaataccttgtgactatgcttgtcggtcttggggtagcctttgcaattgcttatacttggggttatcaagatagagaaacccttccgttaccagctgtcgaagttgatcaaacggctgatcagccagccttagcagaggaaactttatatagtcctttgaatggaacagttgtagacttatctgcggtttcagaccctgttttttcatcaggtgctatgggtcaaggcttagcaattaagccagaagataataccctatactcaccagttgatggtaaagttgaaattgtctttgaaacaggtcatgcctatgctataacgtcaagtcaaggagcagaagtgttacttcatattggtattgataccgagtcgatggcaggagatggctttgaatctcttgtagcagtaggtcaggcggttaaaaaaggggatcttcttggacactttgatcctagcaagattgcagaagctggactagatgacaccaccatgatgattgtgagcaatatcgctgactatcaaagcgtggacattcttgctcaaggacatgttttgaggtgg

SEQ ID NO: 3608 - protein, 620 aa, Streptococcus pyogenes
MDNRQIAAEVIEALGGRENVRSVAHCATRLRVMVYDEGKIDKEKAEAIDKVKGAFFNSGQYQMIFGTGTVNNIYDEVVALGLPTSSTSEQKAEAGKHGNIFQRAIRTFGDVFVPIIPAIVATGLFMGVRGLVTQPAIMDLFGVHEYGENFLMYTRILTDTAFVYLPALVAWSAFRVFGGNPIIGIVLGLMLVSNELPNAWVVASGGDVKPLTFFGFVPVVGYQGTVLPAFFVGLVGAKLEKWLHKKVPEALDLLVTPFLTFAIMSTLGLFVIGPVFHSLENLVLAGTQAVLHLPFGIAGLIVGGIQQLIVVTGIHHIFNFLEAQLIANTGKDPFNAYLTAATAAQAGATLAVAVKTKSTKLKGLAFPSTLSALLGITEPAIFGVNLRYPKVFVSGLIGGALGGWVAGLFGIAGTGFGITVLPGTLLYLNGQLLQYLVTMLVGLGVAFAIAYTWGYQDRETLPLPAVEVDQTADQPALAEETLYSPLNGTVVDLSAVSDPVFSSGAMGQGLAIKPEDNTLYSPVDGKVEIVFETGHAYAITSSQGAEVLLHIGIDTESMAGDGFESLVAVGQAVKKGDLLGHFDPSKIAEAGLDDTTMMIVSNIADYQSVDILAQGHVLRW

SEQ ID NO: 3609 - DNA, 879 bp, Streptococcus agalactiae
atgacaaagttatatggtagtattgaagcaggtgggacaaagtttgtttgtgcagttggtgatgaggaattaaaagttgtagaaaaaatgcaatttccaacaacgacgcctcaagaaacgattaaaaagactgttgatttctttaaaagatttgaaaagaagttagaggcagttgctattggttcttttggtcccattgatattgataaaaaatcaaagacatacggttatatcacaacgaccccaaagttgcattgggctaatgttgatttactcggcttaatttctaaagatttcaatgttccattttatttcacaacagatgttaatagctctgcctatggtgaagttatagctcgtaacaatattgattcacttgtttattacaccattggtacgggaattggtgcaggagctatacaaaagggtgaatttataggaggaactggtcatactgaagcaggtcatacttatatggcgatgcatccgcaggaccaagcaaatgattttaaaggtatctgtccgtttcataatagctgtttagaaggtttggcatctggtccaactctagaagctaggactggtattcgtggtgaattgattgaagaaaattcaatggtttgggatgttcaagcctattatattgctcaggctgcaatacaagcaactgtattatatcgtccacaagtcattgtatttggtggaggcgtcatggcacaagagcacatgttaagacgtgttcgccagacatttgcaactttattaaatgggtatttaccagttcccgatttgtctgattatattgtgacaccagctatagaagaaaatggttctgcaacgttaggaaattttgctttagcaaagaaaatatcaaaaggt

SEQ ID NO: 3610 - protein, 293 aa, Streptococcus agalactiae
MTKLYGSIEAGGTKFVCAVGDEELKVVEKMQFPTTTPQETIKKTVDFFKRFEKKLEAVAIGSFGPIDIDKKSKTYGYITTTPKLHWANVDLLGLISKDFNVPFYFTTDVNSSAYGEVIARNNIDSLVYYTIGTGIGAGAIQKGEFIGGTGHTEAGHTYMAMHPQDQANDFKGICPFHNSCLEGLASGPTLEARTGIRGELIEENSMVWDVQAYYIAQAAIQATVLYRPQVIVFGGGVMAQEHMLRRVRQTFATLLNGYLPVPDLSDYIVTPAIEENGSATLGNFALAKKISKG

SEQ ID NO: 3611 - DNA, 882 bp, Streptococcus pyogenes
atgggaaaattatatggaagcattgaagctggtgggacaaagtttgtctgtgccgtgggtgatgaggagtttacagtggtggataaaacacaatttccgaccaccacaccagaagaaaccatcgcgcgaaccatcgcttattttaaagcttttgaggcagatttggctggaatggcgattggttcttttggaccaattgatattgatccgtcgtcagagacttacggttatatcacaaccactcctaaatcaggctgggctaatgtggatttgttaggacaactttcggctgcttttaagattccttttgatgtgacaacagatgttaatagctctgcttatggtgaggtgcttgctcgtcctggtgtggaaagtttggtctattacaccataggtactggtattggggcgggagctattcaacatggccactttattgggggtttaggtcatacagaagcgggtcatacctatgtcatgccccatcctgatgatatggccaagggatttttaggtgtttgcccttttcataaagggtgtctggaagggatggcagcaggtccaagtattgaggccagaacgggagtgagaggtgaacggcttgatcaggaagctgatgtttgggacattcaagccttctacattgcccaagcagcgctgcaagcaactatgctttaccgtcctcaagtgattgtttttggcggaggtgtcatggcgcaagaacatatggtgttgcgcgtgcatgataaattcactgcccttttaagcggttatttgccagtccctgatttgacagactacattgttactccagctgttgctgataatggctccgctactctgggaaattttgctttggccaagttggctgcacaaggaaaa

SEQ ID NO: 3612 - protein, 294 aa, Streptococcus pyogenes
MGKLYGSIEAGGTKFVCAVGDEEFTVVDKTQFPTTTPEETIARTIAYFKAFEADLAGMAIGSFGPIDIDPSSETYGYITTTPKSGWANVDLLGQLSAAFKIPFDVTTDVNSSAYGEVLARPGVESLVYYTIGTGIGAGAIQHGHFIGGLGHTEAGHTYVMPHPDDMAKGFLGVCPFHKGCLEGMAAGPSIEARTGVRGERLDQEADVWDIQAFYIAQAALQATMLYRPQVIVFGGGVMAQEHMVLRVHDKFTALLSGYLPVPDLTDYIVTPAVADNGSATLGNFALAKLAAQGK

SEQ ID NO: 3613 - DNA, 945 bp, Streptococcus agalactiae
atgtcggaaccattatttttagaagcaagcatgcacgataaaatctggggtggaacaaagttaagggatgaatttggctatgatattccaagtgaaacaacaggagaatattgggctatttcagctcatcctaacggtgtctcaagagttaagaatggtcgctttaaaggttgttttttagataagctgtatcaaggtgaaaaaagcttatttggcaaccctgatgatactgtctttcctttactaactaaaatcttagatgctaatgactggcttagtgtacaggttcatccggatgatgcttatgctcttaaacatgaaggtgaacttggtaaaacagaatgttggtatattatttctgctgatgaaggatctgaaattatctatggtcataatgctaaaactaaagaagaacttcgccaaatgattgaatctggagattgggaacatcttttaacccgaattcctgttaaatcaggggatttttactacgttccaagtgggacaatgcatgctataggtaaagggatattaattttagaaacacagcaatctagtgatactacttatcgtgtttatgattttgatcgtccagatgcttcaggaaaattacgtgatttacacattgaacaatcaatagatgttctcacgattggtaaacctgccaatactgttcctgccaatatgaagttaaaacatctatcttcaactttattagtttcaaatgatttctttacagtttataaatgggaaatttctggtgttaccaactttaaacaatttgcaccctaccttttggttagtgtcttagacggagcgggtcacattacagtagataacaaagtttatacacttaaaaaaggtgaccactttatcttgccaaatgatgttgtcaaatgggatattgatggacagttagaaattatagcaagtcatgttaaaaaa

SEQ ID NO: 3614 - protein, 315 aa, Streptococcus agalactiae
MSEPLFLEASMHDKIWGGTKLRDEFGYDIPSETTGEYWAISAHPNGVSRVKNGRFKGCFLDKLYQGEKSLFGNPDDTVFPLLTKILDANDWLSVQVHPDDAYALKHEGELGKTECWYIISADEGSEIIYGHNAKTKEELRQMIESGDWEHLLTRIPVKSGDFYYVPSGTMHAIGKGILILETQQSSDTTYRVYDFDRPDASGKLRDLHIEQSIDVLTIGKPANTVPANMKLKHLSSTLLVSNDFFTVYKWEISGVTNFKQFAPYLLVSVLDGAGHITVDNKVYTLKKGDHFILPNDVVKWDIDGQLEIIASHVKK

SEQ ID NO: 3615 - DNA, 951 bp, Streptococcus pyogenes
atgtcagaaccattatttctaaaatcaaccatgcacgacaggatttggggtggcaccaagttgagagatgtctttgcttacaacatcccaagtgacaccacaggtgagtattgggctatttctgctcatcctaatggtgtttcgacagttactaatggacgttatcaaggacaacctttaaacacattatatgcgcaagagccggccttgtttgggaatccaaaggaagaagtttttccactgttaactaagattttagatgctaatgactggctaagtgtccaagttcatcctgatgatgcttatggacgtgaacatgaaggagaattaggcaagacagaatgctggtatattatttctgccgaagagggttctgaaattgtatacggccatcaggccaagtccaaagaagaccttcgtgccatgattgaagcaggcgcttgggatgatttgctgactcgtgtcccagtcaaagcaggcgattttttctatgttccaagtggcaccatgcatgcgatcggcaagggaattcttattttagaaacccagcagtcatctgataccacttatcgggtttatgattttgaccgtaaggacgttaatggtaatcttcgtgaccttcatattgaaaagtctattgatgtcttaacgattggtaagccagaaaatagcgtgccagccactatggttttggataatatggtagcaacaactttagtctcaacaccatttttcactgtttacaaatgggtaactagtcaaatggttgacatgaaacaagctgcgccttatcttttagtgagtgttttaaaaggtcaaggaaaactctatgtggaccagaaggcttatgagctagaaaaaggcatgcactttatcttgcctaacgatgttaaatcgtggtcatttgatggtcaattagaaatgattgtgagtcaccccaatcaactcgtt

SEQ ID NO: 3616 - protein, 317 aa, Streptococcus pyogenes
MSEPLFLKSTMHDRIWGGTKLRDVFAYNIPSDTTGEYWAISAHPNGVSTVTNGRYQGQPLNTLYAQEPALFGNPKEEVFPLLTKILDANDWLSVQVHPDDAYGREHEGELGKTECWYIISAEEGSEIVYGHQAKSKEDLRAMIEAGAWDDLLTRVPVKAGDFFYVPSGTMHAIGKGILILETQQSSDTTYRVYDFDRKDVNGNLRDLHIEKSIDVLTIGKPENSVPATMVLDNMVATTLVSTPFFTVYKWVTSQMVDMKQAAPYLLVSVLKGQGKLYVDQKAYELEKGMHFILPNDVKSWSFDGQLEMIVSHPNQLV

SEQ ID NO: 3617 - DNA, 2556 bp, Streptococcus agalactiae
gtggtgataagagtatcgaaaggaattagaatggcaaatattctacgcactgttattgaaaatgacaagggtgaattaaaaaaattagataaaatagctaagaaagttgactcttacgcagatcatatggctgcgttatcagatgaagctttacaagcaaaaactccagaatttaaagaacgttatcaaaatggtgaaactttagatcaattgttaccggaagcgtttgcggtagttcgtgaagcttctaaacgtgtattaggtttatacccataccacgtccaaattatgggtggtatcgttcttcaccatggtgatattccagaaatgcgtactggtgagggaaaaactttaacagcgacaatgcctgtttatctaaatgctatctcaggattaggtgttcatgttattactgttaatgagtatttatcaacacgtgatgcgaccgaaatgggtgaggtttatagttggcttggattatctgtagggattaacttagcagctaagtcaccatttgaaaaacgcgaagcttacaattgtgatatcacatactcaactaacgcagaagtcggatttgactaccttcgagacaatatggttgttcgccaagaagatatggtgcaacgcccactcaactatgctttggttgatgaggttgactctgtattaatcgatgaagctaggacgccattgattgtttcaggtcctgtaagctctgagatgaaccaactgtatacacgtgcggacatgtttgtaaaaacgcttaatagcgatgattatatcattgatgttccaacaaaaacaattggtttatcagatacaggtattgacaaggctgaaaactatttccatctaaataacttgtatgatctcgaaaatgttgccttaactcactacattgataacgctcttcgagctaactatattatgttgttaaatattgattatgtggttagtgaagaacaagagattttaattgtggaccaatttaccggtcgtacgatggaaggacgtcgtttctcagatggcttacaccaagctattgaagcaaaagagtcagtgccaatccaagaagaatcaaaaacgagcgcttcaattacttaccaaaatatgttccgtatgtaccataaattagcaggaatgactggtactggtaagactgaggaagaagagtttcgtgaaatttataatatgcgcgttattcctatcccaacaaatcgtcctgttcaacgtatagatcattcagatctactttatccaactcttgactctaaatttagagcggtggtagcagatgtcaaagaacgttatgaacaaggacaacctgtactggttggtacagtagctgttgaaacgtcagacttaatttctagaaaattagttgctgctggagtaccacatgaagttttgaatgctaaaaatcactttaaagaagctcaaatcattatgaatgctgggcaacgtggtgctgttacaatcgcaaccaacatggctggtcgtggtactgatatcaagcttggtgaaggggttcgtgaacttggtggtttatgtgttattggtacagagcgtcatgaaagccgtcgtattgataaccagcttcgtggtcgttcgggtcgtcaaggagatccaggtgaatcacaattctatctttcgttagaagatgatttgatgcgtcgctttggtacagatcgtattaaagtggttcttgagcgaatgaatttagctgaagatgatacagttattaaatcaaaaatgttgacacgacaagttgaatcagctcaacgccgcgttgaaggtaataactatgacacacgtaaacaagtcttgcaatacgatgatgttatgcgtgaacaacgtgagattatttatgctaaccgtagagaagtgattactgctgagcgtgatttaggaccagagctcaaagggatgattaaacgtacgattaaaagagcagttgatgcacatagcagaagcgataaaaatactgcagcagaagctattgttaattttgcaagatcggcgttattagatgaagaagctatcacagtttcagaacttcgtggtctaaaagaggctgaaattaaagaacttctttatgaacgtgccttagctgtttatgagcaacaaattgctaaattaaaagatccagaagctattatcgaattccaaaaagtcttaatcttgatggtagtggataatcaatggacagagcatattgatgccttagatcaattacgtaactccgttggacttcgtggttatgctcaaaataacccaatcgttgagtatcaatcagaaggtttccgtatgttccaagatatgattggttcgattgagtttgatgtgacacgtacattgatgaaagctcaaattcatgaacaagagcgtgaacgtgcttctcaacatgctacgacaacagcagagcaaaatatctcggcacaacatgtacctatgaataatgaatcaccagaataccaagggattaaacgtaatgataaatgtccttgtggctctggcatgaagtttaaaaattgtcatggtctgagatgtttacaa

SEQ ID NO: 3618 - protein, 852 aa, Streptococcus agalactiae
MVIRVSKGIRMANILRTVIENDKGELKKLDKIAKKVDSYADHMAALSDEALQAKTPEFKERYQNGETLDQLLPEAFAVVREASKRVLGLYPYHVQIMGGIVLHHGDIPEMRTGEGKTLTATMPVYLNAISGLGVHVITVNEYLSTRDATEMGEVYSWLGLSVGINLAAKSPFEKREAYNCDITYSTNAEVGFDYLRDNMVVRQEDMVQRPLNYALVDEVDSVLIDEARTPLIVSGPVSSEMNQLYTRADMFVKTLNSDDYIIDVPTKTIGLSDTGIDKAENYFHLNNLYDLENVALTHYIDNALRANYIMLLNIDYVVSEEQEILIVDQFTGRTMEGRRFSDGLHQAIEAKESVPIQEESKTSASITYQNMFRMYHKLAGMTGTGKTEEEEFREIYNMRVIPIPTNRPVQRIDHSDLLYPTLDSKFRAVVADVKERYEQGQPVLVGTVAVETSDLISRKLVAAGVPHEVLNAKNHFKEAQIIMNAGQRGAVTIATNMAGRGTDIKLGEGVRELGGLCVIGTERHESRRIDNQLRGRSGRQGDPGESQFYLSLEDDLMRRFGTDRIKVVLERMNLAEDDTVIKSKMLTRQVESAQRRVEGNNYDTRKQVLQYDDVMREQREIIYANRREVITAERDLGPELKGMIKRTIKRAVDAHSRSDKNTAAEAIVNFARSALLDEEAITVSELRGLKEAEIKELLYERALAVYEQQIAKLKDPEAIIEFQKVLILMVVDNQWTEHIDALDQLRNSVGLRGYAQNNPIVEYQSEGFRMFQDMIGSIEFDVTRTLMKAQIHEQERERASQHATTTAEQNISAQHVPMNNESPEYQGIKRNDKCPCGSGMKFKNCHGLRCLQ

SEQ ID NO: 3619 - DNA, 2517 bp, Streptococcus pyogenes
atggccaatattctacgcaaagttatcgaaaatgacaaaggcgaactaagaaaattagaaaaaattgcaaaaaaagtagaatcctacgcagaccaaatggcgtcattgtcggatagagatctacaaggaaaaacacttgaatttaaagaacgctatcaaaaaggtgagaccctcgaacaactattacctgaagctttcgcagttgttcgtgaagcagcaaaacgtgtgttgggcttgttcccttatcgtgttcaaattatgggaggaattgttcttcataacggggatgtccctgaaatgcgtactggtgaaggaaaaactcttacagccaccatgccagtttatctcaatgctattgctggtgagggtgttcacgttattactgttaatgagtatctttcaacgcgtgacgctaccgaaatgggtgaagtgtatagctggttaggtctttcagttgggatcaacctagctgctaagtctcctgctgaaaaacgtgaagcttataattgtgatattacttattcaaccaactctgaagtcggttttgattaccttcgtgacaacatggttgttcgccaggaagacatggtacaacgcccactcaattttgccttggttgatgaagtggactcagtcttaattgacgaggcaaggacacctttaattgtttctggtgctgttagctctgaaaccaatcaattgtatattcgtgctgacatgtttgtaaaaactctgacgtcagtggattatgttattgatgtgcccactaaaacgattggattaagcgattcaggtattgataaagctgagagttactttaacttgagcaatctttacgatattgaaaatgtagccttgactcactttatagacaacgcccttcgtgcaaactatattatgttgttagatatcgattatgtggtcagcgaagatggtgagattcttattgttgaccaatttacaggtcgtacgatggaagggcgtcgcttctcagacggcttgcaccaagctattgaggcaaaagaaggcgttcgtattcaggaagaatcaaaaaccagcgcctcaatcacttaccaaaatatgtttcgtatgtacaaaaaattggcaggtatgactggtactgcgaagaccgaggaagaagaatttcgcgaagtttataacatgcgtattattccaattccaaccaatcgtccaattgcccgtattgatcacactgatttgctttacccgaccttagaatcaaagtttagagcagttgtggaagacgttaaaacgcgtcatgcaaaaggacaacctatccttgtaggtacggttgctgttgaaactagtgatttgatttcacgcaagctggttgaagcagggattcctcatgaggttttgaatgctaaaaatcactttaaagaagctcaaatcattatgaatgctgggcaacgtggtgctgttacaatcgcaactaacatggctggtcgtggtactgatatcaagcttggtgaaggtgttcgtgaacttggtgggttatgtgtcattggtacagagcgtcatgaaagccgtcgtatcgataaccagcttcgtggacgttcaggtcgtcaaggagatccaggtgaatcccaattctatctttcattagaagatgatttgatgagacgtttcggctctgatcgtataaaagcctttttggatcggatgaaattagatgaagaagacactgttattaaatcaggtatgttagggcgtcaagtggaatctgctcaaaaacgggttgaaggaaataactatgatacccgtaaacaggtcttacaatatgatgatgtgatgcgtgaacagcgtgaaattatctatgctaaccgtcgtgatgtcataactgctaatcgagatcttggcccagaaattaaagctatgatcaagcgtactatcgaccgtgctgtagatgctcatgcacgtagcaatcgtaaagatgctatagatgctattgtaacttttgctaggacctcgctggtaccagaagagtttattagtgctaaagagttacgtggtttaaaagatgatcaaatcaaagagaagctttatcaaagagcgcttgctatctacgaccagcaactatcaaaacttcgtgatcaagaagctattattgaattccaaaaagtactcattttgatgattgtggataacaaatggactgaacacattgatgccttagatcaacttcgtaatgctgttggacttcgggggtatgctcaaaataaccctgtggtggaataccaagcagaaggtttcaagatgttccaagatatgattggtgctatcgagtttgatgtaacacgtaccatgatgaaagcacaaattcacgaacaagaacgtgaacgtgcaagtcaacgtgccacaacagcagcacctcaaaacatccaatcgcagcagtcagctaacaccgatgatttacccaaagtggagcgtaacgaagcttgtccatgtggttcaggcaaaaaattcaaaaattgtcacggtcgtaaatccttctca

SEQ ID NO: 3620 - protein, 839 aa, Streptococcus pyogenes
MANILRKVIENDKGELRKLEKIAKKVESYADQMASLSDRDLQGKTLEFKERYQKGETLEQLLPEAFAVVREAAKRVLGLFPYRVQIMGGIVLHNGDVPEMRTGEGKTLTATMPVYLNAIAGEGVHVITVNEYLSTRDATEMGEVYSWLGLSVGINLAAKSPAEKREAYNCDITYSTNSEVGFDYLRDNMVVRQEDMVQRPLNFALVDEVDSVLIDEARTPLIVSGAVSSETNQLYIRADMFVKTLTSVDYVIDVPTKTIGLSDSGIDKAESYFNLSNLYDIENVALTHFIDNALRANYIMLLDIDYVVSEDGEILIVDQFTGRTMEGRRFSDGLHQAIEAKEGVRIQEESKTSASITYQNMFRMYKKLAGMTGTAKTEEEEFREVYNMRIIPIPTNRPIARIDHTDLLYPTLESKFRAVVEDVKTRHAKGQPILVGTVAVETSDLISRKLVEAGIPHEVLNAKNHFKEAQIIMNAGQRGAVTIATNMAGRGTDIKLGEGVRELGGLCVIGTERHESRRIDNQLRGRSGRQGDPGESQFYLSLEDDLMRRFGSDRIKAFLDRMKLDEEDTVIKSGMLGRQVESAQKRVEGNNYDTRKQVLQYDDVMREQREIIYANRRDVITANRDLGPEIKAMIKRTIDRAVDAHARSNRKDAIDAIVTFARTSLVPEEFISAKELRGLKDDQIKEKLYQRALAIYDQQLSKLRDQEAIIEFQKVLILMIVDNKWTEHIDALDQLRNAVGLRGYAQNNPVVEYQAEGFKMFQDMIGAIEFDVTRTMMKAQIHEQERERASQRATTAAPQNIQSQQSANTDDLPKVERNEACPCGSGKKFKNCHGRKSFS

SEQ ID NO: 3621 - DNA, 1005 bp, Streptococcus agalactiae
atgggatttcatcagttaagtgataaaattaatattgaaatattgaagcagaaaactagcttagatctagaagttagccaaaaaaaattagccaaagaagaagagttaaaaaatatcataaaaggtgaggatcagcggtttctagtaatagtaggtccttgttctgcggataatccaaaggcggtgctaacttatgcaaagcgtttagctaaattggaagctgcctttaaagataaaatgtttttggttatgagagtttataccgctaagccaagaacgaatggtgatggttataaaggcttagttcaccattctgacaaactaggagttttttttcaagcacgtaagatgcactatgacatcattcgagagactggactcctgacagctgatgaattactttatccagagatgttatcagtgatggatgatttagtttcttactatgctattggtgcgcgttcagtggaagatcagggacaccgttttatatcttcaggtatagatgcaccagtaggtatgaaaaatccaacgtctggtaatttaagagtcatgtttaatgcggtctatgcagcacaaaatcaacaggaattattctatcaaaataagcaagttagaacagatggtaatttgctgtcacatgttattttgagaggatatcataatgccgactatcgaagtatccctaattatcattatgaaaaccttttagaaactattactcattatgaagagactgatttgcaaaatccctttattgttgttgatacaaatcatgacaattcaggtaagcaatttttagaacaaattcgcattgtgaaatcagtacttgcagaccgacagtggcatactaaaattagaaactatgttcgtggttttttgatagaatcttatttagaagatggaagacaagataaaccagatgtttttggtaagtctatcacagatccatgtctaggttgggataaaacagaaatgctaattagggatatttacaatagtttg

SEQ ID NO: 3622 - protein, 335 aa, Streptococcus agalactiae
MGFHQLSDKINIEILKQKTSLDLEVSQKKLAKEEELKNIIKGEDQRFLVIVGPCSADNPKAVLTYAKRLAKLEAAFKDKMFLVMRVYTAKPRTNGDGYKGLVHHSDKLGVFFQARKMHYDIIRETGLLTADELLYPEMLSVMDDLVSYYAIGARSVEDQGHRFISSGIDAPVGMKNPTSGNLRVMFNAVYAAQNQQELFYQNKQVRTDGNLLSHVILRGYHNADYRSIPNYHYENLLETITHYEETDLQNPFIVVDTNHDNSGKQFLEQIRIVKSVLADRQWHTKIRNYVRGFLIESYLEDGRQDKPDVFGKSITDPCLGWDKTEMLIRDIYNSL

SEQ ID NO: 3623 - DNA, 750 bp, Streptococcus pyogenes
atgattgacattatgtctgactttcaaaataagacttgttctaagaataattttattgttggaccttgttccattgaatcttatgatcacattagattagcagcttcaagtgccaaaaaacttggttacaactattttagaggaggcgcctataaaccaagaacatctgctgcttcttttcaaggccttggcctgcaaggaattcgttacttgcatgaggtttgtcaggaatttggcttactatcggtcagtgaaatcatgtccgagcgccaattagaagaagcctatgactatctcgatgtcattcaggttggtgcccgcaacatgcaaaattttgaatttttaaaaaccttgtcacacatcgataagcctattttgtttaaacgaggcttgatggctactatcgaggaatatttgggcgccctttcctacttacaagacactggaaaatctaacattatcttatgcgaacgtggcgttcgtggctacgatgtggagactagaaatatgcttgatattatggcagtccctattattcaacaaaagacagatttaccgattattgtggacgtatctcattcgacaggcagacgagatttactcttacctgctgctaagatagcgaaggctgtcggtgccaatggcatcatgatggaggttcatcctgatcccgaccatgcgctgtcagatgctgcccagcaaattgattataagcaattagaacagttggggcaggaactttggcaagat

SEQ ID NO: 3624 - protein, 250 aa, Streptococcus pyogenes
MIDIMSDFQNKTCSKNNFIVGPCSIESYDHIRLAASSAKKLGYNYFRGGAYKPRTSAASFQGLGLQGIRYLHEVCQEFGLLSVSEIMSERQLEEAYDYLDVIQVGARNMQNFEFLKTLSHIDKPILFKRGLMATIEEYLGALSYLQDTGKSNIILCERGVRGYDVETRNMLDIMAVPIIQQKTDLPIIVDVSHSTGRRDLLLPAAKIAKAVGANGIMMEVHPDPDHALSDAAQQIDYKQLEQLGQELWQD

SEQ ID NO: 3625 - DNA, 357 bp, Streptococcus agalactiae
atgattgttggacacggaattgatttacaagagatagaggcgattactaaagcatatgagcgtaatcaacgttttgcagaacgcgttttgaccgaacaagaattgcttctttttaaaggaatttccaatcccaagcgtcagatgtcttttttaacagggcgatgggcagcaaaagaggcttatagcaaagcacttggaacaggaattgggaaagttaattttcatgatatcgaaattttatcggatgataaaggagcgcctttgattacaaaagaaccgtttaatggaaaatcttttgtttcaatatctcatagtggtaattatgcacaagctagtgttattttggaggaagaaaaa

SEQ ID NO: 3626 - protein, 119 aa, Streptococcus agalactiae
MIVGHGIDLQEIEAITKAYERNQRFAERVLTEQELLLFKGISNPKRQMSFLTGRWAAKEAYSKALGTGIGKVNFHDIEILSDDKGAPLITKEPFNGKSFVSISHSGNYAQASVILEEEK

SEQ ID NO: 3627 - DNA, 354 bp, Streptococcus pyogenes
atgattgttggacatggaatagacttacaagagatttcagctattgaaaaagtttatcaaagaaatcctcgctttgctcaaaaaattttaactgagcaggaattggctatttttgagagttttccttacaaacgtcgactcaactatttggcaggacgctggtcaggtaaggaagcttttgctaaggctatagggacaggtattgggcggttaacctttcaagatattgagattttaaatgatgttagaggatgtcccattctgacaaaatctccgtttaaaggaaatagttttattagcatctcacatagtggcaattatgtacaggctagtgttattttggaggataaaaaa

SEQ ID NO: 3628 - protein, 118 aa, Streptococcus pyogenes
MIVGHGIDLQEISAIEKVYQRNPRFAQKILTEQELAIFESFPYKRRLNYLAGRWSGKEAFAKAIGTGIGRLTFQDIEILNDVRGCPILTKSPFKGNSFISISHSGNYVQASVILEDKK

SEQ ID NO: 3629 - DNA, 1098 bp, Streptococcus agalactiae
atgatttcaagttatcatagaccaaccagagccttgatagatttagaggcgattgcaaataacgttaaatctgtacaagagcacattccaagtgataaaaaaacatttgctgtagttaaggctaatgcttatgggcatggtgctgttgaagtttcaaaatacattgagtctattgtagatggtttttgcgtatccaatttagatgaggctattgagctacgtcaagcaggaattgtaaaaatgatattggtattaggtgttgttatgcctgagcaggttatactagccaaaaatgaaaatattactctaacagttgctagcttggagtggttacgtttatgtcagacatcagcagtagatttatctggtctagaagtacatatcaaagttgatagtggaatgggacgtataggtgttcgccagttagatgaaggaaataagctaatttctgaattgggggaaagtggtgcctctgtcaaggggattttcacccattttgcaacagctgatgaagccgataactgtaaattcaatcaacaacttactttttttaaagactttatttcaggattagataattgtccggaccttgttcatgctagtaattctgctacaagcctttggcatagtgagacaatttttaatgccgttagattgggtgttgttatgtacggcttaaatccaagtggaactgatttagacttaccttaccctataaaccctgctttaagtttagagtctgagctagtacatgttaaacaactacacgatggttctcaagttggctatggcgcaacctatcaagttactggagacgaatttgttggaacagtaccgattggctacgctgatggatggacacgagatatgcaaggattttcagttatagtaaatggagaactttgtgaaattattgggcgtgtctcgatggatcaaatgactatccgtttacctcaaaaatatactatcggaactaaagtaaccttgattggtcaacaaggtagttgtaacattacaactacggacgtcgctcaaaaaagacagacgattaattatgaagtactttgtcttttaagcgatcgtattccgagatattat

SEQ ID NO: 3630 - protein, 366 aa, Streptococcus agalactiae
MISSYHRPTRALIDLEAIANNVKSVQEHIPSDKKTFAVVKANAYGHGAVEVSKYIESIVDGFCVSNLDEAIELRQAGIVKMILVLGVVMPEQVILAKNENITLTVASLEWLRLCQTSAVDLSGLEVHIKVDSGMGRIGVRQLDEGNKLISELGESGASVKGIFTHFATADEADNCKFNQQLTFFKDFISGLDNCPDLVHASNSATSLWHSETIFNAVRLGVVMYGLNPSGTDLDLPYPINPALSLESELVHVKQLHDGSQVGYGATYQVTGDEFVGTVPIGYADGWTRDMQGFSVIVNGELCEIIGRVSMDQMTIRLPQKYTIGTKVTLIGQQGSCNITTTDVAQKRQTINYEVLCLLSDRIPRYY

SEQ ID NO: 3631 - DNA, 1098 bp, Streptococcus pyogenes
atgatttcaagtttccatcgcccaacagttgcaagggtcaacttacaagctattaaggagaatgttgccagtgttcaaaagcatattccactaggggtaaaaacgtatgcagttgtcaaggctgatgcttatggtcatggtgctgtccaggtgtcaaaagcactcctacctcaagtggatgggtactgtgtgtcaaatcttgatgaggctttgcaattacgtcaagcaggtattgataaagagattttaattcttggggttttgctgccaaatgaattagagttagcagttgctaatgctattactgttacaatcgctagtttagactggatagctttagctagactggagaaaaaagaatgtcaaggcttaaaagttcatgtaaaagttgattctggtatggggcggatcgggcttcgttcttcaaaagaagtcaatttattgattgatagtctaaaagagttgggtgctgatgtagaaggtattttcactcattttgccacagctgatgaggcagatgatactaaatttaaccagcagttacagttttttaaaaagctgatagctggacttgaggataagcctcgtttagtacatgctagtaattcagccacaagtatctggcatagtgataccatttttaatgctgttcgtttaggaattgtcagttatggtttgaatccaagtggttctgatctaagcttaccgtttccactgcaagaggctttatctctagaatctagcttagtgcatgtcaagatgatttcagctggtgatacagtcggttatggagctacttatactgccaaaaagtctgaatatgtagggactgtcccaatcggttatgcagatggctggaccaggaacatgcaaggcttttcggtgttagttgatggacaattctgcgaaattatagggcgtgtatcgatggatcaactgaccatacgacttcccaaagcatatcctttaggaacaaaagtcactttgattggcagcaatcagcaaaaaaatatttctacaacagatatcgcaaattaccgtaatacaatcaattatgaagttctatgccttttaagtgaccgtattcctcggatatat

SEQ ID NO: 3632 - protein, 366 aa, Streptococcus pyogenes
MISSFHRPTVARVNLQAIKENVASVQKHIPLGVKTYAVVKADAYGHGAVQVSKALLPQVDGYCVSNLDEALQLRQAGIDKEILILGVLLPNELELAVANAITVTIASLDWIALARLEKKECQGLKVHVKVDSGMGRIGLRSSKEVNLLIDSLKELGADVEGIFTHFATADEADDTKFNQQLQFFKKLIAGLEDKPRLVHASNSATSIWHSDTIFNAVRLGIVSYGLNPSGSDLSLPFPLQEALSLESSLVHVKMISAGDTVGYGATYTAKKSEYVGTVPIGYADGWTRNMQGFSVLVDGQFCEIIGRVSMDQLTIRLPKAYPLGTKVTLIGSNQQKNISTTDIANYRNTINYEVLCLLSDRIPRIY

SEQ ID NO: 3633 - DNA, 1536 bp, Streptococcus agalactiae
atgtcaaaacaaaaagtaatggcaactttgttgttatccactttagtcttatcgctatcatcacctttagtgaccttagcagaaactattaatccagaaacaagcctgacaatggcaacagcatcaacagaaagttcttctgaagcagagaaacaggaaaaaacacaacctacagattcagaaactgcttcaccttcagccgaaggaagtatctcaacagaaaaaacagagattggtacgacagagacatcatcaagcaatgaatcatcatcaagttcatcacatcaatcttcttccaacgaagatgctaaaacatctgattctgcttcaacagcatctactcctagcactaatactacaaacagtagtcaagcagacagtaagccaggtcaatcaacaaagactgaattaaaacctgagcctaccttaccattagtagagcctaaaataactcccgctccgtctcagatagaaagtgttcagacaaatcagaatgcttctgttcctgctttatcctttgatgataacttattatcaacaccgatttcaccagtgacagcaacgccattctacgtagaacactggtctggtcaggatgcctactctcactatttattgtcacatcgttacggtatcaaagctgaacaattagatgggtacttaaaatctttagggattcaatatgattctaatcgtatcaatggtgctaagttattacaatgggaaaaagatagtggtttagatgtccgtgctattgtagctattgctgtccttgaaagttcattgggaactcaaggagtggctaagatgccaggtgctaatatgtttggttatggtgcctttgatcatgactctagccatgctagtgcttataatgatgaagaagcaattatgttgttgacaaaaaatacaattattaaaaacaacaactctagctttgaaatccaagatttgaaagcacagaaattatcttctggacaacttaatacagttactgagggtggtgtttattatacagataactctggaactggtaaacgtcgtgcccagattatggaagatttagaccgctggattgatcaacatggagggacaccagaaattcctgctgccttgaaagctttatcgacagcaagtttagcagatttaccaagtggttttagcttatcaacagcagttaacacagctagctatattgcatcaacttatccatggggtgaatgtacatggtatgtctttaaccgcgctaaagagttaggttatacatttgatccatttatgggtaatggtggagattggcaacataaggctggttttgaaacaacacattcaccaaaagtaggctatgctgtatcattttcaccaggacaagctggtgctgatggcacttacggtcacgtagctattgttgaagaagttaaaaaagatggttcagttcttatttcagaatctaatgcaatgggacgtggtattgtctcttaccgtacttttagttcagcacaagctgcacaattaacttatgttattggccataaa

SEQ ID NO: 3634 - protein, 512 aa, Streptococcus agalactiae
MSKQKVMATLLLSTLVLSLSSPLVTLAETINPETSLTMATASTESSSEAEKQEKTQPTDSETASPSAEGSISTEKTEIGTTETSSSNESSSSSSHQSSSNEDAKTSDSASTASTPSTNTTNSSQADSKPGQSTKTELKPEPTLPLVEPKITPAPSQIESVQTNQNASVPALSFDDNLLSTPISPVTATPFYVEHWSGQDAYSHYLLSHRYGIKAEQLDGYLKSLGIQYDSNRINGAKLLQWEKDSGLDVRAIVAIAVLESSLGTQGVAKMPGANMFGYGAFDHDSSHASAYNDEEAIMLLTKNTIIKNNNSSFEIQDLKAQKLSSGQLNTVTEGGVYYTDNSGTGKRRAQIMEDLDRWIDQHGGTPEIPAALKALSTASLADLPSGFSLSTAVNTASYIASTYPWGECTWYVFNRAKELGYTFDPFMGNGGDWQHKAGFETTHSPKVGYAVSFSPGQAGADGTYGHVAIVEEVKKDGSVLISESNAMGRGIVSYRTFSSAQAAQLTYVIGHK

SEQ ID NO: 3635 - DNA, 2013 bp, Streptococcus agalactiae
atgctattacaatcaccaatttctaatcttaagggatttggaccaaaatcagcagaaaaatttcagaaattagatatttatacagtagaagatttacttctttattatccgtttcgctatgaagattttaaatcaaaatctgtttttgatttagtggatggtgaaaaagcagtcattacaggcctagtcgttactccagctaatgtacaatattatggttttaaacgtaaccgtttaagttttaagttgcgtcaaggggaagctgtcttaaatgttagtttttttaatcaaccctatttagctgataaaatagaacttggtcaagaggtagctgtctttggtaaatgggatgcaactaaatcagctattactgggatgaaggttttagctcaagttgaagatgacatgcaacctgtttatcgcgtagctcagggaatttcacagtctactttgattaaagctattaagtcagcttttgaaatcagtgcgcatttggaattgaaggaaaatttaccagctactttattggaaaaataccgattgatgggtcgtagtcaggcttgtttagctatgcatttcccaaaagatatcacagagtataagcaagcgctccgtcggattaaatttgaagaattattttactttcaaatgaaccttcaagttttgaaatccgaaaataaatctgaaacaaatggtttgcctattctttatagtaaacatgctatggagacaaaaatttcctctttaccttttattctaacgaatgctcaaaagcgctctttagatgaaatattatctgatatgtcatcgggagctcatatgaatcgtttattgcaaggagatgtaggatcaggaaagacagtcattgctggtctatcaatgtatgcagcttatacagcaggttttcaatcggctttgatggttccaacggaaatcctagctgaacaacactacattagtctgcaagagttatttccagatttatcaatcgctatattaacttcgggtatgaaagcagctgttaagcgtacggttttagcagctattgcaaatggctcggttgatatgattgtaggaactcatgctcttatccaggactcggtacagtaccataaactggggcttgtaattacagacgagcaacatcgttttggtgttaaacagcgtagaattttccgtgaaaagggagaaaatcctgatgttttaatgatgacagccaccccaattccccgaactctagcaatcacagcttttggagaaatggatgtttctattattgatgaattacctgccggtcgtaaacctattattacacgctgggtgaaacacgagcagctaggtactgtgttggaatgggtaaaaggtgaattgcaaaaagatgctcaagtgtatgtcatttcaccgttgattgaagagtcagaagctttagatttaaagaatgcagtagcattgcatgctgaattatctacttattttgaaggaattgctaaggttgctcttgtacatggacgtatgaaaaatgatgaaaaagatgctataatgcaagatttcaaggataaaaaaagtcatattttagtatctacaacagttattgaagtaggggtaaatgtcccaaatgcaacgatcatgattattatggatgccgatcgttttggattaagccagctacatcaacttcgtgggcgtgttggtcgtggatataaacaatcatacgctgttttagtggctaatcccaaaactgattctgggaaaaaacgaatgacaatcatgacagaaacgacagatggtttcgttttagctgagtcggatttaaaaatgcgtggttctggtgaaatctttggtactcgtcagtctggaattccagaatttcaagtagctgatatcgttgaggattatcctattttagaagaagccagacgtgttgctagtgatattgtcaaagataataattggaaagaaaatacagaatgggcacttattctagataatttacgccaacattcagattttgat

SEQ ID NO: 3636 - protein, 671 aa, Streptococcus agalactiae
MLLQSPISNLKGFGPKSAEKFQKLDIYTVEDLLLYYPFRYEDFKSKSVFDLVDGEKAVITGLVVTPANVQYYGFKRNRLSFKLRQGEAVLNVSFFNQPYLADKIELGQEVAVFGKWDATKSAITGMKVLAQVEDDMQPVYRVAQGISQSTLIKAIKSAFEISAHLELKENLPATLLEKYRLMGRSQACLAMHFPKDITEYKQALRRIKFEELFYFQMNLQVLKSENKSETNGLPILYSKHAMETKISSLPFILTNAQKRSLDEILSDMSSGAHMNRLLQGDVGSGKTVIAGLSMYAAYTAGFQSALMVPTEILAEQHYISLQELFPDLSIAILTSGMKAAVKRTVLAAIANGSVDMIVGTHALIQDSVQYHKLGLVITDEQHRFGVKQRRIFREKGENPDVLMMTATPIPRTLAITAFGEMDVSIIDELPAGRKPIITRWVKHEQLGTVLEWVKGELQKDAQVYVISPLIEESEALDLKNAVALHAELSTYFEGIAKVALVHGRMKNDEKDAIMQDFKDKKSHILVSTTVIEVGVNVPNATIMIIMDADRFGLSQLHQLRGRVGRGYKQSYAVLVANPKTDSGKKRMTIMTETTDGFVLAESDLKMRGSGEIFGTRQSGIPEFQVADIVEDYPILEEARRVASDIVKDNNWKENTEWALILDNLRQHSDFD

SEQ ID NO: 3637 - DNA, 2013 bp, Streptococcus pyogenes
atgatattaacagctcctatgtccaacttaaagggatttggaccaaaatcagcagaaaaatttcagaaattagatatttatacagtagaagatttactgctttattatccgtttcgctatgaagattttaaatcaaaatctgtttttgatttagtggatggtgaaaaagcagtcattacaggcttagtcgttactccagctaatgtacaatattatggttttaaacgtaaccgtttaagtttcaaattgcgtcaaggggaagctgtcttaaatgttagtttttttaatcaaccctatttagctgataaaatagaacttggtcaagaggtagctgtttttggtaaatgggatgccactaaatcggctattactgggatgaaggttttagctcaagttgaagatgacatgcaacctgtttatcgcgtagctcagggaatttcacagtctactttgattaaagctattaagtcagcttttgaaatcgatgcgcatttggaattgaaggaaaatttaccagctactttattggaaaaataccgattgatgggtcgtagtcaggcttgtttagctatgcatttcccaaaagatatcacagagtataagcaagcgctccgtcggattaaatttgaagaattattttactttcaaatgaaccttcaagttttgaaagccgaaaataaatctgaaacaaatggtttgcctattctttatagtaaacgtgctatggagacaaagatttcctctttaccttttattctaacgaatgctcaaaagcgctctttagatgacatattatctgatatgtcatcgggagctcatatgaatcgtttattgcaaggagatgtaggatcaggaaagacagtcattgctggtctatcaatgtatgcagcttatacagcaggttttcaatcggctttgatggttccaacggaaatcctagctgaacaacactacattagtctgcaagagttatttccagatttatcaatcgctatattaacttcgggtatgaaagcagctgtcaagcgtacggttttagcagctattgcaaatggctcggttgatatgattgtaggaactcatgctcttatccaagactcggtacagtaccataaactggggcttgtcattacagacgagcaacatcgttttggtgttaaacagcgtagaattttccgtgaaaagggagaaaatcctgatgttttaatgatgacagccaccccaattccccgaactctagcaatcacagcttttggagaaatggatgtttctattattgatgaattacctgccggtcgtaaacctattatgacacgctgggtgaaacacgagcagctaggtactgtgttggaatgggtaaaaggtgaattgcaaaaagatgctcaagtgtatgtcatttcaccgttgattgaagaatcagaagctttagatttaaagaatgcagtagcattgcatgctgaattatctacttattttgaaggaattgctaaggttgctcttgtacatggacgtatgaaaaatgatgaaaaagatgctataatgcaagatttcaaggataaaaaaagtcatattttagtatccacaacagttattgaagtaggggtaaatgtcccaaatgcaacgatcatgattattatggatgccgatcgttttggattaagtcagttacatcaacttcgtgggcgtgttggtcgtggatataaacaatcatacgctgttttagtggctaatcccaaaactgattcggggaaaaaacgaatgacaatcatgacagaaacgacagatggtttcgttttagctgagtcggatttaaaaatgcgtggttctggtgaaatctttggtactcgtcagtctggaattccagaatttcaagtagctgatatcgttgaggattatcctattttagaagaagcacgcaaagtttctgcagcgattgtttctgatcctaactggatatatgaaaaacagtggcaattagtggcacaaaatattagaaaaaaagaagtttatgat

SEQ ID NO: 3638 - protein, 671 aa, Streptococcus pyogenes
MILTAPMSNLKGFGPKSAEKFQKLDIYTVEDLLLYYPFRYEDFKSKSVFDLVDGEKAVITGLVVTPANVQYYGFKRNRLSFKLRQGEAVLNVSFFNQPYLADKIELGQEVAVFGKWDATKSAITGMKVLAQVEDDMQPVYRVAQGISQSTLIKAIKSAFEIDAHLELKENLPATLLEKYRLMGRSQACLAMHFPKDITEYKQALRRIKFEELFYFQMNLQVLKAENKSETNGLPILYSKRAMETKISSLPFILTNAQKRSLDDILSDMSSGAHMNRLLQGDVGSGKTVIAGLSMYAAYTAGFQSALMVPTEILAEQHYISLQELFPDLSIAILTSGMKAAVKRTVLAAIANGSVDMIVGTHALIQDSVQYHKLGLVITDEQHRFGVKQRRIFREKGENPDVLMMTATPIPRTLAITAFGEMDVSIIDELPAGRKPIMTRWVKHEQLGTVLEWVKGELQKDAQVYVISPLIEESEALDLKNAVALHAELSTYFEGIAKVALVHGRMKNDEKDAIMQDFKDKKSHILVSTTVIEVGVNVPNATIMIIMDADRFGLSQLHQLRGRVGRGYKQSYAVLVANPKTDSGKKRMTIMTETTDGFVLAESDLKMRGSGEIFGTRQSGIPEFQVADIVEDYPILEEARKVSAAIVSDPNWIYEKQWQLVAQNIRKKEVYD

SEQ ID NO: 3639 - DNA, 918 bp, Streptococcus agalactiae
gtgcatatgttacaaaacattggacaaacaggcattcaagcaactcgaattgctttaggttgtatgagaatgagtgacttgaaaggaaaacaagctgaagaagtagttggaacagcattagatttgggtattaatttttttgatcatgctgatatttatgggggagggctatctgaattacgctttcgagatgcaatcaaacatttaaatgtcaatcgtgacaaaatgattattcaatctaaatgtgggatacgagaaggttactttgatttttctaaagagtatattttatcatcagtagatggtattttagaaagattagggacagaatatttagattttctcattcttcatcgtccagatgtattagttgagcctgaagaagtagcagaagcatttaccaaactgagggcagaaggtaaagtaaaacactttggtgttagcaatcaaaaccggtttcaaatggagttgttacaatcctaccttgacgagcccttagcagtgaatcaacttcagttatcgccagcacatacaccaatgtttgatgcagggttaaatgttaacatgttaaataaagcttcaattgaacatgatgatggcattgttgattattgtcgtcttaaaagagttaccattcaagcttggtctccatttcaaattgatttatctcgtggtttatttgttaatcatccggattataaggaattaaatgaaaccatagctaaactggcaaaaaactacaatgttagcagcgaagctattgtgattgcatggattttacgtcatcctgccaaaatgcaggcgattgttggttcaatgaatccatctcgtttaaaggcgattgataaggctaatgatatcgctttaacccgtaaagaatggtatgatatttaccgtagtgcaggtaatatattgcct

SEQ ID NO: 3640 - protein, 306 aa, Streptococcus agalactiae
MHMLQNIGQTGIQATRIALGCMRMSDLKGKQAEEVVGTALDLGINFFDHADIYGGGLSELRFRDAIKHLNVNRDKMIIQSKCGIREGYFDFSKEYILSSVDGILERLGTEYLDFLILHRPDVLVEPEEVAEAFTKLRAEGKVKHFGVSNQNRFQMELLQSYLDEPLAVNQLQLSPAHTPMFDAGLNVNMLNKASIEHDDGIVDYCRLKRVTIQAWSPFQIDLSRGLFVNHPDYKELNETIAKLAKNYNVSSEAIVIAWILRHPAKMQAIVGSMNPSRLKAIDKANDIALTRKEWYDIYRSAGNILP

SEQ ID NO: 3641 - DNA, 876 bp, Streptococcus agalactiae
atgaattcattaaatggggaaactttactaactggtctaattgccaatcctgcacgccactctctatccccgttaatgtggaatacctcttttcaagaaaaaaacatgaattatgcctatctgacatttgaagtagaagagggtaaattaacagaagctgttcgaggtgtcagggcattgggtattcgtggtgttaatgtttcaatgccatttaaacagagtgttatccctttgctagatgatttatctcctcaagctaaattagtgggtgctgtaaatactatcgttaatcaaggtggaaccggacgtttagtaggccatatgacagatggcattggttgttttaaagctttagcagctcaaggtttcagtgctaaaaataaaataattacaatagctggtattggtggttcaggtaaagcagttgcagttcaagcagctatggagggagttgcggaaattagattatttaatcgtaacagctcaaattacgataaggtcattgacttatcagataaaattaaaaaacagtttcaaataaaggtagtcgttgattatctagaaaataagacagcatttaaagacgctattagaactagtcatttttatattgatgctactagtttaggaatgaggccattagataattatagtttaattaacgatccagaaattttaacaccgaatttagtagttgtcgacttggtttacaagcctaaagaaacagcattgttacgatttgttagacaaaatggagtgaaacatgcttataatggtctagggatgctgatttatcaaggagcagaagcatttcaattaataacgaatcaagaaatgcctattagcagtgttgagagagtattacaaactgaaaat

SEQ ID NO: 3642 - protein, 292 aa, Streptococcus agalactiae
MNSLNGETLLTGLIANPARHSLSPLMWNTSFQEKNMNYAYLTFEVEEGKLTEAVRGVRALGIRGVNVSMPFKQSVIPLLDDLSPQAKLVGAVNTIVNQGGTGRLVGHMTDGIGCFKALAAQGFSAKNKIITIAGIGGSGKAVAVQAAMEGVAEIRLFNRNSSNYDKVIDLSDKIKKQFQIKVVVDYLENKTAFKDAIRTSHFYIDATSLGMRPLDNYSLINDPEILTPNLVVVDLVYKPKETALLRFVRQNGVKHAYNGLGMLIYQGAEAFQLITNQEMPISSVERVLQTEN

SEQ ID NO: 3643 - DNA, 876 bp, Streptococcus pyogenes
atgtcagaacgtttatcaggccacaccctgttggtctctttgcttgctacccctattcgtcatagtttgtctcccaaaatgcacaatgaagcctatgctaaactggggctggattatgcctaccttgcttttgaagtagggacagagcaattagcagatgccgtgcaagggattcgtgccttaggaattcgtggctccaatgtgtctatgccaaataaagaagctattttacccttattggatgacttgtccccagctgctgagttggtcggtgcagtcaatacggttgtcaataaggatggtaaaggacatctcgtggggcatattacagacggtataggagcgctcagagccttggctgacgaaggagtgtcggtaaagaacaaaatcattaccctagcaggagttggtggggctgggaaagctatcgctgtccagctcgcttttgacggcgccaaagaggttcgtttgtttaaccgacaagctacacgtctaagtagcgttcaaaagcttgtgacaaaactgaaccagctaacaaggactaaagtaacccttcaagacttggaagatcagactgcctttaaggaggccatcagggaatctcatctatttattgatgctacaagtgtaggaatgaagcctttagaaaatctaagtttgattaccgaccccgagctcattcgcccagacttggtggtctttgacatcgtgtacagcccagcagaaaccaagttactagcctttgcccgtcaacatggcgcccaaaaagtcattaatgggctaggaatggtgctttatcaaggagcagaagcttttaaattaatcactggtcaagacatgccagttgacgctattaaacctcttttaggtgatgag

SEQ ID NO: 3644 - protein, 292 aa, Streptococcus pyogenes
MSERLSGHTLLVSLLATPIRHSLSPKMHNEAYAKLGLDYAYLAFEVGTEQLADAVQGIRALGIRGSNVSMPNKEAILPLLDDLSPAAELVGAVNTVVNKDGKGHLVGHITDGIGALRALADEGVSVKNKIITLAGVGGAGKAIAVQLAFDGAKEVRLFNRQATRLSSVQKLVTKLNQLTRTKVTLQDLEDQTAFKEAIRESHLFIDATSVGMKPLENLSLITDPELIRPDLVVFDIVYSPAETKLLAFARQHGAQKVINGLGMVLYQGAEAFKLITGQDMPVDAIKPLLGDE

SEQ ID NO: 3645 - DNA, 282 bp, Streptococcus agalactiae
atgataccactatcacccatgccagcatatgctttcacgataggaacagttcctgtaattttatctaaatcaaaacgaactctctcttcagttgctttaaagaaaagcaggtcttgtttcataataatcccaagggggccatgtgtaggggtttggaatgtcgaaacgtttgttgtatgtgtttttgtgacatatttagcagcatgtatctcatcattcatgacaactagcacccccttgtcggcagctttagtactattagcgacacggagggctgatagg

SEQ ID NO: 3646 - protein, 94 aa, Streptococcus agalactiae
MIPLSPMPAYAFTIGTVPVILSKSKRTLSSVALKKSRSCFIIIPRGPCVGVWNVETFVVCVFVTYLAACISSFMTTSTPLSAALVLLATRRADR

SEQ ID NO: 3647 - DNA, 960 bp, Streptococcus agalactiae
atgaaaaaaatccttgttctacacacaggtggaacgatttccatgaatgctaacgagaagggacaggtcatgtccagcgccgataacccaatgaaatacgttgatttatcattagatgaccttgatttgactgttgtagattttctaaatcttcccagtcctcaaatcacccctcatcatatgcttgatatctatcactatctgaagcaacatgccagtaattttgatggtgttgtcattacgcatgggactgacactttagaagaaacagcatattttttagacacaatgatactccctaaaatcccaatcatcattaccggtgctatgagaagcacaaatgaacttggtagcgatggcgtttataattacctatcagccctccgtgtcgctaatagtactaaagctgccgacaagggggtgctagttgtcatgaatgatgagatacatgctgctaaatatgtcacaaaaacacatacaacaaacgtttcgacattccaaacccctacacatggcccccttgggattattatgaaacaagacctgcttttctttaaagcaactgaagagagagttcgttttgatttagataaaattacaggaactgttcctatcgtgaaagcatatgctggcatgggtgatagtggtatcattagctttttaaattctcaaaatattagcggattagttattgaagcactcggtgcagggaatatgcccccaaaagctgcacaagaaatcgaagaattaattgagcaaggtgtccctgttgttctagtgtctcgctgttttaatggtattgctgagccagtttacggatatgaaggtggcggagcaaaattacaagaatctggtgtcatgtttgttaaagaactaaacgctcccaaagccagactcaaattactcattgcactcaatgcaggtctcacagggcaaaatctaaaagactatattgaaggt

SEQ ID NO: 3648 - protein, 320 aa, Streptococcus agalactiae
MKKILVLHTGGTISMNANEKGQVMSSADNPMKYVDLSLDDLDLTVVDFLNLPSPQITPHHMLDIYHYLKQHASNFDGVVITHGTDTLEETAYFLDTMILPKIPIIITGAMRSTNELGSDGVYNYLSALRVANSTKAADKGVLVVMNDEIHAAKYVTKTHTTNVSTFQTPTHGPLGIIMKQDLLFFKATEERVRFDLDKITGTVPIVKAYAGMGDSGIISFLNSQNISGLVIEALGAGNMPPKAAQEIEELIEQGVPVVLVSRCFNGIAEPVYGYEGGGAKLQESGVMFVKELNAPKARLKLLIALNAGLTGQNLKDYIEG

SEQ ID NO: 3649 - DNA, 963 bp, Streptococcus pyogenes
atgaaaaaaatcctagtcttacacactggtggaaccatttctatgcaagctgataactctggtagggttgttccaaatcaagataatcctatgacgaaaatacatgctgcagcccaagatattcagcttaccgttagtgattttctaaatcttccgagtcctcacatcacgcctcaccacatgttatctatttatcatcatattcaagaaagaactgatgtctttgatggtatagtcatcacacatggaacagataccttagaagaaacagcttattttttagataccatggcattgcctactaatatacctgttgtcctaacaggtgctatgaggtcttctaatgaagttggtagtgatggcatatataattaccttaccgcacttagagttgcaagtagtgataaagctaaagaaaaaggggtacttgttgttatgaacgatgaaatccatgctgctaaatatgttactaaaacacatacaaccaatatttcaactttccaaacacccacacacggaccgcttggtatcatcatgaaaaatgacctactttttttcaaaactgctgaacctcgtattcgttttgacttgagatgcatttctggaaccatccccattatcaaagcatacgcaggtatgggcgatggtagtatcttgagtctattaactccaggtagcattcaaggtctagttatcgaagctctaggggcaggaaatgtcccaccattagcagttggggagatcgagcacttaattgctttaggtattcctgtcattcttgtttcccgttgtttcaatggtatggcagaacctgtctatgcttatgaaggtggtggtgcgatgctacaagaagcaggtgttatgtttgtaaaagaattgaatgctccaaaagcccgtctaaagttattaattgctctcaacgccggacttactggtcaagagctaaaagattatattgaagga

SEQ ID NO: 3650 - protein, 321 aa, Streptococcus pyogenes
MKKILVLHTGGTISMQADNSGRVVPNQDNPMTKIHAAAQDIQLTVSDFLNLPSPHITPHHMLSIYHHIQERTDVFDGIVITHGTDTLEETAYFLDTMALPTNIPVVLTGAMRSSNEVGSDGIYNYLTALRVASSDKAKEKGVLVVMNDEIHAAKYVTKTHTTNISTFQTPTHGPLGIIMKNDLLFFKTAEPRIRFDLRCISGTIPIIKAYAGMGDGSILSLLTPGSIQGLVIEALGAGNVPPLAVGEIEHLIALGIPVILVSRCFNGMAEPVYAYEGGGAMLQEAGVMFVKELNAPKARLKLLIALNAGLTGQELKDYIEG

SEQ ID NO: 3651 - DNA, 1380 bp, Streptococcus agalactiae
gtggcaattaaggcagtattttttgatattgatggtacacttcttaatgatcgtaagaatgtacaaaagtcaacaattaaagcaattcgaaatttgaaagaccaaggaatactagtcggtttagcaacggggcgaggtcctagttttgtacaaccttttttagaaaaccttggtttagattttgctgtaacctataatggtcaatatatctatagtagaagtgaaattatttataccaatcaattatctaagacaactgtctatcgtctgattcgttatgctggagcaagaagaagagaaatttcattaggaacagcctcaggattactcggttcaggtattattggtctaggaactagccgtttggggcagattgtatctagccttgttccgagaaaatgggcaaaagcgattgaacgaagctttaagcattttattcgtcggattaaacctcaaaatattgatagcctcatggttatcttacgagaacctatttatcaggtcgttttagttgcaacagagggcgaatcagagcgaattcaaaaacaatttcctcgtgttaaattaacaagaagcagtccttactcaatggatgtcatttctgaagggcagtcaaaagttaagggaattgaacgtgttggtcaacgctatggttttgatctatccgaagtgatagcatttggagattctgataatgatattgagatgttatctcaagttggcattggtgttgccatggggaacgctagtcagcaagtgagagaaaatgcacgttatacaactgctgacaataatgatgatggtatctctaaggcattagcccattatggacttatccaatttgagattgaaaaaacattcagtagtcgtgacgagaatttcaataaagtaaaatccttccatctattaatggatggtgaaactattgaaacgccacgcttatatgacagtaaggaagctggtttcaggtcagactttaaagtagaagaaatcgttgagttcttgtatgctgctagtcaaggtaaccaaaaagtatttgaccaatctatccgtaatttacacttagctattgataaagcaagagataaggttatttctaaagaccatccagaaacaccattagtgggagaagtggatgccttaacagatttactttatctgacttatggctcctttgttcttatgggagtcgacccaaaacctctttttgatacagtacatgaggccaatatggggaaaatctttccagatggcaaagctcattttgatcctgttactcataaaattttaaaaccagacgactgggaagaacatttcgctcctgagccatcaattcgacgtgaattagatagccaaattcagaaatccttaaatcgaaaa

SEQ ID NO: 3652 - protein, 460 aa, Streptococcus agalactiae
MAIKAVFFDIDGTLLNDRKNVQKSTIKAIRNLKDQGILVGLATGRGPSFVQPFLENLGLDFAVTYNGQYIYSRSEIIYTNQLSKTTVYRLIRYAGARRREISLGTASGLLGSGIIGLGTSRLGQIVSSLVPRKWAKAIERSFKHFIRRIKPQNIDSLMVILREPIYQVVLVATEGESERIQKQFPRVKLTRSSPYSMDVISEGQSKVKGIERVGQRYGFDLSEVIAFGDSDNDIEMLSQVGIGVAMGNASQQVRENARYTTADNNDDGISKALAHYGLIQFEIEKTFSSRDENFNKVKSFHLLMDGETIETPRLYDSKEAGFRSDFKVEEIVEFLYAASQGNQKVFDQSIRNLHLAIDKARDKVISKDHPETPLVGEVDALTDLLYLTYGSFVLMGVDPKPLFDTVHEANMGKIFPDGKAHFDPVTHKILKPDDWEEHFAPEPSIRRELDSQIQKSLNRK

SEQ ID NO: 3653 - DNA, 1386 bp, Streptococcus pyogenes
ttgacagtaaaagcagtcttttttgatattgatgggacccttctcaatgatcgtaaaaatatccaaaaaacaacgcaaaaagccatccaacaactcaaaaaacaaggcattatggtcggtttagcaactggtcgtggaccgggatttgtacaaccttttctagaaaattttggattagattttgccgttacttacaatgggcaatatatcttaacaagagataaggtcttatatcagaatcaattgccaaagtcgatgatttacaaagtgattcgctatgccaacgaaaaaaagcgagaaatttctcttggaacagcttctggattagcaggatcgcgtattattgatatggggactagcccatttggacaagtcattagtagttttgtgcccaaaagttgggcaagaacagttgagggtagttttaagcatttgattcgccgaatcaagcctcagagttttagaaatttagtaactattatgcgggagcctatttatcaggttgttctggtagcgtcacaagctgaaactaagaaaatacaagagaagttccctcatataaaaattacaagaagtagtccttattccttggatctgatctctgttgatcaatcaaaaataaaaggaattgaacgtttgggagagatgtttggatttgacttgtctgaagtgatggcttttggagattcagataatgaccttgaaatgttatcaggagttggtatcggtattgctatgggaaatgctgaaactgtggtaaaagatggagcccatttcactaccgactctaataataatgatgggatttccaaagccttagctcactacggtctcatccattttgatatagagaagagctttaaaagccgtgatgaaaattttaataaagtcaaagattttcatcgtctgatggactcagatactattgaaacaccgcgtagttataccatttcagaagctggttataggtcaggctttaaagtagaagaaattgttgagtttctttacgcagcaagcaagggagaccaacaacaatttacacaggctattttcgatttgcatggtgctgttgaccaagcagctaataaggtacaagctaaaaaacatgttgaaacgcccctgattgggcaagttgatgccttagcggatttgctttattttacttatggttcttttgtactgatgggagtagatccacaacctatatttgaagcagtacatgaagcaaatatggctaaaatttttccagatggcaaggcacactttgaccccgttacccataaaattcaaaaacctgactattggcaagagcgtcacgcacctgaagtagccataaaaaaagagttagacaaacaattacaaaaatcactacaacgattcgataaa

SEQ ID NO: 3654 - protein, 462 aa, Streptococcus pyogenes
LTVKAVFFDIDGTLLNDRKNIQKTTQKAIQQLKKQGIMVGLATGRGPGFVQPFLENFGLDFAVTYNGQYILTRDKVLYQNQLPKSMIYKVIRYANEKKREISLGTASGLAGSRIIDMGTSPFGQVISSFVPKSWARTVEGSFKHLIRRIKPQSFRNLVTIMREPIYQVVLVASQAETKKIQEKFPHIKITRSSPYSLDLISVDQSKIKGIERLGEMFGFDLSEVMAFGDSDNDLEMLSGVGIGIAMGNAETVVKDGAHFTTDSNNNDGISKALAHYGLIHFDIEKSFKSRDENFNKVKDFHRLMDSDTIETPRSYTISEAGYRSGFKVEEIVEFLYAASKGDQQQFTQAIFDLHGAVDQAANKVQAKKHVETPLIGQVDALADLLYFTYGSFVLMGVDPQPIFEAVHEANMAKIFPDGKAHFDPVTHKIQKPDYWQERHAPEVAIKKELDKQLQKSLQRFDK

SEQ ID NO: 3655 - DNA, 501 bp, Streptococcus agalactiae
ttgagtgcaagaggttatctcttttggttatatttagaggaggacaggcttatgtcacaaaaatatgaacgcatccttgtcgctattgatggatcaacagaatctgaacttgcttttgaaaaggcagttaacgttgctcttcgcaatgattctgaattaatcttgacacatgttatagatacacgtgctttacaaagctttgcgacatttgatacttatatctatgaaaaattagaaaaagaagcaaaagatgtccttgaggaatatgaaaaacaagctcgtgaaaaaggagcagataaagttagacaagtcattgaatttggtaatcccaaaacattacttgcacatgatattccagaaaaagaaaaagtagacttgattatggttggtgcaacaggtcttaatacctttgaacgtttccytatcggatcttcctcagaatacatccttcgtcacgctaaagtagatttactcattgtacgtgaccctaataaaacaatg

SEQ ID NO: 3656 - protein, 167 aa, Streptococcus agalactiae
  MISC_FEATURE (1)..(167): Xaa = Any Amino Acid
MSARGYLFWLYLEEDRLMSQKYERILVAIDGSTESELAFEKAVNVALRNDSELILTHVIDTRALQSFATFDTYIYEKLEKEAKDVLEEYEKQAREKGADKVRQVIEFGNPKTLLAHDIPEKEKVDLIMVGATGLNTFERFXIGSSSEYILRHAKVDLLIVRDPNKTM

SEQ ID NO: 3657 - DNA, 540 bp, Streptococcus pyogenes
atggatcgctttcaaaatgactcaaaaaagagtataatgaaaaaaagaataaaagctattcttgtcaaactgttaaaggaggacagttctatgtcactaaaatataaacgtatcctcgttgctattgatggctcttatgagtctgaattagctttcaataaaggcgttaacgtagcactacgtaacgacgctaccttactactagtacacgttattgatacccgtgccttgcaaagcgtagctacttttgatacttacatctatgaaaaattagaacaagaagctaaggatgttttagatgattttgaaaaacaagcacagatagcaggaattacaaacatcaaacaaattattgaatttggcaaccccaaaaacttactagctcacgatattccagatcgtgagaacgctgatttaattatggtaggagctactggtcttaatacctttgaacgcctccttattggctcatcttctgagtacattatgcgacacgctaagattgacttacttgtagtccgagatagcactaaaacactc

SEQ ID NO: 3658 - protein, 180 aa, Streptococcus pyogenes
MDRFQNDSKKSIMKKRIKAILVKLLKEDSSMSLKYKRILVAIDGSYESELAFNKGVNVALRNDATLLLVHVIDTRALQSVATFDTYIYEKLEQEAKDVLDDFEKQAQIAGITNIKQIIEFGNPKNLLAHDIPDRENADLIMVGATGLNTFERLLIGSSSEYIMRHAKIDLLVVRDSTKTL

SEQ ID NO: 3659 - DNA, 654 bp, Streptococcus agalactiae
atgaagatatttgataaatcaatgaagctggaacatgtagcttatgatattagaggccctgttttagaagaggcggaccgcatgagggcaaatggtgaaaagatattgcggttaaatactggaaatccagctgcctttggcttcgaagcgccagatgaagtcattcgtgatttaattacgaatgcgcgtgaatcagaaggttactctgattcgaaaggtattttttcagctcgtaaggctgttatgcagtattaccagttacaaaacatccatgttgacatggatgatatatacattgttaatggtgttagtgagggaatctctatgtcaatgcaagctttgcttgataatgatgacgaggttctagttccaatgccagattacccgttatggacagcttgtgttagccttgctggtggaaatgctgtgcattatatttgtgatgaggaagctaattggtatcctgatattgatgatatcaaatcaaaaatcacatccaaaacaaaagcaattgtcctcattaatccaaataatccaactggagcagtctatccgcgtgaaattctgcaagagattgtggatatcgctagacaaaatgacttgattattttttcagacgaggtttatgaccgtttctctagagtacgagaagat

SEQ ID NO: 3660 - protein, 218 aa, Streptococcus agalactiae
MKIFDKSMKLEHVAYDIRGPVLEEADRMRANGEKILRLNTGNPAAFGFEAPDEVIRDLITNARESEGYSDSKGIFSARKAVMQYYQLQNIHVDMDDIYIVNGVSEGISMSMQALLDNDDEVLVPMPDYPLWTACVSLAGGNAVHYICDEEANWYPDIDDIKSKITSKTKAIVLINPNNPTGAVYPREILQEIVDIARQNDLIIFSDEVYDRFSRVRED

SEQ ID NO: 3661 - DNA, 1248 bp, Streptococcus pyogenes
ttggtttataatatggaatacgaggtgtatgagactatgaaaattattgaaaaatcatcaaaattagaacatgttgcctatgatattcgagggcctgttttggatgaagctaatcgcatgattgcgagtggtgaaaaaattctgcgtttaaatactggcaatcctgctgcttttggttttgaagcaccagatgaagtgattcgtgatttaattgtcaacgcgaggctaagtgagggctattctgacagtaaagggattttttcagcgcgtaaggctatcatgcagtattgccaactcaagggcttcccagatgttgacattgaagatatttatttgggaaatggcgtgtcagagttgatatccatatcccttcaagctttgctagataatggcgatgaagttttagtaccaatgccggattatcctttatggacggcttgtgtgagtcttggtggaggaaaagcggtccattatctttgtgatgaagaagctggttggtatcctgatattgctgatatcaaatcaaaaatcacgagtcgcaccaaagctattgtggtcatcaatcctaataacccaacaggagccctttatcctaaggagattttagaagacatcgttgctttggcaagagaacaccagctgattatttttgccgatgaaatctatgatcgtttggtgatggatggtaaagagcatattgctattgcaagtttggcacctgatgttttttgtgtatctatgaatggtctttccaaatctcatcgtattgctggttttcgtgttggatggatggtcttatcaggtcctaaagaccatgttaaaggttacattgaagggttaaacatgcttgccaatatgcggttatgctccaatgttttagcccaacaagttgttcaaacttccttaggaggtcatcaatcagttgatgcactgttactgccaggagggcgtatttttgagcaacgtaattttatttatgaagctattaatgctatccctggcttatcggcagttaaacctgaagcaggtctttatttatttccgaaaattgatcgtcagatgtatcgtattgatgatgatgaagaatttgtcttacagttattaaagcaagaaaaagtgatgttggtacatggacgtggttttaactggaaagatccagatcacttccgtattgtttacctaccaagtgtagaagaattagaagatgtccaagaaaagattacacgtgtcttataccagtatagacgt

SEQ ID NO: 3662 - protein, 416 aa, Streptococcus pyogenes
LVYNMEYEVYETMKIIEKSSKLEHVAYDIRGPVLDEANRMIASGEKILRLNTGNPAAFGFEAPDEVIRDLIVNARLSEGYSDSKGIFSARKAIMQYCQLKGFPDVDIEDIYLGNGVSELISISLQALLDNGDEVLVPMPDYPLWTACVSLGGGKAVHYLCDEEAGWYPDIADIKSKITSRTKAIVVINPNNPTGALYPKEILEDIVALAREHQLIIFADEIYDRLVMDGKEHIAIASLAPDVFCVSMNGLSKSHRIAGFRVGWMVLSGPKDHVKGYIEGLNMLANMRLCSNVLAQQVVQTSLGGHQSVDALLLPGGRIFEQRNFIYEAINAIPGLSAVKPEAGLYLFPKIDRQMYRIDDDEEFVLQLLKQEKVMLVHGRGFNWKDPDHFRIVYLPSVEELEDVQEKITRVLYQYRR

SEQ ID NO: 3663 - DNA, 267 bp, Streptococcus agalactiae
  misc_feature (1)..(267): n = a, c, g, or t
atggcgaaaaaaccatgggaaaaaaaagttgtggaaaacaatagtcatagaaaagacaaaattacaagaacgagtagaggtgtggtgtcaagtactccttggattaccgctttcttgagtgcattctttgttattgtcgttgctattttatttatagtattttatacttcaaatagaggagaagacagagcaaaagaaacttctggtttttatggtgcttcaagccaaaaagttaatagttctaaaacgaaaaaagcatctnnnnnt

SEQ ID NO: 3664 - protein, 89 aa, Streptococcus agalactiae
  MISC_FEATURE (1)..(89): Xaa = Any Amino Acid
MAKKPWEKKVVENNSHRKDKITRTSRGVVSSTPWITAFLSAFFVIVVAILFIVFYTSNRGEDRAKETSGFYGASSQKVNSSKTKKASXX

SEQ ID NO: 3665 - DNA, 474 bp, Streptococcus pyogenes
atggctaaagaaccatgggaagaaaaaattgttgatgatactatagggacacgaacacgtaaatcaagaaatgctttcattagcacgccttggttgactgctttattaagtgtattctttgtcatcattgttgctatactttttattttcttctatacatcaaatagcggtagtaatagacaagctgaaacaaatggtttttatggagcatccactcataaaaaaacaaggaaagcttctaacgctaaaaaaacatcaagtagttcaacaactacagacacaacaccttctagcgaagaaacacttgcttctagtgaaggaactggcgaaacccttactgtattggcaggtgagggggcagcttctattgcagctcgtgcaggtatttctgtggagcagttacaagcacttaatccagagcacatgactcaaggatattggtatgccaatccaggagatcaagtcactattaaa

SEQ ID NO: 3666 - protein, 158 aa, Streptococcus pyogenes
MAKEPWEEKIVDDTIGTRTRKSRNAFISTPWLTALLSVFFVIIVAILFIFFYTSNSGSNRQAETNGFYGASTHKKTRKASNAKKTSSSSTTTDTTPSSEETLASSEGTGETLTVLAGEGAASIAARAGISVEQLQALNPEHMTQGYWYANPGDQVTIK

SEQ ID NO: 3667 - DNA, 195 bp, Streptococcus agalactiae
atgaaagttgcactaattccagaaaaatgtattgcctgcgggctttgccaaacatattcaaatatttttgattatcaagatgatggtatcgttaaattttccgatacagataacctagaaaaagaaattccaagttctgatcaagatactgttttagcagttaaatcatgtcccaccaaagctcttacgattttg

SEQ ID NO: 3668 - protein, 65 aa, Streptococcus agalactiae
MKVALIPEKCIACGLCQTYSNIFDYQDDGIVKFSDTDNLEKEIPSSDQDTVLAVKSCPTKALTIL

SEQ ID NO: 3669 - DNA, 195 bp, Streptococcus pyogenes
atgaaagtatctatcattccagaaaaatgcatcgcttgtggtctatgccaaacctattcatcactttttgattatcatgacaatggtatcgtcacattttcaagctcatctgaaacaagtcagtcaatttgtccttcagataaggacgctattttagctgtcaaatcttgcccaactaaagctcttaccctcgag

SEQ ID NO: 3670 - protein, 65 aa, Streptococcus pyogenes
MKVSIIPEKCIACGLCQTYSSLFDYHDNGIVTFSSSSETSQSICPSDKDAILAVKSCPTKALTLE

SEQ ID NO: 3671 - DNA, 489 bp, Streptococcus agalactiae
atgataaaattatttgggaagatacgttatcactggcaacctgaactttcttgggctattatttattggtcaatagccattgcaccaatttttattggtttatctctgctatatgaaagaactgagattccgagtcaggtatttgttctatttgccatctttattgttttagtgggcattggatttcatcgctattttgttattgaagaagacggatatcttaggattgtatcttttaactttttaagacgaactaagtttccaattgaagatattgctaaaattgaggtcactaaatcaagtgttactatcaaatttaataataaccatgagcgtattttttacatgcgaaaatggcctaaaaaatattttttagatgcactagctattgaacctacatttaagggagaagtggagcttctcgataatttgattaaaatggattattttgaatgttatcgctacgataaaaaagctcttacaaaatcg

SEQ ID NO: 3672 - protein, 163 aa, Streptococcus agalactiae
MIKLFGKIRYHWQPELSWAIIYWSIAIAPIFIGLSLLYERTEIPSQVFVLFAIFIVLVGIGFHRYFVIEEDGYLRIVSFNFLRRTKFPIEDIAKIEVTKSSVTIKFNNNHERIFYMRKWPKKYFLDALAIEPTFKGEVELLDNLIKMDYFECYRYDKKALTKS

SEQ ID NO: 3673 - DNA, 486 bp, Streptococcus pyogenes
atgattaaactatttggtaaaataaggtatcactggcagccagagttgtcttggtctattatttattggtctattgcgtttgcacctatttttgtaggtttatctttgttgtatgagcgcactgaaatacctagtcgggtttttattctatttgctatttttgctgtcctagttggcattggattacatcgttatttcattattgaaaataatggtattttaagaatcgtatcttttaaattgtttggtccacgtaagctacttatttccactattactaagattgaggtgaccaaatcaacactttgtctgcacgttgaagataaaagttatctcttttatatgcgcaaatggcctaaaaaatattttcttgatgccttagcggttaatccatacttccaaggagaagttatattaagtgataactttattaaattagactattttgaagtttatcagcatgataaaaaagcccttactcgaggg

SEQ ID NO: 3674 - protein, 162 aa, Streptococcus pyogenes
MIKLFGKIRYHWQPELSWSIIYWSIAFAPIFVGLSLLYERTEIPSRVFILFAIFAVLVGIGLHRYFIIENNGILRIVSFKLFGPRKLLISTITKIEVTKSTLCLHVEDKSYLFYMRKWPKKYFLDALAVNPYFQGEVILSDNFIKLDYFEVYQHDKKALTRG

SEQ ID NO: 3675 - DNA, 1218 bp, Streptococcus agalactiae
atgtcttacgaaaagcttttagaacgatttttaacatacgtcaaaataaatacaagaagtaatcctaatagtacacaaacgccaacaactcaaagtcaagttgactttgctttaacagttttaaaaccagaaatggaagcaattggtttaaaagatgttcattatttaccttctaatgggtatttggttggaaccttacctgctacaagcgaccgcttacgccataaaataggttttatatcccatatggatacagctgatttcaatgctgaaaatattactccacaaattgttgactataaaggtggagatattgaacttggagactcaggttacattttaagtccaaaagattttccaaatttaaataattaccatgggcaaacactgattacaacagatggtaaaaccttactgggagcagacgataagtctggtatagcagaaatcatgacagctatggaatatttggcttcgcatccagaaattgagcattgtgaaattagagttggctttggaccagacgaagaaattggtataggtgcagataaatttgatgttaaagattttgatgttgattttgcctatacagtggatggtggaccactaggagaattacagtatgaaacctttagtgcagctggtttggagcttacatttgaaggacgaaacgttcaccctggaactgcaaaaaatcaaatgattaatgctttacagcttgctatggattttcatagtcaattaccagaaaatgaacgtcctgaacaaacagatggctatcaaggattttatcacttatatgatttaagtggaacagttgatcaagctaaaagttcatatatcattcgagattttgaggaagttgatttcttaaagcgtaagcacttggctcaagatatcgctgataatatgaatgaagcattacaatctgaacgtgtaaaggttaaactatacgatcaatattacaacatgaagaaagttattgaaaaagacatgacacctatcaacattgctaaagaagtaatggaagagttagacatcaagccaatcatagaaccgattcgtggtggtacagatggctctaaaatttcctttatgggaatccctactcctaatctttttgcaggtggtgaaaacatgcatggacgctttgaattcgttagtctacaaacaatggaaaaagcagttgatgttattttaggcatcgttgctaaggat

SEQ ID NO: 3676 - protein, 406 aa, Streptococcus agalactiae
MSYEKLLERFLTYVKINTRSNPNSTQTPTTQSQVDFALTVLKPEMEAIGLKDVHYLPSNGYLVGTLPATSDRLRHKIGFISHMDTADFNAENITPQIVDYKGGDIELGDSGYILSPKDFPNLNNYHGQTLITTDGKTLLGADDKSGIAEIMTAMEYLASHPEIEHCEIRVGFGPDEEIGIGADKFDVKDFDVDFAYTVDGGPLGELQYETFSAAGLELTFEGRNVHPGTAKNQMINALQLAMDFHSQLPENERPEQTDGYQGFYHLYDLSGTVDQAKSSYIIRDFEEVDFLKRKHLAQDIADNMNEALQSERVKVKLYDQYYNMKKVIEKDMTPINIAKEVMEELDIKPIIEPIRGGTDGSKISFMGIPTPNLFAGGENMHGRFEFVSLQTMEKAVDVILGIVAKD

SEQ ID NO: 3677 - DNA, 1233 bp, Streptococcus pyogenes
ttgaggtggcctatgaagtacgataacttgttagatcgatttataaaatatgtcaaagtgaatacaagaagcgttccagacagtgagactactcctagtacggagagtcaagaagcatttgccttaacgattttaaagcctgaaatggaggcaattggtttgcaagatgttcattataatccagttaatggctatcttattggaactctgcctgccaataatccaaccttgacgcgtaaaattggttttatagcccatatggatacggctgatttcaatgctgaaaatgttaatccgcagattattgacaattatcaaggaggggacattacacttggcagttctaattataagttggatccaaaagcatttccaaatcttaataattatatcggtcaaacattgattaccactgatgggactacacttttaggggcagatgataaatctggtattgctgaaatcatgacagcaatagaattcttgacatcacaaccacaaatagagcactgtgacattaaagtggcttttggccctgatgaagagattggggtcggagctgataagtttgaggtggctgattttgaggtggattttgcttatactatggatggcggtcctttaggcgaattgcaatatgaaactttcagcgctgcagctctagaagtgacttttttaggcagaaatgttcatcctggtacggctaaggatcaaatgattaatgcccttgagttagcaatagattttcatgagaagctacctgctaaagatcggcctgaatacacagatggttatcaaggtttctatcacttaacgggactaactggaacagttgaagaggcacgcgcatcttacattattcgtgattttgaagaagcatcatttgaagctagaaaagtgaaagttgaaaatatagctcaatcgatgaatgctcagctaggaacaaaacgtgtcttggtagagcttaatgaccaatactacaatatgaaaaaagttatcgaaaaagatatgaccgctattgagttagctaaagaagtaatggaagagcttgctatcaagcctgtaatcgaacccatacgtggaggaacagatggctctaaaatttcatttatgggtattcccactcctaatatttttgcagggggtgagaatatgcacgggcgttttgagtttgttagcttacaaacgatggagagagctgtcgatgtcattattggacttgtttgcaaagcc

SEQ ID NO: 3678 - protein, 411 aa, Streptococcus pyogenes
LRWPMKYDNLLDRFIKYVKVNTRSVPDSETTPSTESQEAFALTILKPEMEAIGLQDVHYNPVNGYLIGTLPANNPTLTRKIGFIAHMDTADFNAENVNPQIIDNYQGGDITLGSSNYKLDPKAFPNLNNYIGQTLITTDGTTLLGADDKSGIAEIMTAIEFLTSQPQIEHCDIKVAFGPDEEIGVGADKFEVADFEVDFAYTMDGGPLGELQYETFSAAALEVTFLGRNVHPGTAKDQMINALELAIDFHEKLPAKDRPEYTDGYQGFYHLTGLTGTVEEARASYIIRDFEEASFEARKVKVENIAQSMNAQLGTKRVLVELNDQYYNMKKVIEKDMTAIELAKEVMEELAIKPVIEPIRGGTDGSKISFMGIPTPNIFAGGENMHGRFEFVSLQTMERAVDVIIGLVCKA

SEQ ID NO: 3679 - DNA, 1665 bp, Streptococcus agalactiae
atgctaaataatattgaaaatagaaagtttaccatgtcacaaaaaacaacaaaagttagtcagcaagaacaaatggtcaaagggacggcttggttaacagcagggaatttcattagtcgcttgctgggagccatctatattatcccttggtatgcttggatgggaaagcatgctgccgaagcaaatgctttatttgggatgggatatgaaatctatgctttatttcttttgatatcaactgttggaattccagtagcagttgcaaaacaggtatctaagtataacactttaggtaaagaagagatgagcatttatctggttcggaaaatcttgcagtttatgctgattttaggtggaatttttgcattaattatgtatattggttcacctctatttgcttcacttagtaaaggagggcaagaactcgttccaatattgcgtagtctaactctagctgttttagtttttccttcaatgagtgttttacgtggtttttttcaaggttttaataatttaaaaccgtatgccattagtcaagtcgctgagcagattatacgtgtcatatggatgttattaactgctttctatattatgcgtctaggatcaggagattatattgccgctgtgacacagtcaacattcgccgcctttgtcggtatgtttgctagtatagctgtgctgctttatttcttatggcgttataatatgctatctgccttgattggtaaaactccaaagcacattaaattagatactaaagaaatcctaattgagactattaaggaagcaatcccttttattattactggtgcagcaattcaaattttcaaactgattgatcagttttcatttgggaatacgatggcgctctttacgaattattcaagtgaagaattacgggttatgtttgcttacttttcaagcaaccctggtaaagttacgatgattctaattgctgttgctaccgcaattgctggagttggtattccattgttaacagagaattttgttaagaatgataaaaaagccgccgctcgtttggttgttaataatctacaaatgttactaatgtttttactgccagctgttgcaggatccgttattttagcaaaacctttgtatacagtcttttatgggttaccgcagggacaagctttaggactttttgtcatatctcttattcaaacaattattttatctatttatactgttttagcaccaatgctacaagcattgtttgaaaatcgtaaagctattatttacttcctatatggtctggtggcaaaagttattttacaacttccctccattttccttttccatgcctatggaccacttttctcaacgacagtagctctttgtatcccagtaattcttatgtatttgaaaatacatgaaattacaggatttaaacgccaagctattcgtcgtacaagtgctttagtccttattctaacgctattgatgagctttattatttctatgataatatggttaatgaatctggttattgtacccgatagtagactggtaagtctagtttacattatcgttatcggtgcaataggtttaggggtatatggctttatggcactggccacccatctacttgataaaatgattggtagtcgtgctcaagacttacgccgaaagttgcaccttaac

SEQ ID NO: 3680 - protein, 555 aa, Streptococcus agalactiae
MLNNIENRKFTMSQKTTKVSQQEQMVKGTAWLTAGNFISRLLGAIYIIPWYAWMGKHAAEANALFGMGYEIYALFLLISTVGIPVAVAKQVSKYNTLGKEEMSIYLVRKILQFMLILGGIFALIMYIGSPLFASLSKGGQELVPILRSLTLAVLVFPSMSVLRGFFQGFNNLKPYAISQVAEQIIRVIWMLLTAFYIMRLGSGDYIAAVTQSTFAAFVGMFASIAVLLYFLWRYNMLSALIGKTPKHIKLDTKEILIETIKEAIPFIITGAAIQIFKLIDQFSFGNTMALFTNYSSEELRVMFAYFSSNPGKVTMILIAVATAIAGVGIPLLTENFVKNDKKAAARLVVNNLQMLLMFLLPAVAGSVILAKPLYTVFYGLPQGQALGLFVISLIQTIILSIYTVLAPMLQALFENRKAIIYFLYGLVAKVILQLPSIFLFHAYGPLFSTTVALCIPVILMYLKIHEITGFKRQAIRRTSALVLILTLLMSFIISMIIWLMNLVIVPDSRLVSLVYIIVIGAIGLGVYGFMALATHLLDKMIGSRAQDLRRKLHLN

SEQ ID NO: 3681 - DNA, 1632 bp, Streptococcus pyogenes
atgtcgacagaaaaaaaacaactgacacaagaagaattgatggttcagggagcagcctggtccacagctggtaatttcattagccgacttttgggagtgttatacattattccctggtacatttggatggggcaatacgcgattcaagccaacgctcttttcaatatggggtataatgtttatgcttattttttattgatttcaaccacaggactcaatgttgcgattgctaagcaggttgccaagtacaattccatgggacaaactgagcatagctatcaattaatccgaagtaccctaaaactcatgcttggtctgggccttattttttcagccattatgtatctgggctctcctttatttgcgagcttatctggtggtgatgacacacttgttcccattatgcacagcctttctttagcagtttttatttttcctgtaatgagtgtgattcgaggcatctttcaaggccacaataatatcaagccttatgcagttagtcagattgctgagcaactcattcgggttatctggatgcttttgaccaccttttttatcatgaagttgggttctggtgattacgcttcagcagtgactcagtcaacttttgcagcctttatcgggatggtggctagtatgggtgttctggggtactatctttggaaacagggacttctagcagctatttttagtaagccagatcatactgtttctattgatatcaagggcttgttgcttgaaaccttaaaagaatccatcccctttatcgtaacaggaagtgccattcaagcctttcaattgattgatcaatggacttttgtcaatacgatgactctttttacagattatagccgttctcaattgcttgttttatttggttactttaacgcaaacccagccaaaattacaatggtcttaattgcagtagcagcatctattggtggtgtaggtattgccttgttaactgaaaattatgtcaaaaaagacatgaaagcagctgctcgtttaatcattaacaacattgaaatgttagtgatgtttttgttacctgctcttactggggcaattattttagcaagacctctatattctgttttttacggagctagcgaggagcgtgccattcacctctttgtggcggttctctttcaaaccttgctactggcgctttacaccctcttttcaccgatgcttcaagctctttttgaaaatcgaaaagcgatttactactttgcctatggtatcttgattaagttagttttacagataccgcttatttatttgctacatgcttatggtcctttactagcgacgacgattgctttagtggtgccgatttatttgatgtatcgacgcctatatcaggttactcattttaaccgcaaactgttgcaaaaacgtttattattaaccttaattgaaaccttattaatgggactggtcgtgtttgtggccaactggctattgggctatgcctttaaaccgacaggccgcttgaccagccttctttacctcctcattattggtggcttgggaatgacggtttacacggcactcaccttgctgacgcatcaactggataaattaattggtagcaaagctagtcgccttcgtcagaaattaggctggcat

SEQ ID NO: 3682 - protein, 544 aa, Streptococcus pyogenes
MSTEKKQLTQEELMVQGAAWSTAGNFISRLLGVLYIIPWYIWMGQYAIQANALFNMGYNVYAYFLLISTTGLNVAIAKQVAKYNSMGQTEHSYQLIRSTLKLMLGLGLIFSAIMYLGSPLFASLSGGDDTLVPIMHSLSLAVFIFPVMSVIRGIFQGHNNIKPYAVSQIAEQLIRVIWMLLTTFFIMKLGSGDYASAVTQSTFAAFIGMVASMGVLGYYLWKQGLLAAIFSKPDHTVSIDIKGLLLETLKESIPFIVTGSAIQAFQLIDQWTFVNTMTLFTDYSRSQLLVLFGYFNANPAKITMVLIAVAASIGGVGIALLTENYVKKDMKAAARLIINNIEMLVMFLLPALTGAIILARPLYSVFYGASEERAIHLFVAVLFQTLLLALYTLFSPMLQALFENRKAIYYFAYGILIKLVLQIPLIYLLHAYGPLLATTIALVVPIYLMYRRLYQVTHFNRKLLQKRLLLTLIETLLMGLVVFVANWLLGYAFKPTGRLTSLLYLLIIGGLGMTVYTALTLLTHQLDKLIGSKASRLRQKLGWH

SEQ ID NO: 3683 - DNA, 1452 bp, Streptococcus agalactiae
atgattacaatagataaaattttagaaattttaaaaaatgaccataatttcagagagattttgtttcatgagcattattattataactggacacaaaatgtaacttttaatgccttatcatatgatagtcgtcaaatttcatctgatactttatttttcgctaagggtgctacttttaaaaaagaatatctagattctgcaatcacagcaggcctttctttttacgtttctgagacagattacggcgccgatattccagtgatattagtcaatgatatcaaaaaagccatgagtttgatatctatgtctttctataataacccacaaaacaaacttaaacttctagcttttactggaacaaaaggaaaaacaactgcggcttactttgcttatcatatgttaaaagtaaaccatcgtcctgctatgctctcaactatgaacacaacattagatggtaaatctttctttaaatcacatctcacaacccccgagagtcttgatttatttcggatgatggctacagccgttgagaatcaaatgacacacttaattatggaagtatcaagccaagcatacctaaccaaacgtgtttatggtttaacctttgacgttggcgttttcttaaatattagtcccgatcatattggtcctatcgagcaccctacattcgaagattattttttccacaaacggctcttgatggagaatagcaatgctgttgttgtaaatagtcagatggatcattttaatattgtcaaagaacaggtcgaatatattcctcatgatttctatggagattattctgaaaatgttatcacagaatcaaaggccttttctttccatgtcaaaggaaagttggagaacacctacgatatcaagctgattggaaaattcaatcaagaaaatgctatcgcagctggacttgcttgtctccgacttggtgtttcaattgaagatataaaaaacggaattgcacaaactaccgtccctggccgcatggaagtcctaacacaaaccaacggcgcaaagattttcgttgactatgcccacaacggagacagtttgaagaaattattagctgttgttgaggaacaccaaaaaggggatattatattagtactcggagctcctggtaataaaggtcaaagccgtcgtaaagactttggagatgtcattaatcaacatcctaatctacaagtgatactcactgcagatgatcctaattttgaagatcccttagttatctcacaagaaatagcaagccatattaatcgtccggttactatcatcattgatcgagaagaagcaattgctaatgccagtactcttactaattgcaaactagatgcaattattatcgctggtaaaggagcagatgcttatcaaattatcaaaggaaatcgtgacaattactctggagatttagaagttgcgaaaaaataccttaaacga

SEQ ID NO: 3684 - protein, 484 aa, Streptococcus agalactiae
MITIDKILEILKNDHNFREILFHEHYYYNWTQNVTFNALSYDSRQISSDTLFFAKGATFKKEYLDSAITAGLSFYVSETDYGADIPVILVNDIKKAMSLISMSFYNNPQNKLKLLAFTGTKGKTTAAYFAYHMLKVNHRPAMLSTMNTTLDGKSFFKSHLTTPESLDLFRMMATAVENQMTHLIMEVSSQAYLTKRVYGLTFDVGVFLNISPDHIGPIEHPTFEDYFFHKRLLMENSNAVVVNSQMDHFNIVKEQVEYIPHDFYGDYSENVITESKAFSFHVKGKLENTYDIKLIGKFNQENAIAAGLACLRLGVSIEDIKNGIAQTTVPGRMEVLTQTNGAKIFVDYAHNGDSLKKLLAVVEEHQKGDIILVLGAPGNKGQSRRKDFGDVINQHPNLQVILTADDPNFEDPLVISQEIASHINRPVTIIIDREEAIANASTLTNCKLDAIIIAGKGADAYQIIKGNRDNYSGDLEVAKKYLKR

SEQ ID NO: 3685 - DNA, 1443 bp, Streptococcus pyogenes
atgataaccattgaacaattattagacattttaaaaaaagaccataattttcgtgaggttcttgatgccgacggataccactaccattatcaaggctttagttttgagcgcttgagttacgatagccgtcaagtagatggcaagacccttttttttgctaaaggggcaactttcaaagctgactaccttaaagaagcaatcactaacggattacaactctatatttcagaggtagattacgagcttggtattcccgttgttttggtcactgatatcaaaaaagctatgagtctaattgccatggctttctatggcaaccctcaagaaaagctcaaactactagcttttacaggtactaagggaaagacgacggctgcttattttgcctaccacatgttgaaagaatcctataaacctgccatgttttctaccatgaataccaccttagatggcaagacctttttcaaatcacaactcacaactcctgagagcttggatctttttgctatgatggctgagtgtgtgactaatggcatgacccacttgattatggaagtttctagtcaggcttacctcgttgaccgtgtctatgggcttacgttcgatgttggggttttcctaaatattagtcctgatcatattggcccaatcgagcatccaacgtttgaagattatttctatcataagcgtcttttaatggagaatagcagagctgttgtgatcaatagcgggatggatcatttttcatttctagcggatcaggtagcggatcaagagcatgtgttttatggtcccttgtctgacaaccagatcaccactagccaagccttctcctttgaagctaaaggacaattagctggccattatgacattcaattaattggccattttaaccaagaaaatgctatggcagctggacttgcctgccttcgtttgggtgctagcctagctgatattcaaaaaggtatcgctaagactcgcgtcccaggccgtatggaagtcctcactatgacaaatcatgctaaagtttttgttgattatgcccataatggtgacagcttagaaaaattactcagcgttgtggaagaacatcagacaggcaaattaatgttgattttaggtgcaccaggaaataaaggcgagagcagacgagctgattttggtagggtgattcatcagcatccaaacctcaccgtcattctcactgctgatgaccctaatttcgaggatccagaagatatttcaaaagaaattgccagccatatcgcacgcccagtagagattattagtgaccgtgagcaagctattcaaaaagccatgtctctttgccaaggagcaaaagatgctgtgattatcgctgggaaaggcgcagatgcttatcaaattgttaaaggacaacaagtagcttatgctggtgatttagcaatcgccaaacactacctc

SEQ ID NO: 3686 - protein, 481 aa, Streptococcus pyogenes
MITIEQLLDILKKDHNFREVLDADGYHYHYQGFSFERLSYDSRQVDGKTLFFAKGATFKADYLKEAITNGLQLYISEVDYELGIPVVLVTDIKKAMSLIAMAFYGNPQEKLKLLAFTGTKGKTTAAYFAYHMLKESYKPAMFSTMNTTLDGKTFFKSQLTTPESLDLFAMMAECVTNGMTHLIMEVSSQAYLVDRVYGLTFDVGVFLNISPDHIGPIEHPTFEDYFYHKRLLMENSRAVVINSGMDHFSFLADQVADQEHVFYGPLSDNQITTSQAFSFEAKGQLAGHYDIQLIGHFNQENAMAAGLACLRLGASLADIQKGIAKTRVPGRMEVLTMTNHAKVFVDYAHNGDSLEKLLSVVEEHQTGKLMLILGAPGNKGESRRADFGRVIHQHPNLTVILTADDPNFEDPEDISKEIASHIARPVEIISDREQAIQKAMSLCQGAKDAVIIAGKGADAYQIVKGQQVAYAGDLAIAKHYL

SEQ ID NO: 3687 - DNA, 111 bp, Streptococcus agalactiae
ttgtcaaattgccaaggtatttttggtgtgggaaccgtccataagatattagttcataaactgttatcccttcagttgcttctaacacctgtgggagaagtgcaatcttct

SEQ ID NO: 3688 - protein, 37 aa, Streptococcus agalactiae
MSNCQGIFGVGTVHKILVHKLLSLQLLLTPVGEVQSS

SEQ ID NO: 3689 - DNA, 810 bp, Streptococcus agalactiae
ttgctagaaaggttctctatgtctcacataaaagcagaaaacattatcgtatcttacgatcagaaagaaatcatcaataatctttccctcagtatacttaaccaaaaaataacaacgattattggtgccaatggatgtggaaagtctactcttttgaaggctctcacacgcatccataaaataaaagatggtactatcactattgatggtcatgatattgcacatttacccacaaaggaaattgctaagaagattgcacttctcccacaggtgttagaagcaactgaagggataacagtttatgaactaatatcttatggacggttcccacaccaaaaataccttggcaatttgacaaatgacgatcgcagtaaaatccattgggcgatggaaatgactaacgtagcgcaatttgctaatagagatgttgatgacctttcaggaggtcagaggcaaaaagtatggattgctatggctttagcacaagatacagatactatctttttagacgaacctacaacttatcttgacatgaatcatcaattagaagtcttagaattgctcaaaaaacttaatgacgaaacgcaaaaaacaattattatggtcctacacgacctaaacctgtctgcgcgctattctgattatctagttgcaatgaaaaccggtaaaattatctatgaaggtagtcctagtcagatcatgactaaagatattatcaaagatatttttaagattgatgctcatatcattcaggaccctattagtaaacaacctgttttgttatcttatcaattatcaactgatcaaaat

SEQ ID NO: 3690 - protein, 270 aa, Streptococcus agalactiae
MLERFSMSHIKAENIIVSYDQKEIINNLSLSILNQKITTIIGANGCGKSTLLKALTRIHKIKDGTITIDGHDIAHLPTKEIAKKIALLPQVLEATEGITVYELISYGRFPHQKYLGNLTNDDRSKIHWAMEMTNVAQFANRDVDDLSGGQRQKVWIAMALAQDTDTIFLDEPTTYLDMNHQLEVLELLKKLNDETQKTIIMVLHDLNLSARYSDYLVAMKTGKIIYEGSPSQIMTKDIIKDIFKIDAHIIQDPISKQPVLLSYQLSTDQN

SEQ ID NO: 3691 - DNA, 930 bp, Streptococcus agalactiae
atgaaaaaaattggaattattgtcctcacactactgaccttctttttggtatcttgcggacaacaaactaaacaagaaagcactaaaacaactatttctaaaatgcctaaaattgaaggcttcacctattatggaaaaattcctgaaaatccgaaaaaagtaattaattttacatattcttacactgggtatttattaaaactaggtgttaatgtttcaagttacagtttagacttagaaaaagatagccccgtttttggtaaacaactgaaagaagctaaaaaattaactgctgatgatacagaagctattgccgcacaaaaacctgatttaatcatggttttcgatcaagatccaaacatcaatactctgaaaaaaattgcaccaactttagttattaaatatggtgcacaaaattatttagatatgatgccagccttggggaaagtattcggtaaagaaaaagaagctaatcagtgggttagccaatggaaaactaaaactctcgctgtcaaaaaagatttacaccatatcttaaagcctaacactacttttactattatggatttttatgataaaaatatctatttatatggtaataattttggacgcggtggagaactaatctatgattcactaggttatgctgccccagaaaaagtcaaaaaagatgtctttaaaaaagggtggtttaccgtttcgcaagaagcaatcggtgattacgttggagattatgcccttgttaatataaacaaaacgactaaaaaagcagcttcatcacttaaagaaagtgatgtctggaagaatttaccagctgtcaaaaaagggcacatcatagaaagtaactacgacgtgttttatttctctgaccctctatctttagaagctcaattaaaatcatttacaaaggctatcaaagaaaatacaaat

SEQ ID NO: 3692 - protein, 310 aa, Streptococcus agalactiae
MKKIGIIVLTLLTFFLVSCGQQTKQESTKTTISKMPKIEGFTYYGKIPENPKKVINFTYSYTGYLLKLGVNVSSYSLDLEKDSPVFGKQLKEAKKLTADDTEAIAAQKPDLIMVFDQDPNINTLKKIAPTLVIKYGAQNYLDMMPALGKVFGKEKEANQWVSQWKTKTLAVKKDLHHILKPNTTFTIMDFYDKNIYLYGNNFGRGGELIYDSLGYAAPEKVKKDVFKKGWFTVSQEAIGDYVGDYALVNINKTTKKAASSLKESDVWKNLPAVKKGHIIESNYDVFYFSDPLSLEAQLKSFTKAIKENTN

SEQ ID NO: 3693 - DNA, 930 bp, Streptococcus pyogenes
atgaaaaaattaactctactattaacactctgtttgacaactattaccttaatcgcctgtggtaatcaagcaactaatcattctaacaccgcctcaaaaagtttatcgcctatgcctcaaattgctggtgtgacttattacggagatattcctaaacagcctaagcgagtagtcagtctggcttcaacttacactggttacctcaaaaaattagatatgaatctagtcggggttacttcttatgacaagaaaaaccccatcttagcaaagactgtaaaaaaagcaaagcaagttgctgcaactgatttagaagccgttacaacgcttaagcctgacctcattgttgttggctctacagaagaaaatattaaacaattggcagaaattgcgcctgttatctcgattgaataccgcaaacgtgattatttacaagtgttatctgacttcggccgcatctttaacaaagaagacaaagccaagaagtggttaaaagattggaaaactaaaacagcagcttatgaaaaagaagtcaaggccgttacaggtgacaaagcaacctttactattatggggctttatgaaaaagacgtttacctttttggtaaagactggggacgtggcggagagattatccatcaagctttccattatgatgctcctgaaaaagtgaagactgaagtttttaaacaaggttacctgtcattgtcgcaggaagtcttgccagactatattggtgattatgtcgtcgttgctgcagaagatgataagactggttctgctctatatgaaagcaagctatggcaatccattccagctgtgaaaaaacaccatgtgatcaaagtcaatgccaatgttttttactttactgatcctctttctttagaatatcaattagagactttacgagaggcaatcttatcaagtgaaaac

SEQ ID NO: 3694 - protein, 310 aa, Streptococcus pyogenes
MKKLTLLLTLCLTTITLIACGNQATNHSNTASKSLSPMPQIAGVTYYGDIPKQPKRVVSLASTYTGYLKKLDMNLVGVTSYDKKNPILAKTVKKAKQVAATDLEAVTTLKPDLIVVGSTEENIKQLAEIAPVISIEYRKRDYLQVLSDFGRIFNKEDKAKKWLKDWKTKTAAYEKEVKAVTGDKATFTIMGLYEKDVYLFGKDWGRGGEIIHQAFHYDAPEKVKTEVFKQGYLSLSQEVLPDYIGDYVVVAAEDDKTGSALYESKLWQSIPAVKKHHVIKVNANVFYFTDPLSLEYQLETLREAILSSEN

SEQ ID NO: 3695 - DNA, 123 bp, Streptococcus agalactiae
ttgggaataaaaagcttaataaaatgtggaataatcaatccaatgaaagaaacggttcctatcaaagcgactgatgaagctgataaaaacaaaacaataagtaatagaaacgcagtcattaat

SEQ ID NO: 3696 - protein, 41 aa, Streptococcus agalactiae
MGIKSLIKCGIINPMKETVPIKATDEADKNKTISNRNAVIN

SEQ ID NO: 3697 - DNA, 1023 bp, Streptococcus agalactiae
atgtttaaagcttcaaaaaaactcgttcaaaaaaataagtcaaatcatttttggcttgtttttttcataacacttatactatttcttattggttgttacgccagcttacgatttggtgctatcaatttcaagactagtgatttaataactgttttaaaaaatcccttaaaaaactctaatgctcaggatgttatttttgacattagactaccacgcataattgcagctatcttagtaggtgcagctatgtcacaagcaggtgctattatgcagggagtcactcgaaacgccattgctgatcctggactactaggtattaacgccggagctgggttagcccttgttgtagcatatgcttttttagggagcatgcactatagtacgattctcatagtctgcttactagggtctgtcatttcttgtcttttagtcttcacactctcttatacaaagcaaaagggttaccaccaactacgactcattttagccggagcgatgatctccacactttttacgtctgttggacaagtggttacattatactttaaactcaatcgaactgttatcggttggcaagcaggtggtttatcccaaattaactggaaaatgctaatcataatagcacctatcattattttaggtttacttatttcacaactcctagcacatcaattaactatcttgagccttaatgaatctgtggccaaagcattgggacaaaaaactcaattaatgactgcgtttctattacttattgttttgtttttatcagcttcatcagtcgctttgataggaaccgtttctttcattggattgattattccacattttattaagctttttattcccaaagattatcgtctgttattacctttaataggattttcaggggctactttcatgatctgggtagacttatcatctcgtattataaatcccccttcagagacatcaattagttctataatcagtatcgtagggcttccatgtttcctatggttaattagaaaagggaaaaatcta

SEQ ID NO: 3698 - protein, 341 aa, Streptococcus agalactiae
MFKASKKLVQKNKSNHFWLVFFITLILFLIGCYASLRFGAINFKTSDLITVLKNPLKNSNAQDVIFDIRLPRIIAAILVGAAMSQAGAIMQGVTRNAIADPGLLGINAGAGLALVVAYAFLGSMHYSTILIVCLLGSVISCLLVFTLSYTKQKGYHQLRLILAGAMISTLFTSVGQVVTLYFKLNRTVIGWQAGGLSQINWKMLIIIAPIIILGLLISQLLAHQLTILSLNESVAKALGQKTQLMTAFLLLIVLFLSASSVALIGTVSFIGLIIPHFIKLFIPKDYRLLLPLIGFSGATFMIWVDLSSRIINPPSETSISSIISIVGLPCFLWLIRKGKNL

SEQ ID NO: 3699 - DNA, 939 bp, Streptococcus pyogenes
gtgaaaactaagcatccctttttgtgtctcgagcgtttttgcttaaaaaaaacgcagataatcactaagtcacatatcttttggcttgtctttgtgctacttagttttagcttatgtgttgctatttactgtcatctgcgctttggagccgttgctttatcacatcaggatcttaactctattttatttggaaagcaaaacggccataaagccaatgttttactcgctatacgattaccgagactttttggtgctaccttaactggctctgcgttagctgtttctggaactatcatgcaagcaatcacacgtaatcctatcgctgagcctggccttttaggcattaatgctggagcaggactagccttggtactggcttatgcgtttgtacctcacttgcactattccctcattattctgctttcgttgttagggtctagcctggcagcaaccttagtctttggcctttcttatcaatctggcaaaggctaccatcagctccgccttgtcttagcaggagctatggtttccatactgctatcagcattaggtcaaggtattaccaattactatcatctggcaaatgctgttatcggctggcaagcaggaggtcttgtcggggtcaattggcaaatgatcggctatattgctcctcttattattcttagtctttgtttagcccagctattatcttatcacctgaccgtccttagtctaagtgagtctcaggcaaaagctcttgggcaaaaaaccaacttgatcagtgcagtctttatgattttggttcttattttatcatcagcagctgtagccattgctggaagcatttcttttatcggcttagtcattcctcatcttatgaaacattttacacctcatcattaccgataccttttgccgctttgtgcagtttctggcgctagtttcaatggtatgggt

SEQ ID NO: 3700 - protein, 313 aa, Streptococcus pyogenes
VKTKHPFLCLERFCLKKTQIITKSHIFWLVFVLLSFSLCVAIYCHLRFGAVALSHQDLNSILFGKQNGHKANVLLAIRLPRLFGATLTGSALAVSGTIMQAITRNPIAEPGLLGINAGAGLALVLAYAFVPHLHYSLIILLSLLGSSLAATLVFGLSYQSGKGYHQLRLVLAGAMVSILLSALGQGITNYYHLANAVIGWQAGGLVGVNWQMIGYIAPLIILSLCLAQLLSYHLTVLSLSESQAKALGQKTNLISAVFMILVLILSSAAVAIAGSISFIGLVIPHLMKHFTPHHYRYLLPLCAVSGASFNGMG

SEQ ID NO: 3701 - DNA, 252 bp, Streptococcus agalactiae
ttgctaacattaaatgttcctatggttagagcgattactaatccagctccagcattgataccaagaataccggaatcagctagtggatttttggttaacgtctgtaatagcaacccagcaattcctaaagaagctcccccaaagatacagacaataatacgaggtaaacgaatgttagtaatgataaaaaggaaggcatcatcagattttccacttattagttttaaaacgtcaataacggaagtattagca

SEQ ID NO: 3702 - protein, 84 aa, Streptococcus agalactiae
MLTLNVPMVRAITNPAPALIPRIPESASGFLVNVCNSNPAIPKEAPPKIQTIIRGKRMLVMIKRKASSDFPLISFKTSITEVLA

SEQ ID NO: 3703 - DNA, 999 bp, Streptococcus agalactiae
atgattcaaaaaaataaagctccttttgttttaatatcatctgtcattatcctactattattaatactagtatcaatttcacttggctatgctaatacttccgttattgacgttttaaaactaataagtggaaaatctgatgatgccttcctttttatcattactaacattcgtttacctcgtattattgtctgtatctttgggggagcttctttaggaattgctgggttgctattacagacgttaaccaaaaatccactagctgattccggtattcttggtatcaatgctggagctggattagtaatcgctctaaccataggaacatttaatgttagcaatccaactatattatactttttacccctatttgctatgtttggagggttggtaactatttttcttatctatcttatgtcatacagaagaaatcacaatattagccctacacgattaatcgtcactggtatcggaatatctacaattatttcaggcgttatgattttgattattagtcagtctaataatcaaaaaatggatatgatcgttgaatggcttagtggaaaaattacaattagttcctggactaccattatcacttttatcccgattctcattttgttatggggattagcatatagtcgcagtcgccaccttaatattatgaacctaaacgagcagactgctctcgctctaggacttcatttaaaaaaggaaagaatatatactttgatgctgacaagtagcctcgctgctattagcgtcgtcttaattggtaatattacttttataggcttactcgctgggcacttaagtagacgactattaggaaataaccataaaattatactacctagctgtcttcttattggtgctattatcctattggtatcagatactataggtcgtctcctcttagttggtacgggtattcccactggattggttgtatcaataattggtgccccctattttctctggttgatgacaaaagttgac

SEQ ID NO: 3704 - protein, 333 aa, Streptococcus agalactiae
MIQKNKAPFVLISSVIILLLLILVSISLGYANTSVIDVLKLISGKSDDAFLFIITNIRLPRIIVCIFGGASLGIAGLLLQTLTKNPLADSGILGINAGAGLVIALTIGTFNVSNPTILYFLPLFAMFGGLVTIFLIYLMSYRRNHNISPTRLIVTGIGISTIISGVMILIISQSNNQKMDMIVEWLSGKITISSWTTIITFIPILILLWGLAYSRSRHLNIMNLNEQTALALGLHLKKERIYTLMLTSSLAAISVVLIGNITFIGLLAGHLSRRLLGNNHKIILPSCLLIGAIILLVSDTIGRLLLVGTGIPTGLVVSIIGAPYFLWLMTKVD

SEQ ID NO: 3705 - DNA, 651 bp, Streptococcus agalactiae
atgatattaacgtttaatccaggaaagttagaaagacaagagttttttaaggagcttattaactatctttggatacatgatgatgtaacactaagaaaaataaagtcccactttacagactattctaaaattgaccgtttgttagaagaatatattaatcatggatatatccttcgccaaaataaacgctacagccttaatcttccttttctgagttcgctagatggattagtattagatgatttggttttcatagattctgatagtcaaatctatcagttattacagaagcgaaaatttgtgacaaatttagataacccaaccaatcacttggtatttgtagaagagacagattttgaaagaaacactttgactctttctaattatttctataaactaactaacggttatccactttcaagagaacaaaaaaagctttatcaacttttaggagatgttaattcggaatatgctttaaaatatatgtcaagctttatattgaaatttcttcgcaaggatagtgttaagcaaaaacgtacagttatttttatccaagctttagaattacttggatatattagcttaaaccaagatactacctatcgtttaaatgctaaacttgatgttgaagctttaaagatttacttaaca

SEQ ID NO: 3706 - protein, 217 aa, Streptococcus agalactiae
MILTFNPGKLERQEFFKELINYLWIHDDVTLRKIKSHFTDYSKIDRLLEEYINHGYILRQNKRYSLNLPFLSSLDGLVLDDLVFIDSDSQIYQLLQKRKFVTNLDNPTNHLVFVEETDFERNTLTLSNYFYKLTNGYPLSREQKKLYQLLGDVNSEYALKYMSSFILKFLRKDSVKQKRTVIFIQALELLGYISLNQDTTYRLNAKLDVEALKIYLT

SEQ ID NO: 3707 - DNA, 651 bp, Streptococcus pyogenes
atgataacagtatttcattcagataaactcaccagacaacctttctttcaagaccttatcaattatctcgaccagcatgatcacgttatattacgagagatcaaaaaagcctttcctaatgtgacaggtattgacaaggccatcgaaagctatgttcaagctggctatattcgccgtgaaaataagcgttatggcatcaatcttcctttggtgagttctgatcagcagctggccttagacactatgctttttgtggacacctgttcagctatgtatgaaaatattttagcggttgtttttgagactcagctaacaaaccaaaccaatcgcgtgatgatcaaggaaaagaccaacatcacgagagacgatttgaccctggctaattatttttaccgtctcaaaagaggtgagaagccatcagctgagcagatggacttgtatgacctcttgggggatgtgaatcaggaatatgcccttaaatatatgacaacttttttgcttaaattcacgcgcaaagactttgtgatgcaaaaacgtcctgatatatttgtggaagctctggttacacttggttacctaaaacaagtggagcctacaacataccagctgctaatgaccttggataaagaaagtttaacctttatagcacca

SEQ ID NO: 3708 - protein, 217 aa, Streptococcus pyogenes
MITVFHSDKLTRQPFFQDLINYLDQHDHVILREIKKAFPNVTGIDKAIESYVQAGYIRRENKRYGINLPLVSSDQQLALDTMLFVDTCSAMYENILAVVFETQLTNQTNRVMIKEKTNITRDDLTLANYFYRLKRGEKPSAEQMDLYDLLGDVNQEYALKYMTTFLLKFTRKDFVMQKRPDIFVEALVTLGYLKQVEPTTYQLLMTLDKESLTFIAP

SEQ ID NO: 3709 - DNA, 933 bp, Streptococcus agalactiae
atgtctaaaattttagtctttggtcaccaaaatccagattcagatgctattggatcatcagttgcttttgcatatctagctaaagaagcttgggggcttgacacagaggccgttgctttaggaactccaaatgaagaaacagcatatgttttagattattttggtgttcaagcacctcgagtagtagaatctgcaaaagcagagggtgtagagacagtcattttaactgaccataacgaattccaacaatctatttctgatattaaagatgtgacagtttatggtgttgttgatcatcatcgtgttgctaactttgagactgccaatccgttatatatgcgtttggaaccagttggctcagcatcatcgattgtttaccgtatgtttaaggaaaatggagtatcagtacccaaagagttggctggtttattattatcaggtttgatttcagatactcttcttttgaaatcaccaacaactcatgcttcagatattccagttgcaaaagaactagcagagcttgcaggtgtaaacttagaagaatatggtttagaaatgcttaaagcaggtactaacctctcaagtaagactgcagcggagttgattgatattgatgctaaaacatttgaattaaatggagaagctgttcgtgttgcacaagttaatactgtggacattaacgatattttagcacgtcaagaagagattgaagttgctattcaagaagcaattgtcacagaaggttattctgattttgtattgatgattactgacattgttaattcaaattcagagattttagctctcggttcaaatatggctaaagttgaagcagcttttgaatttacacttgaaaataaccacgcttttcttgctggggcagtatcacgcaaaaaacaagttgttcctcaattgacagaaagctacaatgct

SEQ ID NO: 3710 - protein, 311 aa, Streptococcus agalactiae
MSKILVFGHQNPDSDAIGSSVAFAYLAKEAWGLDTEAVALGTPNEETAYVLDYFGVQAPRVVESAKAEGVETVILTDHNEFQQSISDIKDVTVYGVVDHHRVANFETANPLYMRLEPVGSASSIVYRMFKENGVSVPKELAGLLLSGLISDTLLLKSPTTHASDIPVAKELAELAGVNLEEYGLEMLKAGTNLSSKTAAELIDIDAKTFELNGEAVRVAQVNTVDINDILARQEEIEVAIQEAIVTEGYSDFVLMITDIVNSNSEILALGSNMAKVEAAFEFTLENNHAFLAGAVSRKKQVVPQLTESYNA

SEQ ID NO: 3711 - DNA, 939 bp, Streptococcus pyogenes
atgattatgtcaaaaattttagtttttggtcatcaaaatcctgatacggatgctattgcatcatcttatgcttttgattacttatcccaaaaagcgtttggtttggatactgaagtcgtagctttaggaacacctaacgaagaaacagcttttgcccttgattattttggtgttgaggcaccacgtgtggtagagtctgctaaagcacaagggtctgaacaagtgattttgacagaccacaatgaattccaacaatccattgcagatatccgtgaggttgaggtatatggtgtggttgatcaccaccgtgtggctaattttgaaactgcaaatcctttatacatgcgtgtggaaccagtaggatcagcctcatctattgtttaccgtatgtttaaagaaaatggcatcgaggtgccaaaagcgattgcagggatgctcttgtctggtttgatttcagataccttgttgttgaaatctccaacaactcatgtgtctgatcaccttgtcgctgaagaattggcagagctggcagaagtgaacttggaagactatggaatggctcttttaaaagcaggtacaaaccttgcaagcaaatcagaagtagaattgattggtattgatgccaaaacatttgaattaaatggcaatgctgtgcgcgtggcacaagtgaacactgttgacattgcagaagtcttagaacgtcaagaagctattgaagcagccattaaagatgccatggctgcagaaggttattcagattttgttttgatgatcacggatattgttaactcaaactctgaaattctagctattggagcaaacatggacaaggttgaagcagcctttaacttcacccttgacaacaatcatgccttcttagcaggtgccgtttctcgtaaaaaacaagtggttccacaattgacagaaagttttggagct

SEQ ID NO: 3712 - protein, 313 aa, Streptococcus pyogenes
MIMSKILVFGHQNPDTDAIASSYAFDYLSQKAFGLDTEVVALGTPNEETAFALDYFGVEAPRVVESAKAQGSEQVILTDHNEFQQSIADIREVEVYGVVDHHRVANFETANPLYMRVEPVGSASSIVYRMFKENGIEVPKAIAGMLLSGLISDTLLLKSPTTHVSDHLVAEELAELAEVNLEDYGMALLKAGTNLASKSEVELIGIDAKTFELNGNAVRVAQVNTVDIAEVLERQEAIEAAIKDAMAAEGYSDFVLMITDIVNSNSEILAIGANMDKVEAAFNFTLDNNHAFLAGAVSRKKQVVPQLTESFGA

SEQ ID NO: 3713 - DNA, 786 bp, Streptococcus agalactiae
atggcagaaatagactataaaaaagtaacaggaatgatccattctacagaaagtttcggctctgtggatgggccaggtattcgttttatcatttttatgcaaggatgtaaaatgcgttgtcaatactgtcataatcctgatacttgggaaatggaaactaacaattcaaaggaacgtaccgttgaggatgttctaaaggaagctctccgttataaacatttttggggaaaagatggaggtatcacagtttcaggtggtgaagcaatgctgcaaattgactttattacagccctctttattgaggctaagaaactaggtattcatacgacgctagatacttgtggttttgcttatcgagcaacaccagaataccatgctatccttgaaaaattgttagatgttactgatttggtactccttgacttaaaagaaattgattcagaacaacataaaattgtaactcgtcagtctaacaaaaatattttacagtttgctagatatttatctgatagaggtactccggtatggattcgtcatgttttagttcctggattgactgatattgatgaccatttaaaacgtttgggtgaatttgtccaaacacttgataatgtcgataaatttgaagtattgccttatcatactatgggagagttcaaatggcgtgaattaggaattccgtatccattagctggtgtgaaaccaccaactccagaacgtgttaaaaacgctaaagatatcatgaaaacagaatcctatacagaatatctaaaaaggattcaaaat

SEQ ID NO: 3714 - protein, 262 aa, Streptococcus agalactiae
MAEIDYKKVTGMIHSTESFGSVDGPGIRFIIFMQGCKMRCQYCHNPDTWEMETNNSKERTVEDVLKEALRYKHFWGKDGGITVSGGEAMLQIDFITALFIEAKKLGIHTTLDTCGFAYRATPEYHAILEKLLDVTDLVLLDLKEIDSEQHKIVTRQSNKNILQFARYLSDRGTPVWIRHVLVPGLTDIDDHLKRLGEFVQTLDNVDKFEVLPYHTMGEFKWRELGIPYPLAGVKPPTPERVKNAKDIMKTESYTEYLKRIQN

SEQ ID NO: 3715 - DNA, 861 bp, Streptococcus pyogenes
atgcctagtctttttgatgaaaagtgttataatgaaaatgtaaaaacgtttacaagtaatgaaggagatgcaatgactgagaaagattatggacaagtaacagggatggtgcattcgacagaaagttttggttctgtagatggtccaggcattcgttttatcattttcttgcaaggctgtaaattacgttgccaatattgccataatccggatacttgggagatggaaaccaacaattcaaaaatcagaacagtcaatgatgtcttgaaagaagcccttcagtacaaacatttctggggaaaaaaaggaggaattaccgtatctggtggtgaagctatgcttcaaattgattttatcactgccttattcatcgaagctaaaaaattaggtatccataccacactagacacctgtggctttacctatagaccgacacctgaataccatcaggttcttgataacttattggcagtgaccgatttgattttattggacttaaaagaaattgatgaaaaacaacataaaattgtcacgcgtcagcctaataaaaacatattgcaatttgctaggtatttatccgacaagcagattcctgtctggattcgacatgtcttggttccaggcttgactgatattgatgatcatttgacacgattgggtgagtttgtcaaaaccttgaaaaatgtcgataaatttgaagttttgccttaccataccatgggagaattcaagtggcgtgagctaggtattccttatcagttagaaggtgttaaaccaccaactaaggaacgcgttcaaaatgctaaaaatctgatgcagaccgaatcttacacagaatatatgaatcggattcatcagtca

SEQ ID NO: 3716 - protein, 287 aa, Streptococcus pyogenes
MPSLFDEKCYNENVKTFTSNEGDAMTEKDYGQVTGMVHSTESFGSVDGPGIRFIIFLQGCKLRCQYCHNPDTWEMETNNSKIRTVNDVLKEALQYKHFWGKKGGITVSGGEAMLQIDFITALFIEAKKLGIHTTLDTCGFTYRPTPEYHQVLDNLLAVTDLILLDLKEIDEKQHKIVTRQPNKNILQFARYLSDKQIPVWIRHVLVPGLTDIDDHLTRLGEFVKTLKNVDKFEVLPYHTMGEFKWRELGIPYQLEGVKPPTKERVQNAKNLMQTESYTEYMNRIHQS

SEQ ID NO: 3717 - DNA, 1332 bp, Streptococcus agalactiae
atgcaagaccctggcagtcagagtttgttactacaatttgttattttattaatattaaccctatttaacgccttcttttcagcatctgaaatggctttagtatcgctaaaccgctctaaagtagaacagaaagctgaagaaggggacaaaaggtatcgacgtcttttggacgttcttgaaaatcccaataattttttatcaacaattcaagttggtattacttttattagccttttgcaaggggctagtttatctgcctcactaggacatgtgatttcagggtggctaggaaattcagcaacagcccgtacagcagggagtattattgcgctaatctttttaacatatgtctctattgttctaggagaattatatcctaagcgtattgctatgaatttgaaagatcgtctagcaattgtttcagctcccattattatctttctagggaaaatcgtaagcccctttgtatggttgctctcagcttcaactaacttattgagtagaatcactccgatgacttttgatgatgctgacgagaagatgacacgtgatgaaattgaatatatgttgacgaatagtgaagaaactttggaagctgaagaaattgagatgctgcaagggattttctcgctagatgaaatgatggcgcgtgaagttatggttccgcgcactgatgctttcatgattgacatcaacaatgatgcacaatcaaatattgaaggaattttatcacaaaacttttctcgtgtccctgtttttgatgacgataaagatagagttgttggtgttttacataccaagcgcttattggaagcgggctttaaaactggttttgatactatcgacttgcgaaaaatacttcaggaacctctttttgttccagaaacgatttttgtagatgaccttttaaaagcattacgcaacactcaaaatcaaatggccattttactagatgaatatggtggcgttgctggtttagtaactctagaggatttattggaagaaattgtcggcgaaattgatgatgaaacagatacagctgaacaatttgtcagggaaatcgatgagaatatctatattgttctaggaactatgacgcttaatgaatttaatgattattttgagacagagttagaaagtgatgatgttgatacaattgcgggttattatttaactggtgtgggtagtattccaaaccaagaggaaaaagtagcttacgaagtagacagcaaagataaacacatcactttgattaatgataaagttaaagatggtcgtataacaaaattgaaggtgctattgtctgatatagaacagaatattgaaaaagac

SEQ ID NO: 3718 - protein, 444 aa, Streptococcus agalactiae
MQDPGSQSLLLQFVILLILTLFNAFFSASEMALVSLNRSKVEQKAEEGDKRYRRLLDVLENPNNFLSTIQVGITFISLLQGASLSASLGHVISGWLGNSATARTAGSIIALIFLTYVSIVLGELYPKRIAMNLKDRLAIVSAPIIIFLGKIVSPFVWLLSASTNLLSRITPMTFDDADEKMTRDEIEYMLTNSEETLEAEEIEMLQGIFSLDEMMAREVMVPRTDAFMIDINNDAQSNIEGILSQNFSRVPVFDDDKDRVVGVLHTKRLLEAGFKTGFDTIDLRKILQEPLFVPETIFVDDLLKALRNTQNQMAILLDEYGGVAGLVTLEDLLEEIVGEIDDETDTAEQFVREIDENIYIVLGTMTLNEFNDYFETELESDDVDTIAGYYLTGVGSIPNQEEKVAYEVDSKDKHITLINDKVKDGRITKLKVLLSDIEQNIEKD

SEQ ID NO: 3719 - DNA, 1371 bp, Streptococcus pyogenes
atgaagtcactatattatttttttaggagttacattaacatggaagaccctgtgagtcagtccttagtgattcaatttttattgttagttgttttaaccttgttaaatgcttttttttcagccagtgaaatggccttagtttctctcaatcgttctcgggtggaacaaaaagcagcagacggtgataaaaaatacgctcgtttgttgcgggttttagaggaacctaatcattttttatcaacgattcaagttgggattacctttattagtttactatcaggagcaagtttatcagcttctttgggtaaggtgatctcaggttggctaggtaattcagcgaccgcaaggacagctggtactatcatctccttggttttcttgacttatgtctctattgttttaggagaattgtatccaaaacggattgccatgaacctcaaagacaagttggcgattgtttcagcccctattatcattgggttagggagactggttagtccctttgtatggctcttatcagcttctactaatttactgagccgacttacccctatgacctttgatgatgcagatgagcaaatgacacgtgatgaaatcgagtatatgttatcaaaaagtgaggcgacccttgatgctgaagaaattgagatgttgcaaggagttttctcacttgatgaaatgatggcgcgtgaagtcatggtcccaaggaccgatgctttcatgattgacattaacgatgatccgcttgaaaatattcaggaaatcttaaaacaaagtttttcacgcattcctgtttatgatgtggataaagataaaattatcggtctcatccacactaagcgtctcttggagtcaggtttccgccagggatttgatcagattaacatgcgaaaaatgttacaagaacctctttttgttcccgaaaccatttttgtagatgatctcttacgccagctgcgcaatacccaaaatcagatggctattttgctagatgaatatggtggtgtggcaggacttgtgactttggaagacttgcttgaagaaatcgtcggtgaaatcgatgatgaaaccgataaagcagaacaatttgttcatgagattggagacaatacctatattgttgttggtactatgactttaaatgagtttaatgactattttgataccgaactagaatcagatgatgtagataccattgctggtttttatttgacaggtatcggaaccattccaagccaggagcaaaaagaagcctacgaaatagataacaaagacaaacatttagttctaatcaacgataaagtcaaagatggccgtattacgaaattaaaattaatcctgtctaatatagaacagattattgaggaagac

SEQ ID NO: 3720 - protein, 457 aa, Streptococcus pyogenes
MKSLYYFFRSYINMEDPVSQSLVIQFLLLVVLTLLNAFFSASEMALVSLNRSRVEQKAADGDKKYARLLRVLEEPNHFLSTIQVGITFISLLSGASLSASLGKVISGWLGNSATARTAGTIISLVFLTYVSIVLGELYPKRIAMNLKDKLAIVSAPIIIGLGRLVSPFVWLLSASTNLLSRLTPMTFDDADEQMTRDEIEYMLSKSEATLDAEEIEMLQGVFSLDEMMAREVMVPRTDAFMIDINDDPLENIQEILKQSFSRIPVYDVDKDKIIGLIHTKRLLESGFRQGFDQINMRKMLQEPLFVPETIFVDDLLRQLRNTQNQMAILLDEYGGVAGLVTLEDLLEEIVGEIDDETDKAEQFVHEIGDNTYIVVGTMTLNEFNDYFDTELESDDVDTIAGFYLTGIGTIPSQEQKEAYEIDNKDKHLVLINDKVKDGRITKLKLILSNIEQIIEED

SEQ ID NO: 3721 - DNA, 564 bp, Streptococcus agalactiae
atgattaaaagaccaattcatctttctcatgattttttagcagaagttattgataaagaagcaataacgcttgatgcaactatgggaaatgggaatgatactgtttttttagcgaaaagttctaaaaaagtttatgcatttgatattcaagaagaagcaatagcaaaaacgaaagcaaagctcacggagcaagggatctctaacgctgaacttatcttggatgggcatgaaaatttggaacaatatgttcatacacctttaagagcggctatatttaatctgggatacttaccctcagcggataaaacagttattacaaaaccacacacaactatcaaggcaatcaaaaacgttttagacattttagaagtaggtggacgtctatcacttatggtttattatggtcatgatggtggaaaaagtgagaaagatgcggtgatagcattcgtggaacaattaccacagaataatttcgctacaatgctttatcaaccactcaatcaagttaatacgcctccctttttaattatggtagaaaagttacaatcatatgaaaatgaggtg

SEQ ID NO: 3722 - protein, 188 aa, Streptococcus agalactiae
MIKRPIHLSHDFLAEVIDKEAITLDATMGNGNDTVFLAKSSKKVYAFDIQEEAIAKTKAKLTEQGISNAELILDGHENLEQYVHTPLRAAIFNLGYLPSADKTVITKPHTTIKAIKNVLDILEVGGRLSLMVYYGHDGGKSEKDAVIAFVEQLPQNNFATMLYQPLNQVNTPPFLIMVEKLQSYENEV

SEQ ID NO: 3723 - DNA, 579 bp, Streptococcus pyogenes
ttgacggatttggataggagaaaagtgatgctaaaacgccccattcatctctcgcatgattttttagcggaggttgtggataagtctagtgtggttgttgatgccacgatgggtaatggaaatgatactgcctttttggcacaattagctaaaaaggtttatgcttttgatgtgcaagaacaagctattagaaaaacaagtgagcggttagcgcagctaggattatcgaacgctgagctgattttagcgggtcatgaagcggttgatcagtatgtgacagagccggtgcgcgcagcgatttttaaccttggttatttgcccagcgcagataaatctattattaccttaccaaataccacactccaagctttatcaaaactactaacgttattaatggtaggtgggcgtattgctattatggtctattatgggcatgatggaggcagtttggaaaaagatgctttattagattttgtcaagcaattagaccaaagaaaggtttctgcaatgctttatcagcctcttaatcaggtgaataccccaccttttttaatcatgttggagaaattagcagacttt

SEQ ID NO: 3724 - protein, 193 aa, Streptococcus pyogenes
LTDLDRRKVMLKRPIHLSHDFLAEVVDKSSVVVDATMGNGNDTAFLAQLAKKVYAFDVQEQAIRKTSERLAQLGLSNAELILAGHEAVDQYVTEPVRAAIFNLGYLPSADKSIITLPNTTLQALSKLLTLLMVGGRIAIMVYYGHDGGSLEKDALLDFVKQLDQRKVSAMLYQPLNQVNTPPFLIMLEKLADF

SEQ ID NO: 3725 - DNA, 933 bp, Streptococcus agalactiae
atgaaaaaacgttatcgtgcgattaatgattattatcgagaactctttggagaaaaaatatttaaattacctatagatgctggttttgactgtcctaacagagacggaacagttgctagaggagggtgcactttttgcacagtttctggttcaggggatgctatagttgctccagaagctcctattcgtgaacaattctataaagaaattgatttcatgcatagaaagtggcctgaggttaataaatacttagtctattttcaaaattttaccaatacccatgctaagttagagataattaaagagcgttacgaacaggctattaatgagccaggagttatcggaatcaacatcggaacaaggccggattgcttacctgatgaaactatatactatctcgctgaactttctgaaagaatgcatgtgactttagaattaggccttcagacaacttatgaagcaacttctgcattaataaatagagcacattcatatgacctttacaaaaaaactgttaagagaatacgagaattagctcctaaagtagaaatcgtttctcacctaataaatggccttccaggggagacacatgatatgatggtggaaaatgttcgtcgatgtgttacggataatgatattcagggtataaaattacaccttctgcatcttatgactaatacaagaatgcagagagattaccatgaaggtcgtttacgtttgttaagtcaagaagactatatttcgattatttgtgaccaactggagattattccaaaacatattgttattcaccgaattactggtgatgcgccacgtcatatgttaattggaccgatgtggagccttaataaatgggaagtgcttaatgccattgacaaagaaatggagaaaagacagtcatatcaaggatgtaaagctgaggtaaaacatgat

SEQ ID NO: 3726 - protein, 311 aa, Streptococcus agalactiae
MKKRYRAINDYYRELFGEKIFKLPIDAGFDCPNRDGTVARGGCTFCTVSGSGDAIVAPEAPIREQFYKEIDFMHRKWPEVNKYLVYFQNFTNTHAKLEIIKERYEQAINEPGVIGINIGTRPDCLPDETIYYLAELSERMHVTLELGLQTTYEATSALINRAHSYDLYKKTVKRIRELAPKVEIVSHLINGLPGETHDMMVENVRRCVTDNDIQGIKLHLLHLMTNTRMQRDYHEGRLRLLSQEDYISIICDQLEIIPKHIVIHRITGDAPRHMLIGPMWSLNKWEVLNAIDKEMEKRQSYQGCKAEVKHD

SEQ ID NO: 3727 - DNA, 936 bp, Streptococcus pyogenes
ttgtgctacaatagaaacatgaaaaaaagatatcagacattaaatgagcattaccgtcaactatttggcgcaaaaatgtttaaagttccgattgatgccggctttgattgtcccaatcgtgatggaacggtagctcatggaggatgtactttttgcacagtatcaggttctggagatgctattgtagcaccagatgctccaattaaagagcaattttataaagaaattgattttatgcaccgtaaatggcctgatgtcaatcgctatttggtttattttcaaaactttaccaatactcatgatacagttgatgtgattcgcgaccgttacgaacaagctattaacgaacctggagttgttggtattaatattggcacacggcctgactgtctaccagatgataccattgcttacttagcagaattatcagaacgcatgcatgtgacagtggagctaggcttacagacaacttatgaagaaacttctaggctaattaacagagcacattcttatgatttgtataaagaaacggtgaggcgactaaggcattaccccaacattaatattgtttcgcacttgattaatggattgccaaaagaaactcatgacatgatgcttgaaaatgtgagacgctgtgtaacagacaatgacattcaaggaattaaattgcatttgctgcatttgatgaccaatactagaatgcaaagagattatcatgaaggacgcttaaagttgttgagtcaaaaggactatgtttcgattatttgtgaccagctagagattatccctaagcatattgtgattcaccgtattacaggagatgccccacgcgatatgttgattgggcccatgtggagtctaaataagtgggaagtattgaatgccattgataaagaaatggaaagacgaggaagctttcagggctgtaaagttgac

SEQ ID NO: 3728 - protein, 312 aa, Streptococcus pyogenes
LCYNRNMKKRYQTLNEHYRQLFGAKMFKVPIDAGFDCPNRDGTVAHGGCTFCTVSGSGDAIVAPDAPIKEQFYKEIDFMHRKWPDVNRYLVYFQNFTNTHDTVDVIRDRYEQAINEPGVVGINIGTRPDCLPDDTIAYLAELSERMHVTVELGLQTTYEETSRLINRAHSYDLYKETVRRLRHYPNINIVSHLINGLPKETHDMMLENVRRCVTDNDIQGIKLHLLHLMTNTRMQRDYHEGRLKLLSQKDYVSIICDQLEIIPKHIVIHRITGDAPRDMLIGPMWSLNKWEVLNAIDKEMERRGSFQGCKVD

SEQ ID NO: 3729 - DNA, 639 bp, Streptococcus agalactiae
atgttatctcgtcaaaatagtaaacttattcaagcatttattgctattatcttatttttcagtttaggattggtcatcaaatattggcccgacactgtaatttcatttgaccaaactattcaagaaagtgttagaggacagttgccaaatctttctacaagatttttcaagttaatcactgtgattggtaatactgtaagccagatagctattgcgattatgagcgtcactttctgttaccttaagaagtggtatcctcaagctagatttatcgcagtaaatgctattatctctggtatatgtatactttctttaaaacttatttttcaaagagtaagaccaactttaacccatttagtatttgcaggtggctattcgtttcccagtgggcactcgatgggaacatttatgatatttgggagtattattattttattgcagtactatatgcctaagagtatatggaaactgttgtgccaaggtactttgggtttgctcatttttttaattgggttatctcgtatttacctaggggttcattttccgacagatgttttagctggttttatacttgcttatggtattttgaatctaactgcgtatatctttttagccaaggattggttaaagaaagtgaag

SEQ ID NO: 3730 - protein, 213 aa, Streptococcus agalactiae
MLSRQNSKLIQAFIAIILFFSLGLVIKYWPDTVISFDQTIQESVRGQLPNLSTRFFKLITVIGNTVSQIAIAIMSVTFCYLKKWYPQARFIAVNAIISGICILSLKLIFQRVRPTLTHLVFAGGYSFPSGHSMGTFMIFGSIIILLQYYMPKSIWKLLCQGTLGLLIFLIGLSRIYLGVHFPTDVLAGFILAYGILNLTAYIFLAKDWLKKVK

SEQ ID NO: 3731 - DNA, 666 bp, Streptococcus agalactiae
atgggagaagacaaaggttttttcgcgtacatacgcttacctttggagcttctttcaatttatttaaattggaggaatttttttatgacaaatacacgtaaaatggtgacaatcgccattctttctgccttatcttttgtattgatgatggtttcatttccattaataccaggagcagaatttttaaaggttgatttttcaatccttccgatgttagttgcttttattttatttgatttgaaatcaagttatggtgtactcttattaagatcacttttaaaagttatacttgctaatcgtggtccagaaacgtttattggtttaccgatgaatatggttgctctagctttatttttagcaagtttcgctattttctggaaaaatagagagagtgcaaaagattttattaaagctagtctatttggtacagttagcttgaccgtatctatggtagctctcaactatgtctttgcgattcctttgtatgctatatttgctaactttgatatcagaacatttattggtgtaggcaattaccttttaacaatggttattccatttaatatcgttgagggaattttaatttcgattgttttctatctaacttacgtggcttgtttgccaatattagaaagatataaaaagactaatgttatctcgtcaaaa

SEQ ID NO: 3732 - protein, 222 aa, Streptococcus agalactiae
MGEDKGFFAYIRLPLELLSIYLNWRNFFMTNTRKMVTIAILSALSFVLMMVSFPLIPGAEFLKVDFSILPMLVAFILFDLKSSYGVLLLRSLLKVILANRGPETFIGLPMNMVALALFLASFAIFWKNRESAKDFIKASLFGTVSLTVSMVALNYVFAIPLYAIFANFDIRTFIGVGNYLLTMVIPFNIVEGILISIVFYLTYVACLPILERYKKTNVISSK

SEQ ID NO: 3733 - DNA, 561 bp, Streptococcus pyogenes
atgtcaaaaacacataaaatgattatgattggtatactttctgcgatatcatttctattgatgctagttagctttgccattattccaggcgcagcttttttaaaaattgaatttagtattattcctgttttatttggtttaatgattatggacttaaagagtgcttacttaattttgttattgaggtccttattgaaactctttttgaacaatcgtggggttaatgattttattggtctcccaatgaatattatcgctatcgctttatttgtgacggcttttgccttagtttggaaccgtcaaaaaacgcttagtcaatatgtatttgctagcttactaggcacagggttattaacgtttggcatggttgttcttaattatacttttgccattcctttatatgctatatttgcaaatattgatatcagagcttatattggtgttactaagtatatgatgactatggttattccgtttaatcttgttgaagggttgatatttgcaattaccttttattttgtgtatattgcaagtaaaccaattttagaaagatacttacac

SEQ ID NO: 3734 - protein, 187 aa, Streptococcus pyogenes
MSKTHKMIMIGILSAISFLLMLVSFAIIPGAAFLKIEFSIIPVLFGLMIMDLKSAYLILLLRSLLKLFLNNRGVNDFIGLPMNIIAIALFVTAFALVWNRQKTLSQYVFASLLGTGLLTFGMVVLNYTFAIPLYAIFANIDIRAYIGVTKYMMTMVIPFNLVEGLIFAITFYFVYIASKPILERYLH

SEQ ID NO: 3735 - DNA, 924 bp, Streptococcus agalactiae
atgaaaaagattagaaaaagtttaggacttctactatgttgctttttaggattggtacaattagcgtttttttcggtagccagtgtaaatgctgatacccctaatcaactaacaatcacacagataggacttcagccaaatactacagaggaggggatttcttatcgtttatggactgtgactgacaacttaaaagttgatttattgagccaaatgacagatagcgaattgaaccagaagtataagagtatcttgacttctcctactgatactaatggtcagacaaagatagcactcccaaatggttcgtactttggtcgtgcttataaagctgatcaaagcgtttcaacaatagtacctttttatattgaattaccagatgataagttatcaaatcaattacagataaatcctaagcgaaaagttgaaacaggccgattaaaacttattaaatatacaaaagaaggaaagataaagaaaaggctatccggagtaatatttgtattatacgataaccagaatcagccagttcgctttaaaaatggacgatttacgaccgatcaagatgggattacttcattagtaactgatgataagggagaaattgaggttgaaggtttattacctggtaagtatatttttcgagaagcaaaagcactaactggttaccgtatatctatgaaggatgctgtagttgctgtagttgctaataaaacacaggaagtagaggtagaaaacgaaaaagaaactcctccaccaacaaatcctaaaccatcacaaccgctttttccacaatcatttcttcctaaaacaggaatgattattggtggaggactgacaattcttggttgtattattttgggaattttgtttatctttttaagaaaaactaaaaatagcaaatctgaaagaaacgatacagta

SEQ ID NO: 3736 - protein, 308 aa, Streptococcus agalactiae
MKKIRKSLGLLLCCFLGLVQLAFFSVASVNADTPNQLTITQIGLQPNTTEEGISYRLWTVTDNLKVDLLSQMTDSELNQKYKSILTSPTDTNGQTKIALPNGSYFGRAYKADQSVSTIVPFYIELPDDKLSNQLQINPKRKVETGRLKLIKYTKEGKIKKRLSGVIFVLYDNQNQPVRFKNGRFTTDQDGITSLVTDDKGEIEVEGLLPGKYIFREAKALTGYRISMKDAVVAVVANKTQEVEVENEKETPPPTNPKPSQPLFPQSFLPKTGMIIGGGLTILGCIILGILFIFLRKTKNSKSERNDTV

SEQ ID NO: 3737 - DNA, 882 bp, Streptococcus agalactiae
atgggaggaaaatttcagaaaaaccttaagaaatcggtcgttttaaatcgatggatgaatgtaggcttgatactattgttcttagttggtcttttgataacctcatatccttttatttcaaattggtactataatattaaagctaataatcaagtaactaactttgataatcaaacccaaaaattaaatactaaagagattaatagacgatttgagttagcaaaagcttataatagaacactggacccaagccgcctatcagatccctatactgaaaaagaaaaaaaaggtattgctgaatacgcccacatgcttgagattgctgaaatgattggatatattgatataccgtctatcaagcaaaaattacctatctatgcggggactaccagtagtgttcttgaaaaaggagcaggacaccttgaaggaacctccttgccaattggtggaaaaagttcacatactgttatcacagctcatcgcggcttacctaaagctaagttatttacagatttagataaacttaaaaaaggaaaaattttttatattcataatatcaaagaagttttagcctataaggttgatcaaataagtgttgtaaagccagataatttttctaaattattggttgttaaaggtaaggattatgcgactttgctaacatgtacaccttattcgattaattcacatcgtttactagttagagggcatcgaatcaagtatgtacctcctgttaaagaaaagaactatttaatgaaagaattgcaaacacactataaactttatttcctcttatcaatcctagttattcttatattagtcgctttactattatatttaaaacgaaaatttaaagagagaaagagaaagggaaatcaaaaa

SEQ ID NO: 3738 - protein, 294 aa, Streptococcus agalactiae
MGGKFQKNLKKSVVLNRWMNVGLILLFLVGLLITSYPFISNWYYNIKANNQVTNFDNQTQKLNTKEINRRFELAKAYNRTLDPSRLSDPYTEKEKKGIAEYAHMLEIAEMIGYIDIPSIKQKLPIYAGTTSSVLEKGAGHLEGTSLPIGGKSSHTVITAHRGLPKAKLFTDLDKLKKGKIFYIHNIKEVLAYKVDQISVVKPDNFSKLLVVKGKDYATLLTCTPYSINSHRLLVRGHRIKYVPPVKEKNYLMKELQTHYKLYFLLSILVILILVALLLYLKRKFKERKRKGNQK

SEQ ID NO: 3739 - DNA, 753 bp, Streptococcus pyogenes
gtggaatgctatcgtgatcgtcaattgttatcaacttatcacaaacaagtgactcaaaagaagccctcagaaatggaggaggtgtggcaaaaggctaaggcgtataacgctaggcttgggattcagcctgttccagatgctttttcatttagggatggcattcatgataaaaactacgaaagcctacttcaaattgaaaacaatgatattatgggatatgttgaagtgccctctattaaagtgacgttacccatataccactatacgacagacgaggtgctaactaaaggagcaggtcacttatttggaagtgccttaccagttggtggtgacgggactcacacggttatttctgctcatagaggccttccatcggcagaaatgtttactaatttgaatttagtgaaaaagggagatactttttactttcgtgtgttaaataaagtattggcttataaagttgatcagatactaactgttgaaccagatcaagtcacatcactttctggagtcatggggaaagattatgctactttggttacctgcacaccatatggtgttaacaccaagcgtctattggtccgaggtcatagaattgcatatcattataaaaagtatcaacaggctaaaaaagcaatgaaactcgtggataaatcaagaatgtgggcagaagtagtgtgtgctgctttcggggtggttatagctattattttagtgtttatgtattcgcgagtaagtgctaagaaaagcaag

SEQ ID NO: 3740 - protein, 251 aa, Streptococcus pyogenes
VECYRDRQLLSTYHKQVTQKKPSEMEEVWQKAKAYNARLGIQPVPDAFSFRDGIHDKNYESLLQIENNDIMGYVEVPSIKVTLPIYHYTTDEVLTKGAGHLFGSALPVGGDGTHTVISAHRGLPSAEMFTNLNLVKKGDTFYFRVLNKVLAYKVDQILTVEPDQVTSLSGVMGKDYATLVTCTPYGVNTKRLLVRGHRIAYHYKKYQQAKKAMKLVDKSRMWAEVVCAAFGVVIAIILVFMYSRVSAKKSK

SEQ ID NO: 3741 - DNA, 879 bp, Streptococcus agalactiae
gtgaagactaaaaaaatcatcaaaaaaacaaaaaaaaagaagaagtcaaatcttccttttatcattctttttctaataggtctatctattttattgtatccagtggtatcacgtttttactatacgatagaatctaataatcaaacacaggattttgagagagctgctaaaaaacttagtcagaaagaaatcaatcgacgtatggctctagcacaagcttataatgattctttaaataatgtccatcttgaagatccttatgagaaaaaacgaattcaaaagggggtagcagagtacgcccgtatgttagaggtaagtgaaaaaatcggaacaatttcagttcctaagataggtcaaaaactccctatatttgcaggttcaagtcaagaagttctatctaaaggagcagggcatttagaaggtacctctcttccaattgggggcaatagtacacatactgttataacagcgcattcaggaattccagataaagaactcttttctaaccttaaaaagttaaaaaaaggagataagttttatattcaaaacataaaagaaacgatagcatatcaagtagatcagataaaagtcgttacacccgataacttttcagatttgttggttgttcctggacatgattatgcaaccttattgacttgcaccccgattatgatcaatacacacagacttttagtaaggggacatcgtatcccttataaaggtcctattgatgaaaaattaataaaagacggtcatttaaacacgatttatagatatctattctatatatctttagttattattgcttggttactttggttaataaaacgtcaacgtcaaaaaaatcgtttagcaagtgttagaaaaggaattgaatca

SEQ ID NO: 3742 - protein, 293 aa, Streptococcus agalactiae
MKTKKIIKKTKKKKKSNLPFIILFLIGLSILLYPVVSRFYYTIESNNQTQDFERAAKKLSQKEINRRMALAQAYNDSLNNVHLEDPYEKKRIQKGVAEYARMLEVSEKIGTISVPKIGQKLPIFAGSSQEVLSKGAGHLEGTSLPIGGNSTHTVITAHSGIPDKELFSNLKKLKKGDKFYIQNIKETIAYQVDQIKVVTPDNFSDLLVVPGHDYATLLTCTPIMINTHRLLVRGHRIPYKGPIDEKLIKDGHLNTIYRYLFYISLVIIAWLLWLIKRQRQKNRLASVRKGIES

SEQ ID NO: 3743 - DNA, 2115 bp, Streptococcus agalactiae
atgaaaagaatcaacaaatattttgcaatgttctcggcattgttactgactttaacgtcattgctctcagttgcaccagcgtttgcggatgaagcaacaactaatacagtgactttgcacaagattttgcaaaccgaatcaaatcttaacaaaagtaacttcccaggaactacaggtcttaacggaaaagactacaaaggtggagctatttctgaccttgctggttactttggcgagggatctaaagaaatcgaaggtgcgttctttgctttagctttgaaagaagataaaagtggtaaagtgcaatatgttaaggcaaaagaaggtaacaaattaacaccagccttaattaataaagatggtactcctgaaataacagtaaatattgatgaggccgtgtctggattgacaccagagggagatactggacttgttttcaacaccaaaggattgaaaggcgagtttaaaattgttgaagttaaatcaaaatctacttacaacaataatggttccctcctggctgcttcaaaagcggttccagttaacatcactcttccattggtaaatgaagatggtgttgttgctgatgcccatgtttatccaaagaacactgaagaaaaaccagaaattgataaaaactttgctaaaacaaacgatttgacagcattgacagatgttaatagacttttgacagctggcgcaaattatggtaattatgcacgtgacaaagcaactgctactgctgaaatcggtaaagttgttccttatgaagttaaaacaaaaattcacaaaggttctaaatacgaaaacttggtttggacagatataatgtcaaatggtttgacaatgggttcaactgttagccttaaagcttcaggaactacagaaacttttgctaaggatacagactatgaacttagcattgatgcccgtggtttcacattaaaattcacagctgatggattgggcaaattggaaaaagcagctaaaacagctgatattgaatttacattgacttatagtgctactgttaatggtcaagcaattattgataatccagaatccaatgatatcaaattgtcgtatggtaacaaaccaggtaaagacttgactgaacttcctgttacaccttcaaagggtgaagtaacagttgctaaaacttggtctgacggaattgcacctgatggtgtaaacgttgtttacacattgaaagataaagataaaactgttgcttcagtatcattgacaaaaacatctaaaggtacaatcgaccttggaaatggtatcaaatttgaagtatctggtaacttctcgggtaaattcactggtctagaaaacaaatcatacatgatctcagaacgtgtttctggttacggaagtgcaataaatctagaaaatggtaaagtaaccattaccaataccaaagattctgataacccaacaccattgaacccaactgaaccaaaagttgaaactcatggtaagaaatttgtcaaaactaatgaacaaggtgaccgtttggctggtgcacaattcgttgtgaaaaactcagcaggtaaataccttgctcttaaagcagatcaatcagaaggtcaaaaaactttagctgctaagaaaatagctttagatgaagctatcgctgcttataacaagttgtctgcaacagaccaaaaaggtgaaaaaggaattactgcaaaagaacttatcaaaactaaacaagcagattacgatgcagccttcattgaggctcgtacagcttatgagtggataacagataaggctagagccattacctacacttcaaacgatcaaggtcaatttgaagttacaggtcttgcagacggtacttacaaccttgaagaaacacttgctccagcaggatttgctaagttggcaggtaatattaagtttgtagttaatcaagggtcatacataacaggtggtaacattgactacgttgctaacagcaaccaaaaagatgcgacacgtgtagaaaataaaaaggtaacaatcccacaaacaggtggtattggtacaattcttttcacaattattggtttaagcattatgcttggagcagtagttatcatgaaaagacgccaatcaaaggaagct

SEQ ID NO: 3744 - protein, 705 aa, Streptococcus agalactiae
MKRINKYFAMFSALLLTLTSLLSVAPAFADEATTNTVTLHKILQTESNLNKSNFPGTTGLNGKDYKGGAISDLAGYFGEGSKEIEGAFFALALKEDKSGKVQYVKAKEGNKLTPALINKDGTPEITVNIDEAVSGLTPEGDTGLVFNTKGLKGEFKIVEVKSKSTYNNNGSLLAASKAVPVNITLPLVNEDGVVADAHVYPKNTEEKPEIDKNFAKTNDLTALTDVNRLLTAGANYGNYARDKATATAEIGKVVPYEVKTKIHKGSKYENLVWTDIMSNGLTMGSTVSLKASGTTETFAKDTDYELSIDARGFTLKFTADGLGKLEKAAKTADIEFTLTYSATVNGQAIIDNPESNDIKLSYGNKPGKDLTELPVTPSKGEVTVAKTWSDGIAPDGVNVVYTLKDKDKTVASVSLTKTSKGTIDLGNGIKFEVSGNFSGKFTGLENKSYMISERVSGYGSAINLENGKVTITNTKDSDNPTPLNPTEPKVETHGKKFVKTNEQGDRLAGAQFVVKNSAGKYLALKADQSEGQKTLAAKKIALDEAIAAYNKLSATDQKGEKGITAKELIKTKQADYDAAFIEARTAYEWITDKARAITYTSNDQGQFEVTGLADGTYNLEETLAPAGFAKLAGNIKFVVNQGSYITGGNIDYVANSNQKDATRVENKKVTIPQTGGIGTILFTIIGLSIMLGAVVIMKRRQSKEA

SEQ ID NO: 3745 - DNA, 2703 bp, Streptococcus agalactiae
atgagaaaataccaaaaattttctaaaatattgacgttaagtcttttttgtttgtcgcaaataccgcttaataccaatgttttaggggaaagtaccgtaccggaaaatggtgctaaaggaaagttagttgttaaaaagacagatgaccagaacaaaccactttcaaaagctacctttgttttaaaaactactgctcatccagaaagtaaaatagaaaaagtaactgctgagctaacaggtgaagctacttttgataatctcatacctggagattatactttatcagaagaaacagcgcccgaaggttataaaaagactaaccagacttggcaagttaaggttgagagtaatggaaaaactacgatacaaaatagtggtgataaaaattccacaattggacaaaatcaggaagaactagataagcagtatccccccacaggaatttatgaagatacaaaggaatcttataaacttgagcatgttaaaggttcagttccaaatggaaagtcagaggcaaaagcagttaacccatattcaagtgaaggtgagcatataagagaaattccagagggaacattatctaaacgtatttcagaagtaggtgatttagctcataataaatataaaattgagttaactgtcagtggaaaaaccatagtaaaaccagtggacaaacaaaagccgttagatgttgtcttcgtactcgataattctaactcaatgaataacgatggcccaaattttcaaaggcataataaagccaagaaagctgccgaagctcttgggaccgcagtaaaagatattttaggagcaaacagtgataatagggttgcattagttacctatggttcagatatttttgatggtaggagtgtagatgtcgtaaaaggatttaaagaagatgataaatattatggccttcaaactaagttcacaattcagacagagaattatagtcataaacaattaacaaataatgctgaagagattataaaaaggattccgacagaagctcctaaagctaagtggggatctactaccaatggattaactccagagcaacaaaaggagtactatcttagtaaagtaggagaaacatttactatgaaagccttcatggaggcagatgatattttgagtcaagtaaatcgaaatagtcaaaaaattattgttcatgtaactgatggtgttcctacgagatcatatgctattaataattttaaactgggtgcatcatatgaaagccaatttgaacaaatgaaaaaaaatggatatctaaataaaagtaattttctacttactgataagcccgaggatataaaaggaaatggggagagttactttttgtttcccttagatagttatcaaacacagataatctctggaaacttacaaaaacttcattatttagatttaaatcttaattaccctaaaggtacaatttatcgaaatggaccagtgaaagaacatggaacaccaaccaaactttatataaatagtttaaaacagaaaaattatgacatttttaattttggtatcgatatatctggttttagacaagtttataatgaggagtataagaaaaatcaagatggtacttttcaaaaattgaaagaggaagcttttaaactttcagatggagaaatcacagaactaatgaggtcgttctcttccaaacctgagtactacacccctatcgtaacttcagccgatacatctaacaatgaaattttatctaaaattcagcaacaatttgaaacgattttaacaaaagaaaactcaattgttaatggaactatcgaagatcctatgggtgataaaatcaatttacagcttggtaatggacaaacattacagccaagtgattatactttacagggaaatgatggaagtgtaatgaaggatggtattgcaactggtgggcctaataatgatggtggaatacttaagggggttaaattagaatacatcggaaataaactctatgttagaggtttgaatttaggagaaggtcaaaaagtaacactcacatatgatgtgaaactagatgacagttttataagtaacaaattctatgacactaatggtagaacaacattgaatcctaagtcagaggatcctaatacacttagagattttccaatccctaaaattcgtgatgtgagagaatatcctacaataacgattaaaaacgagaagaagttaggtgaaattgaatttataaaagttgataaagataataataagttgcttctcaaaggagctacgtttgaacttcaagaatttaatgaagattataaactttatttaccaataaaaaataataattcaaaagtagtgacgggagaaaacggcaaaatttcttacaaagatttgaaagatggcaaatatcagttaatagaagcagtttcgccggaggattatcaaaaaattactaataaaccaattttaacttttgaagtggttaaaggatcgataaaaaatataatagctgttaataaacagatttctgaatatcatgaggaaggtgacaagcatttaattaccaacacgcatattccaccaaaaggaattattcctatgacaggtgggaaaggaattctatctttcattttaataggtggagctatgatgtctattgcaggtggaatttatatttggaaaaggtataagaaatctagtgatatgtccatcaaaaaagat

SEQ ID NO: 3746 - protein, 901 aa, Streptococcus agalactiae
MRKYQKFSKILTLSLFCLSQIPLNTNVLGESTVPENGAKGKLVVKKTDDQNKPLSKATFVLKTTAHPESKIEKVTAELTGEATFDNLIPGDYTLSEETAPEGYKKTNQTWQVKVESNGKTTIQNSGDKNSTIGQNQEELDKQYPPTGIYEDTKESYKLEHVKGSVPNGKSEAKAVNPYSSEGEHIREIPEGTLSKRISEVGDLAHNKYKIELTVSGKTIVKPVDKQKPLDVVFVLDNSNSMNNDGPNFQRHNKAKKAAEALGTAVKDILGANSDNRVALVTYGSDIFDGRSVDVVKGFKEDDKYYGLQTKFTIQTENYSHKQLTNNAEEIIKRIPTEAPKAKWGSTTNGLTPEQQKEYYLSKVGETFTMKAFMEADDILSQVNRNSQKIIVHVTDGVPTRSYAINNFKLGASYESQFEQMKKNGYLNKSNFLLTDKPEDIKGNGESYFLFPLDSYQTQIISGNLQKLHYLDLNLNYPKGTIYRNGPVKEHGTPTKLYINSLKQKNYDIFNFGIDISGFRQVYNEEYKKNQDGTFQKLKEEAFKLSDGEITELMRSFSSKPEYYTPIVTSADTSNNEILSKIQQQFETILTKENSIVNGTIEDPMGDKINLQLGNGQTLQPSDYTLQGNDGSVMKDGIATGGPNNDGGILKGVKLEYIGNKLYVRGLNLGEGQKVTLTYDVKLDDSFISNKFYDTNGRTTLNPKSEDPNTLRDFPIPKIRDVREYPTITIKNEKKLGEIEFIKVDKDNNKLLLKGATFELQEFNEDYKLYLPIKNNNSKVVTGENGKISYKDLKDGKYQLIEAVSPEDYQKITNKPILTFEVVKGSIKNIIAVNKQISEYHEEGDKHLITNTHIPPKGIIPMTGGKGILSFILIGGAMMSIAGGIYIWKRYKKSSDMSIKKD

SEQ ID NO: 3747 - DNA, 996 bp, Streptococcus agalactiae
ttgagagagtttactgaattgattgaaaattatttagaaaaagacatccttaatcaaataaaacttctaactttatgctatgattactacccttccattactctagacaaatcatgtcatcaacttggtttatctgaactacttattaggaaatattgtcatgatttaacaactttatttaacagtcaactctctctgaatatcgaaaagagtacaatagtctaccaatctaatggtgtaactagagaacaagctttcaaatatatttatcatcaatcacacgttttacaacttttaaaatttttgatcacgaatgattcaggcaggttacctttaacttactttagtgaaaaatttggactatcttgtgcaactgcttatcgcatacgaaaacatattagtccattactagaaaaacttggatttcagattgtcaaaaatactattaccggtgacgagtatcgaattcgctatttaatcgcatttttaaatgctcaatttggtatagaagtttatcccatgtctaagatggataaattgctcatcaaacgattgttattagaacactcaactacttttactgcttctcattacttcccaaatacatttattttctttgatacattgttgtctctatcatggaaacgtattaattataatgtagttgtcccttactcatcccttttcactgaactacaaaatatatttatctatgatacattacaatattgtgtcaaaaatgttattatagattcctttaaaattaatttaaaaaaagacgatatagactatatttttcttgcttaccttacttcccataactctttttctaatccaaattggactgagaagcgtatcgataatgtaatagctattttcgaaaattatcccaaattccaaaaattattacagccactcaaagatgctcttcccttatctggctcctatcatgatgagttggtaaaagttgctatctttttttccgaacatttattt

SEQ ID NO: 3748 - protein, 332 aa, Streptococcus agalactiae
MREFTELIENYLEKDILNQIKLLTLCYDYYPSITLDKSCHQLGLSELLIRKYCHDLTTLFNSQLSLNIEKSTIVYQSNGVTREQAFKYIYHQSHVLQLLKFLITNDSGRLPLTYFSEKFGLSCATAYRIRKHISPLLEKLGFQIVKNTITGDEYRIRYLIAFLNAQFGIEVYPMSKMDKLLIKRLLLEHSTTFTASHYFPNTFIFFDTLLSLSWKRINYNVVVPYSSLFTELQNIFIYDTLQYCVKNVIIDSFKINLKKDDIDYIFLAYLTSHNSFSNPNWTEKRIDNVIAIFENYPKFQKLLQPLKDALPLSGSYHDELVKVAIFFSEHLF

SEQ ID NO: 3749 - DNA, 1491 bp, Streptococcus pyogenes
ttgatagaaaaatacttggaatcatcaatcgaatcaaaatgtcagttaattgtcttgttttttaagacatcttatttgccaataactgaggtagcagaaaaaactggcttaacctttttacaactaaaccattattgtgaggaactgaatgcctttttccctggtagtctgtctatgaccatccaaaaaaggatgatatcttgccaatttacacatccttttaaagaaacttatctttaccaactctatgcatcatctaatgtcttacaattactagcctttttaataaaaaatggttcccactctcgtccccttacggattttgcaagaagtcattttttatcaaactcctcagcttatcggatgcgcgaagcattgattcctttattaagaaactttgaattaaaactctctaagaacaagattgtcggtgaggaatatcgcatccgttacctcatcgctctgctatatagtaagtttggcattaaagtttatgacttgacgcagcaagacaaaaacactattcatagctttttatcccatagttccacccaccttaaaacctctccttggttatcggaatcgttttctttctatgacattttattagctttatcgtggaagcggcatcaattttcggtaactattccccaaaccagaatttttcaacaattaaaaaaactttttgtctacgattctttgaaaaaaagtagccatgatattatcgaaacttactgccaactaaacttttcagcaggagatttggactacctctatttaatttatatcaccgctaataattcttttgcgagcttacaatggacacctgagcatatcagacaatattgtcaactttttgaagaaaatgatacttttcgcctgcttttaaatcctatcatcactcttttacctaacctaaaagagcaaaaggctagtttagtaaaagctcttatgtttttttcaaaatcattcttgtttaatctgcaacattttattcctgagaccaacttattcgtttctccgtactataaaggaaaccaaaaactctatacgtccttaaagttaattgtcgaagagtggatggccaaacttcctggtaagcgtgacttgaaccataagcattttcatcttttttgccactatgtcgagcaaagtctaagaaatatccaacctcctttagttgttgttttcgtagccagtaattttatcaatgctcatctcctaacggattcttttccaaggtatttctcggataaaagcattgattttcattcctattatctattgcaagataatgtttatcaaattcctgatttaaagccagatttggtcatcactcacagtcaactgattccttttgttcaccatgaacttacaaaaggaattgctgttgctgaaatatcttttgatgaatcgattctgtctatccaagaattgatgtatcaagttaaagaggaaaaattccaagctgatttaaccaagcaattaaca

SEQ ID NO: 3750 - protein, 497 aa, Streptococcus pyogenes
LIEKYLESSIESKCQLIVLFFKTSYLPITEVAEKTGLTFLQLNHYCEELNAFFPGSLSMTIQKRMISCQFTHPFKETYLYQLYASSNVLQLLAFLIKNGSHSRPLTDFARSHFLSNSSAYRMREALIPLLRNFELKLSKNKIVGEEYRIRYLIALLYSKFGIKVYDLTQQDKNTIHSFLSHSSTHLKTSPWLSESFSFYDILLALSWKRHQFSVTIPQTRIFQQLKKLFVYDSLKKSSHDIIETYCQLNFSAGDLDYLYLIYITANNSFASLQWTPEHIRQYCQLFEENDTFRLLLNPIITLLPNLKEQKASLVKALMFFSKSFLFNLQHFIPETNLFVSPYYKGNQKLYTSLKLIVEEWMAKLPGKRDLNHKHFHLFCHYVEQSLRNIQPPLVVVFVASNFINAHLLTDSFPRYFSDKSIDFHSYYLLQDNVYQIPDLKPDLVITHSQLIPFVHHELTKGIAVAEISFDESILSIQELMYQVKEEKFQADLTKQLT

SEQ ID NO: 3751 - DNA, 1137 bp, Streptococcus agalactiae
atggaaaataaggtaaaaacagttgctgttttctcaggatattatctacccttcctcggaggtattgaacgttatacagataaaatgacagcagatttggttaagcgtggctaccgtgttgttattgtaacaactaatcatggtgatttaccgattatagatgaagacaagggtagaaaaatttaccgtttaccgaccaaaaatattgtcaagcagcgctatcctattattaacaaaaatcgagaatacaacacgctgatgaaatatgtttcagatgaaaatattgattttgtgatttgtaatacacgttttcagttaacaacgctagaagggctatcttttgcaaagaatcaccatttacctagtattgttttagaccatgggtcaagtcatttttctgtcaataatcgttttttagatttctttggagctatctatgaacatcttctcacagcgcgtgttaagcattatcgtccagatttttatgcggtatccaagagaagcgttgaatggttaaaacattttaatatagaagctaaaggagttatttataattcggtatctgaaagtctaggctctgattttgctggtacggcttaccttgaaaaatctgctgatgatattttcatcacttatgctggtagaattattaaagaaaaaggcattgaattgctcttagaagcattttcgatgtcacagtactctgaaaatgtttatttacagattgcaggagacggacctgaattagcacatttgaaagagaaatatcagtccaaacagattaactttttggggaaattaaactttgaacagactatgtctttaatggcacagactgatatctttgtttacccttcaatgtatccagagggattaccaacctctattttagaagctggtctactttcaagtgctattattgcaacagatcgcggtggaacagttgaagttattgatagccctgagttaggaatcatcatggaagaaaatactcagtcactccatgaatctcttgatttattagtaaaagataaggcattaagagagaaactacaacagaatattgctaaaagaattaaagaacatttcacatgggaaaaaacagttgaaaagttggattatattattcaaaaaaat

SEQ ID NO: 3752 - protein, 379 aa, Streptococcus agalactiae
MENKVKTVAVFSGYYLPFLGGIERYTDKMTADLVKRGYRVVIVTTNHGDLPIIDEDKGRKIYRLPTKNIVKQRYPIINKNREYNTLMKYVSDENIDFVICNTRFQLTTLEGLSFAKNHHLPSIVLDHGSSHFSVNNRFLDFFGAIYEHLLTARVKHYRPDFYAVSKRSVEWLKHFNIEAKGVIYNSVSESLGSDFAGTAYLEKSADDIFITYAGRIIKEKGIELLLEAFSMSQYSENVYLQIAGDGPELAHLKEKYQSKQINFLGKLNFEQTMSLMAQTDIFVYPSMYPEGLPTSILEAGLLSSAIIATDRGGTVEVIDSPELGIIMEENTQSLHESLDLLVKDKALREKLQQNIAKRIKEHFTWEKTVEKLDYIIQKN

SEQ ID NO: 3753 - DNA, 846 bp, Streptococcus agalactiae
atgaaatatttagcgggtattgtcacctttaaccccaatattgaacgcttagatcagaacattcgagcaatttatcctcaagtaagccacatctatatcgtagataatggctcgaaaaataaggaagaaatttctcaattagtagccgattataatgaagaggggcacctaactgttgattatttaacagaaaataaagggattgcatatgctttgaactgtatcggtcaatttgcagtagcacaagaatttgattggttcttgactttagatcaagattcggttgtcctaggtgatttgatagataattatgaaaattaccttcatttacctaaggtcggtatgttatcttgtttgtatcaagatatgaaccgtgaaaatttagtgatgcaagaatttgactataaagaaattgaagagtgtattacttcggctgctttaatgaaaacgagcgttttcgaagaaacatctggctttgcagaagagatgtttattgattttgttgactctgaaatgaattatcgtctgtcagagatgggatataagacttatcaggttaattttattggtctgttacacgaaattggacactcttcacgagttaaaaaatttggccatgtttttcatgtattgaatcattcaccatttcgaaaatattacatgatacgcaatgcgatctatattataaaaaaatatggtaagaagaagcgatacaaatatttagtatttatgcgaaatgaatttgttcgagtgttggtagcagaagagcaaaagagcaaaaaaatagttgctatgattaaaggcttaaaagatggcttattgatgaaagtggataaatatggaaaa

SEQ ID NO: 3754 - protein, 282 aa, Streptococcus agalactiae
MKYLAGIVTFNPNIERLDQNIRAIYPQVSHIYIVDNGSKNKEEISQLVADYNEEGHLTVDYLTENKGIAYALNCIGQFAVAQEFDWFLTLDQDSVVLGDLIDNYENYLHLPKVGMLSCLYQDMNRENLVMQEFDYKEIEECITSAALMKTSVFEETSGFAEEMFIDFVDSEMNYRLSEMGYKTYQVNFIGLLHEIGHSSRVKKFGHVFHVLNHSPFRKYYMIRNAIYIIKKYGKKKRYKYLVFMRNEFVRVLVAEEQKSKKIVAMIKGLKDGLLMKVDKYGK

SEQ ID NO: 3755 - DNA, 1422 bp, Streptococcus agalactiae
atgaaacttttgaaaaatatgttttataatacctcataccagttattgactttgttgttacctttagtaacagttccttatgtttcccgtgtactatctcctcaaggcatcggtattaatgcctatacgagctccattgtcatgtactttactttatttggtgctttagggatatctttgtacggtaatcgtgagatagcttttgtgcagtcaaataagtataagagaagtaagatattttgggaattagttgtattaaaacttgcctctgtatctatagcaacgttattattctttggatttgtcttacttacaaacgaatggcaattattctatttaattcaaggtattaatttattagcgactgcaactgatatttcgtggtattttattggagttgaagactttaagataattgtcattcgtaataccattgttaagcttattacagttgttttgaccttcttagttgtgaagacgccagatgacctagcactttatatgtttttaattgcatttgcatcattactcggaaatttaacagtctggcatcatttaaagcatgaaatcatcaagataccatttagtagattagatatcttaatacatctaagaccaactttaatgttatttttaccccaaatcaccatgcagatttatctctctcttaacaagagtatgctgggagcaatggatagtgtggtcagtgctggatattttgatcaatctgataaaattattcgtattttatttaccattgtttcagcaatcggaggagttttcttaccaaggctctccagtctattttcttcaggaaaagaaaagcaagctaaggctttacttttgaaacttgttgatttaagcaatgctatctcaatgttaatgattgcgggagtggtaggagtttcgtcgacatttgccgtcttcttttttgggaaagggtatgaagctgtcggtccgctaatggctgttgagtctttgatgatcatttgcatttcttatggtaacgctttagggacacagtatctactggcttcaagacgtacaaaagcttacacaatgtctgcagttattggacttgtggcaaatgttgtgcttaatatacttttaataccaattttaggtgctatgggagctattatctctacagttattactgaatttattgtctccctatatcaagctatctctttaagagatgtatttacttttaaagaattaacaagaggaatgctgcgctatttaattgctgctactcttagtggagctgtactctattatatcaatactcaaatgtcagtatcattggtaaattatgtcattcaaagtttagtagcagtaactatctatgtcggtatcgtttttataaccaaagcaccagtcattcagttatttagagattttagaaaagagcatagaaca

SEQ ID NO: 3756 - protein, 474 aa, Streptococcus agalactiae
MKLLKNMFYNTSYQLLTLLLPLVTVPYVSRVLSPQGIGINAYTSSIVMYFTLFGALGISLYGNREIAFVQSNKYKRSKIFWELVVLKLASVSIATLLFFGFVLLTNEWQLFYLIQGINLLATATDISWYFIGVEDFKIIVIRNTIVKLITVVLTFLVVKTPDDLALYMFLIAFASLLGNLTVWHHLKHEIIKIPFSRLDILIHLRPTLMLFLPQITMQIYLSLNKSMLGAMDSVVSAGYFDQSDKIIRILFTIVSAIGGVFLPRLSSLFSSGKEKQAKALLLKLVDLSNAISMLMIAGVVGVSSTFAVFFFGKGYEAVGPLMAVESLMIICISYGNALGTQYLLASRRTKAYTMSAVIGLVANVVLNILLIPILGAMGAIISTVITEFIVSLYQAISLRDVFTFKELTRGMLRYLIAATLSGAVLYYINTQMSVSLVNYVIQSLVAVTIYVGIVFITKAPVIQLFRDFRKEHRT

SEQ ID NO: 3757 - DNA, 120 bp, Streptococcus agalactiae
atgactaaaagaatcaatcctataagagcaatactaagatttttagtcaacgatttatcaactaaaagatttatcaaaagcgataaaaatgctccaaatacaatatatccagtcgagtca

SEQ ID NO: 3758 - protein, 40 aa, Streptococcus agalactiae
MTKRINPIRAILRFLVNDLSTKRFIKSDKNAPNTIYPVES

SEQ ID NO: 3759 - DNA, 117 bp, Streptococcus agalactiae
atgagggcaaccaaggtgattgagacaaaggaactaaataaccttgctactgtaatcattacccccatagaaggatacacaaatttgcctaaaaataagccaactgctggcacaaga

SEQ ID NO: 3760 - protein, 39 aa, Streptococcus agalactiae
MRATKVIETKELNNLATVIITPIEGYTNLPKNKPTAGTR

SEQ ID NO: 3761 - DNA, 1362 bp, Streptococcus agalactiae
atgaacctcaaaaaagttcgtctatttgaaaagttttttctagacaagaacttgcataaaacatattttatattaggcttaacgattactattgtattgagcctattaatgccatttttcaatgaacctgatggacaataccatttagctgtgtctggtcgtatttcaaataacattattgatacttcttactatggagaatataatattgattcaggtatgagacgacaatcgacctcctatagagatggtactagatttgaaaaatactatttaaataaagccaattttgttgatggtaatcatttgcctcgtgagataaactattctaaacataactttgttttttggggtcatcttgtgccagcagttggcttatttttaggcaaatttgtgtatccttctatgggggtaatgattacagtagcaaggttatttagttcctttgtctcaatcaccttggttgccctcattatccggtatgtgaaaaaaggaaagttaatctactttgctattttcctcagtcccgtagttctaaattcatttgctagtctatcttatgactcgactggatatattgtatttggagcatttttatcgcttttgataaatcttttagttgataaatcgttgactaaaaatcttagtattgctcttataggattgattcttttagtcattgttgcatgtaagcagaattactggctgtttttattgctagtaataccggtattattgcaggttaacaatcctaaattaatgggctataatcagaagctatcacatttatttcaaggtcttaaatctaaaaagctattttggctatgtctaacctttttgtcacttgctatagtttatgttctgaccgcaagacatggtggtgtccttgctgttttaagacgttatgtaatgacatttggctataattatgctggtatcaatattttaagtaatgacattacttcctggcttgcctctccatatccaagtcagaattttattcccacttgggtatcatcagtatggtatctcatggtctttctagtatggttttctgaagaaaaatttgttaagtcaaaaaatatgggatttcttttcttagctagtttctttgtgggaattcttggtgtcttttttatcatgttagaatatcgtggagcgccaacaagctacattgaaggagttcaaggacgttactttactgttacattgcttttggtacaagtttttgcatcaagtattccagcgcgtctaaatgaggcaggaaggaaagtggtgccgtatgcgttaactggcttggtaattgtatcaaatgccttattgttatttgatactgttattagtttaattatgaggagaaac

SEQ ID NO: 3762 - protein, 454 aa, Streptococcus agalactiae
MNLKKVRLFEKFFLDKNLHKTYFILGLTITIVLSLLMPFFNEPDGQYHLAVSGRISNNIIDTSYYGEYNIDSGMRRQSTSYRDGTRFEKYYLNKANFVDGNHLPREINYSKHNFVFWGHLVPAVGLFLGKFVYPSMGVMITVARLFSSFVSITLVALIIRYVKKGKLIYFAIFLSPVVLNSFASLSYDSTGYIVFGAFLSLLINLLVDKSLTKNLSIALIGLILLVIVACKQNYWLFLLLVIPVLLQVNNPKLMGYNQKLSHLFQGLKSKKLFWLCLTFLSLAIVYVLTARHGGVLAVLRRYVMTFGYNYAGINILSNDITSWLASPYPSQNFIPTWVSSVWYLMVFLVWFSEEKFVKSKNMGFLFLASFFVGILGVFFIMLEYRGAPTSYIEGVQGRYFTVTLLLVQVFASSIPARLNEAGRKVVPYALTGLVIVSNALLLFDTVISLIMRRN

SEQ ID NO: 3763 - DNA, 945 bp, Streptococcus agalactiae
atggtaaaaacagcagttttgatggcaacatataatggtcaaggtttcatccacgatcagctagattcaattagaaatcaaacgttgagaccagactatgtcttaatgagggacgatggctctactgatgatactgtaaaggtggttgaagactatataaaagagcaccgtttagatggttggtcaataactagtaatgataaaaatttaggttggcgtttaaattttcgtcaattacttattgatgtgttagcctatgaggttgactatgtcttttttagtgatcaagatgacacatggtatcatcataaaaataagatgcaagttgatattatggaagaacgccaagatataaaccttcttagcgccgatattgatatcaaaaagttatcagaagaggctactattcccaataattttaagttcaatggtgaggaaacaatttctaagtatccattagacttttcatatcataactatcgtcaaggttggactttttgtttacgcaagtcgtttgttgatcaagtaatgactttttacagtgataatttaattttgtcacatgataatctttttgcaggggtatctggtgtcattggttcaggttacaatttaaacagaagtgttggtgaacataagcgacatgctgagaatgcaagtgggaatatcttgaatatgagctcaagttacgaaaggcatttacaagaactgtattttgttttgagttactatatcatccttgtaccatttttagaaaaaagtagctctagtcaattaagggaagctaaagcttatctggattttaatcagcaacgttataaaaatgctcaaaataaagattttgtagcaatacttaaacaaatgatgactaaaaaacggttctatgatagcttttcaaatcgcattcgtgacttggtgtttttattaaaagatataaaaaggagt

SEQ ID NO: 3764 - protein, 315 aa, Streptococcus agalactiae
MVKTAVLMATYNGQGFIHDQLDSIRNQTLRPDYVLMRDDGSTDDTVKVVEDYIKEHRLDGWSITSNDKNLGWRLNFRQLLIDVLAYEVDYVFFSDQDDTWYHHKNKMQVDIMEERQDINLLSADIDIKKLSEEATIPNNFKFNGEETISKYPLDFSYHNYRQGWTFCLRKSFVDQVMTFYSDNLILSHDNLFAGVSGVIGSGYNLNRSVGEHKRHAENASGNILNMSSSYERHLQELYFVLSYYIILVPFLEKSSSSQLREAKAYLDFNQQRYKNAQNKDFVAILKQMMTKKRFYDSFSNRIRDLVFLLKDIKRS

SEQ ID NO: 3765 - DNA, 945 bp, Streptococcus agalactiae
ttgaggagtaatatggtaaagacagcagttttaatggcgacatacaatggcgaaatatttatatctgaacaacttgattcaattcgccaacagacattaaaaccagattatgtattattgagggatgattgttcaacggatgaaacagtcaatgtcgtcaataactatatcgcaaaacatgagttagaaggctggaaaattgttaaaaacgacaaaaacttaggctggcgtttaaattttcgtcaattacttattgatgtgttagcctatgaggttgactatgtcttttttagtgatcaagatgatatttggtatcttgataaaaacgaacgacagtttgccattatgtcagataaacctcaaattgaggttttgagtgcagacgttgatatcaaaacgatgtctacagaagccagtgttccacattttctaactttttcttctagtgatagaatcagtcagtatcctaaagtatatgattatcaaacattccgtcccggatggaccattgctatgaagagagattttgcgcaagctatcgctgataattggacttttggagctaatatttcgcacgataatcttatcgagacaactgccagtattattggaaatggttataaccttaacgaaagcgtaggagttcatattcgatatggaggaaacgcaagtggtaatagcaaatttgttttgaattggaagtcgcctaaaacacaacatatcacaggattaaaaacatttgttgatttttacgaaaccatgcagaaggttgtcaacaaatatcaaaatgatgtcgctttaaatcaacgcttagcctttgaaaaagaaagattggaagcttctaaattgtcattaattcataatagtgcttttgtgattaaaaattggcgactctataactctaatagtggacgtatgagagatttattatttgcgtttaaaaag

SEQ ID NO: 3766 - protein, 315 aa, Streptococcus agalactiae
MRSNMVKTAVLMATYNGEIFISEQLDSIRQQTLKPDYVLLRDDCSTDETVNVVNNYIAKHELEGWKIVKNDKNLGWRLNFRQLLIDVLAYEVDYVFFSDQDDIWYLDKNERQFAIMSDKPQIEVLSADVDIKTMSTEASVPHFLTFSSSDRISQYPKVYDYQTFRPGWTIAMKRDFAQAIADNWTFGANISHDNLIETTASIIGNGYNLNESVGVHIRYGGNASGNSKFVLNWKSPKTQHITGLKTFVDFYETMQKVVNKYQNDVALNQRLAFEKERLEASKLSLIHNSAFVIKNWRLYNSNSGRMRDLLFAFKK

SEQ ID NO: 3767 - DNA, 1056 bp, Streptococcus agalactiae
atgatgattaaatttagtaataaaattgtacaagaagatttagcacttattagtaaccaaaattatattaattgggaaagaattgctaataaaggcgttttaataagtggttctaatagtatgttagcgagttatatggtatttttactagcctatctcaatgagacaagaaattaccaaacgcaaattattgcgacagctagaaacattgaaaaagcccgtgataaattttcagatttagttgggaaagattatttcaccttaattccttatgatgtagaagaacgcctagagtatgatggaaaagtggattacattatccatgcagcaagcaatgctagtccaactgctattttgagtaatcctgttagcatcataaaagctaatacaattggtacattgaatttattagactttgcaaaggaaaaaacaattgaaaacttcttgttcttatcaacgcgtgaagtatatggaacatctattaaagaagtgattgatgaagaagcttatggtggatttgatattttagctactagagcttgttacccagaaagcaaacgtatggctgaaactctactgcaaagttactatgatcaatataaggtaccctttactattgctcgtattgcacattcatttggtcctggtatggagcttggtaacgatggtcgtattatgaatgatcttttatcgaatgtcattgatggcaaagatatcgttttaaaaagtagtggtacagcagagcgtgctttctgttatttagcagatgctgtatcagggttatttactattttattaaatggtgaagttggtcaagcttacaatgtagcaaatgaagatcaacccattatgattaaggatttggcacaaaagttagttgatctcttttctgataaaaatatttcagtagtattcgatattcctaaaactatgagtgcaggttatagcaaaatggggagaacacgtctcactatggccaaattagaagcgttgggatggaagcgagaagtttctcttgaatctggaatattaaaaacagtacaagcatttgaggag

SEQ ID NO: 3768 - protein, 352 aa, Streptococcus agalactiae
MMIKFSNKIVQEDLALISNQNYINWERIANKGVLISGSNSMLASYMVFLLAYLNETRNYQTQIIATARNIEKARDKFSDLVGKDYFTLIPYDVEERLEYDGKVDYIIHAASNASPTAILSNPVSIIKANTIGTLNLLDFAKEKTIENFLFLSTREVYGTSIKEVIDEEAYGGFDILATRACYPESKRMAETLLQSYYDQYKVPFTIARIAHSFGPGMELGNDGRIMNDLLSNVIDGKDIVLKSSGTAERAFCYLADAVSGLFTILLNGEVGQAYNVANEDQPIMIKDLAQKLVDLFSDKNISVVFDIPKTMSAGYSKMGRTRLTMAKLEALGWKREVSLESGILKTVQAFEE

SEQ ID NO: 3769 - DNA, 741 bp, Streptococcus agalactiae
ttggtactggaaagaaggttaatgatgaatattggagttatttttgcaggtggtgttggtcgtcgcatgaataccaaaggtaaaccaaagcaattcctagaagtgcatggtaaacccattattgtacacacaattgatattttccaaaatacagaagctattgatgctgtagtagttgtctgtgtatcagactggctagattatatgaataatctggtagagcgtttcaaccttacgaaagtaaaagcagttgttgcaggtggagaaactggccaaatgtcaatttttaaggggcttgaagccgctgaacagctggctacagatgatgccgttgttttaattcatgacggagtacgtccattgattaatgaagaagttattaatgctaatatacagtcagtaaaagaaacaggaagtgcggtaacttcagttcgtgctaaagagacagttgttctagtcaatgattcttctaaaatatctgaagttgttgatcgtactcgttccttcattgctaaagcgccacaaagtttttatctatcagatatcctttctgttgaacgtgatgccattagcaaagggattactgatgcaattgattctagtactttgatgggtatgtacaatcgtgaactcactattgttgagggaccatatgaaaatatcaagataacaacaccagatgatttttatatgtttaaagctttgtatgatgctagagaaaatgaacaaatttatgggatg

SEQ ID NO: 3770 - protein, 247 aa, Streptococcus agalactiae
MVLERRLMMNIGVIFAGGVGRRMNTKGKPKQFLEVHGKPIIVHTIDIFQNTEAIDAVVVVCVSDWLDYMNNLVERFNLTKVKAVVAGGETGQMSIFKGLEAAEQLATDDAVVLIHDGVRPLINEEVINANIQSVKETGSAVTSVRAKETVVLVNDSSKISEVVDRTRSFIAKAPQSFYLSDILSVERDAISKGITDAIDSSTLMGMYNRELTIVEGPYENIKITTPDDFYMFKALYDARENEQIYGM

SEQ ID NO: 3771 - DNA, 822 bp, Streptococcus agalactiae
atgaaagaaatgacggtctcagaaataagagaagttcaacttgaaatgttagcttatattgataaagttgcgcgtgataataaaattgaatattctttaggcggaggcagcctactgggagcaatgagacataaaggattcattccatgggatgacgatattgatttgatgctagaaagaagccagtatgagcgtttgatgaaagcattagctgatgctaataatagcgattttaaattgctacatcattctgttgaaaaaaatctatggccatttgccaagctgtatcacacaaagtcaatgtacttaagtaaaacagatagaattcatccttggacagggatttttattgatatcttcccacttgaccgattaccagagagtgcagaagaacgtcaaagattctttaaaaaagttcactctgctgctgcaaatttgatgtgtacgacttaccccaattttgctagcggttcccgaaagctttatgcaaatgcaaggctaattttggggctaccccgattcatcgcttatcacggccaagctaaaaaacgtgctgaaattgttgatcaagtgatggaaacatataataatcaagaggttccttacatgggttataccgattcaagatatcgcttgaaagaatattttccaagagaaattttttctgagtatgaagatgttatgtttgaaaacattaaaacccgaaaaattaaaaatgagcatgcttatctgaatcaattatatgggggtagttatatggaattacctccagaaagtaagagagaaagtcatagttattacacttggtactggaaagaaggt

SEQ ID NO: 3772 - protein, 274 aa, Streptococcus agalactiae
MKEMTVSEIREVQLEMLAYIDKVARDNKIEYSLGGGSLLGAMRHKGFIPWDDDIDLMLERSQYERLMKALADANNSDFKLLHHSVEKNLWPFAKLYHTKSMYLSKTDRIHPWTGIFIDIFPLDRLPESAEERQRFFKKVHSAAANLMCTTYPNFASGSRKLYANARLILGLPRFIAYHGQAKKRAEIVDQVMETYNNQEVPYMGYTDSRYRLKEYFPREIFSEYEDVMFENIKTRKIKNEHAYLNQLYGGSYMELPPESKRESHSYYTWYWKEG

SEQ ID NO: 3773 - DNA, 1731 bp, Streptococcus agalactiae
atgagtaaaaaacatatttttatttgtctgtttttcatgctttttttagtaggttgccaaaataataaaaaagtaaaaacagataaaaaagtagatattacagcttattattatcataataataccccgcaatacagtgttcagattaatgctattcatttacaaacagcattggataaagtgaggacgggggagtttgagagcaaagactttacacactatacttttgatagtatcaagcggaagtaccaagttagtggtaaaaaagtccttatggataataactatagatttggttctggtataaaaaatactagacaggatgctattgctattgtaaggttactgcttgaaaagaataaagattatttaatttacatgaatggcttagaagagccaagtgttttatataatccagaaaataaacgttataagttcacaaataacaaaggaaaagcaattggtaatattccagttggtttaactgcttttgaaaacagcgcagaaactcaagaatatgtgttgaaaaatattcagaaaaacgaaacgatttatcttggtaatacccgagtagataatcctcgagtaactgttaataacaaaaaaagagatactataggagttgaatacggtaaacgtattacttataggattccaatttattcaaagcagctgactgtcagagttagccctaattttgtagtagatagtactaattataattaccgactttctcaagcgcctattattgcggaagaaggtaaagagggacgtttgtatccaatagatagcagtattagtgtcgatggtgataaaattgttttaaatagtagtggtgatgaaacagagcaaaaagaattattacaaaatagcctgtataaacttcactctattgataagttagactttgatttgacaaatgctgatattaaagagttagagattacaggacatgttgcttcaaaaagagattataatttgtctgttgctcaggaaaagaaaggcgtcatagagactaaacggagtctaatttctgttgataatcaaaaacaagatcaagggatttttgtcgaggattctaaaggctatataaagacacctagtttgagcagttatggtataaattttgccatgtatgacgacaatcaaaatagattattacaaggttcagagtatattttaggaagattgaatgcagataaaaaagtatctctatatcaacctaatggcttttggataaatactcaaaaaacgattaagagtttaaataaagaatatcttaaccaaaatgcttaccatattagaggaaataacattataggtattgatggctattcaaatgacatagacttgaatcctaggttatgggcttataactataaaaaacaagtgaaaagtaaccaatcattatttaaattacgaggtttgtctaataaatataagtatttcttaatacagacaaaatctccaaaaggctacttacaaagcaataaaccattttattttacagtaaataaagatagtgtttctaaagcacaatttggtaactataatataaatggttatataatggacatgcagtacaacaaacaagaatacaatgcacttgcaaacactccaaaaggtcaaaaaacaaagaaaactttcaaacccatgaccctagtgattctttttgcagtagctttatttattttctatattacagctataagatttgtatttaaaagaatg

SEQ ID NO: 3774 - protein, 577 aa, Streptococcus agalactiae
MSKKHIFICLFFMLFLVGCQNNKKVKTDKKVDITAYYYHNNTPQYSVQINAIHLQTALDKVRTGEFESKDFTHYTFDSIKRKYQVSGKKVLMDNNYRFGSGIKNTRQDAIAIVRLLLEKNKDYLIYMNGLEEPSVLYNPENKRYKFTNNKGKAIGNIPVGLTAFENSAETQEYVLKNIQKNETIYLGNTRVDNPRVTVNNKKRDTIGVEYGKRITYRIPIYSKQLTVRVSPNFVVDSTNYNYRLSQAPIIAEEGKEGRLYPIDSSISVDGDKIVLNSSGDETEQKELLQNSLYKLHSIDKLDFDLTNADIKELEITGHVASKRDYNLSVAQEKKGVIETKRSLISVDNQKQDQGIFVEDSKGYIKTPSLSSYGINFAMYDDNQNRLLQGSEYILGRLNADKKVSLYQPNGFWINTQKTIKSLNKEYLNQNAYHIRGNNIIGIDGYSNDIDLNPRLWAYNYKKQVKSNQSLFKLRGLSNKYKYFLIQTKSPKGYLQSNKPFYFTVNKDSVSKAQFGNYNINGYIMDMQYNKQEYNALANTPKGQKTKKTFKPMTLVILFAVALFIFYITAIRFVFKRM

SEQ ID NO: 3775 - DNA, 93 bp, Streptococcus agalactiae
ttggtattgctactagtatcaaataattctaaacaaaacagaaataaaatagcaccaaataacaagaaattcatcgttaaagcgaatccaagg

SEQ ID NO: 3776 - protein, 31 aa, Streptococcus agalactiae
MVLLLVSNNSKQNRNKIAPNNKKFIVKANPR

SEQ ID NO: 3777 - DNA, 759 bp, Streptococcus agalactiae
ttgcaacaaattattacaataagagataagatgatgaaaaaaattttactagtgatacctgcttataatgaagaaggtagtattgcaaagacagtccagactattgtagattttaaggcgtctcgctcactaccttttgagctggattatattgttattaacgatgggtcaaccgatggtactccagagttattagatagattgggtttaaatcatattgaccttgttcaaaatctaggtattggtggctgtgtgcagacaggatacttatacgctaatcgtaatcattacgatgttgccgttcaatttgatggtgatggtcaacatgatattagaagcattgaagatgttgttatgccaatcttaaatgacgaagcagattttgttattggttctcgctttgttgataaaaaacatcaaaattttcaatcgacagcaatgaggcgtcttggcataaatttaatatctgctgctataaaattaacgacgggacacaaagtctatgatacaacaagtggttatagggcagccaacgcggcgctaatagcttatttatcgtgtcattatccagtacaatacccagagcctgaatcaactgctcggattttgaaaaaaggctatcgtttgaaggaagtcacagctaatatgtttgaacgtgaggcaggtacttcaagtataagttccctaaaatcgattttttatatgacggatgttttaacatcaattattattgcagggtttattaaggaggatgataaa

SEQ ID NO: 3778 - protein, 253 aa, Streptococcus agalactiae
MQQIITIRDKMMKKILLVIPAYNEEGSIAKTVQTIVDFKASRSLPFELDYIVINDGSTDGTPELLDRLGLNHIDLVQNLGIGGCVQTGYLYANRNHYDVAVQFDGDGQHDIRSIEDVVMPILNDEADFVIGSRFVDKKHQNFQSTAMRRLGINLISAAIKLTTGHKVYDTTSGYRAANAALIAYLSCHYPVQYPEPESTARILKKGYRLKEVTANMFEREAGTSSISSLKSIFYMTDVLTSIIIAGFIKEDDK

SEQ ID NO: 3779 - DNA, 693 bp, Streptococcus pyogenes
gtgaaaaagttaatcattattcctgcttacaatgaaagcagtaatattgtcaatactatacgtactattgaatcagatgccccggattttgactatatcattattgatgattgctcaacggataatacgttagcaatatgtcaaaaacaggggttcaatgttatttctttgcccattaacctgggaattggcggtgcggtgcaaactggctatcgttatgcacaaagatgtggatatgacgttgcagttcaagtagatggagatggtcagcacaatccatgctatttggaaaaaatggttgaggtattagttcaatcttcagtaaatatggtaattggatcacgatttatcacaaaagaagggtttcagtcatcatttgctcgacgtatcggcataaagtattttacttggcttattgcgctactaacaggaaaaaaaataacagatgcaacgtcaggtctaaggttaattgaccgttcattgattgaacgttttgctaatcattatccagatgattatcctgaacctgaaacagttgttgatgtattggttagtcattttaaagtgaaagaaattcctgttgtaatgaatgagcgacaaggcggtgtgtcatctatctcgttgacgaaatcggtctattatatgattaaagtgactttagctattttagttgttagattgaaaggaaatcgt

SEQ ID NO: 3780 - protein, 231 aa, Streptococcus pyogenes
VKKLIIIPAYNESSNIVNTIRTIESDAPDFDYIIIDDCSTDNTLAICQKQGFNVISLPINLGIGGAVQTGYRYAQRCGYDVAVQVDGDGQHNPCYLEKMVEVLVQSSVNMVIGSRFITKEGFQSSFARRIGIKYFTWLIALLTGKKITDATSGLRLIDRSLIERFANHYPDDYPEPETVVDVLVSHFKVKEIPVVMNERQGGVSSISLTKSVYYMIKVTLAILVVRLKGNR

SEQ ID NO: 3781 - DNA, 939 bp, Streptococcus agalactiae
atgaaagttaatattttaatggccacctacaatggagagaagtttctggcgcagcaaatcgaaagtatccaaaagcaaacctttaaagagtggaacctcctaatcagagatgatggttcaagtgacaagacatgtgatattattagaaactttactgctaaagattctcgaattcgtttcattaatgaaaatgagcaccataatttaggagttattaaatcattttttacgctagttaattacgaagttgcagatttctatttttttagtgatcaagatgatgtatggttgccagaaaagttatctgtaagtttagaggcagcaaagcataaagcatctgatgtaccattacttgtttatactgatttgaaagttgttaatcaagaattaaatattttacaagacagcatgattcgggctcaatcgcaccatgccaatacgacattattaccagaactaactgagaatactgttactggtgggactatgatgataaatcatgcattagctgagaagtggtttactcctaatgatatcttaatgcatgattggtttttagcactcttagcagcaagtttaggagaaatcatttatttggatttaccaactcaactataccgtcaacatgacaataatgttttgggggcgaggacaatggataagagatttaagatacttcgtgaaggtcctaaatctatatttacaaggtattggaaacttatccatgactcacaaaagcaagcttccttaattgttgataagtatggtgatattatgacagctaatgatcttgagctcattaaatgttttataaaaattgacaaacagccttttatgacaagattaaggtggttatggaaatatggttatagcaaaaatcaatttaagcatcaagttgtgtttaaatggttgattgcaacaaattattacaataagaga

SEQ ID NO: 3782 - protein, 313 aa, Streptococcus agalactiae
MKVNILMATYNGEKFLAQQIESIQKQTFKEWNLLIRDDGSSDKTCDIIRNFTAKDSRIRFINENEHHNLGVIKSFFTLVNYEVADFYFFSDQDDVWLPEKLSVSLEAAKHKASDVPLLVYTDLKVVNQELNILQDSMIRAQSHHANTTLLPELTENTVTGGTMMINHALAEKWFTPNDILMHDWFLALLAASLGEIIYLDLPTQLYRQHDNNVLGARTMDKRFKILREGPKSIFTRYWKLIHDSQKQASLIVDKYGDIMTANDLELIKCFIKIDKQPFMTRLRWLWKYGYSKNQFKHQVVFKWLIATNYYNKR

SEQ ID NO: 3783 - DNA, 1182 bp, Streptococcus agalactiae
atggattgtttagctagaatggagaagatgatgcaagatgttttcattataggaagtagagggttgccagctcgttacggtggttttgaaacttttgtttcagaattgattaatcatcaaaaaagtttcgacataaaataccatgttgcatgccttagtgataaagaacatcatactcattttaactttgctgacgctgattgttttactataaatcctccccaattagggccagcacgtgtgattgcttatgatattatggccattaattatgcccttgacttggttaagacacatgatttaaaagagcctattttttatattttaggaaatacaattggtgcctttatttggcattttgccaataaaatacataaagtcggtggcttattgtatgttaatccggatggtttagagtggaagcgatcaaagtggtctcgtcccacacagcgttatttaaaatacgccgaaaaatgtatgactaaaaatgcagacctaattatttctgataatattggtattgaaaattacattcaatctacctactctaatgtgaagacaaggttcattgcttacggtacagagattaattctaggaaattatcgtcagatgatccacgtgtcaaacagttgtttaaaaaatggaatattaagtctaagggttactatctaatcgttggtcgatttgtccctgaaaacaattatgaaacggctattagggagttcatggcttcagatactaagcgtgatttagttattatctgtaaccatcaaaataacccctactttgaaaagttgtccttaaagacaaaccttcaacaagataaaagagttaagtttgtaggtacgctctatgaaaaagatctgctggattatgttcgtcaacaagcctttgcttatattcatgggcatgaagttggcggtactaatccaggactgcttgaggctttagctaatactgatttgaatcttgttctagatgttgatttcaacaaatcagtagcaggtctctcaagtttttactgggctaaaaaagagggggatttagctaagcttattaacgatagtgatcaacaacaggatttatctacttacggtgatcgagcaaaagccattattcaagaaaactatacttggaaaaaaattgttgaagaatatgaggatttgtttttaaatgaaagt

SEQ ID NO: 3784 - protein, 394 aa, Streptococcus agalactiae
MDCLARMEKMMQDVFIIGSRGLPARYGGFETFVSELINHQKSFDIKYHVACLSDKEHHTHFNFADADCFTINPPQLGPARVIAYDIMAINYALDLVKTHDLKEPIFYILGNTIGAFIWHFANKIHKVGGLLYVNPDGLEWKRSKWSRPTQRYLKYAEKCMTKNADLIISDNIGIENYIQSTYSNVKTRFIAYGTEINSRKLSSDDPRVKQLFKKWNIKSKGYYLIVGRFVPENNYETAIREFMASDTKRDLVIICNHQNNPYFEKLSLKTNLQQDKRVKFVGTLYEKDLLDYVRQQAFAYIHGHEVGGTNPGLLEALANTDLNLVLDVDFNKSVAGLSSFYWAKKEGDLAKLINDSDQQQDLSTYGDRAKAIIQENYTWKKIVEEYEDLFLNES

SEQ ID NO: 3785 - DNA, 1152 bp, Streptococcus pyogenes
atgcaggatgtttttatcattggtagcagagggttaccagcgaaatacggtggctttgaaacctttgtcgaagagttgattagtcatcaatcatctaaaaacattcgttatcatgttgcttgtttaagcgatacgaagcataaggttcattttgattataagggggcagattgcttttaccttaatcccccaaaacttggtcctgctagagttattgcttatgatatgatggcaattacctatgccctgtcttatagcgaccaacaccagattcagaaccctattttttatgtgttgggcaatactgtaggcgcttttattgcgccatttgtgaagcagattcacaatcgaggtggacgcttttttatcaatccagacgggttagagtggaaacggtctaaatggtcaagaccagtgcaggcctacctgaagttttccgaaaagcaaatgactagacaggctgatttggtcatttcagataatattggcattgaccgctaccttaaacaagtttatccttggtctaaaacatgttttattgcttatggaacgcagacacaaccttcacgtttggcaacagcagatagcaaggtcagagcttattttcaaacctttgatattagagaaaaggattactatctcattttaggacgctttgttcctgaaaataattacgaaaccgctattaaagaatttatggcttcctcaactaagcgtgatttagtgattatttgtaatcatgaaggcaatgcttactttaagcaattacttgctgagacagagtgtgataaagacccacgcattaaatttgttggtaccctttatgacaaagaactattagcctacattcgagaacaggcttatgcctatatccatggtcatgaggtaggagggactaatccaggccttctagaagcactagcccataccaatcttaatttggttttaggagttgattttaaccagtcggtggctaagtctgctgcgctttattggaccaagcaaaaagggcaattagcagagctgattaaccaagttgatgcaggttttgatagtgatcatctgggcaaagaagccaaagctattattcaagaacattacacttgggaaaaaattgtaggggagtacgaggctttatttttaaatgaacat

SEQ ID NO: 3786 - protein, 384 aa, Streptococcus pyogenes
MQDVFIIGSRGLPAKYGGFETFVEELISHQSSKNIRYHVACLSDTKHKVHFDYKGADCFYLNPPKLGPARVIAYDMMAITYALSYSDQHQIQNPIFYVLGNTVGAFIAPFVKQIHNRGGRFFINPDGLEWKRSKWSRPVQAYLKFSEKQMTRQADLVISDNIGIDRYLKQVYPWSKTCFIAYGTQTQPSRLATADSKVRAYFQTFDIREKDYYLILGRFVPENNYETAIKEFMASSTKRDLVIICNHEGNAYFKQLLAETECDKDPRIKFVGTLYDKELLAYIREQAYAYIHGHEVGGTNPGLLEALAHTNLNLVLGVDFNQSVAKSAALYWTKQKGQLAELINQVDAGFDSDHLGKEAKAIIQEHYTWEKIVGEYEALFLNEH

SEQ ID NO: 3787 - DNA, 852 bp, Streptococcus agalactiae
atgattttaattacaggggcaaacgggcaattaggtagtgaattacgtcaccttttagacgaacgaactcaagagtatgttgctgttgatgtagctgaaatggatattacaaatgccgagatggtggacaaagtctttgaagaggtgaagccatctttagtttaccattgtgcagcttacacagctgttgatgcggcagaagatgaaggaaaagagctagactttgcaatcaatgtcactggtacagagaatgtcgctaaggctgctgctaaacatgatgcaacacttgtttacatttcgacggactacgtgtttgatggtgaaaaaccagtggggcaagaatgggaagtagatgatctgcctgatcccaaaacagagtacggtcgtacaaaacgtatgggtgaagagttagttgaaaaatatacttcaaaattctataccattcgcacagcgtgggtatttggtaactatggtaaaaactttgtctttacgatgcaaaaccttgcaaaaacacacaaaactctaactgttgttaacgaccaacatggacgaccaacatggacacgtactttggctgagtttatgacttatttagctgaaaatcaaaaagattttggttactatcatttatcaaatgatgctaaagaagatacaacatggtatgattttgcggttgaaatcttaaaagacacagatgtggaggttaagcctgttgattctagtcaattcccagcaaaagcaaaacgtcctttaaattcaactatgagtttggaaaaagcgaaagcaacaggatttgtgattcctacttggcaagatgctttaaaagagttctacaagcaggaagttaaaaaa

SEQ ID NO: 3788 - protein, 284 aa, Streptococcus agalactiae
MILITGANGQLGSELRHLLDERTQEYVAVDVAEMDITNAEMVDKVFEEVKPSLVYHCAAYTAVDAAEDEGKELDFAINVTGTENVAKAAAKHDATLVYISTDYVFDGEKPVGQEWEVDDLPDPKTEYGRTKRMGEELVEKYTSKFYTIRTAWVFGNYGKNFVFTMQNLAKTHKTLTVVNDQHGRPTWTRTLAEFMTYLAENQKDFGYYHLSNDAKEDTTWYDFAVEILKDTDVEVKPVDSSQFPAKAKRPLNSTMSLEKAKATGFVIPTWQDALKEFYKQEVKK

SEQ ID NO: 3789 - DNA, 912 bp, Streptococcus pyogenes
atgttagagaacactaagatactgagaaaagtgttctacctatggcaaaaaggagaactgatgattttaattacaggaagcaatggtcaattagggacagaacttcgatacttattagatgaacgaggtgttgattatgtagccgttgatgtcgcagaaatggacatcacaaatgaagacaaagtcgaagctgtttttgcgcaggtcaagccaacattggtctatcattgtgctgcttatacggcagttgatgcagcagaagacgaaggaaaagccttgaatgaggctattaatgtaacaggctcagaaaatattgccaaggcttgtggaaaatatggggctacccttgtttacatttcaacagactacgtatttgatggcaataaaccagtcggtcaagaatgggtagaaacagatcatccagaccctaagacagaatatggccgtacaaaacgtttaggagaactagctgttgaacgatacgcagagcatttttatattatccgtactgcttgggtatttggaaattatggtaaaaactttgtctttaccatggagcagttagcagaaaatcactcccgtttgactgttgtcaatgaccaacacggtcggccaacgtggacaaggaccttggcagaattcatgtgttatttgacagagaatcaaaaagcctttggttactatcacttgtcaaatgatgctaaggaagacaccacttggtatgattttgccaaagaaatcttaaaagacaaggctgttgaagtggtgccagttgattcatcagctttcccagcaaaagccaaacgtcctttaaattcaaccatgaatcttgataaggcaaaagcaacagggtttgttattccaacatggcaagaagccttgaaggcattttaccaacaaggactgaaaaag

SEQ ID NO: 3790 - protein, 304 aa, Streptococcus pyogenes
MLENTKILRKVFYLWQKGELMILITGSNGQLGTELRYLLDERGVDYVAVDVAEMDITNEDKVEAVFAQVKPTLVYHCAAYTAVDAAEDEGKALNEAINVTGSENIAKACGKYGATLVYISTDYVFDGNKPVGQEWVETDHPDPKTEYGRTKRLGELAVERYAEHFYIIRTAWVFGNYGKNFVFTMEQLAENHSRLTVVNDQHGRPTWTRTLAEFMCYLTENQKAFGYYHLSNDAKEDTTWYDFAKEILKDKAVEVVPVDSSAFPAKAKRPLNSTMNLDKAKATGFVIPTWQEALKAFYQQGLKK

SEQ ID NO: 3791 - DNA, 339 bp, Streptococcus agalactiae
atgtcagaagtaaagcaatatagcgaagaagaagttggaaaaataaaagatcgtatcctagaagctttggagatggttatcgatcctgaattgggaatagatattgttaaccttgggttaatttatgagattcgctttgaagataacggtcgaactgaaattgatatgactttaacgactatgggatgcccgttagcagatttattgacagatcaaattcatgatgttatgaaaacagtcccagaggtaactgaaaccgaggtgaaattggtatggtacccagcctggtctgttgataagatgagtcgttatgctcgtatcgctttgggaattcgttca

SEQ ID NO: 3792 - protein, 113 aa, Streptococcus agalactiae
MSEVKQYSEEEVGKIKDRILEALEMVIDPELGIDIVNLGLIYEIRFEDNGRTEIDMTLTTMGCPLADLLTDQIHDVMKTVPEVTETEVKLVWYPAWSVDKMSRYARIALGIRS

SEQ ID NO: 3793 - DNA, 336 bp, Streptococcus pyogenes
atgtctgatacaccaaaatatacacaagatcaggtgatagctatcaagaatagaattcttgaagctttagaaactgttattgatcccgagctaggtattgatgttgttaatctaggcttgatttatgaaattcggtttaatgataacggttatacagagattgatatgacactcacaacaatgggttgtcctttggcagacttgttgacagattacatccatgatgccctgcaagatgtgccagaagtcactaagactgaggtcaaattagtctggtaccctgcttggacggttgataaaatgagccgctatgctaggattgcgctgggtattcgc

SEQ ID NO: 3794 - protein, 112 aa, Streptococcus pyogenes
MSDTPKYTQDQVIAIKNRILEALETVIDPELGIDVVNLGLIYEIRFNDNGYTEIDMTLTTMGCPLADLLTDYIHDALQDVPEVTKTEVKLVWYPAWTVDKMSRYARIALGIR

SEQ ID NO: 3795 - DNA, 1140 bp, Streptococcus agalactiae
ttgctcaaaaaagaaatatggaatgaggaacctatggcagagaaaaaaggaaatacaacttttaatgttcaagttgcggattttattcgcaatcataaaaaacaaggtactgcaattgatgatgaggtaacagaaaaacttgttattccttttgttttagatgcagatcaaattgatgatttgttagaacgattgacagacggtggcatttcaatcacagataaagaaggcaatccttcaacaaagtatgtggtagaagggccaaaacctgaagaattgactgatgaagagctcataggaagtaattctgctaaagtcaatgacccagtacgtatgtacttgaaggaaattggtgttgttcctcttttaacgaatgaagaagaaaaagaattggctgttgcggttgctgagggagatttaatggctaaacaacgtttagctgaagcaaaccttcgtcttgttgtctcaattgcaaaacgttatgttggacgtggaatgcaatttcttgatttaattcaagagggtaacatggggctcatgaaagctgttgataaatttgattattcaaagggattcaaattttcaacttatgcaacatggtggattcgtcaagctataacacgtgcaattgcagatcaagcacgtacgattcgtattcctgttcatatggttgaaacgattaataaattggtccgtgaacaacgtaatcttcttcaagaacttggtcaagatccaactcctgagcaaatcgcagaacgcatggatatgacaccagataaagtacgtgaaatcctaaaaattgctcaagagccggtatcgctagaaacgccaatcggtgaggaagatgatagccatttgggtgatttcattgaagacgaagttattgaaaatccagtagattatactacacgtgttgttcttcgtgagcaattagatgaggttttagatactcttactgaccgtgaagagaatgttcttcgtttacgctttggtcttgacgatggtaaaatgcgtacgttagaggacgtaggtaaagtatttaatgttactcgtgagcgcattcgtcagattgaagctaaagcccttagaaaacttcgccatcctagtcgtagcaagcaacttaaagatttcatggaagat

SEQ ID NO: 3796 - protein, 380 aa, Streptococcus agalactiae
MLKKEIWNEEPMAEKKGNTTFNVQVADFIRNHKKQGTAIDDEVTEKLVIPFVLDADQIDDLLERLTDGGISITDKEGNPSTKYVVEGPKPEELTDEELIGSNSAKVNDPVRMYLKEIGVVPLLTNEEEKELAVAVAEGDLMAKQRLAEANLRLVVSIAKRYVGRGMQFLDLIQEGNMGLMKAVDKFDYSKGFKFSTYATWWIRQAITRAIADQARTIRIPVHMVETINKLVREQRNLLQELGQDPTPEQIAERMDMTPDKVREILKIAQEPVSLETPIGEEDDSHLGDFIEDEVIENPVDYTTRVVLREQLDEVLDTLTDREENVLRLRFGLDDGKMRTLEDVGKVFNVTRERIRQIEAKALRKLRHPSRSKQLKDFMED

SEQ ID NO: 3797 - DNA, 1107 bp, Streptococcus pyogenes
atgacaaaacaaaaagaaataacaacttttaacgttcaagttgcggagtttattcgccatcacaaaaaagaaggaacagcgattgatgatgacgtgaccgaaaaacttgtcattccatttgctttggatgctgatcagattgatgacttacttgagcggttaacagatggtggtatctcgattacggataaagaaggtaacccatcatcaaaatacattgttgaagaaccaaaaccagaagaattaactgatgaagaattaattggtagtaattcagctaaagtaaacgaccctgtccgcatgtacctcaaagaaattggtgtggtaccgcttttaacaagtgaagaggaaaaagaattggctgttgcggttgccaagggagatttaatggctaaacaacgtttagcggaagcaaaccttcgtcttgttgtctcaattgcaaaacgttatgttggacgtggaatgcaatttcttgatttaattcaagaaggtaacatgggactcatgaaagctgttgataaatttgattattcaaaaggattcaaattctcaacttatgcaacatggtggattcgtcaagctataacacgcgcaattgcagatcaagcacgtacgattcgtatccctgttcatatggttgaaaccattaataaattggttcgtgaacaacgtaaccttcttcaagaacttggtcaagatccaacgccagaacaaatcgcagaacgtatggaaatgactccagacaaggttcgtgaaattctaaaaattgctcaagaacctgtttctttagaaacaccaattggggaagaagatgatagtcacttaggtgattttatcgaagatgaagttattgaaaatccagtagattatacgacgcgtgttgttcttcgtgagcaattggatgaagttttagatacgcttactgaccgtgaagagaacgttcttcgcctacgctttggccttgacgatggtaaaatgcgtacgttagaggacgtaggtaaagtctttaatgttactcgtgagcgcattcgacagattgaagctaaagcccttagaaaacttcgccatcctagtcgtagtaaacaattaagagactttatagaggac

SEQ ID NO: 3798 - protein, 369 aa, Streptococcus pyogenes
MTKQKEITTFNVQVAEFIRHHKKEGTAIDDDVTEKLVIPFALDADQIDDLLERLTDGGISITDKEGNPSSKYIVEEPKPEELTDEELIGSNSAKVNDPVRMYLKEIGVVPLLTSEEEKELAVAVAKGDLMAKQRLAEANLRLVVSIAKRYVGRGMQFLDLIQEGNMGLMKAVDKFDYSKGFKFSTYATWWIRQAITRAIADQARTIRIPVHMVETINKLVREQRNLLQELGQDPTPEQIAERMEMTPDKVREILKIAQEPVSLETPIGEEDDSHLGDFIEDEVIENPVDYTTRVVLREQLDEVLDTLTDREENVLRLRFGLDDGKMRTLEDVGKVFNVTRERIRQIEAKALRKLRHPSRSKQLRDFIED

SEQ ID NO: 3799 - DNA, 120 bp, Streptococcus agalactiae
atgttggtaatcttccacaaatttaaagacatcaccagagcgaccacaaccaaaacaatgaaaaaactgcctatcttcgataacattaaaagatggcgttttttctttatgaaatgggca

SEQ ID NO: 3800 - protein, 40 aa, Streptococcus agalactiae
MLVIFHKFKDITRATTTKTMKKLPIFDNIKRWRFFFMKWA

SEQ ID NO: 3801 - DNA, 1887 bp, Streptococcus agalactiae
gtgaagaagaaatccttgaaaaagcttttgaaaaaatttacacagaaaagaaaaaatgatataatcaaatgtaaaactataatgggttatttctgtggaggtcatgacttggcaattgataaagaaaaaatttctgaaatcaagaacagtgttaacattgttgatgtcatcggtgaagttgtcggtttgacaaaaacaggacgcaatcatcttggtttatgcccatttcataaagaaaaaacgccatcttttaatgttatcgaagataggcagttttttcattgttttggttgtggtcgctctggtgatgtctttaaatttgtggaagattaccaacatattagttttttagatagtgtacaagttctagctgaacgttcaggaatacctctagatactaattttaaggggcaagttcctaaaaaacctaaagctaatcagtcgcttttagatattcatagagttgcttcgggattttaccatgcctatttaatgacaactaatgatggtgaacgcgctagacaataccttgccgagcgcggagtgacagaggacttaattaaacattttcaaataggattatcgccgggagggcaggattttctatatcgtcgtctggcaaaagagtttgatgaaaaaactttgatgtcttctggtttgttcaattattcagaaaatagcaatcagttttacgattcatttaataatagaattatgtttccgttaactaatgatattggtgaagtcattgcgttttcaggacgagtttggactcaagaggacattgatagaaaacaagctaaatataaaaattctcgtgccacccctatttttaataagtcttacgagctttaccatttagataaagcgcgtgctgtaattaataaagcacacgaagtttacctaatggaaggctttatggatgttattgcagcttatcgtgcaggaattgagaatgttgttgcttctatggggaccgctttaaccaatgaacatgttagacaccttaaaagatttactaagaaagttgttctgacttatgatggtgatagagctggtcaaaacgcaattgacaagtctttagaactgctatcagatatgactgttgatatcgttaggatacctaataaaatggaccctgatgaatttctacaagcaaattcagcagaagattttaaacaactcttagaaaatgggcgcatcagtaatacagagttttatatccactacttaaagcctgaaaacaccgataatttacaatctgaaattgcttatgttgaaaaaatagcgaaattaattgctaaatctccatcgataacagcacaaaattcatatattacaaaagtggctgaactcttgccagattttgattattttcaagtagaacaatcggttaataacgaacgattgcatcatagaagtcaacagcaagcttcatcttcagtacaaacaagtgctacagtgcaattaccacagacaggtaagttatcagctatcactaaaacagaaatgcaattgtttcatcgattattgaatcatccctacctgttaaatgaattccgtaatagggataatttttattttgatacaacagaaatacaagttttatatgagttgctaaaagaaagtggtgagatcacgtcttatgatttatcacaagaaagtgacaaagttaatcgtacttattatataattttagaggaacaattacctgtagaagtatctattggagagattgaagccgtcgaaaaggcacgtgaccgtttattgaaagaacgtgatttaagaaaacaaagccagttaattagacaatctagtaatcaaggtgatgaagaaggagccttggctgcattagaaaatttaattgctcaaaaaagaaatatggaa

SEQ ID NO: 3802 - protein, 629 aa, Streptococcus agalactiae
MKKKSLKKLLKKFTQKRKNDIIKCKTIMGYFCGGHDLAIDKEKISEIKNSVNIVDVIGEVVGLTKTGRNHLGLCPFHKEKTPSFNVIEDRQFFHCFGCGRSGDVFKFVEDYQHISFLDSVQVLAERSGIPLDTNFKGQVPKKPKANQSLLDIHRVASGFYHAYLMTTNDGERARQYLAERGVTEDLIKHFQIGLSPGGQDFLYRRLAKEFDEKTLMSSGLFNYSENSNQFYDSFNNRIMFPLTNDIGEVIAFSGRVWTQEDIDRKQAKYKNSRATPIFNKSYELYHLDKARAVINKAHEVYLMEGFMDVIAAYRAGIENVVASMGTALTNEHVRHLKRFTKKVVLTYDGDRAGQNAIDKSLELLSDMTVDIVRIPNKMDPDEFLQANSAEDFKQLLENGRISNTEFYIHYLKPENTDNLQSEIAYVEKIAKLIAKSPSITAQNSYITKVAELLPDFDYFQVEQSVNNERLHHRSQQQASSSVQTSATVQLPQTGKLSAITKTEMQLFHRLLNHPYLLNEFRNRDNFYFDTTEIQVLYELLKESGEITSYDLSQESDKVNRTYYIILEEQLPVEVSIGEIEAVEKARDRLLKERDLRKQSQLIRQSSNQGDEEGALAALENLIAQKRNME

SEQ ID NO: 3803 - DNA, 1812 bp, Streptococcus pyogenes
atgggatttttatggggaggtgacgatttggcaattgacaaagaaatgatttcccaagtaaaaaatagcgttaatattgtcgatgtcattggagaagtggtcaaactttcccgatcagggcggcattacctcgggctttgcccatttcataaggaaaagacaccctcttttaatgttgttgaagacagacaattttttcactgctttggctgtggaaaatcaggggatgtttttaaatttattgaggaataccgccaagtccccttcttagaaagtgttcagattattgccgataagactggtatgtcgcttaatataccgccaagtcaggcagtacttgctagccaacacaagcaccctaatcacgctttgatgacacttcatgaggatgctgctaaattttaccatgcagttttgatgaccactaccattggtcaagaagctaggaagtacctttaccagagaggcttggatgaccaattaattgagcatttcaatattggtttagccccagatgagtcagattatctttatcaagctctttctaaaaaatacgaggaaggtcaattggttgcttcaggattgtttcacttgtccgatcaatccaataccatttacgacgcctttcgaaatcgtatcatgtttcccttatcagatgaccgagggcatattattgccttttcaggacgtatctggacggcagctgatatggaaaagagacaggcaaagtataaaaattcaagaggaacagttctttttaacaaatcttatgaattgtatcatctggacaaggcaaggcctgttattgccaaaacccatgaagtgtttctaatggaagggtttatggacgtgattgccgcttaccgttccggctatgaaaatgctgttgcttcaatggggacggcattgactcaagaacatgtcaatcaccttaagcaagtcactaaaaaagttgttttgatttatgatggtgacgatgctggacaacatgctattgcaaaatcactagaattgcttaaagattttgttgtcgaaattgtcagaatccccaataaaatggatcctgacgaatttgtacaacggcattccccagaagcatttgcagatttgcttaagcagtcacggatcagtagtgttgaattttttattgattacctaaaacctactaatgtagacaatttgcaatcacaaattgtttatgtggagaaaatggcaccattgattgctcaatcaccatccatcacagctcaacattcgtatattaacaagattgctgatttgttgccaaactttgactattttcaagtagaacaatcagtaaatgcattaaggattcaagataggcaaaaacatcaaggtcaaatagctcaagccgtcagcaatcttgtgaccttaccaatgccaaaaagtttgacagctattgctaagacagaaagtcatctcatgcatcggctcttacatcatgactatttattaaatgaatttcgacatcgtgatgatttttattttgatacctctaccttagaattactttatcaacggctgaagcaacaaggacacattacatcttatgatttgtcagagatgtcagaggaagttaaccgtgcttattacaatgttttagaagaaaaccttcccaaagaagtagctcttggtgagattgatgatattttatccaaacgtgccaaacttttagcagagcgcgatcttcacaaacaagggaaaaaagttagagaatctagtaacaaaggcgatcatcaagcggctctagaagtactagaacattttattgcgcagaaacgaaaaatggaa

SEQ ID NO: 3804 - protein, 604 aa, Streptococcus pyogenes
MGFLWGGDDLAIDKEMISQVKNSVNIVDVIGEVVKLSRSGRHYLGLCPFHKEKTPSFNVVEDRQFFHCFGCGKSGDVFKFIEEYRQVPFLESVQIIADKTGMSLNIPPSQAVLASQHKHPNHALMTLHEDAAKFYHAVLMTTTIGQEARKYLYQRGLDDQLIEHFNIGLAPDESDYLYQALSKKYEEGQLVASGLFHLSDQSNTIYDAFRNRIMFPLSDDRGHIIAFSGRIWTAADMEKRQAKYKNSRGTVLFNKSYELYHLDKARPVIAKTHEVFLMEGFMDVIAAYRSGYENAVASMGTALTQEHVNHLKQVTKKVVLIYDGDDAGQHAIAKSLELLKDFVVEIVRIPNKMDPDEFVQRHSPEAFADLLKQSRISSVEFFIDYLKPTNVDNLQSQIVYVEKMAPLIAQSPSITAQHSYINKIADLLPNFDYFQVEQSVNALRIQDRQKHQGQIAQAVSNLVTLPMPKSLTAIAKTESHLMHRLLHHDYLLNEFRHRDDFYFDTSTLELLYQRLKQQGHITSYDLSEMSEEVNRAYYNVLEENLPKEVALGEIDDILSKRAKLLAERDLHKQGKKVRESSNKGDHQAALEVLEHFIAQKRKME

SEQ ID NO: 3805 - DNA, 441 bp, Streptococcus agalactiae
ttggatttctcaaaagaaatctgctataatgaacgtgaattaaataatattaaggagcttgttcacatgattaaagaactaaaagaatttttatttaagggtaatgttttagaccttgctgttgctgttattttaggtgcagcttttaatgctatcatcacttcacttgttaaagacgttattacaccgcttatccttaatcctgtattaaaagctgctggcgtttcaaatatcgcacagctttcatggaatggtgttgcttacggtaatttcttaagtgcagttattaatttcttaatcgttggtactactttattcttcatcgttaaagctgctaacaaggttatggctaagaaacctgctgaagaagaaattattgaagttgttgaaccaacacaagagcaattacttgctgaaatccgcgacttactcgctaacaaa

SEQ ID NO: 3806 - protein, 147 aa, Streptococcus agalactiae
MDFSKEICYNERELNNIKELVHMIKELKEFLFKGNVLDLAVAVILGAAFNAIITSLVKDVITPLILNPVLKAAGVSNIAQLSWNGVAYGNFLSAVINFLIVGTTLFFIVKAANKVMAKKPAEEEIIEVVEPTQEQLLAEIRDLLANK

SEQ ID NO: 3807 - DNA, 360 bp, Streptococcus pyogenes
atggttaaagaattaaaagcatttttgtttagaggaaacattattgaacttgctgtagcagttatcatcgggggagcttttggtgctattgtcacttcttttgtgaacgatattatcacaccgcttattttaaacccagctttgaaagctgcaaatgttgaaaacatcactcaattgtcatggaatggtgttaaatatggtagctttttaggagccgttattaattttcttatcatcggtaccagtcttttctttgttgtaaaagccgctgaaaaagctatgcctaaaaaggaaaaagaagctgcagctcctactcaagaagaattattgacagaaatccgtgatttgttggctcaaaaa

SEQ ID NO: 3808 - protein, 120 aa, Streptococcus pyogenes
MVKELKAFLFRGNIIELAVAVIIGGAFGAIVTSFVNDIITPLILNPALKAANVENITQLSWNGVKYGSFLGAVINFLIIGTSLFFVVKAAEKAMPKKEKEAAAPTQEELLTEIRDLLAQK

SEQ ID NO: 3809 - DNA, 108 bp, Streptococcus agalactiae
gtgactaaagctggtactcttcaagaatcacgtaaacgtgaattctacgaaaaaccttctgtaaaacgtaaacgtaaatcagaagcagctcgcaaacgtaaaaaattc

SEQ ID NO: 3810 - protein, 36 aa, Streptococcus agalactiae
MTKAGTLQESRKREFYEKPSVKRKRKSEAARKRKKF

SEQ ID NO: 3811 - DNA, 210 bp, Streptococcus pyogenes
gtgaaaatgttacaatatcttgaggaggtgaaacacatgtcaaaaacagtagtacgtaagaatgaatctcttgacgatgctcttcgtcgcttcaaacgttctgttactaaagctggtactcttcaagaatcacgtaaacgtgaattctacgaaaaaccttctgtaaaacgtaaacgtaaatcagaagcagctcgcaaacgtaaaaaattc

SEQ ID NO: 3812 - protein, 70 aa, Streptococcus pyogenes
VKMLQYLEEVKHMSKTVVRKNESLDDALRRFKRSVTKAGTLQESRKREFYEKPSVKRKRKSEAARKRKKF

SEQ ID NO: 3813 - DNA, 1443 bp, Streptococcus agalactiae
gtgaaaaaaacaattggtattataggtatgggagttagtggtttagctgttctactagcactttctcgtaaaaaagagaaagagttaaaacagttagctattttttgttttgatgatactgtccactttggacgaggaattccttttcaagaagacgttgactcagctttaatcaattccccaatcaacgatatttcatttgattatcgccatatgtctgacttcatggattggttagaagaaaattactatgacacaaatctaacctatgtatcaaggacactttacggacaatacctttcagaaagaactaagttacttttagataaactccctgtcacggttattaaaacaagagtggataaactaaactatttatcagatgagcaacaatggcaagtctatattcaagataagctttttcctgtcacatttgatgaattacacttagcttgtggtgctctgcctgttatagaaccttatcatttggaagggaagaccgattatatcaaagacccttatcctatcaaatacttggctcaggaaaattggaagggaaaaacagttgctatcatcgggactggtctagctgcaattgatgttataaaatggttgctactcaatacacaatcttctgttaaagcattttcaagaaccaactacttccctagcgtccgtattgttaatgatttaccacttacttggcacttttttaccaatgataaccttaaagcatttctatcacatccttcaaaaaccttcactattgccgattttaatgatttgatgtctggcgaattggagcatcttggctttaaaaactggaaaaatacaacagaaacttttttatccccaggaattgatggtctcaagttagcctttaaataccctaagcaactctatctattacaacaattagcttcacgaatcactgtctggttaactgacctttggccactcatgtcattatcagataagaaagagtataaagcactctatggaaaagcgattattaacttgcgaaatcctatgcctgatgaatctgctaaagtaattttgaaagctgcacaaaaagggactttttctctgatcaataacgtcaagacaattacaaaaaatgacgaaggattttcaatagaaaaagaaaaacaaaatcatatatctgtcgatcgcgtcattaacgctactggttaccagttaaacactaaaaactggacaaaagccaatccacttctaaaatcgctcatcaatcaagaattttgtcaaattgacgatcaaggagggattactattttaactgaaaatgcacaagttttgtctccaaaatatggtccaatgccaggtttatatgcgcatggtgcactggttaatggtgtcgtttatcagaataactctacaattaaaattcaacaaatggcagagcgagccttttctgataataaa

SEQ ID NO: 3814 - protein, 481 aa, Streptococcus agalactiae
MKKTIGIIGMGVSGLAVLLALSRKKEKELKQLAIFCFDDTVHFGRGIPFQEDVDSALINSPINDISFDYRHMSDFMDWLEENYYDTNLTYVSRTLYGQYLSERTKLLLDKLPVTVIKTRVDKLNYLSDEQQWQVYIQDKLFPVTFDELHLACGALPVIEPYHLEGKTDYIKDPYPIKYLAQENWKGKTVAIIGTGLAAIDVIKWLLLNTQSSVKAFSRTNYFPSVRIVNDLPLTWHFFTNDNLKAFLSHPSKTFTIADFNDLMSGELEHLGFKNWKNTTETFLSPGIDGLKLAFKYPKQLYLLQQLASRITVWLTDLWPLMSLSDKKEYKALYGKAIINLRNPMPDESAKVILKAAQKGTFSLINNVKTITKNDEGFSIEKEKQNHISVDRVINATGYQLNTKNWTKANPLLKSLINQEFCQIDDQGGITILTENAQVLSPKYGPMPGLYAHGALVNGVVYQNNSTIKIQQMAERAFSDNK

SEQ ID NO: 3815 - DNA, 669 bp, Streptococcus agalactiae
atgctcgaattaaaaaatattgcttatcgttataaggggaacgacaataaaacattagaaaatatcaattatagttttcagtcaggggtattttatactatattagggaattctggttcagggaaaacaacccttctatccttgatggcaggtcttgattcgcctactgagggacaagtattatttaacaaaaaagatattaaagaagcaggttatgctcagcatcgcaaaaagaatatagctttggtctttcaaaattataaccttttagactatctaaccccattggaaaatgttcagttggtaaaacctactgcagataaacaattattgttggatttaggtttaaaagaagatatgttaacgcgaaatatcttgagattatcaggagggcaacaacaacgtgtagctattgcgagagctttggttgtaggaacaccagctattttacttgatgaacctacggggaatttagattttgacatttcgcgtgatattacgatgcgtcttaaagattttgcgcataaggaaaaacgatgtgttattatggtgacacatagtagagagatcgctcatatggctgatactgctttacaattgataggagataacttaaaagaattatcaaaagaaagtatagcacagtctatattacaacaaaggaattta

SEQ ID NO: 3816 - protein, 223 aa, Streptococcus agalactiae
MLELKNIAYRYKGNDNKTLENINYSFQSGVFYTILGNSGSGKTTLLSLMAGLDSPTEGQVLFNKKDIKEAGYAQHRKKNIALVFQNYNLLDYLTPLENVQLVKPTADKQLLLDLGLKEDMLTRNILRLSGGQQQRVAIARALVVGTPAILLDEPTGNLDFDISRDITMRLKDFAHKEKRCVIMVTHSREIAHMADTALQLIGDNLKELSKESIAQSILQQRNL

SEQ ID NO: 3817 - DNA, 318 bp, Streptococcus agalactiae
atgattgctattccagcctttgctttatcagtacttatcagtcaatttattggtcaaaaattagcagactccttagtgtatcaggcctctagaactgtcagagcagactttatgaaagggtttgggaatatgcagcttggggctgatagtgatacagatatgtttatgcaaacgattaagacgttaaatgtacaagtgaagcctgaggaagtctggttagtaattctagttggtttagcaatcgtcttatttgctattattactactagtttaattattgctcgctacaaaccaaggggaatcttatcaaaactgtcc

SEQ ID NO: 3818 - protein, 106 aa, Streptococcus agalactiae
MIAIPAFALSVLISQFIGQKLADSLVYQASRTVRADFMKGFGNMQLGADSDTDMFMQTIKTLNVQVKPEEVWLVILVGLAIVLFAIITTSLIIARYKPRGILSKLS

SEQ ID NO: 3819 - DNA, 264 bp, Streptococcus agalactiae
atgttttcaaaagaccccgttagaaacagtaaggataaaacattagttgaagcaactattgttggcatatataaaggtaaaacggtacaaaaatcaaattacccttatgagatgctagaaaatacagccttttcagatacgcaattgattaaggatttatacggctattctaaaggtaaggccttttatcgccaaacaactgtatatcctaaaaagaatgctgatatagaaactcttaaaagttttatcaaaaaacaatcctat

SEQ ID NO: 3820 - protein, 88 aa, Streptococcus agalactiae
MFSKDPVRNSKDKTLVEATIVGIYKGKTVQKSNYPYEMLENTAFSDTQLIKDLYGYSKGKAFYRQTTVYPKKNADIETLKSFIKKQSY

SEQ ID NO: 3821 - DNA, 441 bp, Streptococcus agalactiae
atgaatttatttaaacgttcctttttatatgttagccgtaaaaagcgtaagagtatcactttattcgtatgtttatggctagttgcttctacattaattagcggtattgcggtaaaaaatgctggtcttactgctaagaagacattttcaaggcaaactggatcaattttgcatatttcatcggatagtactgaccttgttggtgatggttacggatctggagaaatccctgaaaaagcaatagttaacatagcaagtaatccaaatgttaagcgcgttaataataatttgatggcttatgctggactaacctcggaaaaaatggttacacgaccaaatgataaagaacaatataaagaacaagttttacaagttcatggtaatagttactccgatacagatcctaaatacacagcggggatgatttctcttaagggaggg

SEQ ID NO: 3822 - protein, 147 aa, Streptococcus agalactiae
MNLFKRSFLYVSRKKRKSITLFVCLWLVASTLISGIAVKNAGLTAKKTFSRQTGSILHISSDSTDLVGDGYGSGEIPEKAIVNIASNPNVKRVNNNLMAYAGLTSEKMVTRPNDKEQYKEQVLQVHGNSYSDTDPKYTAGMISLKGG

SEQ ID NO: 3823 - DNA, 1317 bp, Streptococcus agalactiae
ttgatagataacgtagaagtcgatagagaatatctaacgacttctatcgttattctagagattattaagatagaaaaaggagggaaaatagtgaacctatggacattaagtttagcttatttgaaacgtcaaaaaatgaaaacagtaaccttgttcttagtttttctaactataggcacatgtttaatcagtctgatgagtattcagcattctttggaaaaaaatatcctaacaaaacaagggaaaagcatttatttaacctccaaagaaaaggcttattggcctgaacaagcatacgaagctttgaaaaaagcaaaaatggttgagtcagtagaggcaagtttaagcattgatgttggtagccgtttaaaatctgtatcaccatataactcttctaaagaagagaatcaagttacattagcaggttatcaaagtacagaagatttacgagcttttcagacaaaagcattggtcttaaagaaaggaagccatttagcggccgataatacaaaacaagtactagttccattgaagttagcacaaaagaatcatttaagtgtgggtaacaaattgagattaggcaaagaaaatgttactattgcaggaatttatgatgcgaatagtgctaagtctaaaaatacttttaatcccaatattgataatacattgattgctcaggcaacattggttaggaagattagtaaacaaaaaggttatcagacggttgcagtgcgcttaagtgataaacgtttagtggatacagttatccaaaacatcaaacaatggccgcttgatttcgggaaattagatgttcaaacagctaaagagttttatggagattcttatcgtaatatcgagacattgcatcgtctagtgggacgaatcattcttattgttagtctcgtggcgatggcaatattagttgtcatgctaacattttggattaataaccgcattaaagagacgggaattttactcgctatcggaaaaactaagtttgaaatcataggtcattatctgatagaagtactgttagtagcaggtgctgccttcacactatctattattggtggtgtctttcttggaaaaacatttgcagctggccttttatcacaagttaatggtggtgtgagttcacaaattgtacaaaatagtagtctaattattgatagaattgataacctcgctgtttctgttggagtaatggatgtctttagactctatgctcagggtgctttaatttgcttatttgcagttgtattatctagttattctattcttaaactacaaccaaagcaaatattgtcacgaatgtca

SEQ ID NO: 3824 - protein, 439 aa, Streptococcus agalactiae
MIDNVEVDREYLTTSIVILEIIKIEKGGKIVNLWTLSLAYLKRQKMKTVTLFLVFLTIGTCLISLMSIQHSLEKNILTKQGKSIYLTSKEKAYWPEQAYEALKKAKMVESVEASLSIDVGSRLKSVSPYNSSKEENQVTLAGYQSTEDLRAFQTKALVLKKGSHLAADNTKQVLVPLKLAQKNHLSVGNKLRLGKENVTIAGIYDANSAKSKNTFNPNIDNTLIAQATLVRKISKQKGYQTVAVRLSDKRLVDTVIQNIKQWPLDFGKLDVQTAKEFYGDSYRNIETLHRLVGRIILIVSLVAMAILVVMLTFWINNRIKETGILLAIGKTKFEIIGHYLIEVLLVAGAAFTLSIIGGVFLGKTFAAGLLSQVNGGVSSQIVQNSSLIIDRIDNLAVSVGVMDVFRLYAQGALICLFAVVLSSYSILKLQPKQILSRMS

SEQ ID NO: 3825 - DNA, 1059 bp, Streptococcus agalactiae
atgaataaaataacgacattatcaaccatcgccctgactttaatgctttgcgttggatgttctgccaataaagataatcaaaaaactaaaactgaggatcctaagcaagaaaacgtaactgcaaatccgaaggaagacaaggcaacagcagccaagcgaatgaagttaacgaaagaacttgaaaaatataataaaggcacagagagctttattagtaacaaacaatatcaaaaatatatcaaaacacctatcaaagaatatggtcaaaaggttgaagtcaaaggcaagaagatgaatgtctatactgttggagaaggtaaagtaccaattgtctttattcctggtcaagggacggtgactgccaaacatcagtaccataatttgattagtaatttaagtaaaactcataaggttgtggtagttgagccatttggttcaggtttaagtgatgtcattgaccaaccacgaaatctagctaatattacctcagatatccacgaagctttacaaaaagttggtattaccggaaaatatgtaattgcctctcattcaattggtggtgtttatgcccttaaatacatcagtacttatccaaaggaagtgctaggattaataggtttagatacatcaacgccgggtatggaaggtggtaagcaagttgatttcgctgctccagtgttaaaagaattacctaaaattcctaaagtatccgacgatattaatgcacaattttttgctattggacataagatacttaataattctaatatgaaagaagaagcgaagaattcttctaatatgattaacgaaagtgccaactataagattccaaagggaattcctgctatgtatttattagcacgtgaaagtgacttagggcttcaattacgtagtttagatataccaattaaaggcagttggcaagagcaacataaggagttatcagaagatccaaaagaagtctctattcatacactagacggaactcaccaaatttatgatactaaccttaaagaagtaattgattatactaaccaatttatgaaaacatttgagaaa

SEQ ID NO: 3826 - protein, 353 aa, Streptococcus agalactiae
MNKITTLSTIALTLMLCVGCSANKDNQKTKTEDPKQENVTANPKEDKATAAKRMKLTKELEKYNKGTESFISNKQYQKYIKTPIKEYGQKVEVKGKKMNVYTVGEGKVPIVFIPGQGTVTAKHQYHNLISNLSKTHKVVVVEPFGSGLSDVIDQPRNLANITSDIHEALQKVGITGKYVIASHSIGGVYALKYISTYPKEVLGLIGLDTSTPGMEGGKQVDFAAPVLKELPKIPKVSDDINAQFFAIGHKILNNSNMKEEAKNSSNMINESANYKIPKGIPAMYLLARESDLGLQLRSLDIPIKGSWQEQHKELSEDPKEVSIHTLDGTHQIYDTNLKEVIDYTNQFMKTFEK

SEQ ID NO: 3827 - DNA, 1044 bp, Streptococcus agalactiae
atgaaatacctaagtcaaggagaaaaaatgaataaaataacgaaattatcaaccgttgccctcgctttgatgctttgcgttggatgttctgccaataaagataatcaaaaaactaaaactgagcagcctaagcaagaaaagtcaatcgctaagcaaaaacaagagagagaagcagaaaaagctatgattgctaaaggtgctattgacctaactaaatataaagcgaaaccaattgaagattacggacaaaaaattgatgtcggtgacggtaaaaaaatgaacatatatacaatgggtcaagggaaaattccgctagtagtcttccctggtcaagctgaaatttcaccacgttatgcttacaaaaacttgcttgatagattagggaaaaaatataaaatttatacggttgaaccgctcggttatgggcttagtgatatgacagataagccacgtacgattgaaaatattaccaaagagattcatacagctcttgaaaaagtcggtgtcaaaaatttctatcttatggctcactcgttaggtggcatatacggtctaaattatgctaagacatattctaacgatgtcaaaggtttcattggcatggatacaagcacaccaaatatggaaggtgatggcacaactggagaatcttcagcttcaaccttaaaatgggcagaatccattccagaagttgataagaaaaccaatgaacaatacttatcaatcggtgctaaaaaatcaggtaataaaacagagcgcgataaagataggcgtgttagtgacaatcttcataaaatggaaaaagttaagttccctaaaggtatgccagctaagtatttcttagctaatgagtcagcagaagatataaaaatgcgtaaaaaaatattccctaagcttaaaagctgggaacaacaacatattgacttatctgaagatccaaaagacgtttctgttgagacactagatgctagccacttgatttatcatacgcaatataaacatatggcgaaggctattgacgagtggattcaatcgcatgaaaaa

SEQ ID NO: 3828 - protein, 348 aa, Streptococcus agalactiae
MKYLSQGEKMNKITKLSTVALALMLCVGCSANKDNQKTKTEQPKQEKSIAKQKQEREAEKAMIAKGAIDLTKYKAKPIEDYGQKIDVGDGKKMNIYTMGQGKIPLVVFPGQAEISPRYAYKNLLDRLGKKYKIYTVEPLGYGLSDMTDKPRTIENITKEIHTALEKVGVKNFYLMAHSLGGIYGLNYAKTYSNDVKGFIGMDTSTPNMEGDGTTGESSASTLKWAESIPEVDKKTNEQYLSIGAKKSGNKTERDKDRRVSDNLHKMEKVKFPKGMPAKYFLANESAEDIKMRKKIFPKLKSWEQQHIDLSEDPKDVSVETLDASHLIYHTQYKHMAKAIDEWIQSHEK

SEQ ID NO: 3829 - DNA, 1029 bp, Streptococcus agalactiae
atgaagaatataacaaagctatcaactgttgctttaagcctactactttgtacggcgtgtgctgcatcaaacacgtctacatctaaaacacagtctcatcatcctaaacaaactaaactcacagataagcaaaaagaagaacccaaaaacaaagaagctgctgatcaagagatgcatccccaaggcgctgttgatttgacaaaatataaggcaaaaccggtcaaagattatggtaaaaaaatcgatgttggtgatggcaagaaaatgaacatttatgaaactggtcagggaaaaattccaattgtttttattcctggtcaagctgagatttcgccacgctatgcttataagaatttaattgagcggttaagtaaaaaatataaaatttatacagtagaaccattaggctatggtctcagtgatattcctactaaaccacgtacgctagaaaacattacaaaagaaattcacacaggcctaaataaaattggagttaaaaatttctaccttgcagctcactcacttggcggtatgtattctttaaattatgctaaaaattatccagaagaagtcagaggatttattggtatggataccagtacaccttggatggaaggggaacaaaaaacaaagtatgaccctgaaagtgctaaatgggcaatgaaattaccagatgttgatgataagactaacgaacagtatctgtcaattgcgaaaaaaattaacggcaataagtctcaacgagatgaagatgagcgcttaggtgataatcttggtaaattgaagaatgtaaaattccctaaagggatgccaactaagtattttcttgctgatcaatctgtggagggaatcaagctacgtcaagcagattttaaaggtttgaaaaattgggatcagcagcatattgatttatctgaagatccaaaagatgcttccgttgaaatttttaaaggtagtcacaatattttccaaacacaatatgaacatatggctaaagctattgatggatttatccaatcccatcaaaag

SEQ ID NO: 3830 - protein, 343 aa, Streptococcus agalactiae
MKNITKLSTVALSLLLCTACAASNTSTSKTQSHHPKQTKLTDKQKEEPKNKEAADQEMHPQGAVDLTKYKAKPVKDYGKKIDVGDGKKMNIYETGQGKIPIVFIPGQAEISPRYAYKNLIERLSKKYKIYTVEPLGYGLSDIPTKPRTLENITKEIHTGLNKIGVKNFYLAAHSLGGMYSLNYAKNYPEEVRGFIGMDTSTPWMEGEQKTKYDPESAKWAMKLPDVDDKTNEQYLSIAKKINGNKSQRDEDERLGDNLGKLKNVKFPKGMPTKYFLADQSVEGIKLRQADFKGLKNWDQQHIDLSEDPKDASVEIFKGSHNIFQTQYEHMAKAIDGFIQSHQK

SEQ ID NO: 3831 - DNA, 108 bp, Streptococcus agalactiae
ttgagagctaacatcccagtacgtaatttccaagaattttatgatgcctttggtgttaaaaaaggcgattcaatgtatctaaaaccagaaaaacgtttgacactttgg

SEQ ID NO: 3832 - protein, 36 aa, Streptococcus agalactiae
MRANIPVRNFQEFYDAFGVKKGDSMYLKPEKRLTLW

SEQ ID NO: 3833 - DNA, 816 bp, Streptococcus agalactiae
ttgggtgattattatggtaagaaatattttggtgaggcagctaaaaaagacgtcgaacatatggctaagaaaatcattaatgtctataaaacacggttaaaaaacaacacttggttatcagaaaatacaaaagcaatggccattaagaaacttgataacatgagattaatgattggctatccagaagattatcctgatctttatcgtcagtaccaatttgatagtaaagcaagcttctttgaaaacaatgataactacagaaaattatcgaacaagaaaacatttgaagaatttaaccagtctaatcaacgtgaacattggcaaatgagtgccaatgctgtaaatgcttataatgatcctaataccaattccatagtctttccagcagcgatttttcaatcaccactctacgataaaactaaaacagttagtcaaaattatggagctatcggagcaattattggtcatgaaatttcacactcatttgatattaatggtatgaaatatgacgagaaagggaatcttcacgattggtggactaaagaagatttaaaacattataagaaaaaaacacaagctatgattgaccaatgggatggccttaaagcagatggcggtaaagttgatggtaaattaactttagcagaaaatattgcagataatggtggtgttatggcatctctagaagctcttaagactgaaaaaatccaaactataaagaattttttgaatcatgggcaagtatttggcgtcaaaaagcaaccaaagaacaaagtaagtcctcaattcagtcagatgttcatgcaccatatgaat

SEQ ID NO: 3834 - protein, 272 aa, Streptococcus agalactiae
MGDYYGKKYFGEAAKKDVEHMAKKIINVYKTRLKNNTWLSENTKAMAIKKLDNMRLMIGYPEDYPDLYRQYQFDSKASFFENNDNYRKLSNKKTFEEFNQSNQREHWQMSANAVNAYNDPNTNSIVFPAAIFQSPLYDKTKTVSQNYGAIGAIIGHEISHSFDINGMKYDEKGNLHDWWTKEDLKHYKKKTQAMIDQWDGLKADGGKVDGKLTLAENIADNGGVMASLEALKTEKIQTIKNFLNHGQVFGVKKQPKNKVSPQFSQMFMHHMN

SEQ ID NO: 3835 - DNA, 1092 bp, Streptococcus agalactiae
gtgtcatttatgcaaagaaaatcctatttaaaatccatgagtgttcttactttaacagcttgtcttatatcaggatatgtggttaaagatattgctatgttacatgcagtatctgccagtgagaagaaagcaaataatgtcagtccgagagaaaatctctacagggctgtcaatgataattggctagccaatacaaaactcaaacaagggcagactagtgttaatagtttttcagaaattgaggataaattaaagcaactgttagtgtctgatatggctaaaatggcctcaggaaagattgaaacaaccaatgatgaacagaaaaaaatggttgcatactataaacaaggtatggactttaaaacaagagataaaaatggtctcaaacctctaaaaccagttttacaaaaacttgaagcagtctcttcaatgaaagactttcaaagtttggcccatgattttgtgatgagtggttttgttttaccatttggtttgactgtggaaaccaatgctcgagataatagccaaaagcaattggtgcttcgtcaagcacccgcattacttgaatcacctgaccaatataagaagggcaataaagaaggtgaggctaaattatcagcttaccgtacttcagcaatggctttgcttaaacaagctggaaaaagtaacattgaagatagaaaactagttaaacaagctatagcatttgatagactcttatcagaaaaaacgcaagttgatcaaagtaaaatcacagctgaaagtgagacagctgcggggcgatataaccctgaaagtatggaaacggttcacaattacgccaaggaatttgactttaaagaattgattgaaaaactagttgggccaacgaataaggcagtcaatgtagaagataaaacttattttaaacaggttaatgatgttataaatagtaaacaattagccaatatgaaagcatggatgatgatttctatgctagttgatcaatcagattttctaggagaacaaaatcgtcaagcagcgagtgcttttaagaatgttgcgtctggtttgactcagattgaatcgaaagaaaaaatgcttacacccaat

SEQ ID NO: 3836 - protein, 364 aa, Streptococcus agalactiae
MSFMQRKSYLKSMSVLTLTACLISGYVVKDIAMLHAVSASEKKANNVSPRENLYRAVNDNWLANTKLKQGQTSVNSFSEIEDKLKQLLVSDMAKMASGKIETTNDEQKKMVAYYKQGMDFKTRDKNGLKPLKPVLQKLEAVSSMKDFQSLAHDFVMSGFVLPFGLTVETNARDNSQKQLVLRQAPALLESPDQYKKGNKEGEAKLSAYRTSAMALLKQAGKSNIEDRKLVKQAIAFDRLLSEKTQVDQSKITAESETAAGRYNPESMETVHNYAKEFDFKELIEKLVGPTNKAVNVEDKTYFKQVNDVINSKQLANMKAWMMISMLVDQSDFLGEQNRQAASAFKNVASGLTQIESKEKMLTPN

SEQ ID NO: 3837 - DNA, 3243 bp, Streptococcus agalactiae
ttgaataataaaggtgtcggtggcgatggtgtccaaatttatcaatactatatcaaaatggacaacaataaaccttacttaagtcccaaagataagactactgtagagaagttagaagatcgctggaaaaaaattactttcaaagttcaggatactggcattggtttgaaagacgtttatcttcaatctgttaagtatgttggtggtggcaataataatttagaccttatcacacctccaggatttaaaaaagaagataaaaaagttgaaaaaccaaaattagaccgtccaccaggaattgatttaccagcaccaacttcaatgagaagttttgattattcaaccccaccgggaactaagccaagcaaacccaaagatagtttatcaactcctccaggtttcccagatttaaacacgccgccggatgaagcaccaaaggatagtaaaaaagacgctattgaagataaatcaggagcaattaaatatgctaagtctcttcaacttagctttgttgatggccctattttagctagcaaagtaaatggcaaaatattacaagtcgaatctgatggcaaattagtcattcctagaaatgctttgtcagctaatcaatttgatgacactagtcttaaaatttatcgtaataataatcgcaataaagaaattactatcacaacagattattttgcagatacaaaatatgtcaatatcacagcggttgactatttgagcaatactacttttgagcaattagctactggtgaaacagtagattaccatgccattgtattttcaagctttgctgctattaaagacaagggtggtaagatttatgttaacgataaattgcaagaaacttctcgtatagcgcttaaagataaatctgttaagattggtattgaattaccaaatgatgtcagacatattgatagtttatctgttcgtcgtttgaatgaggttaaaactgttgataatatcttgaaaaatgatgaacaagacattaatctcagcaaaacttaccaattaaaatacaacccgacaaatcgtcgtctagagtttactattaataacattaactcaagttcagaaatcatgaccactttcaaagatggaaagatgccagaattggttgaacaaaaagatgtttctttggatataaacgatatggacatgagtaagtttaaaactattcgacttggacgaaaggattctgaatttaagggacaacttattgcaaaaactggaacagttgaattagatatgtttttcaaacaatctcaagacccagcttcaattattaaaaaaatataccttatccaaaatggtgttccaaatgaattgaaaaaatttgactctagttttggtttaactgaaagtcagatagatggatactatatttataaagatgcaattaaccttaaatttaaattaaccagtggtgcaagtcttaaagttgtttataaagggcaagaagatccatatagtcatcagaaagaagatatgactaaaaaaggtgaacagctcagtcattcaactcaagccaatgaaaatacagcaaaagtaacctttgctaatattgactggtcacattatagtaaggttactgtgaatggaaaagaagttgttaaaggtagtgagttacctttaactaaaggatggacaacatttgtattacataaaacagaaaattcattaaatgttaaaagtttgattatggagacgggtagtgtaagtaagaaagttcaacaacttcctttaagtcctagattatctaaaaataagcatatgagggatatgctacttactatgcaaaaagattcagcgtattacgaaacaagtgacagtctagtccttcgaattaatctcactgcagatactaaacttaattttaatgctgttaaaggagcgagtgctcttactgaaaatatgatgatgagacagtttgcagttgctggaccacaagatgatcctgttagtgaacataaatacccatcagtatttctcttaactcctgccttattggaaactgctagtgaggcaactctaaatggtaaggaaatcacagcatctggtattatcggtcacatcaaggatggtgataaaagcaagcatgttgaagtcaaaatggtgaatgaaaatggagacatgctaggaacccctgttattattcaaggtaaagacttgactaatcgaacaaaaccattaatgagtggacgtagagtactttatgccggtaaacaatatgagttccgggctaaattaccacttagtcgttttaacacttggattagggttgaagtggtaacagaagcaggagagaaagcaagtattgttcgtcgcatgttctttgaccaatcagttccagagcttaacacagcagttgctaaacgtgatttgacttctgatactgctcttatccacatcgttgccaaagatgactctctaaaactaaaattatatcaagatgattcattacttgaatctgttgataaaaccggtctttatagttttagaaatggtgtagaaatcactaaagatatgacagtaccactagaatttggagataatattattaagttatctgctgttgacttatcaaattatcgtcgtaatgagacccttcatatctatagaaaccgttttgatgttaaagcaagccaaatgacagctgacaaaggagctaaagtaactgtggatatgttgatgaagcacttagttgttccagaaatggcaggagcttatacattaacaatcgacgaagctccaaacacaaatgaatcaggaatgttaacaaacgctaaagtatcgattcattatgtaaatggtggtgttgataaagttgatgttccgattaaagtagttgacttagaagctattcgtaaagctgaagaagcacgtaaagctgaagaagcacgtaaagctgaagaagcacgtaaagctgaagagggacataaaacccaagaagcacctatagttgaagaaggctacaaggttaataacgttcatcaaactgatactacagttaaagcgtctgatttaccaaagactaagacagtttccgcagttcatatggctagaacagacaataaacagataacttcacatcagacacatgttgaaaaacaaattaaaaatacattgccatccactggtgacagcaaacgtggttattatatcactggaatggctatcgttatgctgagtgtattatttagtttagctaaaaagtttaaaagcaaatat

SEQ ID NO: 3838 - protein, 1081 aa, Streptococcus agalactiae
MNNKGVGGDGVQIYQYYIKMDNNKPYLSPKDKTTVEKLEDRWKKITFKVQDTGIGLKDVYLQSVKYVGGGNNNLDLITPPGFKKEDKKVEKPKLDRPPGIDLPAPTSMRSFDYSTPPGTKPSKPKDSLSTPPGFPDLNTPPDEAPKDSKKDAIEDKSGAIKYAKSLQLSFVDGPILASKVNGKILQVESDGKLVIPRNALSANQFDDTSLKIYRNNNRNKEITITTDYFADTKYVNITAVDYLSNTTFEQLATGETVDYHAIVFSSFAAIKDKGGKIYVNDKLQETSRIALKDKSVKIGIELPNDVRHIDSLSVRRLNEVKTVDNILKNDEQDINLSKTYQLKYNPTNRRLEFTINNINSSSEIMTTFKDGKMPELVEQKDVSLDINDMDMSKFKTIRLGRKDSEFKGQLIAKTGTVELDMFFKQSQDPASIIKKIYLIQNGVPNELKKFDSSFGLTESQIDGYYIYKDAINLKFKLTSGASLKVVYKGQEDPYSHQKEDMTKKGEQLSHSTQANENTAKVTFANIDWSHYSKVTVNGKEVVKGSELPLTKGWTTFVLHKTENSLNVKSLIMETGSVSKKVQQLPLSPRLSKNKHMRDMLLTMQKDSAYYETSDSLVLRINLTADTKLNFNAVKGASALTENMMMRQFAVAGPQDDPVSEHKYPSVFLLTPALLETASEATLNGKEITASGIIGHIKDGDKSKHVEVKMVNENGDMLGTPVIIQGKDLTNRTKPLMSGRRVLYAGKQYEFRAKLPLSRFNTWIRVEVVTEAGEKASIVRRMFFDQSVPELNTAVAKRDLTSDTALIHIVAKDDSLKLKLYQDDSLLESVDKTGLYSFRNGVEITKDMTVPLEFGDNIIKLSAVDLSNYRRNETLHIYRNRFDVKASQMTADKGAKVTVDMLMKHLVVPEMAGAYTLTIDEAPNTNESGMLTNAKVSIHYVNGGVDKVDVPIKVVDLEAIRKAEEARKAEEARKAEEARKAEEGHKTQEAPIVEEGYKVNNVHQTDTTVKASDLPKTKTVSAVHMARTDNKQITSHQTHVEKQIKNTLPSTGDSKRGYYITGMAIVMLSVLFSLAKKFKSKY

SEQ ID NO: 3839 - DNA, 2655 bp, Streptococcus agalactiae
gtgactaaaccacagggggcggttgctgagaaagctactccggctgtgccaaagcctcaaaaagtaagagtaattgttgaatttaataaggaatctatcttagattatgcgacagaacagaaaaaaacagttgcacagttaaatcaagctgatgttgagaaaaaattacaaagcatcaagcaagagcaagataaagttcttaagaatattgaaaaaagtgttcactttgattcaagcaaagtgaagcgttacgatgctattattaatggtgtcgcacttgatattcaagctcaagaaattgaaaaattaaaaacgattgctgatgttagaagggtctatgtctcacaagaatatgttcagacaaaacctttactatcttcctcagggcaacttattggtttgccagaagtttggaacaactcccagtataaaggtgagggaactgttgttgcagttattgattcaggggttgatttcaaacaccaagcactaaaaatcaaagaaccaaatcgtgctaagtataataaaactagtattgaaaaactgattcatgaaaagaatctcaaaggaaaattctattccgaaaaagtaccttatggttataactattatgactataatgataacctcaaggatagctacggtgtaatgcatggtatgcatgtaacaggtatcgtaggagctaatgatgataatcaaaaattgtatggtgttgcaccaaatgctcaaattttagcgatgaaggtattttcagatgaccaacaaaatcccacaaccttcacagatgtgtggctaaaagctctagacgatgctattttactaaaagctgatgttgttaatatgagtcttggaacacctgctggatttgtacatgaggggaaagactatcctgaacttgaagttattgcaagagcgtgtaaggcaggaatcgtcattgcagtagcagcaggtaatgaaggaaatatcactgacggtaatacttatggtgttaagccgctagcagaaaattatgatacagccttgattgccaacccagccctcgatgataataccttggctgttgcctctatggagaaccttaaaaagcatgctcatgttttgaaatttaaagataaaaaatctggaacagaagttacagaagtcattaatcttcatgttgccccaaacgcttcaaaaactattattggattggctgtagatttgggagcaggagctccttcggaattgtcaaaacattttgatttaagtggtaaaatcgccatgcttgaaattccagaagataataaatctaatggatttttagaaaaagtacaggcgattactaagttaaatccagctgctatcttgctttacaataatgcgaaggttaaagatgatttaggcagtcaattattagttgaatcagaagcagctaaatttaatattgctcgcattaccagaagcacgtataacaatatcaaaaataatagcaataaaattattactattttaacagagcgtcaagctattgataatagtttagcaggacaattatcttcttattcttcttggggacctacaccagacttacgtctaaaacctgagattacagctccaggtggtcatattttctcaactgtggaggataatcaatatgctgataaatcaggaacatcaatggctgcacctcaggtagctggggcagctgcagttttaaaacaatacattacagataaaaaaattcctgttgataatgctgctgattttattaaattactcttgatgaacactgcacagccaattatcaataaacaatcaaaagatggcaaaacaccttactttgtgcgccaacaaggtagcggagcaatgaatcttgccaaagctcttgttacgacagtcgttgcaactgtaacagggactaacgataataatgcagatggtaagttggagttacgtgaattaaaagagaaaaaatttaaagcacgcattctacttcgtaactttggaaaaactaataaaacgtatatcatctcatcagaagcgattgcggacccagttgatgaaaaaggatttcgtacgcaaaattcagaacacctagtatcaaaaaaagctgatgcagttacaaggaaagttactgtagaagcaggtaagacattagctgttgaccttgatgtggattattctgatgcagaggctttaactcgcaataatttcttggaaggttatcttaacttaaaagatactgaaggtgtagccgatttacacttaccatttttaggtttttacggttcatggacagagcaaaaagctattgatgcttttgaaggcatttctgaaattggtaacggtgacaaaaaacgtcgcgttcaattctatgttaataaagaaaccaacaagacctcatcaacctttacaactaacggcatgttgagtcttccaatctataacaatacagtatttttctctcctaatagtcctttctatgacaaagcaggagttcgtattgcagctttgcgtaatatggagtatgttcaatattctattatagatccagataccaataaagaagttcgtgtacttggtagatcacacgacgttagaaaactttatcgcctagattatcgtaatagttttgccatgatgccagattctatttgggatggtaagattaaagat

SEQ ID NO: 3840 - protein, 885 aa, Streptococcus agalactiae
MTKPQGAVAEKATPAVPKPQKVRVIVEFNKESILDYATEQKKTVAQLNQADVEKKLQSIKQEQDKVLKNIEKSVHFDSSKVKRYDAIINGVALDIQAQEIEKLKTIADVRRVYVSQEYVQTKPLLSSSGQLIGLPEVWNNSQYKGEGTVVAVIDSGVDFKHQALKIKEPNRAKYNKTSIEKLIHEKNLKGKFYSEKVPYGYNYYDYNDNLKDSYGVMHGMHVTGIVGANDDNQKLYGVAPNAQILAMKVFSDDQQNPTTFTDVWLKALDDAILLKADVVNMSLGTPAGFVHEGKDYPELEVIARACKAGIVIAVAAGNEGNITDGNTYGVKPLAENYDTALIANPALDDNTLAVASMENLKKHAHVLKFKDKKSGTEVTEVINLHVAPNASKTIIGLAVDLGAGAPSELSKHFDLSGKIAMLEIPEDNKSNGFLEKVQAITKLNPAAILLYNNAKVKDDLGSQLLVESEAAKFNIARITRSTYNNIKNNSNKIITILTERQAIDNSLAGQLSSYSSWGPTPDLRLKPEITAPGGHIFSTVEDNQYADKSGTSMAAPQVAGAAAVLKQYITDKKIPVDNAADFIKLLLMNTAQPIINKQSKDGKTPYFVRQQGSGAMNLAKALVTTVVATVTGTNDNNADGKLELRELKEKKFKARILLRNFGKTNKTYIISSEAIADPVDEKGFRTQNSEHLVSKKADAVTRKVTVEAGKTLAVDLDVDYSDAEALTRNNFLEGYLNLKDTEGVADLHLPFLGFYGSWTEQKAIDAFEGISEIGNGDKKRRVQFYVNKETNKTSSTFTTNGMLSLPIYNNTVFFSPNSPFYDKAGVRIAALRNMEYVQYSIIDPDTNKEVRVLGRSHDVRKLYRLDYRNSFAMMPDSIWDGKIKD

SEQ ID NO: 3841 - DNA, 513 bp, Streptococcus agalactiae
atgacattttataaaaagacggacaaatttggatttaggaaaagtaaagtgtgccgcagcctatgcggtgctttattgggtacagtagcagttgttagtctagctacagcaagtacagagattcacgctgatgaagcaacaacctcacctaccactgtaacgaaagtacctcagccagttcaagcagacacaacagctctaaatacctctaagactcacagtacacaagcaactacaactcctgttgaagctaaggagaataaggttgtcaaaagtgaaactgttcaatctgagagccgagtaatgcctagagataaggtagtagaaaggccagaaacagtaaaagctagtgttaactcagacgttagccaacctattacaaccacacccccaacaattaatgaaaaaacagttgagattcctaacttagctcaagatactaagaaggtagctccaaaagtaactgttacaccagaagttgttaatcagccaaagcagttgcctaaatacgag

SEQ ID NO: 3842 - protein, 171 aa, Streptococcus agalactiae
MTFYKKTDKFGFRKSKVCRSLCGALLGTVAVVSLATASTEIHADEATTSPTTVTKVPQPVQADTTALNTSKTHSTQATTTPVEAKENKVVKSETVQSESRVMPRDKVVERPETVKASVNSDVSQPITTTPPTINEKTVEIPNLAQDTKKVAPKVTVTPEVVNQPKQLPKYE

SEQ ID NO: 3843 - DNA, 573 bp, Streptococcus agalactiae
ttgaatcctttatcagaaaaagacaaagttaactatattatgatttataaaaataggcagtctacattggagaataatttatctggcgatcggttgatgagatatcaacaagcaaatagacaggtaagcaaagataaactgttaacagggagttattttgtgtaccaatgcttaaaaaagttaggttttaccaataagatttgtcaggaatctttttctagtgttagtagttatttaattggtttgccaaaggggaaaattagttactctaattctggtgactatcatattctaacctatgctcccagtggttcaactggggttgatattgagaaatacaaagatagatcagaacaaacctaccaaaactacctaggagaatcagttagtagtgatatggattctaaattattattttataaggcatggttacaaaaagaaatttcctataaatgtgggaaatctatagatattacctatcaaacaatgatagatggctatatttatggttatgcttttgataatacttttaaagtagaagcggtttacttaaaagaattattaccagataac

SEQ ID NO: 3844 - protein, 191 aa, Streptococcus agalactiae
MNPLSEKDKVNYIMIYKNRQSTLENNLSGDRLMRYQQANRQVSKDKLLTGSYFVYQCLKKLGFTNKICQESFSSVSSYLIGLPKGKISYSNSGDYHILTYAPSGSTGVDIEKYKDRSEQTYQNYLGESVSSDMDSKLLFYKAWLQKEISYKCGKSIDITYQTMIDGYIYGYAFDNTFKVEAVYLKELLPDN

SEQ ID NO: 3845 - DNA, 1248 bp, Streptococcus agalactiae
gtggtatctcttttgctattattgaaaaaaggtgataaaatgagtaaatttttatttgctcctttcatgatgaatttaggagagagccaaagattatcaaaactggctaattgtttatatgaacaaggacatgatattcatatccttggagacaattattatccatttttatttaataatgatgcttatcgctatcaccactgtgtagaagataaatctgtttataatagtaagcgatatgatgctttcttttctctttcaacagactttaattttttatcagaagaagaaattgaacgcatctgttctattgaaagagacttgttacgccaagaaaaatttgatgctgtattgacaggttaccgtctatctattgttacaagttgtcgtttagaaagcataccattaatttggattatttcaggggcaacgcatatcagtgaaattgttgaaaactcagaaggaatattgcctaatgggaagataagtaaagctagtaagcctcaaacaaaggattttatcaaaagagtaatcactacttattcaacaaatgttaaaacgtggaataactatattaaaaaatatggtggcaaaacttttaataatgctttagaattatttactggtgatctaaacttggtaacagattactctttgttttatgaatttgataaagattcgtcctataaaacgataggacctattttgatagataatgtaggtttttcaaaatgcagccaaattaatcaagacaataagactgtactgctcagctttggtacttcatttaaacgagattgggtggaatcttttttaaagacattaccaaggcattatcattatttactgacaagctgtggtgaggctataaacattccaggaagttatattgagatagttgattttattgattttaaaaccatagataaagagatttatttcgctattatacacggtgggcaaggaacagtttatgcgatggctgcacaaggtattccctttataggtatccctttctttaacgaacaattttggaatattaagaagttcagtaaagaaaagtgcgcttatttggtaaagaaacctgatgtaagagagatacgtaaagcaattagctgtcttgaaagagactatgatatctataaaagttatatgataagactaagccaaggaattaaagaagaagcagaggcatctttacaaaaagcggaggcagaaattgaatcctttatcagaaaaagacaaagt

SEQ ID NO: 3846 - protein, 416 aa, Streptococcus agalactiae
MVSLLLLLKKGDKMSKFLFAPFMMNLGESQRLSKLANCLYEQGHDIHILGDNYYPFLFNNDAYRYHHCVEDKSVYNSKRYDAFFSLSTDFNFLSEEEIERICSIERDLLRQEKFDAVLTGYRLSIVTSCRLESIPLIWIISGATHISEIVENSEGILPNGKISKASKPQTKDFIKRVITTYSTNVKTWNNYIKKYGGKTFNNALELFTGDLNLVTDYSLFYEFDKDSSYKTIGPILIDNVGFSKCSQINQDNKTVLLSFGTSFKRDWVESFLKTLPRHYHYLLTSCGEAINIPGSYIEIVDFIDFKTIDKEIYFAIIHGGQGTVYAMAAQGIPFIGIPFFNEQFWNIKKFSKEKCAYLVKKPDVREIRKAISCLERDYDIYKSYMIRLSQGIKEEAEASLQKAEAEIESFIRKRQS

SEQ ID NO: 3847 - DNA, 156 bp, Streptococcus agalactiae
atggaagcaacagatgataagatagccattttaagattttctctagcaggtaatgtttctagaggtgaatctaaagatgacaataagacaccactattatttccaccaaaagcaaacgaaaaatttaaagcatttcttattgggtattctctcttt

SEQ ID NO: 3848 - protein, 52 aa, Streptococcus agalactiae
MEATDDKIAILRFSLAGNVSRGESKDDNKTPLLFPPKANEKFKAFLIGYSLF

SEQ ID NO: 3849 - DNA, 2220 bp, Streptococcus agalactiae
ttgtatcccagaaagttggaacaaagaatgagcgtatatgttagtggaataggaattatttcttctttgggaaagaattatagcgagcataaacagcatctcttcgacttaaaagaaggaatttctaaacatttatataaaaatcacgactctattttagaatcttatacaggaagcataactagtgacccagaggttcctgagcaatacaaagatgagacacgtaattttaaatttgcttttaccgcttttgaagaggctcttgcttcttcaggtgttaatttaaaagcttatcataatattgctgtgtgtttagggacctcacttgggggaaagagtgctggtcaaaatgccttgtatcaatttgaagaaggagagcgtcaagtagatgctagtttattagaaaaagcatctgtttaccatattgctgatgaattgatggcttatcatgatattgtgggagcttcgtatgttatttcaaccgcctgttctgcaagtaataatgccgtaatattaggaacacaattacttcaagatggcgattgtgatttagctatttgtggtggctgtgatgagttaagtgatatttctttagcaggcttcacatcactaggagctattaatacagaaatggcatgtcagccctattcttctggaaaaggaatcaatttgggtgagggcgctggttttgttgttcttgtcaaagatcagtccttagctaaatatggaaaaattatcggtggtcttattacttcagatggttatcatataacagcacctaagccaacaggtgaaggggcggcacagattgcaaagcagctagtgactcaagcaggtattgactacagtgagattgactatattaacggtcacggtacaggtactcaagctaatgataaaatggaaaaaaatatgtatggtaagtttttcccgacaacgacattgatcagcagtaccaaggggcaaacgggtcatactctaggggctgcaggtattatcgaattgattaattgtttagcggcaatagaggaacagactgtaccagcaactaaaaatgagattgggatagaaggttttccagaaaattttgtctatcatcaaaagagagaatacccaataagaaatgctttaaatttttcgtttgcttttggtggaaataatagtggtgtcttattgtcatctttagattcacctctagaaacattacctgctagagaaaatcttaaaatggctatcttatcatctgttgcttccatttctaagaatgaatcactttctataacctatgaaaaagttgctagtaatttcaacgactttgaagcattacgctttaaaggggctagaccacccaaaactgtcaacccagcacaatttaggaaaatggatgatttttccaaaatggttgccgtaacaacagctcaagcactaatagaaagcaatattaatctaaaaaaacaagatacttcaaaagtaggaattgtatttacaacactttctggaccagttgaggttgttgaaggtattgaaaagcaaatcacaacagaaggatatgcacatgtttctgcttcacgattcccgtttacagtaatgaatgcagcagctggtatgctttctatcatttttaaaataacaggtcctttatctgtcatttcgacaaatagtggagcgcttgatggtatacaatatgccaaggaaatgatgcgtaacgataatctagactatgtgattcttgtttctgctaatcagtggacagacatgagttttatgtggtggcaacaattaaactatgatagtcaaatgtttgtcggttctgattattgttcagcacaagtcctctctcgtcaagcattggataattctcctataatattaggtagtaaacaattaaaatatagccataaaacattcacagatgtgatgactatttttgatgctgcgcttcaaaatttattatcagacttaggactaaccataaaagatatcaaaggtttcgtttggaatgagcggaagaaggcagttagttcagattatgatttcttagcgaacttgtctgagtattataatatgccaaaccttgcttctggtcagtttggattttcatctaatggtgctggtgaagaactggactatactgttaatgaaagtatagaaaagggctattatttagtcctatcttattcgatcttcggtggtatctcttttgctattattgaaaaaagg

SEQ ID NO: 3850 - protein, 740 aa, Streptococcus agalactiae
MYPRKLEQRMSVYVSGIGIISSLGKNYSEHKQHLFDLKEGISKHLYKNHDSILESYTGSITSDPEVPEQYKDETRNFKFAFTAFEEALASSGVNLKAYHNIAVCLGTSLGGKSAGQNALYQFEEGERQVDASLLEKASVYHIADELMAYHDIVGASYVISTACSASNNAVILGTQLLQDGDCDLAICGGCDELSDISLAGFTSLGAINTEMACQPYSSGKGINLGEGAGFVVLVKDQSLAKYGKIIGGLITSDGYHITAPKPTGEGAAQIAKQLVTQAGIDYSEIDYINGHGTGTQANDKMEKNMYGKFFPTTTLISSTKGQTGHTLGAAGIIELINCLAAIEEQTVPATKNEIGIEGFPENFVYHQKREYPIRNALNFSFAFGGNNSGVLLSSLDSPLETLPARENLKMAILSSVASISKNESLSITYEKVASNFNDFEALRFKGARPPKTVNPAQFRKMDDFSKMVAVTTAQALIESNINLKKQDTSKVGIVFTTLSGPVEVVEGIEKQITTEGYAHVSASRFPFTVMNAAAGMLSIIFKITGPLSVISTNSGALDGIQYAKEMMRNDNLDYVILVSANQWTDMSFMWWQQLNYDSQMFVGSDYCSAQVLSRQALDNSPIILGSKQLKYSHKTFTDVMTIFDAALQNLLSDLGLTIKDIKGFVWNERKKAVSSDYDFLANLSEYYNMPNLASGQFGFSSNGAGEELDYTVNESIEKGYYLVLSYSIFGGISFAIIEKR

SEQ ID NO: 3851 - DNA, 1230 bp, Streptococcus pyogenes
atgacatttaaaagagtagtggtaacaggttatggtctaacatctccaatcgggcatgatcctgaaacgttttggaacaatctgaaagctggccaaattggtattggtcctattactaaatttgacacgactgattatgcagtcaagaatgctgctgaaattcaggattttccatttgacaaatactttgtgaaaaaagatttgaaccgtttcgatagatattctctttatgctctttacgcagcgaaagaggctattaatcatgctgatttaaatattgagatggttgattccgatcgatttggcgttattgttgcttcaggtattggtggaattgcggagattgaagagcaagtgattcgcttacatgaaaaagggccaaaacgtgtgaagccaatgacgttgccaaaagcgctaccaaatatggctgcaggaaatgtcgccatgtctttaaaagctcaaggagtatgtaaatcaattaatactgcctgcgcttcttcaaatgatgcgattggggatgcctttcgtgccattaaatttgggactcaagatgtgatgatagttggtgggtcagaggcggccataaccaagtttgccattgctggcttccaaagtttaacagctctctcaacaactgaagatccaagcagaagctctattccatttgataaagaccgcaatggttttatcatgggagaaggatcaggaatgcttgttttagaaagcctagaacatgcgcaagaacgcggggcgacaatcttagcagaaattgtgggttatggaaatacctgcgatgcctaccatatgacatctccaaatcctgagggattaggagctcgtaaagccatccacttagccttacaagaagctggtattgaagccagtgctattaattatgtcaatgcgcacggaacttcaaccccagctaatgaaaaaggagagagtcaagcaattgtagccgttcttggtaaggatgttccggtgtcttcaacaaaatcgtttacgggtcaccttcttggagcagcaggcgctattgaagctattgccactatcgaggctatgcgtcataactatgttccgatgacggctgggacacaagctttatcagaggatatcgaagcaaatgtcatctttggagaaggaaaagaaacagctatcaactatgccatttcaaatacttttggatttggtggtcataatgctgtattagctttcaaatgttgggaggag

SEQ ID NO: 3852 - protein, 410 aa, Streptococcus pyogenes
MTFKRVVVTGYGLTSPIGHDPETFWNNLKAGQIGIGPITKFDTTDYAVKNAAEIQDFPFDKYFVKKDLNRFDRYSLYALYAAKEAINHADLNIEMVDSDRFGVIVASGIGGIAEIEEQVIRLHEKGPKRVKPMTLPKALPNMAAGNVAMSLKAQGVCKSINTACASSNDAIGDAFRAIKFGTQDVMIVGGSEAAITKFAIAGFQSLTALSTTEDPSRSSIPFDKDRNGFIMGEGSGMLVLESLEHAQERGATILAEIVGYGNTCDAYHMTSPNPEGLGARKAIHLALQEAGIEASAINYVNAHGTSTPANEKGESQAIVAVLGKDVPVSSTKSFTGHLLGAAGAIEAIATIEAMRHNYVPMTAGTQALSEDIEANVIFGEGKETAINYAISNTFGFGGHNAVLAFKCWEE

SEQ ID NO: 3853 - DNA, 951 bp, Streptococcus agalactiae
atgaatactatttataatacattgagaacagataaaggttataaagtttatgaggggtatttatatgaaattactggtgaagaatgtgaagaagccttagaccttgtgattcctaagaatattgtatttgcagatacagatacttgtggctacacttttttactcaatgaagatggaacagtttatgatgatgtgactttctacaaatttgatgataaatattggttggctagtcataaagctttggattcttatttagacaacatcaattttgactataccgtaacagatatttctgacgagtataaaatgctgcaaattgaaggaagatattcgggagaaattgctcagtcattttatgaatatgatatttcaacacttaattttcgtactttgatagagatgacttataaaggtgagaaaggttatcttgctagatttggtttttctggagaatttggctatcaatttttcctaccatcttctatttttgctacttttgtttcggatgtctgtgaaggtatagcagagtatggggatgaacttgatagatatttaaggtttgaagtgggacaacccattactgatatttatcaacaagaagaatattctttatatgaaataggttattcttggaatctagatttcacaaaggaagaatttagaggtcgcgatagcttgttagagcacatcagatcagcaacagttaaaagtgttggattctcaacgaaggaaaaactcgcttcaggaacaccagtgctatttgatgaccaaattgttggaaagattttttggatagcagacgagaaagactcttcggaaaattacctaggtttgatgattgttaaccaaacatatgctcattcaggagttacttttgtaacagaagatggccaaattttgaaaacacaatcaagcccttattgtatcccagaaagttggaacaaagaa

SEQ ID NO: 3854 - protein, 317 aa, Streptococcus agalactiae
MNTIYNTLRTDKGYKVYEGYLYEITGEECEEALDLVIPKNIVFADTDTCGYTFLLNEDGTVYDDVTFYKFDDKYWLASHKALDSYLDNINFDYTVTDISDEYKMLQIEGRYSGEIAQSFYEYDISTLNFRTLIEMTYKGEKGYLARFGFSGEFGYQFFLPSSIFATFVSDVCEGIAEYGDELDRYLRFEVGQPITDIYQQEEYSLYEIGYSWNLDFTKEEFRGRDSLLEHIRSATVKSVGFSTKEKLASGTPVLFDDQIVGKIFWIADEKDSSENYLGLMIVNQTYAHSGVTFVTEDGQILKTQSSPYCIPESWNKE

SEQ ID NO: 3855 - DNA, 2001 bp, Streptococcus agalactiae
atgaaagatgataataaattaaagatttctgaagcttccttagaagattattctgaagtggttcatttatttaataggaatcatgtttatcaatttccagacggtaggcctttaactgttgatgaccttgatttaacgttaaaagttaaagaagtgacacatttatttttactgaaaaatcatggtgttttgattggaacatcagctttctttaaatttattacctatggttgtttagattggaatagtagctttagtggttttcttttaattgattcgaaaagtcgtagtggacaggcaatcacttatctatataaaactatcttaaagaagataacaaaactgaagttttctaatatctataccgaaatcagtaactacaataaaccctccttagctttatcaaaattgaatggcttcaaagagtatgataagacatatgaagacatactgcattgtcgatcattgcgtagtcacctccctaagatattgaatacgtttcgtatttcgaattattatggtaaaacatacgacatatcaacttttcaaattatggaggaaattgaaaatcccttggaagaggagacagaaattaggaccaaagtctctgatgaagaaatattatttaaagcagaagatagtgcttcacttccttattatttaaaaatgagcttgtttcaaatggaaattgctaagttagataaccgttatgttttacaagttgactttttatcggaacaagtaaagagggttcgggttaaaactggaaaatatcacttggcaaacttaacgagggctcaccctagcctaactttaagtcgttttgccaattattattacattcaagcaactgtggaaaccctttatggtaatatcgatgttcaactggaacgtcgaaaaaagcattatagagatgcaactatttgtcttaagagaacttttcaaggttatgatttacttatctctccaaatggcagccttatttttgaaaagcagaaaagaaagatacttgaagatagttttttgatttttagccaacctttggacaagaaattagttgtaaaagaagaagaaaatcacattacaatcaaatgtttctatcaaggtgctttaattgagaaaatcatgacatttacaagtgacgaagaaatcacttgtgtttataaatgtaatcaaaaggctaaagagatgttcccaaaattattgaaacagactttcaagttacactgccaagagcagttgattagagatagtgaaggttatcttgtgaatgttccaggaagttacccgattgagcatgatgattttcttcgagcagataagtttgaagatagacaattccattattacctcccgaatgaagataaaatgatttcctattctcctcctggcaaagccagcaatcaaatgcaatttagacccttatgtcttattgatacagatagcctttcttttccactgacttatcattttaggatttcacaagcatcatcggaggaggcgttaatcaatctaaaaaaacagccaatatgggacagcaactaccaagcgtcagcaactgaccttttaaaacatatctctaacctaacattagaagaagagaaggattatggcatcaagagaatgatagctaacagaaagcattatcctagtcacaaactggttttagcctataatcagattgttttgcctaagaatgaaattccaagagacagtgaattatattctatttcttttgattatcgaattagaggaaagtttgtccaaatccgccaaggggaacatgtcaaatatgataataaatcctatgttttggaaaatagtcaacaattagtattgtatgtagctagcgatgataaatatatactaatttctgctaaaaatggaatattttattcttacaaagagaacaatcatttaaaaataaggtgcatgtttaaaaggaactcaccttatgctacaaatgtgagcattacagaatatagaaagtgtgaagaaaaa

SEQ ID NO: 3856 - protein, 667 aa, Streptococcus agalactiae
MKDDNKLKISEASLEDYSEVVHLFNRNHVYQFPDGRPLTVDDLDLTLKVKEVTHLFLLKNHGVLIGTSAFFKFITYGCLDWNSSFSGFLLIDSKSRSGQAITYLYKTILKKITKLKFSNIYTEISNYNKPSLALSKLNGFKEYDKTYEDILHCRSLRSHLPKILNTFRISNYYGKTYDISTFQIMEEIENPLEEETEIRTKVSDEEILFKAEDSASLPYYLKMSLFQMEIAKLDNRYVLQVDFLSEQVKRVRVKTGKYHLANLTRAHPSLTLSRFANYYYIQATVETLYGNIDVQLERRKKHYRDATICLKRTFQGYDLLISPNGSLIFEKQKRKILEDSFLIFSQPLDKKLVVKEEENHITIKCFYQGALIEKIMTFTSDEEITCVYKCNQKAKEMFPKLLKQTFKLHCQEQLIRDSEGYLVNVPGSYPIEHDDFLRADKFEDRQFHYYLPNEDKMISYSPPGKASNQMQFRPLCLIDTDSLSFPLTYHFRISQASSEEALINLKKQPIWDSNYQASATDLLKHISNLTLEEEKDYGIKRMIANRKHYPSHKLVLAYNQIVLPKNEIPRDSELYSISFDYRIRGKFVQIRQGEHVKYDNKSYVLENSQQLVLYVASDDKYILISAKNGIFYSYKENNHLKIRCMFKRNSPYATNVSITEYRKCEEK

SEQ ID NO: 3857 - DNA, 876 bp, Streptococcus agalactiae
atgtttgaactaatttctagaaatcgtaaagtttacacgcgagatcggttagcgtttttcatgtcttttttatcagttattatcttaattttggtctatcagattttcttgggaaaaattcaattagatgctataaaagcagcattgaggagtaatacagtatccagtgatactattcacatggttaattattggctcattgcaggtttgacgactattatttcaatgactagtacattaggtgcctttggagttatggtgtccgacaaagaaaaaaaattaaatgaagattttaaggtcagtcctatatcaaatatcaaaattgaattgtcctatgctatatttgccgttttatttggtattgtcatgacgatgttctcttgcatctttgctatcggtatttttaacggctttaattccttgctagagtattcagctatggattatttaactattttagggatcgtttccttagggactgttttatctgcggcgatgattttacctattttagcctttattcatactagttcagcttttacgactcttagcacaattgtagggacttttattggttttatttcaggagtatatctctcaattggctcggtaggaaaagcattacaacaggttatgacatggtttccattgactcaaatcaattctcttttgaaacaggtcttaatgaagggttctattgcgaaggtatttgacaaagccaacgaagccactgtctctaactataaagaatcatatggtgttgttttgcgtaatgctgatggagaaaggctgagtaatcactttatgttgatttatatcattgccctcattcttattttattggcaattcattttattattaaaaaggttaaaaaa

SEQ ID NO: 3858 - protein, 292 aa, Streptococcus agalactiae
MFELISRNRKVYTRDRLAFFMSFLSVIILILVYQIFLGKIQLDAIKAALRSNTVSSDTIHMVNYWLIAGLTTIISMTSTLGAFGVMVSDKEKKLNEDFKVSPISNIKIELSYAIFAVLFGIVMTMFSCIFAIGIFNGFNSLLEYSAMDYLTILGIVSLGTVLSAAMILPILAFIHTSSAFTTLSTIVGTFIGFISGVYLSIGSVGKALQQVMTWFPLTQINSLLKQVLMKGSIAKVFDKANEATVSNYKESYGVVLRNADGERLSNHFMLIYIIALILILLAIHFIIKKVKK

SEQ ID NO: 3859 - DNA, 975 bp, Streptococcus agalactiae
atgagaataaaaaagaggttgcctcaggaaggatgttggtatcagaaaatggaaattaaactcaaaaatattggaaaaaaatatggttcttttgaagcattgagagacattaatctcatctttgaagagggaaaattttatggccttcttggacctaatggagctggtaaaacaactttatttaaccttttaattcaaaattttaagcaaacgtcaggcgatattaagtgggaggtggatggaaaacctctatctattaaagatttttatcgtcacattggtattgtcttccaaagtaatcgcttagatgataatttaacggttgaggaaaatctaatttctagaggtgctttgtacggtttatctaaatcacaagtacgtaatcgccttaaagatcttcaaacgtatctagatatcacagcaataaaaaaacaaaaatatggcagtttatcaggaggtcaaaaacgaaaagttgatattgcacgcgccttgctgccacaaccttctctattattattagatgaaccaacgactggtttagaccctcaatctcgtcgcgatttatgggatgctatcgcacaactaaatcaacaatcgcagatgacagttgtactaattactcattatcttgaagaaatgtctgcttgtgatgttttaaatgttcttattgaaggaaacatttattattcgggagatattaaaagctttattgagcaacattccacaacaaacttgaatgtggtattgaaaccagaaaagtcattagaccaactttcgatagctgattttgttaataaatgtcaagtcctttcagaaagggagatagtatttaaggatatttctgttgaggaaatgatgcaggttatctcagacaatcaagataaatctattattgagacatttaatgttgaatattcgaacttagaggcggcgtatctcaacttgcttagagaaaaagaaaggaaaaacaatgtt

SEQ ID NO: 3860 - protein, 325 aa, Streptococcus agalactiae
MRIKKRLPQEGCWYQKMEIKLKNIGKKYGSFEALRDINLIFEEGKFYGLLGPNGAGKTTLFNLLIQNFKQTSGDIKWEVDGKPLSIKDFYRHIGIVFQSNRLDDNLTVEENLISRGALYGLSKSQVRNRLKDLQTYLDITAIKKQKYGSLSGGQKRKVDIARALLPQPSLLLLDEPTTGLDPQSRRDLWDAIAQLNQQSQMTVVLITHYLEEMSACDVLNVLIEGNIYYSGDIKSFIEQHSTTNLNVVLKPEKSLDQLSIADFVNKCQVLSEREIVFKDISVEEMMQVISDNQDKSIIETFNVEYSNLEAAYLNLLREKERKNNV

SEQ ID NO: 3861 - DNA, 303 bp, Streptococcus agalactiae
atgattaactgggctgaagaacgtaaaataataaaaacacgtcaagaagtagttgatgaaattaaaggtattttgattgactctttaatgttggatattgataaagatctgattatgaatgatcaaccattatttggtcgtggattagagctagactctattgatgccctagaactgtcaatagggatttcaacaacgtttggtgttgaactaaatgatgatgatatttcaatattatcatcagtaaatagactagcagattttgtgattgaaaatagtgaggatatagatgaccaagctaag

SEQ ID NO: 3862 - protein, 101 aa, Streptococcus agalactiae
MINWAEERKIIKTRQEVVDEIKGILIDSLMLDIDKDLIMNDQPLFGRGLELDSIDALELSIGISTTFGVELNDDDISILSSVNRLADFVIENSEDIDDQAK

SEQ ID NO: 3863 - DNA, 720 bp, Streptococcus agalactiae
atgaaagtagcaatagttactggtggtaccagaggaattggaagggctattacaaaagagttatacaaagaaggttacaaagtcattgctatttataatagcaatgatgctaaggcaagagctttacaagaggagttaccaaaattagacgtttataaatgcaatatttcagatgcaaaagcagtacaaaaattggtgactaaaatttttagagaatatggcggtattgattgtttagttaataatgctggtattgttagagatggctttttcttgatgatgtctaaggaaaaatggatggatgtcattaacataaatattatggggctagttaacatgagtaaagccgtgttaaaaatcatgaaggctaagcgtatacagggaaaggttatcaatatttcttcaactagtggtatagcagggcagatagggcaagcgaactattcagcaacgaaaggcgctatcatttccattactaaaactctagcgaaagaatttgcatcagatggtattacgattaattgtgtaagtccaggattcattgaaacagatatgacaaatgaattgcaaaataaagaagagctaaaagagcatcttattcctctaaaaaggtttggacaacctgaagaggtggcttggctcgtaagctttttagcaagtgagaaggcaaactatattacaggaaaaaatattgtgattgatggaggaatgattaatgat

SEQ ID NO: 3864 - protein, 240 aa, Streptococcus agalactiae
MKVAIVTGGTRGIGRAITKELYKEGYKVIAIYNSNDAKARALQEELPKLDVYKCNISDAKAVQKLVTKIFREYGGIDCLVNNAGIVRDGFFLMMSKEKWMDVININIMGLVNMSKAVLKIMKAKRIQGKVINISSTSGIAGQIGQANYSATKGAIISITKTLAKEFASDGITINCVSPGFIETDMTNELQNKEELKEHLIPLKRFGQPEEVAWLVSFLASEKANYITGKNIVIDGGMIND

SEQ ID NO: 3865 - DNA, 732 bp, Streptococcus pyogenes
atggaaattaaaggaaaaaatatatttatcacaggctcaacgagaggtatcggtttagcaatggctcatcaattcgccagtttagaagctaatattgtcttaaatggtcgctctgctatctctgaggagcttgttgctagttttactgactacggcgttacagttgttaccatctctggggatgtttcagaagcatcagaagctaaacgtatggtcaatgaagctatcgaaagtttaggttcgattgatgttttagttaacaatgctggcattactaatgataaattgatgcttaaaatgacggaagaggattttgagcgcgtcttgaaaatcaatttgaccggtgcttttaacatgactcaatcagtgttaaaaccaatgatcaaggcccgccaaggagcaattattaatgtctctagtgtggttggtttaacaggcaatattgggcaagcaaactatgctgcttctaaggcaggaatgattggttttaccaagtctgttgcccgtgaagttgctgctcgtaacatttgcgtgaatgctattgctccaggatttatcgagtccgacatgacaggtgtccttcctgaaaaaatgcaagagcaaatcttaagtcaaatcccaatgaaacgtattggaaaagctcaagaagttgctcacttagcaagcttcttggtggaacaagattatattacgggacaagttatcgctattgatggcggtatgacaatgcaa

SEQ ID NO: 3866 - protein, 244 aa, Streptococcus pyogenes
MEIKGKNIFITGSTRGIGLAMAHQFASLEANIVLNGRSAISEELVASFTDYGVTVVTISGDVSEASEAKRMVNEAIESLGSIDVLVNNAGITNDKLMLKMTEEDFERVLKINLTGAFNMTQSVLKPMIKARQGAIINVSSVVGLTGNIGQANYAASKAGMIGFTKSVAREVAARNICVNAIAPGFIESDMTGVLPEKMQEQILSQIPMKRIGKAQEVAHLASFLVEQDYITGQVIAIDGGMTMQ

SEQ ID NO: 3867 - DNA, 846 bp, Streptococcus agalactiae
atgaaaacagtaataatatatggaggacagggtaatgttcagtcaaaacacctttgtcaactagttaaaactccaaaaggtgaaattcttttttcaaagttacaagcaactgatttagaatcatatcagttaatgatggatgtcattaaccacaaggtaagtttagacaatgttcatgcgtctatgttagcaaattttttatataatgattggctaacaaacgatgaaaaaatagtatctgggataggattttcagctcatagcgccggtattttcaatgtgttatatgctagtggtagtactagttttgaaaacattattcactttattaaacgtcgtgcccaacttatagaaaattgtcatgtgtctgaagagctttggcttttgatggttgaaaacattgatatgtttagtaaggatgttttaaaagaacagtctgagaaagtaaaattagctattattactgatgatagagctggtgtaattgctatggatcaagtcaaccgttctttctttgatgacgtgatgactaacaaaggttatttttataaattaaagcagttaggcgtaaaagcaccatatcatactgattttttaaatgaatctaaagagcagtataaacaattgattgaaagcctagatatttcgcaaaatgatgactatgactatatttttcattgtgatcaattggtagatgaaattttatatcagtggaccaatctctttaactggcgtgcgattaaggaaactatcatagaaaaggatgcggagattattgatatttctcctaataggtttatttctagtcagttgcaaaaaatgaaaaagagggggaggaaacagtta

SEQ ID NO: 3868 - protein, 282 aa, Streptococcus agalactiae
MKTVIIYGGQGNVQSKHLCQLVKTPKGEILFSKLQATDLESYQLMMDVINHKVSLDNVHASMLANFLYNDWLTNDEKIVSGIGFSAHSAGIFNVLYASGSTSFENIIHFIKRRAQLIENCHVSEELWLLMVENIDMFSKDVLKEQSEKVKLAIITDDRAGVIAMDQVNRSFFDDVMTNKGYFYKLKQLGVKAPYHTDFLNESKEQYKQLIESLDISQNDDYDYIFHCDQLVDEILYQWTNLFNWRAIKETIIEKDAEIIDISPNRFISSQLQKMKKRGRKQL

SEQ ID NO: 3869 - DNA, 120 bp, Streptococcus agalactiae
atggcttgccttactaatcaagaacccgcactctcatatacttctactcctttatgccaaagtattagtgataccataaaagaaatcaaggaaatcaagataaccccaccaatattaaaa

SEQ ID NO: 3870 - protein, 40 aa, Streptococcus agalactiae
MACLTNQEPALSYTSTPLCQSISDTIKEIKEIKITPPILK

SEQ ID NO: 3871 - DNA, 783 bp, Streptococcus agalactiae
atgacaaaatatcagcgaatgcactttatttttattaaacaatacatgaagcaaatcatggagtataaaatagacttttttgtaggcgttttaggagtatttttaacacaagggttaaatcttttatttctgaatgttctttttcaacatatcccttctttagaaggatggacttttcagcaaatagcttttatttatggtttttctctcctcccaaaaggaattgatcaccttttctttgataacttgtgggctcttggtcaaaggcttattcgaaaaggagaatttgataagtatttaaccaggccgatcagtcctttatttcatgtcctagttgaaacctttcaagtagatgcattgggggagttattggttggttttattctgttatctaccacagtatctagtataagctggaccgtgccaaaagtattattatttatatttattatcccctttgcaactttgatttatacctccttgaagattgctacgtcaagtatcgctttttggaccaaacaatctggtgctgttatctatattttttatatgtttaatgactttgctaagtatcctgtcgcaatatataataatctattgcgttggatcattagttttgtcattccatttgcttttacagcttattatcccgctgcttacttcttacaagatagaaatgtctattttaatattggtggggttatcttgatttccttgatttcttttatggtatcactaatactttggcataaaggagtagaagtatatgagagtgcgggttct

SEQ ID NO: 3872 - protein, 261 aa, Streptococcus agalactiae
MTKYQRMHFIFIKQYMKQIMEYKIDFFVGVLGVFLTQGLNLLFLNVLFQHIPSLEGWTFQQIAFIYGFSLLPKGIDHLFFDNLWALGQRLIRKGEFDKYLTRPISPLFHVLVETFQVDALGELLVGFILLSTTVSSISWTVPKVLLFIFIIPFATLIYTSLKIATSSIAFWTKQSGAVIYIFYMFNDFAKYPVAIYNNLLRWIISFVIPFAFTAYYPAAYFLQDRNVYFNIGGVILISLISFMVSLILWHKGVEVYESAGS

SEQ ID NO: 3873 - DNA, 783 bp, Streptococcus pyogenes
atggcaaaattgagatgtatgcacgctatttttatcaaacaatacctcaaacaaattatggaatacaaggttgattttgtggtgggagtgctaggtgtttttctcactcagggacttaatctgctctttttatcggtacttttccaacatatcccttctttagaaggctggacgtttgaacaaattgcctttatttatggcttttgtttgattccaaagggaattgatcacctcttttttgacaatctttgggctttagggcaacggcttgtccgcaaaggagaatttgacaagtacctcaccagaccaattagtcctttgtttcatgttttagttgagacctttcaagtggatgccctgggtgaattattggttggggttatcttattagtgaccacggctggtagtatcgtatggactcttcctaaggtgcttttgtttattttggttattccttttgcgaccttgatttacacctctttaaaaattgcgaccgccagcatttctttttggaccaagcagtctggggcagttatctatattttttacatgttcaatgacttttctaagtaccctatgtccatttaccattcctttttgcggtggttaatcagttttatcattccctttgcttttacagcttattaccctgcttcttattttttaacaggtcaacacctgctctttaatattggaggcttggtagtggtgtcgttactggttttggccttgtcgcttaagctttggaaatggggcctggatgcttatgaaagtgcaggttcc

SEQ ID NO: 3874 - protein, 261 aa, Streptococcus pyogenes
MAKLRCMHAIFIKQYLKQIMEYKVDFVVGVLGVFLTQGLNLLFLSVLFQHIPSLEGWTFEQIAFIYGFCLIPKGIDHLFFDNLWALGQRLVRKGEFDKYLTRPISPLFHVLVETFQVDALGELLVGVILLVTTAGSIVWTLPKVLLFILVIPFATLIYTSLKIATASISFWTKQSGAVIYIFYMFNDFSKYPMSIYHSFLRWLISFIIPFAFTAYYPASYFLTGQHLLFNIGGLVVVSLLVLALSLKLWKWGLDAYESAGS

SEQ ID NO: 3875 - DNA, 816 bp, Streptococcus agalactiae
atgaacagaatttggagacgttataaaccttttattagtacaggaatccaaggattaatcacatatcgtgttgatttcatcctttataggataggtgatgtgataggagcatttgttgcattttatctatggaaagcagttttcgattcctcaagtcaatccttaatccaaggttttcagctgtcagatatgattctctatattattatgagttttgtgactaatttattaacaagaactgatagttcatttatgataggtgacgaagtaaaagacggttcaattattatgcgactcttacgtccagttcactttgctgcttcctaccttttcatggagattggttctagatggctcatctttttaagtataggggtaccgtttttgcttgttattacgggggtacgcctcttcttggggactgatttgattcaagctatagtgttagtggtattttatattattagcattattttagcttttttgattaacttcttttttaatatttgttttggcttctcggcatttgtttttaaaaatttatgggggtcaaacctgttaaaaaattcgttagtcgcatttatgtcggggagcttgattcctcttactttttttccgaaaatcgttgctgatattttaggatttttaccattttcatctttaatttacacaccagtaatgattattattggtaaatatgatggcagtcaaattgtgcaagccttacttttacaaatattttggctaatagtaatggtagctttatctcaattaatatggaaaaaagtacagttgcatatcactatccaaggaggt

SEQ ID NO: 3876 - protein, 272 aa, Streptococcus agalactiae
MNRIWRRYKPFISTGIQGLITYRVDFILYRIGDVIGAFVAFYLWKAVFDSSSQSLIQGFQLSDMILYIIMSFVTNLLTRTDSSFMIGDEVKDGSIIMRLLRPVHFAASYLFMEIGSRWLIFLSIGVPFLLVITGVRLFLGTDLIQAIVLVVFYIISIILAFLINFFFNICFGFSAFVFKNLWGSNLLKNSLVAFMSGSLIPLTFFPKIVADILGFLPFSSLIYTPVMIIIGKYDGSQIVQALLLQIFWLIVMVALSQLIWKKVQLHITIQGG

SEQ ID NO: 3877 - DNA, 858 bp, Streptococcus pyogenes
ttgaggatattgttcgtcgtttctaccgaaaggagctttaagatgtggtcattttggaaacgttatagaccctttctcagtgcaggaattcaggaattaataacctatcgcgttaatttctttttgtatcgtattggagatgtcatgggggcttttgtggcttattacctctggaaggctgtttttgattcgtctaagcaatccttaatcaatggttttactctgtctgacatgaccttttacattatcatgagttttgtgaccactttactgaccaaatcagacagctcctttatgattggcgaagaagtgaaagatggttctatcatcatgcgcctgcttcgaccagttcattttgcagcctcttacctctttatggaaattggttttcgctggattgtgctaatgagtgtcggctttccttttttaatggtcttatctggtattaaagtcatggcggggctgtctatcttgcaagtcctagccagcagttgtctgtatttagttagccttttattagcttttttaatcaatttttatttcaacatttgttttggctcttcagcatttgtctttaaaaacctttgggggtctaatttattgaaaaatgccttggttgcctttatgtcaggcagtttgattccattggctttttttcctaaaatggtttctatagtgcttagttttctaccgttttcctctttggtttacacgccagttatgattgtcattgggaaatacagccttagtcagataatggtggccctaagtttgcaaatcttttggttactggtgatggtagtcttatcgcaagtcatctggaaaaaggttcagtaccatttaacgattcaaggaggg

SEQ ID NO: 3878 - protein, 286 aa, Streptococcus pyogenes
LRILFVVSTERSFKMWSFWKRYRPFLSAGIQELITYRVNFFLYRIGDVMGAFVAYYLWKAVFDSSKQSLINGFTLSDMTFYIIMSFVTTLLTKSDSSFMIGEEVKDGSIIMRLLRPVHFAASYLFMEIGFRWIVLMSVGFPFLMVLSGIKVMAGLSILQVLASSCLYLVSLLLAFLINFYFNICFGSSAFVFKNLWGSNLLKNALVAFMSGSLIPLAFFPKMVSIVLSFLPFSSLVYTPVMIVIGKYSLSQIMVALSLQIFWLLVMVVLSQVIWKKVQYHLTIQGG

SEQ ID NO: 3879 - DNA, 1011 bp, Streptococcus agalactiae
ttgagtaaaagaggtattaatatgtcaatgattgaagtttctcaccttcagaaaaattttataaaaaccgttaaagcaccagggttaaaaggagcatttcaatcatttcttcgtcctgaaaaacacacctttgaagctgttaaagatttaacatttgatgtgcctaaaggacaaattctgggatttattggagcgaacggtgcaggaaaatctacaacaattaaaatgttaactgggattttaaaaccaacttcgggcttttgccgtattgatggcaaattgccacaagaaaaccgacaaaattatgttaaggatattggagtcgtttttgggcaacgtacgcagttatggtgggatttagctctacaagaaacctatacagtgttaaaagaaatctatgacgttcctgataaagaatttcgcaaacgcatggcttttttaaatgaggttttggaactaaatgactttataaaggatcctgttagaactttgtctctcggacagcgtatgagagcggatatcgcagcttctttattacataacccaaaggttcttttcttagatgaacccaccattggcttggacgtttcagtgaaagataatatccgacgtgcaatcacacaaattaatcaagaagaagagacaacgattttactaacgacacatgacctcagtgatattgaacaactttgtcatcgtatttttatgattgatagaggacaagaaatatttgatggcacagtttctcagctaaaagagacatttggaaagatgaaaactctttcttttgatttgcgcccaggacaagagcatatcagctctagtttaattggaaagtcggagattaatattaaacgtaatgacttagttttagatattcagtatgatagttctcgctaccaaactgctgacataattcagcagacattagcagatttttctgtacgtgaccttaaaatgacagatgcggatattgaagatatcattcgtcgcttctatagaaatgagcta

SEQ ID NO: 3880 - protein, 337 aa, Streptococcus agalactiae
MSKRGINMSMIEVSHLQKNFIKTVKAPGLKGAFQSFLRPEKHTFEAVKDLTFDVPKGQILGFIGANGAGKSTTIKMLTGILKPTSGFCRIDGKLPQENRQNYVKDIGVVFGQRTQLWWDLALQETYTVLKEIYDVPDKEFRKRMAFLNEVLELNDFIKDPVRTLSLGQRMRADIAASLLHNPKVLFLDEPTIGLDVSVKDNIRRAITQINQEEETTILLTTHDLSDIEQLCHRIFMIDRGQEIFDGTVSQLKETFGKMKTLSFDLRPGQEHISSSLIGKSEINIKRNDLVLDIQYDSSRYQTADIIQQTLADFSVRDLKMTDADIEDIIRRFYRNEL

SEQ ID NO: 3881 - DNA, 990 bp, Streptococcus pyogenes
atggtcatgatagaagtgtcccaccttcaaaaaaatttttccaaaaccattaaagagccaggattaaagggagccttgaagtcgtttgttcatcccccaagagaaatctttgaggcggttaaggacttatcttttgaggtacccaaagggcaaattttaggttttattggcgccaatggtgcaggaaaatcaacaacgattaagatgttaacaggtattttaaagcctacatcaggttactgtcgcattaacggaaagattccacaagataatcgtcaatattatgtgagagacattggagctgtttttggtcaacgaacacaactatggtgggatttggccttgcaagagacctatgtcgttttaaaagaaatttacgatgtacctgaaaaagcctttcgcaagcgcatggattttttaaatgaggttttggacctgaatgagtttattaaggatcctgtccggaccttatcactcggtcagcggatgcgagctgatattgctgcctccttgttgcataatcctaaagtattgtttttagatgaaccaacgattggacttgatgtttctgtgaaggacaacattcggcgtgccattactcaaattaatcaagaagaagagacaactattttactgacgacccatgatttgagtgatattgaacagctctgtgatcggattatcatgattgataaagggcaagaaatctttgatggaacggtgacccaattaaagcaaagctttggaaaaatgaagagtctgtcttttgagttgaagccagggcaggagcaggtggtctcacagtttatgggcttacctgacatcacagtggaacggcatgagcttagtttagacattcaatatgacagttcgcgctatcaaactgcggacattattcaaaaaaccatggctgattttgcggtcagggatgtgaagatgactgatgtagatattgaggatattgttcgtcgtttctaccgaaaggagctt

SEQ ID NO: 3882 - protein, 330 aa, Streptococcus pyogenes
MVMIEVSHLQKNFSKTIKEPGLKGALKSFVHPPREIFEAVKDLSFEVPKGQILGFIGANGAGKSTTIKMLTGILKPTSGYCRINGKIPQDNRQYYVRDIGAVFGQRTQLWWDLALQETYVVLKEIYDVPEKAFRKRMDFLNEVLDLNEFIKDPVRTLSLGQRMRADIAASLLHNPKVLFLDEPTIGLDVSVKDNIRRAITQINQEEETTILLTTHDLSDIEQLCDRIIMIDKGQEIFDGTVTQLKQSFGKMKSLSFELKPGQEQVVSQFMGLPDITVERHELSLDIQYDSSRYQTADIIQKTMADFAVRDVKMTDVDIEDIVRRFYRKEL

SEQ ID NO: 3883 - DNA, 1170 bp, Streptococcus agalactiae
atgatattaaggaggttatttatggtacgtaaatttttaaaatcgctcctatctctctttcttatagcagtaatcgccaccggtatttcagtggcatgtttcttttttattccagaaaataaagggaatattacaccgattttattgcatcgctttatgcgaaaaaataatgttaatggaatgatgattgttagcgataatactggtaaaccgattaccatctcgcatgggattaaccgtggggaagttgaaacggatattgaaaataataaattatttccaatggcttctctccaaaaactcatgacaggaattattatccaaagattaattgatcaagatgtcttgagtgaagacgaccgattgtctcagttctttccccaagtaaaaggtagtaatagtattaccatccaccaattgttgacccatacgagtgggttaagagaaaaaggtgttaaggtgtctccttatctaaaaaatgagagagaacaattacaattttgcttaaaacactataactttgttaataagaaatcgtggtattattctaatatcaactttagtttcctaacaggtatagccactcaagttacgggaaggacctacgctgaacttgttgatgatgtgataaaaaatcctttgcgattagatgatacccaaagttaccaatcagttgttaatcatgacttagttagcccaatgcgaaagaacggcaagttaaataaaattaatatctttaatcaagtatccacagcatatggagctggagattttttcacaactccgctgaacttttgggtgttgatgcggtctttttctaaagggtactttttcccaacggatgaatataccaaacatcaaaatgatgcgatatcacattattatggtgggctttacatgcatggtcgtatagttaattctaatgggacctttttccagtattcaagttttggttatgcagatctaaagacgcatgatacaatggtgctttttatgaataacaaagtctatagtgatgctagtcacgtggcaccaaaagcatttgaatattatcaaaaatttatgttccttaataagattttccacttagtcttttactttgtattttctttctttttaatgcttttaatacgtcattcgtttaggaaaagaaggtataagaaacgtctc

SEQ ID NO: 3884 - protein, 390 aa, Streptococcus agalactiae
MILRRLFMVRKFLKSLLSLFLIAVIATGISVACFFFIPENKGNITPILLHRFMRKNNVNGMMIVSDNTGKPITISHGINRGEVETDIENNKLFPMASLQKLMTGIIIQRLIDQDVLSEDDRLSQFFPQVKGSNSITIHQLLTHTSGLREKGVKVSPYLKNEREQLQFCLKHYNFVNKKSWYYSNINFSFLTGIATQVTGRTYAELVDDVIKNPLRLDDTQSYQSVVNHDLVSPMRKNGKLNKINIFNQVSTAYGAGDFFTTPLNFWVLMRSFSKGYFFPTDEYTKHQNDAISHYYGGLYMHGRIVNSNGTFFQYSSFGYADLKTHDTMVLFMNNKVYSDASHVAPKAFEYYQKFMFLNKIFHLVFYFVFSFFLMLLIRHSFRKRRYKKRL

SEQ ID NO: 3885 - DNA, 948 bp, Streptococcus pyogenes
atggtttacgaaatgactttggcggtcattaaatgtattgaaaaccatcttcacaaaaaagtatacaaaggggccagtctggctctctttcaatctggtcgatggcaagaataccatatcggaacaattgatggaagacgaccagttgatgctaacttagtttatgacttggctagtgtttcaaaagttgttggtgtggccacaatatgcaatattttattgaataatggtacgttagcattagatgatcccttaaaggtatattatcctagtattgctgatgcgactgtcactattcgacagttattgactcataccagtggtcttgatccttatattcctaacagagatgttttaaatgcacaacaattaagaaaagcacttaatcatcttactcaaaaagaaaataaaaacttttattacacagatgtcaatttcctcttgttaggcttcatgttagaagagctctttagtgaatctttagaccagatatttgacaagactatctttactccctttgggatgtatcatacgtcttttggccctcgtccagaagctgtaccaacattaaagggtgtgagtgatggagaagttcatgatcccaaagcaaaaatcttaaaaaaacattctggatctgcggggctattttcaactcttgcagatttagaaagttttagcaatcattatcttaatgatccattttcagattgtctgtggcgcaactacagccaacaaacaattgagcggtcactagggtggaatttagatggcgattggattagtcatacaggttacacagggccgtttctaatgcttaataaaaaagagcaaacggcagctatttttttgaccaaccgtacttacgacgaggatgataaaagtaaatggttaaaagaacgtcagttgctttacaatgcactaaagcatgatctgacaacccccgtatcg

SEQ ID NO: 3886 - protein, 316 aa, Streptococcus pyogenes
MVYEMTLAVIKCIENHLHKKVYKGASLALFQSGRWQEYHIGTIDGRRPVDANLVYDLASVSKVVGVATICNILLNNGTLALDDPLKVYYPSIADATVTIRQLLTHTSGLDPYIPNRDVLNAQQLRKALNHLTQKENKNFYYTDVNFLLLGFMLEELFSESLDQIFDKTIFTPFGMYHTSFGPRPEAVPTLKGVSDGEVHDPKAKILKKHSGSAGLFSTLADLESFSNHYLNDPFSDCLWRNYSQQTIERSLGWNLDGDWISHTGYTGPFLMLNKKEQTAAIFLTNRTYDEDDKSKWLKERQLLYNALKHDLTTPVS

SEQ ID NO: 3887 - DNA, 267 bp, Streptococcus agalactiae
atggtgagcttgcttctcttgaaagtaaagcaggaggagttgatagagtttcataatgttttttatagagaagcgatatcttcttatcttgaaacagaaaattttgagaaggctaaagtgactgaagagaattaccaagtttttttaggaatccgtacttatcagaagagttataactatcaagatcatagtgagaatctaaaaggaaatattgaggtagcaatgataggagttgaaaataatattagcgacgaacatattttttgc

SEQ ID NO: 3888 - protein, 89 aa, Streptococcus agalactiae
MVSLLLLKVKQEELIEFHNVFYREAISSYLETENFEKAKVTEENYQVFLGIRTYQKSYNYQDHSENLKGNIEVAMIGVENNISDEHIFC

SEQ ID NO: 3889 - DNA, 117 bp, Streptococcus agalactiae
atgaattctctttttaaaatattcaaagtttctaaagctaaatgtttgtgcttgatgattttgatgagattattggttgctcaagtttggtgtttgaataaggcgattcaaggacat

SEQ ID NO: 3890 - protein, 39 aa, Streptococcus agalactiae
MNSLFKIFKVSKAKCLCLMILMRLLVAQVWCLNKAIQGH

SEQ ID NO: 3891 - DNA, 219 bp, Streptococcus agalactiae
atgcatacataccatatcctatataacggctatcgttttaagaacaatttatttatgttggcagaaaataataataggaagcagaaaaatccaataatattcaagagaaaaagtataggtgatagctctctaaaaaaatttgatattgaaactataagaaaccctgtagatacgatagttgaaacaacctttttcttatccatattaataaccacccct

SEQ ID NO: 3892 - protein, 73 aa, Streptococcus agalactiae
MHTYHILYNGYRFKNNLFMLAENNNRKQKNPIIFKRKSIGDSSLKKFDIETIRNPVDTIVETTFFLSILITTP

SEQ ID NO: 3893 - DNA, 171 bp, Streptococcus agalactiae
ttgcttgatgattcggaaaaatacggagactatactatttcaaggaaaagatacaaaagtttcgaatcaagtcttcaactatacatccttcaaagtcatcggctagagatttggaattatgaaccaatccctttgattactagaaaaataaatagcttggagaggctaacg

SEQ ID NO: 3894 - protein, 57 aa, Streptococcus agalactiae
MLDDSEKYGDYTISRKRYKSFESSLQLYILQSHRLEIWNYEPIPLITRKINSLERLT

SEQ ID NO: 3895 - DNA, 228 bp, Streptococcus agalactiae
atgggcattactctagtttttaataagctatctgatgagcagaaggagaagttaatgcatgttgggaagtcttattttgactatcaagaaaatgctcttatcccacaattaggttttctatattctaaattaactaaaaaaattgaacttgataatcggttgtctccgactgaaaaaaagttattgattaccttattattacatactaaaggtttaatcattgatatg

SEQ ID NO: 3896 - protein, 76 aa, Streptococcus agalactiae
MGITLVFNKLSDEQKEKLMHVGKSYFDYQENALIPQLGFLYSKLTKKIELDNRLSPTEKKLLITLLLHTKGLIIDM

SEQ ID NO: 3897 - DNA, 90 bp, Streptococcus agalactiae
atgggaaatggtcaggattgggttggaacagccgaaagactagatggtgaaactgatacagttccaaaagaaggtactattctctctttt

SEQ ID NO: 3898 - protein, 30 aa, Streptococcus agalactiae
MGNGQDWVGTAERLDGETDTVPKEGTILSF

SEQ ID NO: 3899 - DNA, 156 bp, Streptococcus agalactiae
atggaaaaacaggattcacgagttctcatccattgggaggggaattctggggacaagctcattgaacaccaaaccagcgcaacggggtggtactaccaagtcgatcgtagctttagtcaaccaaaaggggaaccgcccagaatgatccaaaggcac

SEQ ID NO: 3900 - protein, 52 aa, Streptococcus agalactiae
MEKQDSRVLIHWEGNSGDKLIEHQTSATGWYYQVDRSFSQPKGEPPRMIQRH

SEQ ID NO: 3901 - DNA, 126 bp, Streptococcus agalactiae
gtgcgtagcgttgctacaacgaagcaaagggtaaaaatcctttattttaagcactttttcaagcattttgtctttattgaaaagagtgattttaacataaaaaaggtattaaaaaacatattgacg

SEQ ID NO: 3902 - protein, 42 aa, Streptococcus agalactiae
MRSVATTKQRVKILYFKHFFKHFVFIEKSDFNIKKVLKNILT

SEQ ID NO: 3903 - DNA, 636 bp, Streptococcus agalactiae
atgaagccattaggagttattccttatcttttagtggcgcgcgatccatatagtgatagatcgagatatttagatccaaaagttctatcatcctcttttggcgccttttttccagcagataatattaaggtagcttggtctaacaactccagcactttatttacaccacctattaatgcaaactacaccactcagattcaagctattgggacaacgattaagtcacaaattccggaatcgattttgacggttacggataaaaagagcaggaagttcagcattaacaagattgacgaagctaaagaaggcttagtaggtgcgaccttcaccttgtctaaacgcacaacagtagcggcagatcatcaagtacaaggagatttcattcctgtcagcaaagagacgacagtcggtcggacaacccttacctttgacaaccttaaacctggattttatgaccttaaagaaacgaaagcgccgaatgcttacgtacttgatcctaagacttatgttgtggtcgttcaaaattcaggaaaaacgacaattgtggatgaagctaacttcaaagaggctgattacccaatggctgataataccagccatgtggagtgcgtagcgttgctacaacgaagcaaaggg

SEQ ID NO: 3904 - protein, 212 aa, Streptococcus agalactiae
MKPLGVIPYLLVARDPYSDRSRYLDPKVLSSSFGAFFPADNIKVAWSNNSSTLFTPPINANYTTQIQAIGTTIKSQIPESILTVTDKKSRKFSINKIDEAKEGLVGATFTLSKRTTVAADHQVQGDFIPVSKETTVGRTTLTFDNLKPGFYDLKETKAPNAYVLDPKTYVVVVQNSGKTTIVDEANFKEADYPMADNTSHVECVALLQRSKG

SEQ ID NO: 3905 - DNA, 99 bp, Streptococcus agalactiae
ttgtacttcatgaaggtcctaaagaccattttaaaagcagaattgccagttgttacgttatcatctatgaagctaaagaattcagttgttcgcttttct

SEQ ID NO: 3906 - protein, 33 aa, Streptococcus agalactiae
MYFMKVLKTILKAELPVVTLSSMKLKNSVVRFS

SEQ ID NO: 3907 - DNA, 102 bp, Streptococcus agalactiae
ttggatgttcaaagcgatgagaattttgcttttaaaatttttaaagttgcgaaagccaaaggcttgtcgcttgatgtctttgataagcttgttggtcgcttc

SEQ ID NO: 3908 - protein, 34 aa, Streptococcus agalactiae
MDVQSDENFAFKIFKVAKAKGLSLDVFDKLVGRF

SEQ ID NO: 3909 - DNA, 207 bp, Streptococcus pyogenes
atgagtaaacaggaagtaagagactcattgtcaactgtagtgggtgacttatcattaacaacgagagagaatcagattggttctctctttttggatgttcaaagcgatgaggattttggttttaaagttgtcaaagttctgaaatctaaaggcattgtacttaatgcccttgatgagtctgtttgtggcttcaagtttgtcgttgaa

SEQ ID NO: 3910 - protein, 69 aa, Streptococcus pyogenes
MSKQEVRDSLSTVVGDLSLTTRENQIGSLFLDVQSDEDFGFKVVKVLKSKGIVLNALDESVCGFKFVVE

SEQ ID NO: 3911 - DNA, 567 bp, Streptococcus agalactiae
atgttagaagtcagagagcaggttgaccatgtgatgattccaaaaatcaatcaggatttaccaatctacgctggttcagaagaggacaatctgcaacggggagttggtcatctagaagggataagtttgccgattggaggggcttctacacatgcggtcttgagcggtcaaagaggtatgccagctgctcggttgtttgcggatttggataagatgaaaaaaggtgattatttttatgttaccaatctgaaagaaaccttggcttatcaagtggatcgtatcatggtgattgaacctagccaattggatgccgtgagcattgaagaggataaagattatgttacccttctgacctgtacaccttatatgggctctttgtcaactgtaatgggtgacttatcattaacaacgagagagaatcagcttggttctctctctttttggatgttcaaagcgatgagaattttgcttttaaaatttttaaagttgcgaaagccaaaggcttgtcgcttgatgtctttgataagcttgttggtcgcttctaatttggcattggaaagggatagc

SEQ ID NO: 3912 - protein, 189 aa, Streptococcus agalactiae
MLEVREQVDHVMIPKINQDLPIYAGSEEDNLQRGVGHLEGISLPIGGASTHAVLSGQRGMPAARLFADLDKMKKGDYFYVTNLKETLAYQVDRIMVIEPSQLDAVSIEEDKDYVTLLTCTPYMGSLSTVMGDLSLTTRENQLGSLSFWMFKAMRILLLKFLKLRKPKACRLMSLISLLVASNLALERDS

SEQ ID NO: 3913 - DNA, 2709 bp, Streptococcus agalactiae
atgatgattgtgaataatggttatctagaagggagaaaaatgaaaaagagacaaaaaatatggagagggttatcagttactttactaatcctgtcccaaattccatttggtatattggtacaaggtgaaacccaagataccaatcaagcacttggaaaagtaattgttaaaaaaacgggagacaatgctacaccattaggcaaagcgacttttgtgttaaaaaatgacaatgataagtcagaaacaagtcacgaaacggtagagggttctggagaagcaacctttgaaaacataaaacctggagactacacattaagagaagaaacagcaccaattggttataaaaaaactgataaaacctggaaagttaaagttgcagataacggagcaacaataatcgagggtatggatgcagataaagcagagaaacgaaaagaagttttgaatgcccaatatccaaaatcagctatttatgaggatacaaaagaaaattacccattagttaatgtagagggttccaaagttggtgaacaatacaaagcattgaatccaataaatggaaaagatggtcgaagagagattgctgaaggttggttatcaaaaaaaattacaggggtcaatgatctcgataagaataaatataaaattgaattaactgttgagggtaaaaccactgttgaaacgaaagaacttaatcaaccactagatgtcgttgtgctattagataattcaaatagtatgaataatgaaagagccaataattctcaaagagcattaaaagctggggaagcagttgaaaagctgattgataaaattacatcaaataaagacaatagagtagctcttgtgacatatgcctcaaccatttttgatggtactgaagcgaccgtatcaaagggagttgccgatcaaaatggtaaagcgctgaatgatagtgtatcatgggattatcataaaactacttttacagcaactacacataattacagttatttaaatttaacaaatgatgctaacgaagttaatattctaaagtcaagaattccaaaggaagcggagcatataaatggggatcgcacgctctatcaatttggtgcgacatttactcaaaaagctctaatgaaagcaaatgaaattttagagacacaaagttctaatgctagaaaaaaacttatttttcacgtaactgatggtgtccctacgatgtcttatgccataaattttaatccttatatatcaacatcttaccaaaaccagtttaattcttttttaaataaaataccagatagaagtggtattctccaagaggattttataatcaatggtgatgattatcaaatagtaaaaggagatggagagagttttaaactgttttcggatagaaaagttcctgttactggaggaacgacacaagcagcttatcgagtaccgcaaaatcaactctctgtaatgagtaatgagggatatgcaattaatagtggatatatttatctctattggagagattacaactgggtctatccatttgatcctaagacaaagaaagtttctgcaacgaaacaaatcaaaactcatggtgagccaacaacattatactttaatggaaatataagacctaaaggttatgacatttttactgttgggattggtgtaaacggagatcctggtgcaactcctcttgaagctgagaaatttatgcaatcaatatcaagtaaaacagaaaattatactaatgttgatgatacaaataaaatttatgatgagctaaataaatactttaaaacaattgttgaggaaaaacattctattgttgatggaaatgtgactgatcctatgggagagatgattgaattccaattaaaaaatggtcaaagttttacacatgatgattacgttttggttggaaatgatggcagtcaattaaaaaatggtgtggctcttggtggaccaaacagtgatgggggaattttaaaagatgttacagtgacttatgataagacatctcaaaccatcaaaatcaatcatttgaacttaggaagtggacaaaaagtagttcttacctatgatgtacgtttaaaagataactatataagtaacaaattttacaatacaaataatcgtacaacgctaagtccgaagagtgaaaaagaaccaaatactattcgtgatttcccaattcccaaaattcgtgatgttcgtgagtttccggtactaaccatcagtaatcagaagaaaatgggtgaggttgaatttattaaagttaataaagacaaacattcagaatcgcttttgggagctaagtttcaacttcagatagaaaaagatttttctgggtataagcaatttgttccagagggaagtgatgttacaacaaagaatgatggtaaaatttattttaaagcacttcaagatggtaactataaattatatgaaatttcaagtccagatggctatatagaggttaaaacgaaacctgttgtgacatttacaattcaaaatggagaagttacgaacctgaaagcagatccaaatgctaataaaaatcaaatcgggtatcttgaaggaaatggtaaacatcttattaccaacactcccaaacgcccaccaggtgtttttcctaaaacagggggaattggtacaattgtctatatattagttggttctacttttatgatacttaccatttgttctttccgtcgtaaacaattg

SEQ ID NO: 3914 - protein, 903 aa, Streptococcus agalactiae
MMIVNNGYLEGRKMKKRQKIWRGLSVTLLILSQIPFGILVQGETQDTNQALGKVIVKKTGDNATPLGKATFVLKNDNDKSETSHETVEGSGEATFENIKPGDYTLREETAPIGYKKTDKTWKVKVADNGATIIEGMDADKAEKRKEVLNAQYPKSAIYEDTKENYPLVNVEGSKVGEQYKALNPINGKDGRREIAEGWLSKKITGVNDLDKNKYKIELTVEGKTTVETKELNQPLDVVVLLDNSNSMNNERANNSQRALKAGEAVEKLIDKITSNKDNRVALVTYASTIFDGTEATVSKGVADQNGKALNDSVSWDYHKTTFTATTHNYSYLNLTNDANEVNILKSRIPKEAEHINGDRTLYQFGATFTQKALMKANEILETQSSNARKKLIFHVTDGVPTMSYAINFNPYISTSYQNQFNSFLNKIPDRSGILQEDFIINGDDYQIVKGDGESFKLFSDRKVPVTGGTTQAAYRVPQNQLSVMSNEGYAINSGYIYLYWRDYNWVYPFDPKTKKVSATKQIKTHGEPTTLYFNGNIRPKGYDIFTVGIGVNGDPGATPLEAEKFMQSISSKTENYTNVDDTNKIYDELNKYFKTIVEEKHSIVDGNVTDPMGEMIEFQLKNGQSFTHDDYVLVGNDGSQLKNGVALGGPNSDGGILKDVTVTYDKTSQTIKINHLNLGSGQKVVLTYDVRLKDNYISNKFYNTNNRTTLSPKSEKEPNTIRDFPIPKIRDVREFPVLTISNQKKMGEVEFIKVNKDKHSESLLGAKFQLQIEKDFSGYKQFVPEGSDVTTKNDGKIYFKALQDGNYKLYEISSPDGYIEVKTKPVVTFTIQNGEVTNLKADPNANKNQIGYLEGNGKHLITNTPKRPPGVFPKTGGIGTIVYILVGSTFMILTICSFRRKQL

SEQ ID NO: 3915 - DNA, 849 bp, Streptococcus agalactiae
atgaaaaagcggctagtcaaaatagtcacaataattcgaaataataaaatcagaaccctcatttttgtgatgggaagtctgattctcttatttccgattgtgagccaggtaagttactaccttgcttcgcatcaaaatattaatcaatttaagcgggaagtcgctaagattgatactaatacggttgaacgacgcatcgctttagctaatgcttacaatgagacgttatcaaggaatcccttgcttatagacccttttaccagtaagcaaaaagaaggtttgagagagtatgctcgtatgcttgaagttcatgagcaaataggtcatgtggcaatcccaagtattggggttgatattccaatttatgctggaacatccgaaactgtgcttcagaaaggtagtgggcatttggagggaaccagtcttccagtgggaggtttgtcaacccattcagtactaactgcccaccgtggcttgccaacagctaggctatttaccgacttaaataaagttaaaaaaggccagattttctatgtgacgaacatcaaggaaacacttgcctacaaagtcgtgtctatcaaagttgtggatccaacagctttaagtgaggttaagattgtcaatggtaaggattatataaccttgctgacttgcacaccttacatgatcaatagtcatcgtctcttggtaaaaggagagcgtattccttatgattctaccgaggcggaaaagcacaaagaacaaaccgtacaagattatcgtttgtcactagtgttgaagatactactagtattattaattggactcttcatcgtgataatgatgagaagatggatgcaacatcgtcaa

SEQ ID NO: 3916 - protein, 283 aa, Streptococcus agalactiae
MKKRLVKIVTIIRNNKIRTLIFVMGSLILLFPIVSQVSYYLASHQNINQFKREVAKIDTNTVERRIALANAYNETLSRNPLLIDPFTSKQKEGLREYARMLEVHEQIGHVAIPSIGVDIPIYAGTSETVLQKGSGHLEGTSLPVGGLSTHSVLTAHRGLPTARLFTDLNKVKKGQIFYVTNIKETLAYKVVSIKVVDPTALSEVKIVNGKDYITLLTCTPYMINSHRLLVKGERIPYDSTEAEKHKEQTVQDYRLSLVLKILLVLLIGLFIVIMMRRWMQHRQ

SEQ ID NO: 3917 - DNA, 915 bp, Streptococcus agalactiae
atgggacaaaaatcaaaaatatctctagctacgaatattcgtatatggatttttcgtttaattttcttagcgggtttccttgttttggcatttcccatcgttagtcaggtcatgtactttcaagcctctcacgccaatattaatgcttttaaagaagctgttaccaagattgaccgggtggagattaatcggcgtttagaacttgcttatgcttataacgccagtatagcaggtgccaaaactaatggcgaatatccagcgcttaaagacccctactctgctgaacaaaagcaggcaggggtcgttgagtacgcccgcatgcttgaagtcaaagaacaaataggtcatgtgattattccaagaattaatcaggatatccctatttacgctggctctgctgaagaaaatcttcagaggggcgttggacatttagaggggaccagtcttccagtcggtggtgagtcaactcatgccgttctaactgcccatcgagggctaccaacggccaagctatttaccaatttagacaaggtaacagtaggtgaccgtttttacattgaacacatcggcggaaagattgcttatcaggtagaccaaatcaaagttatcgcccctgatcagttagaggatttgtacgtgattcaaggagaagatcacgtcaccctattaacttgcacaccttatatgataaatagtcatcgcctcctcgttcgaggcaagcgaattccttatgtggaaaaaacagtgcagaaagattcaaagaccttcaggcaacaacaatacctaacctatgctatgtgggtagtcgttggacttatcttgctgtcgcttctcatttggtttaaaaagacgaaacagaaaaagcggagaaagaatgaaaaagcggctagtcaaaatagtcacaataattcgaaa

SEQ ID NO: 3918 - protein, 305 aa, Streptococcus agalactiae
MGQKSKISLATNIRIWIFRLIFLAGFLVLAFPIVSQVMYFQASHANINAFKEAVTKIDRVEINRRLELAYAYNASIAGAKTNGEYPALKDPYSAEQKQAGVVEYARMLEVKEQIGHVIIPRINQDIPIYAGSAEENLQRGVGHLEGTSLPVGGESTHAVLTAHRGLPTAKLFTNLDKVTVGDRFYIEHIGGKIAYQVDQIKVIAPDQLEDLYVIQGEDHVTLLTCTPYMINSHRLLVRGKRIPYVEKTVQKDSKTFRQQQYLTYAMWVVVGLILLSLLIWFKKTKQKKRRKNEKAASQNSHNNSK

SEQ ID NO: 3919 - DNA, 921 bp, Streptococcus agalactiae
atgaaacaaacattaaaacttatgttttcttttctgttgatgttagggactatgtttggaattagccaaactgttttagcgcaagaaactcatcagttgacgattgttcatcttgaagcaagggatattgatcgtccaaatccacagttggagattgcccctaaagaagggactccaattgaaggagtactctatcagttgtaccaattaaaatcaactgaagatggcgatttgttggcacattggaattccctaactatcacagaattgaaaaaacaggcgcagcaggtttttgaagccactactaatcaacaaggaaaggctacatttaaccaactaccagatggaatttattatggtctggcggttaaagccggtgaaaaaaatcgtaatgtctcagctttcttggttgacttgtctgaggataaagtgatttatcctaaaatcatctggtccacaggtgagttggacttgcttaaagttggtgtggatggtgataccaaaaaaccactagcaggcgttgtctttgaactttatgaaaagaatggtaggactcctattcgtgtgaaaaatggggtgcattctcaagatattgacgctgcaaaacatttagaaacagattcatcagggcatatcagaatttccgggctcatccatggggactatgtcttaaaagaaatcgagacacagtcaggatatcagatcggacaggcagagactgctgtgactattgaaaaatcaaaaacagtaacagtaacgattgaaaataaaaaagttccgacacctaaagtgccatctcgaggaggtcttattcccaaaacaggtgagcaacaggcaatggcacttgtaattattggtggtattttaattgctttagccttacgattactatcaaaacatcggaaacatcaaaataaggat

SEQ ID NO: 3920 - protein, 307 aa, Streptococcus agalactiae
MKQTLKLMFSFLLMLGTMFGISQTVLAQETHQLTIVHLEARDIDRPNPQLEIAPKEGTPIEGVLYQLYQLKSTEDGDLLAHWNSLTITELKKQAQQVFEATTNQQGKATFNQLPDGIYYGLAVKAGEKNRNVSAFLVDLSEDKVIYPKIIWSTGELDLLKVGVDGDTKKPLAGVVFELYEKNGRTPIRVKNGVHSQDIDAAKHLETDSSGHIRISGLIHGDYVLKEIETQSGYQIGQAETAVTIEKSKTVTVTIENKKVPTPKVPSRGGLIPKTGEQQAMALVIIGGILIALALRLLSKHRKHQNKD

SEQ ID NO: 3921 - DNA, 1743 bp, Streptococcus agalactiae
gtgctaaactttaatagttttgtgcttaataataatcagcacttacaaagaacaaagggaaaagcgaggagagaacttttaatgaaattatcgaagaagttattgttttcggctgctgttttaacaatggtggcggggtcaactgttgaaccagtagctcagtttgcgactggaatgagtattgtaagagctgcagaagtgtcacaagaacgcccagcgaaaacaacagtaaatatctataaattacaagctgatagttataaatcggaaattacttctaatggtggtatcgagaataaagacggcgaagtaatatctaactatgctaaacttggtgacaatgtaaaaggtttgcaaggtgtacagtttaaacgttataaagtcaagacggatatttctgttgatgaattgaaaaaattgacaacagttgaagcagcagatgcaaaagttggaacgattcttgaagaaggtgtcagtctacctcaaaaaactaatgctcaaggtttggtcgtcgatgctctggattcaaaaagtaatgtgagatacttgtatgtagaagatttaaagaattcaccttcaaacattaccaaagcttatgctgtaccgtttgtgttggaattaccagttgctaactctacaggtacaggtttcctttctgaaattaatatttaccctaaaaacgttgtaactgatgaaccaaaaacagataaagatgttaaaaaattaggtcaggacgatgcaggttatacgattggtgaagaattcaaatggttcttgaaatctacaatccctgccaatttaggtgactatgaaaaatttgaaattactgataaatttgcagatggcttgacttataaatctgttggaaaaatcaagattggttcgaaaacactgaatagagatgagcactacactattgatgaaccaacagttgataaccaaaatacattaaaaattacgtttaaaccagagaaatttaaagaaattgctgagctacttaaaggaatgacccttgttaaaaatcaagatgctcttgataaagctactgcaaatacagatgatgcggcatttttggaaattccagttgcatcaactattaatgaaaaagcagttttaggaaaagcaattgaaaatacttttgaacttcaatatgaccatactcctgataaagctgacaatccaaaaccatctaatcctccaagaaaaccagaagttcatactggtgggaaacgatttgtaaagaaagactcaacagaaacacaaacactaggtggtgctgagtttgatttgttggcttctgatgggacagcagtaaaatggacagatgctcttattaaagcgaatactaataaaaactatattgctggagaagctgttactgggcaaccaatcaaattgaaatcacatacagacggtacgtttgagattaaaggtttggcttatgcagttgatgcgaatgcagagggtacagcagtaacttacaaattaaaagaaacaaaagcaccagaaggttatgtaatccctgataaagaaatcgagtttacagtatcacaaacatcttataatacaaaaccaactgacatcacggttgatagtgctgatgcaacacctgatacaattaaaaacaacaaacgtccttcaatccctaatactggtggtattggtacggctatctttgtcgctatcggtgctgcggtgatggcttttgctgttaaggggatgaagcgtcgtacaaaagataac

SEQ ID NO: 3922 - protein, 581 aa, Streptococcus agalactiae
MLNFNSFVLNNNQHLQRTKGKARRELLMKLSKKLLFSAAVLTMVAGSTVEPVAQFATGMSIVRAAEVSQERPAKTTVNIYKLQADSYKSEITSNGGIENKDGEVISNYAKLGDNVKGLQGVQFKRYKVKTDISVDELKKLTTVEAADAKVGTILEEGVSLPQKTNAQGLVVDALDSKSNVRYLYVEDLKNSPSNITKAYAVPFVLELPVANSTGTGFLSEINIYPKNVVTDEPKTDKDVKKLGQDDAGYTIGEEFKWFLKSTIPANLGDYEKFEITDKFADGLTYKSVGKIKIGSKTLNRDEHYTIDEPTVDNQNTLKITFKPEKFKEIAELLKGMTLVKNQDALDKATANTDDAAFLEIPVASTINEKAVLGKAIENTFELQYDHTPDKADNPKPSNPPRKPEVHTGGKRFVKKDSTETQTLGGAEFDLLASDGTAVKWTDALIKANTNKNYIAGEAVTGQPIKLKSHTDGTFEIKGLAYAVDANAEGTAVTYKLKETKAPEGYVIPDKEIEFTVSQTSYNTKPTDITVDSADATPDTIKNNKRPSIPNTGGIGTAIFVAIGAAVMAFAVKGMKRRTKDN

SEQ ID NO: 3923 - DNA, 117 bp, Streptococcus agalactiae
atgattgatgacttgttggcaactagcctcaaactgtgtttggaaaaaggcatcgatagacacaagaagactacgtatactggtagtaggaaaacaagggacaagctttatatagga

SEQ ID NO: 3924 - protein, 39 aa, Streptococcus agalactiae
MIDDLLATSLKLCLEKGIDRHKKTTYTGSRKTRDKLYIG

SEQ ID NO: 3925 - DNA, 1230 bp, Streptococcus agalactiae
atgataatgaaggcggtctatcaaatggttacattcgattttaaacatgttcaaacattgcataccatatctcaactacctatttcagtcatgtcacgagacaaggaactcgttcagttatatggtaacgaagactatctgttgccttactatcagtttttaaaacatttagctatcccttataaccaagatatcactgtttatgagggtctttttgaagaatcattcttaatttttcctgtctgtcaatatcttattgctattggaccattttatccctatagccctgatatcaataggcaagaacagttatccagtcgctttctagaacaattttctcatcgtaataaaaaagaaatcttatcctatataaagcttgtcccttgttttcctactaccagtatacgtagtcttcttgtgtctatcgatgcctttttccaaacacagtttgaggctagttgccaacaagtcatcaatcatttattagaagagtcagaacagattgttgcggatcctgatattgttcttcacctaaaacatactaagaaaaactcttttcagttacccactgttttaaaccatctcaatcacattattgatctcgttaagctgggtaacactcaactgttaaagcaagaaattaatcgcctcccatcatccagtgttacctcatcttcaatccctgccctaagagctgaaaagaacttaactgttgtttacttaacaaaattactagaattaagtttcgaggaaaatactgatgtggctaaaagttatgcgctggtaaagcactatatggctttaaacgaagaggctcctgatcttattgatgtttcaagaattcgctgtgcagctcttattgatttttcagaatccttaaccaataagagcatctctgacaagcagcaaatgtacaatagtattctccattatgtggacaaccacctctactccaaactcaaagtatctgatattgccaactacctatatatctcagattcccacttacgctcagtttttaaaaaatactctgacatttccttgcaaagttatattctaaaggcaaaaattaaggagggacaattactactgcaaagaggggtaccgattggggaagtagcgaaattattacatttttacgacaccacacattttcttaaaacctttaaaaaatacgtgggaatatcttcaaacgaatatcttactaaatatcgtgagacctcatgccag

SEQ ID NO: 3926 - protein, 410 aa, Streptococcus agalactiae
MIMKAVYQMVTFDFKHVQTLHTISQLPISVMSRDKELVQLYGNEDYLLPYYQFLKHLAIPYNQDITVYEGLFEESFLIFPVCQYLIAIGPFYPYSPDINRQEQLSSRFLEQFSHRNKKEILSYIKLVPCFPTTSIRSLLVSIDAFFQTQFEASCQQVINHLLEESEQIVADPDIVLHLKHTKKNSFQLPTVLNHLNHIIDLVKLGNTQLLKQEINRLPSSSVTSSSIPALRAEKNLTVVYLTKLLELSFEENTDVAKSYALVKHYMALNEEAPDLIDVSRIRCAALIDFSESLTNKSISDKQQMYNSILHYVDNHLYSKLKVSDIANYLYISDSHLRSVFKKYSDISLQSYILKAKIKEGQLLLQRGVPIGEVAKLLHFYDTTHFLKTFKKYVGISSNEYLTKYRETSCQ

SEQ ID NO: 3927 - DNA, 345 bp, Streptococcus agalactiae
atggataaaattattaaatcaatttctgcctctggtgccttcaggtcttatgtcctcgatagcaccgagactgttaaattggctcaggaaaaacatcataccttgtcgtcttcaacagttgctcttggtcgcaccctgattgctaatcaaatattagcggctaatcaaaaaggcgatagcaagattacggttaaagtcatcggtgattcttcctttggtcatattatctctgttgcagataccaaagggcatgttaaggggtacatccaaaatactggtgttgacatcaaaaaacggtcacaggtgaagttttggttggcccttttatggggaatggtcattttg

SEQ ID NO: 3928 - protein, 115 aa, Streptococcus agalactiae
MDKIIKSISASGAFRSYVLDSTETVKLAQEKHHTLSSSTVALGRTLIANQILAANQKGDSKITVKVIGDSSFGHIISVADTKGHVKGYIQNTGVDIKKRSQVKFWLALLWGMVIL

SEQ ID NO: 3929 - DNA, 870 bp, Streptococcus pyogenes
atggataaaataattaaatcaatagcacaatcaggggcttttagggcttatgtccttgatagcactgagacggttgcattagctcaagaaaaacacaacacgctgtcatcgtctactgttgcgcttggccgtaccttgatcgccaaccagattttggcggctaatcaaaaaggcgatagtaaaatcaccgtcaaagtgattggtgattcttcttttggacacattatctctgtggcagataccaaaggacatgtgaaaggttacattcaaaatactggtgtcgatattaaaaagaccgcaacaggtgaagtccttgttgggccttttatggggaatggtcattttgtgacgattattgattatggcacaggtaacccttacacctcaacaacgcctcttattactggggaaattggtgaggattttgcctactacttaaccgaatcagagcaaacaccatctgcaatcggacttaatgtgcttttagatgaaaatgataaggttaaggttgctggtggctttatggtgcaggtgctaccaggcgcttctgaagaagagattgctcgctatgaaaaacgcctgcaagaaatgcctgccatttctcacctactagcttccaaaaatcatgtggatgcccttttggaggccatctatggagatgaaccttacaagcgtctttctgaagaacctctgagttttcagtgtgactgttctagagaacgttttgaagcagccctaatgactttgccaaaagcagatttacaggccatgattgacgaagataagggtgctgagattgtttgccaattttgtggtaccaagtaccaatttaatgaaagtgatttggaggccattatcagtgataaagct

SEQ ID NO: 3930 - protein, 290 aa, Streptococcus pyogenes
MDKIIKSIAQSGAFRAYVLDSTETVALAQEKHNTLSSSTVALGRTLIANQILAANQKGDSKITVKVIGDSSFGHIISVADTKGHVKGYIQNTGVDIKKTATGEVLVGPFMGNGHFVTIIDYGTGNPYTSTTPLITGEIGEDFAYYLTESEQTPSAIGLNVLLDENDKVKVAGGFMVQVLPGASEEEIARYEKRLQEMPAISHLLASKNHVDALLEAIYGDEPYKRLSEEPLSFQCDCSRERFEAALMTLPKADLQAMIDEDKGAEIVCQFCGTKYQFNESDLEAIISDKA

SEQ ID NO: 3931 - DNA, 147 bp, Streptococcus agalactiae
gtgcaggaagttttgattatcgcaagagagaatcatcaagtgactcatgaacacgtgtcaatcttattgacctgcgttcaagaattgattgtggaagtcaatcaaacacagccactcagtcgtgagtttcgtgaaaagtatatgggt

SEQ ID NO: 3932 - protein, 49 aa, Streptococcus agalactiae
MQEVLIIARENHQVTHEHVSILLTCVQELIVEVNQTQPLSREFREKYMG

SEQ ID NO: 3933 - DNA, 819 bp, Streptococcus agalactiae
ttgtgtcgtgttttacgtgtcaatcgctccacttactataaatttctaaaacataagccctcaaaaagagaattggataatcaaatttataaaaaacaaatacttgagatttataccaaagcaaacaaaagacttggtgtgaagtctatcaaagtcattcttcaaagagactacgacacaaaaatctctgaaggaagaatttaccatctgatgaagaatatggcgctccctaaaatggctaccgttaagacaaaaacagctcttaaaaagactcaaaaaacgtatcctcaaaacttactcaaccagaaattttatcctgacaaacctaatcaagtatggtctactgacttcacctatatttctattggatataagaaatatgtctatctctgcgcaatacttgatctctattctagaaaatgtattgcttggaaattgagtcaccgtatggatgcaaagttagcatgtaacactctagaattagctcttaataaaagaaagattgaaggaacacttctctttcattccgaccaagggtcacaatttaaggccagggaatttagaaaaataattgatgacaacaatatcatgcattctttttctaaacctggatatccttatgataatgccgtaactgaagcatttttcaagtatttaaagcatagacaaatcaaccgaaaacattatcaaaatatcaaacaggttcaattagactgctttgaatacattgagaatttttataacaattacatcccacatacggctaatctaggactaacccctaatcagaaagaagaaaattattttaacgcaataaaa

SEQ ID NO: 3934 - protein, 273 aa, Streptococcus agalactiae
MCRVLRVNRSTYYKFLKHKPSKRELDNQIYKKQILEIYTKANKRLGVKSIKVILQRDYDTKISEGRIYHLMKNMALPKMATVKTKTALKKTQKTYPQNLLNQKFYPDKPNQVWSTDFTYISIGYKKYVYLCAILDLYSRKCIAWKLSHRMDAKLACNTLELALNKRKIEGTLLFHSDQGSQFKAREFRKIIDDNNIMHSFSKPGYPYDNAVTEAFFKYLKHRQINRKHYQNIKQVQLDCFEYIENFYNNYIPHTANLGLTPNQKEENYFNAIK

SEQ ID NO: 3935 - DNA, 516 bp, Streptococcus agalactiae
ttgagagtttatgaaaataaagaagagttgaaaaaagaaataagtaaaacatttgagaaatacattatggaatttaataatattccagagaatctaaaagataaaagaattgatgaagttgatagaactccagcagccaacctttcttatcaggttggctggaccaacttggttcttaaatgggaagaagatgaaagaaagggacttcaagtaaaaacaccatcggataaatttaaatggaatcaacttggtgaattatatcagtggttcacagatacctacgctcatttatctctgcaagagttgaaagcaaaattaaatgaaaatattaattctatctatgcaatgattgatttgttgagtgaggaagaattatttgaagcgcatatgagaaagtgggctgatgaagcgactaaaacagcgacttgggaagtgtataagtttattcatgtaaatacggttgcaccttttggaactttcagaactaaaatcagaaaatggaagaagatagtatta

SEQ ID NO: 3936 - protein, 172 aa, Streptococcus agalactiae
MRVYENKEELKKEISKTFEKYIMEFNNIPENLKDKRIDEVDRTPAANLSYQVGWTNLVLKWEEDERKGLQVKTPSDKFKWNQLGELYQWFTDTYAHLSLQELKAKLNENINSIYAMIDLLSEEELFEAHMRKWADEATKTATWEVYKFIHVNTVAPFGTFRTKIRKWKKIVL

SEQ ID NO: 3937 - DNA, 747 bp, Streptococcus agalactiae
atggaggttcttatgaagaaagtgttagtgagtagtcttttggttttagggattacgataacgttacaaacagtagttgaggctaaggggccaaaagtagcttatacacaagagggaatgactgctctttcggacacaaataaagataaagtcactactatttctattgacgagattcaaaaaagcttagaaggtaagaagccgattactgttagttttgatattgatgatacactgcttttcagtagtcaatattttcaatatggtaaagaatatgtaactcctggatcgtttgattttcttcataaacaaaaattctgggatcttgttgcaaaacgaggagatcaagattccattcccaaagaatatgctaaaaaattaattgctatgcatcaaaaacgaggagataaaattgtttttataacaggtaggacaagagggtcaatgtataaggagggcgaggttgataaaacagctaaagccttagctaaagattttaaattagacaaaccaattgctgtaaattatacaggcgataaacctaaaaagccatacaaatatgataaatcatattatattaagaaatatggttcagacattcattatggagatagtgatgacgatattcatgcagctagggaggccggtgctagaccaattagaattttaagagcacctaattctacaaatctacctttaccagaagctggaggctacggtgaagaggttctcgaaaattcagcttac

SEQ ID NO: 3938 - protein, 249 aa, Streptococcus agalactiae
MEVLMKKVLVSSLLVLGITITLQTVVEAKGPKVAYTQEGMTALSDTNKDKVTTISIDEIQKSLEGKKPITVSFDIDDTLLFSSQYFQYGKEYVTPGSFDFLHKQKFWDLVAKRGDQDSIPKEYAKKLIAMHQKRGDKIVFITGRTRGSMYKEGEVDKTAKALAKDFKLDKPIAVNYTGDKPKKPYKYDKSYYIKKYGSDIHYGDSDDDIHAAREAGARPIRILRAPNSTNLPLPEAGGYGEEVLENSAY

SEQ ID NO: 3939 - DNA, 729 bp, Streptococcus pyogenes
atgaaaaaagaatttaccagtatcctgtttacagttagtttttgtggaatcatagcattgcctgtcgaagctagtggccctaaagttccttatacacaagaaggtataacggccatttcaaatcaggcaacagtaaaattgatttctattgctgatatcgcgagcagtttagaaggacaaaaacctataacggttagttttgatatcgatgatactttgttatttactagccaatattttcagtacggcaaagaatatataactccaggctcatttgattttttgcataagcaaaaattttgggacttggtcgctaaacggggagatcaggattctattccaaaagagtatgcaaagcaactaatcgcaatgcatcaaaaacgaggagataaaattgtctttattactggccgaactcgaggatcgatgtataaaaaaggtgagattgataaaacagctaagtcactggctaaagattttaagttagacaagccaatagctatcaattatacaggagataaagctgtgaagccgtatcagtatgataaaacatattatataaagaaaaacggctcacaaattcattacggagatagtgatgaagatataaatgctgccaaagaggcaggtgcaagacctattcgcattttaagagctcctaattcaaccaatcttcctttgccaaaagctggaggatacggagaagaggttttagaaaattcggcttat

SEQ ID NO: 3940 - protein, 243 aa, Streptococcus pyogenes
MKKEFTSILFTVSFCGIIALPVEASGPKVPYTQEGITAISNQATVKLISIADIASSLEGQKPITVSFDIDDTLLFTSQYFQYGKEYITPGSFDFLHKQKFWDLVAKRGDQDSIPKEYAKQLIAMHQKRGDKIVFITGRTRGSMYKKGEIDKTAKSLAKDFKLDKPIAINYTGDKAVKPYQYDKTYYIKKNGSQIHYGDSDEDINAAKEAGARPIRILRAPNSTNLPLPKAGGYGEEVLENSAY

SEQ ID NO: 3941 - DNA, 219 bp, Streptococcus agalactiae
ttgccaactatgcagctgttagatgagttagttcttccaaaagacattaccatagcagatgtcagtcaaagtatccaagaatttgaaatagaaagagatgcccttcaagaattttttgacgatatgctgaagacttatacaacctaccaagaaatgaaagattatattaaatctcgtgaagcgaacactcctaagcaagagacagaagaaaaatcactt

SEQ ID NO: 3942 - protein, 73 aa, Streptococcus agalactiae
MPTMQLLDELVLPKDITIADVSQSIQEFEIERDALQEFFDDMLKTYTTYQEMKDYIKSREANTPKQETEEKSL

SEQ ID NO: 3943 - DNA, 1398 bp, Streptococcus agalactiae
gtgtataaactaaagacttcaaatgatagatataaaaggaaaattatgttacataaaaatgatattattgaaactgaaattagcgacattagccatgagggaatgggtattgccaaagtagatggctttgttttctttgttgaaaatgctcttccaggtgagattattaagatgcgcgtcttgaaattacgtaagcgtataggatatggaaaagttgaggaatatttaacgacttctcctcaccgaaatgaaggattagactatacctatttacgtacagggattgctgatttgggacatcttacttatgaacaacagctgttatttaaacaaaaacaagtagctgataacctttataaaattgctcatatatctgatgttttagtagaacctactcttggtatgacaatccctttggcatatcgaaataaagctcaggtaccagttcgtcgtgttgatggacagctagagacaggttttttcagaaaaaattcacatactctggtatccattgaagattatttaattcaggaaaaagagattgatgctctgattaattttacacgagatttattaagaaaatttgatgttaaaccatatgacgaagagcagcaatctggtttaattagaaatctcgttgttcgtcgaggacattatacagggcaattaatgttggttttggtgacaacacgtcctaaaatattccgcattgaccaaatgattgaaaagttggtgtctgcctttccttctgttgtttcaattatgcaaaatattaatgatcgtaatagcaacgttatttttgggaaagaatttcgtactctatatggttctgatactattgaggaccaaatgttaggaaatacttacgctatatcagcccaatctttttaccaagttaatactgaaatggctgaaaaactgtaccaaaaagcaatcgatttttcagatttaaactcagaggatatcgttattgatgcctattcaggtataggaacaattggcttatctgttgctaaacaagtaaaacatgtttatggtgttgaagttgttgaaaaagcagtaagtgatgccaaagaaaatgctactcgaaatgggataactaacagtacctatgttgctgattcggctgaaaatgcaatggcaaagtggcttaaagaaggtataaaaccaactgttataatggttgatccaccacgaaaaggattaacggagagttttgtatattctgctgcccaaacaaaagcagataaaatcacttatatttcttgtaattcagcgacaatggcgcgtgatatcaaactatttgaagaattagggtatcatttagtaaaaattcaaccagtagacttattcccaatgacacatcatgtggagtgtgtggctctgctcgtaaaagcc

SEQ ID NO: 3944 - protein, 466 aa, Streptococcus agalactiae
MYKLKTSNDRYKRKIMLHKNDIIETEISDISHEGMGIAKVDGFVFFVENALPGEIIKMRVLKLRKRIGYGKVEEYLTTSPHRNEGLDYTYLRTGIADLGHLTYEQQLLFKQKQVADNLYKIAHISDVLVEPTLGMTIPLAYRNKAQVPVRRVDGQLETGFFRKNSHTLVSIEDYLIQEKEIDALINFTRDLLRKFDVKPYDEEQQSGLIRNLVVRRGHYTGQLMLVLVTTRPKIFRIDQMIEKLVSAFPSVVSIMQNINDRNSNVIFGKEFRTLYGSDTIEDQMLGNTYAISAQSFYQVNTEMAEKLYQKAIDFSDLNSEDIVIDAYSGIGTIGLSVAKQVKHVYGVEVVEKAVSDAKENATRNGITNSTYVADSAENAMAKWLKEGIKPTVIMVDPPRKGLTESFVYSAAQTKADKITYISCNSATMARDIKLFEELGYHLVKIQPVDLFPMTHHVECVALLVKA

SEQ ID NO: 3945 - DNA, 1386 bp, Streptococcus pyogenes
atggttagccctagaaaaggaaaaagaataagaatgttgaaaaaaaatgatattatccaagttgctatttcagatttaagccatgagggagcaggtgtcgctaaacacgatggttttgttttctttgttgataatgccttgccagaagaagtgattgacatgcgtgtcttaaaggtcaataaaaacagcggttttggcaaagtagaagcctatcattacctgtcgtcagctagaaatgcagatgtcaatttaacttatttgcgaacaggcattgcagaccttggacatctaacttatgaagaccaactgactttcaaaaagaaacaagttcaggacagcctctataaaattgctggaatcagtgacgtgacagtcgaaagcacgattgggatgacagaacctttagcttaccgaaataaggctcaagttcctgttagacgtgttaatggtcagctagaaacaggctttttccgcaagcattctcatgacttgattcctatttcggattattatattcaggacaaagagattgatcgtctcattaattttacccgtgatttattacgccgctttgatattaaaccgtatgacgaaacagaacaaacaggtctcttgagaaatattgttgttcgccgaggtcattactctggagaaatgatgctggtcttagtgactacacgcccaaaagttttccgtgttgaccaagtcattgaaaaaatcgttgaagcttttccagcagtggtgtctattattcaaaatattaatgataagaacaccaatgcaatctttggtaaagatttcaaaacgctttacggcaaggataccattactgatagcatgcttggaaacaactatgccatttctgctcagtctttctaccaagtgaatacggttatggcagaaaaactctatcaaacagctatagccttttcagacctttctaaagatgatattgtgattgacgcctactcaggtatcggaaccattggcctatcatttgctaaaaccgttaaagctgtttatggtgttgaagtgattgaagcagctgttagagatgctcaacagaatgccgctcttaatggcatcaccaatgcctactttgtcgcagataccgcagaacatgccatggcaacatgggcgaaagatggcatcaaaccaagtgttattctggtagacccgccacgaaaaggcttaacagaaagtttcatccaagccagcgtggcaatgggaccacaaaaaattacctacgtttcctgcaacccagccaccatggcgcgtgacataaagcgttatcaagagttgggttacaaactggccaaagtacagcccgtagatttgtttccgcaaacgcatcacgtcgagtgcgtagtattgctaatcaaggag

SEQ ID NO: 3946 - protein, 462 aa, Streptococcus pyogenes
MVSPRKGKRIRMLKKNDIIQVAISDLSHEGAGVAKHDGFVFFVDNALPEEVIDMRVLKVNKNSGFGKVEAYHYLSSARNADVNLTYLRTGIADLGHLTYEDQLTFKKKQVQDSLYKIAGISDVTVESTIGMTEPLAYRNKAQVPVRRVNGQLETGFFRKHSHDLIPISDYYIQDKEIDRLINFTRDLLRRFDIKPYDETEQTGLLRNIVVRRGHYSGEMMLVLVTTRPKVFRVDQVIEKIVEAFPAVVSIIQNINDKNTNAIFGKDFKTLYGKDTITDSMLGNNYAISAQSFYQVNTVMAEKLYQTAIAFSDLSKDDIVIDAYSGIGTIGLSFAKTVKAVYGVEVIEAAVRDAQQNAALNGITNAYFVADTAEHAMATWAKDGIKPSVILVDPPRKGLTESFIQASVAMGPQKITYVSCNPATMARDIKRYQELGYKLAKVQPVDLFPQTHHVECVVLLIKE

SEQ ID NO: 3947 - DNA, 1371 bp, Streptococcus agalactiae
atgtcaagaaataattacggtcagctaaatcatcatgaagagctacgatataactatcttttaaaaaacatccattatcttaatgaacgtgaaaagatggaatttcagtaccttcattataaaaaaacagcagtacgaccacagagaaggacagaaagtccaccaactaattcttattatgaggaaccttattctgattcttattatcaagatgacgatttttactcagagcctcagctaacctcacaaggtttaccaatttatcaagaagagagagctccgaagaagaaaaaacaaagggccagaaaagaaaaacagagggtgaaggttatggcgcctttccctccaaaggctataaccccccctagaaagaaaaaaaaatttaagggtttcctaaagttcataggtattatattactaattgttttatcaggtatggttttcatgtttgttaaaggaatgcgtgatgtgaataatgggaagtcacattatagccctgcaattattgaagattttaagggaaaagatgctgttgatgggactaatatcttaattttaggtagtgataaacgtgtcagcgagagatctactgatgcgagaacagataccataatggttgctaatgttggtaacaaggataataaggttaagatggtgagttttatgcgagatctcttagtcaatattcctaattatagtacggaaggttactatgatatgaaattaaatgcgtcttttaatttgggagaacaagataatcataaaggagcagagtatgttcgacaaacgttgaaaaatcattttgatattgatataaaatattatgttatggttgactttgagacatttgcagatgctattgatacactgtttcctaatggtgtcaagattaatgctaaatttggacttgtcggtggacaatctgctgattcagttaaagttcctgatgatttaaggatgaaaaatggcgttgtacctagccaaaaaattaaggttgggattcagtacatggatggaaggacccttctaaattatgctcgtttcagaaaagacgatgatggggactttggtcgaacacaacgtcaacaacaagttatgagagctattgtctctcaaataaaagacccacgtcgtctctttacaggttctgctgctatcggtaaagcctatgctttaacttcaagtaatttatcttatagctttgtcctaacagatggcattccaattttatcagatgctaaaaatggtattaagcaaatgacaattccaagagaaggagattgggtagatgattatgaccagtatggtggtcaagggttaacaattgattttgctaagtacaaaaagatcctaaagaaaatgggactgcgt

SEQ ID NO: 3948 - protein, 457 aa, Streptococcus agalactiae
MSRNNYGQLNHHEELRYNYLLKNIHYLNEREKMEFQYLHYKKTAVRPQRRTESPPTNSYYEEPYSDSYYQDDDFYSEPQLTSQGLPIYQEERAPKKKKQRARKEKQRVKVMAPFPPKAITPPRKKKKFKGFLKFIGIILLIVLSGMVFMFVKGMRDVNNGKSHYSPAIIEDFKGKDAVDGTNILILGSDKRVSERSTDARTDTIMVANVGNKDNKVKMVSFMRDLLVNIPNYSTEGYYDMKLNASFNLGEQDNHKGAEYVRQTLKNHFDIDIKYYVMVDFETFADAIDTLFPNGVKINAKFGLVGGQSADSVKVPDDLRMKNGVVPSQKIKVGIQYMDGRTLLNYARFRKDDDGDFGRTQRQQQVMRAIVSQIKDPRRLFTGSAAIGKAYALTSSNLSYSFVLTDGIPILSDAKNGIKQMTIPREGDWVDDYDQYGGQGLTIDFAKYKKILKKMGLR

SEQ ID NO: 3949 - DNA, 1449 bp, Streptococcus pyogenes
atgacaaaataccccatgggtggccttagtcaccatgaagaattacgttatttttatctcctaaggaatttgagttaccttagtgagaatgaaaaaaaagagtttgcttttttaaaatctaaattggaaattggtcgagcttatgctccttctaagcagcattataggaagtcaaaacggcaagaaccttactttgaagatgactactataacgactactcaccaaatgatttactagaagatgatgacgtcaatcatgactcttcttttgttccatatggtttaccgatatatcctaaagaagacagatatttaaacaaaaaaacaaaacttacagctcgtagacctatagatgctccgcagcctattgatgaagacgatgcttttttaacagagtctgttgctcgttgtgctcttcctagatctcaaaaaaggaagcataagaaaaaaggatgtatgaaatggttttttaacattcttggcttattgctaatgactgtgcttatggggttagggttgatgtttgcaaaaggggtttttgatatttctactaataaagctaattacaaaccagctgtttcccaagcttttgatggtcaagaaactcaagatggtacgaacattctgattttgggttctgaccaacgagttactcaaggttctacagatgctcgcacagataccattatggttgtcaatgtcggcaaccatgctaaaaaaataaaaatggtctcttttatgcgtgacactttgattaacattccaggatacagttataatgataattcgtatgatcttaaattaaatagtgcatttaatcttggagagcaagaagatcaccacggagcagagtacgttcgacgggccttaaaacataattttgatatcgacattaagtattatgtgatggtagattttgaaacatttgcagaagctattgacaccttgtttccaaatggtgttaagattgatgccaaatttgcgacagtaggtggtgtagctgttgactccgtagaagttccagatgacttgcgaatgaaaaatggggttgttcccaaccaaaccatcgaagttggagaacaacgcatggatggtagaaccttgctcaactatgctcgtttccgtaaagatgacgaaggagatttcggacgaaccgtccggcagcaacaggttatgtcagctgttatgtcccaaatcaaagacccaactaaactctttacagggtctgcggctattggtaaaatctatgcgctgacttcgaccaatgtttctttcccatttgttgttaaaaatggtgtttctgttttaggaagtgggaaaaatggagttgagcacgtgaccatcccagaaaatggggattgggttgacgaatacgatatgtatggaggacaagccctttacatagattttgataagtatcagaaaacgttagccaaattaggtctgcgc

SEQ ID NO: 3950 - protein, 483 aa, Streptococcus pyogenes
MTKYPMGGLSHHEELRYFYLLRNLSYLSENEKKEFAFLKSKLEIGRAYAPSKQHYRKSKRQEPYFEDDYYNDYSPNDLLEDDDVNHDSSFVPYGLPIYPKEDRYLNKKTKLTARRPIDAPQPIDEDDAFLTESVARCALPRSQKRKHKKKGCMKWFFNILGLLLMTVLMGLGLMFAKGVFDISTNKANYKPAVSQAFDGQETQDGTNILILGSDQRVTQGSTDARTDTIMVVNVGNHAKKIKMVSFMRDTLINIPGYSYNDNSYDLKLNSAFNLGEQEDHHGAEYVRRALKHNFDIDIKYYVMVDFETFAEAIDTLFPNGVKIDAKFATVGGVAVDSVEVPDDLRMKNGVVPNQTIEVGEQRMDGRTLLNYARFRKDDEGDFGRTVRQQQVMSAVMSQIKDPTKLFTGSAAIGKIYALTSTNVSFPFVVKNGVSVLGSGKNGVEHVTIPENGDWVDEYDMYGGQALYIDFDKYQKTLAKLGLR

SEQ ID NO: 3951 - DNA, 510 bp, Streptococcus agalactiae
atgcctaaggtattattgggattcatgggagttggcaagactagtgttgccaactgcttagaaaatgaagtaattgatatggatagtctgattgaaaaacatattggtatgtcaatttcccgattttttacagaagaaggagaagcctcctttcgtgctttagaatctcaatttttaaacgaacttttaaagaaaaaaaatgaaggacttgtgatagctagtggaggaggtattgtactccttgaagaaaatcgtcgtcttttaactttaaatcgtcataataatattcttttaacaggaagttttgaagtcttatatcatcgtataaaaaaagatgagaagaatagaagaccattatttttaaaccattcaaaagaagaattttatgatatttatcaaaaacgcatgttactctatagtggtttgtctgatatgattattgataccgattatcttacaccacaaaaaatagctactgtaattggagagtcactggttaatttatctaac

SEQ ID NO: 3952 - protein, 170 aa, Streptococcus agalactiae
MPKVLLGFMGVGKTSVANCLENEVIDMDSLIEKHIGMSISRFFTEEGEASFRALESQFLNELLKKKNEGLVIASGGGIVLLEENRRLLTLNRHNNILLTGSFEVLYHRIKKDEKNRRPLFLNHSKEEFYDIYQKRMLLYSGLSDMIIDTDYLTPQKIATVIGESLVNLSN

SEQ ID NO: 3953 - DNA, 489 bp, Streptococcus pyogenes
atgactaaagtgttattgggatttatgggagtggggaaaacaacggtttcgaaacacctaagtatgcactgtaaagatatggatgctattattgaagctaaaatcggtatgtctattgcagctttttttgaacagcatggagaaatagcatttcgaacaattgaaagtcaagtgttaaaagatctattgtttgcaaatgataatagtatcatcgtaacaggtggcggtgtagtggttttacaagaaaatcgacaattactgagaaaaaatcaccagcataatattttattggtagcttcttttgaaactttgtaccagcgtttaaaacatgataaaaagtctcaaagacctctatttcttaagtactctaaggaagcattttatgaattttatcaacaacgtatggtattttatgagggactttcagatttagtaatcagagttgaccatcgtacgcctgaagaagttgccaacatcattgagggttat

SEQ ID NO: 3954 - protein, 163 aa, Streptococcus pyogenes
MTKVLLGFMGVGKTTVSKHLSMHCKDMDAIIEAKIGMSIAAFFEQHGEIAFRTIESQVLKDLLFANDNSIIVTGGGVVVLQENRQLLRKNHQHNILLVASFETLYQRLKHDKKSQRPLFLKYSKEAFYEFYQQRMVFYEGLSDLVIRVDHRTPEEVANIIEGY

SEQ ID NO: 3955 - DNA, 1293 bp, Streptococcus agalactiae
ttgggagttatcatgaaattactgactaatgcaaatactctcaagggaaccatccgtgttcctggcgataaatcaataagtcacagggctattatttttgggagtatatctcagggagttacccgaattgttgatgtcttaagaggcgaggatgttttatcaactatagaggcttttaaacaaatgggggttctaattgaagacgatggcgagataatcactatctatggcaaaggatttgcaggtttaacacaaccgaataatctcttagacatgggaaactctggtacttcaatgcgtctgatagcaggtgtgttagctggtcaagagtttgaagtgacgatggttggagacaatagtttgtcaaagagacctatggatcgtatagcattgcctttaagcaaaatgggagctagaatttcgggagtaactaaccgtgatttaccaccattaaaacttcaaggtacaaaaaaattaaaacctattttttaccatttacccgtagcttctgcacaagtaaaatcagctttaatttttgcggctttacaaactaagggagaatctctcattgtagaaaaagagcaaacaaggaatcatactgaggacatgattcggcaatttggtggacatttggatattaaagataaagaaattcgactcaatggcggtcagagcttagtaggacaagatataagagttcctggtgatatttcgagtgctgccttttggatagtagcgggtcttattattcctaacagtcatattattttagaaaacgtaggtataaacgagacacgaactggaatccttgatgtcgtcagtaaaatgggtggaaaaattaagttatcttcggttgataatcaagtaaaatcagcaacccttacagttgattactctcatctacaagctactcatatttctggggctatgattccacgtctgattgatgaattacctattattgctcttttagcaacacaagctcaaggcaccacagtcatagcagatgctcaggaattaaaggtgaaagagacagatcggattcaggtcgttgtcgaatcgctaaaacagatgggtgctgatattactgctacagcagatggtatgattatacgtggtaatacccctcttcacgctgcttcacttgattgtcatggagatcatagaataggaatgatgatagctattgctgctctcttggtcaaagaaggcgaagtagatttatctggtgaagaagctattaatacaagctatcctaactttttagaacatttggagggattagttaatgcc

SEQ ID NO: 3956 - protein, 431 aa, Streptococcus agalactiae
MGVIMKLLTNANTLKGTIRVPGDKSISHRAIIFGSISQGVTRIVDVLRGEDVLSTIEAFKQMGVLIEDDGEIITIYGKGFAGLTQPNNLLDMGNSGTSMRLIAGVLAGQEFEVTMVGDNSLSKRPMDRIALPLSKMGARISGVTNRDLPPLKLQGTKKLKPIFYHLPVASAQVKSALIFAALQTKGESLIVEKEQTRNHTEDMIRQFGGHLDIKDKEIRLNGGQSLVGQDIRVPGDISSAAFWIVAGLIIPNSHIILENVGINETRTGILDVVSKMGGKIKLSSVDNQVKSATLTVDYSHLQATHISGAMIPRLIDELPIIALLATQAQGTTVIADAQELKVKETDRIQVVVESLKQMGADITATADGMIIRGNTPLHAASLDCHGDHRIGMMIAIAALLVKEGEVDLSGEEAINTSYPNFLEHLEGLVNA

SEQ ID NO: 3957 - DNA, 1290 bp, Streptococcus pyogenes
atgaaacggatgaaattgcgaacaaatgcaggaccattacagggaacgattcaagttccaggagacaagtccattagtcaccgggcagtcatattaggagccgttgctaaaggggaaacacgagtaaaaggactcttaaaaggagaagatgtgctttccacgattcaagcctttaggaatttgggggtccgtatcgaagaaaaagatgaccagcttgtgatagaaggtcaaggttttcaaggattgaacgctccttgtcagacacttaatatgggaaattctggaacctctatgcgcctcattgctggcttattggcaggtcaaccttttagtgtcaaaatgattggcgatgaaagcttatccaaacgtcctatggatcggattgtttatccgttaaagcaaatgggggttgagatatctggagaaacagataggcaatttcctccactacaattgcaaggtaatcgtaatttacaaccaatcacatataccttgcctatctcttctgctcaggttaagtcagctattttattagcagctttgcaagcaaaaggaacaacacaggttgttgaaaaagagattactcgaaaccatacagaagaaatgattcaacaatttggtggacgattgatagttgatggtaaacgcattactttggtgggaccccagcagctcactgctcaagagataactgtccccggagatatttctagtgcagctttttggcttgtcgccggcttaattattcctggttcggagctccttttaaagaatgttggagtcaatccgacacgaacagggattcttgaagtggttgaaaaaatgggagcacagattgtctatgaagatatgaataagaaagagcaagtaactagtattcgagtggtatattctaacatgaaaggaactatcatatcaggaggtcttatccctcgattgattgatgaactgcccatcattgcacttcttgcaacccaagcacaaggaacaacctgtattaaagatgctcaagaattacgagtcaaagaaacagatcgtattcaagtagtaactgatattcttaacagtatgggagctaatatcaaagcgacagcagatggcatgattatcaaaggccctacggtactatatggggctaacacaagtacctatggagatcatcgtattggtatgatgacagcaattgcagccttgcttgttaaacaaggacaggtccatttggataaagaagaagccatcatgacgtcttatccaacgtttttcaaagatttagaaaggctgtgtcatgac

SEQ ID NO: 3958 - protein, 430 aa, Streptococcus pyogenes
MKRMKLRTNAGPLQGTIQVPGDKSISHRAVILGAVAKGETRVKGLLKGEDVLSTIQAFRNLGVRIEEKDDQLVIEGQGFQGLNAPCQTLNMGNSGTSMRLIAGLLAGQPFSVKMIGDESLSKRPMDRIVYPLKQMGVEISGETDRQFPPLQLQGNRNLQPITYTLPISSAQVKSAILLAALQAKGTTQVVEKEITRNHTEEMIQQFGGRLIVDGKRITLVGPQQLTAQEITVPGDISSAAFWLVAGLIIPGSELLLKNVGVNPTRTGILEVVEKMGAQIVYEDMNKKEQVTSIRVVYSNMKGTIISGGLIPRLIDELPIIALLATQAQGTTCIKDAQELRVKETDRIQVVTDILNSMGANIKATADGMIIKGPTVLYGANTSTYGDHRIGMMTAIAALLVKQGQVHLDKEEAIMTSYPTFFKDLERLCHD

SEQ ID NO: 3959 - DNA, 1062 bp, Streptococcus agalactiae
atgaaaagaaaacagtttataaaattaggaattgcaaccttactaacggttatttcgctttacacaccaataaacctagctacaaatcataccacagaaaatattgttactgctcaagagtataaaacaaaagagaatggtactttaccttttaaacacaaacgacaattggttttaggagagttggatgacaaaggtcgtgccacattcgcacatattcagctaaaagttaaagatgaacccaagaaaaagagagtaaaacgtttaaaaacaacccctgttggatggcacaattttaaattctattataatgatggtactcaaaaagcttggctaatgagccgaggccgtcttatttgccaccaatttagtggactaaacaatgaaagaaagaatttagttccaatgacgaattggctaaatactggaaactacaatagcacgaattcatctaaccctgagagcatgctattctatgaaaaacaactaaagacttggctttcgactcataaaaactactacttagattataaagtaacaccaatttatcaaaataatgaactaattccaagaaaaattgaattaaaatatgttggtattgataagactgggaaattattacctatttttatcggaaacaaatccactcaagatcaattcggcatcagcactgttaccttagagaatacctcaccaaatgctaccattgactacctcagcggaaaggctcaaaatactgtcttatcagctaaagaacaaagaaaacttatcgctaagcacgaagaagaaaaacgacttgcagaaaagaaagttgaagaggaaaaagctgctgctgaaactcagaaaaaactggaagaagaacaagcaaggcttgctgctgaagctcaaaggaagcaaaaagaggagcaagcaaggctcgcagctgaaactcagaaaaaacaagaaactctagtacaagaacaaactagtcaaggctacaaacgtgactatagaggaaggtggcatcgtccaaatggacaatacgcttcaaaagcagaaatcgctgctgctggattgcaatgg

SEQ ID NO: 3960 - protein, 354 aa, Streptococcus agalactiae
MKRKQFIKLGIATLLTVISLYTPINLATNHTTENIVTAQEYKTKENGTLPFKHKRQLVLGELDDKGRATFAHIQLKVKDEPKKKRVKRLKTTPVGWHNFKFYYNDGTQKAWLMSRGRLICHQFSGLNNERKNLVPMTNWLNTGNYNSTNSSNPESMLFYEKQLKTWLSTHKNYYLDYKVTPIYQNNELIPRKIELKYVGIDKTGKLLPIFIGNKSTQDQFGISTVTLENTSPNATIDYLSGKAQNTVLSAKEQRKLIAKHEEEKRLAEKKVEEEKAAAETQKKLEEEQARLAAEAQRKQKEEQARLAAETQKKQETLVQEQTSQGYKRDYRGRWHRPNGQYASKAEIAAAGLQW

SEQ ID NO: 3961 - DNA, 756 bp, Streptococcus pyogenes
atgaaattatctaaacaaaaggcaagtttgcttaccgctgttttactgttactttctctttctataacgacaataactgttgacgcagctagggtacgaacttatccgaatgtatcccatgcaaacacacattataaaaatactgtttctagtaagctcttaccttttactgctaattatcagttacaacttggtgagttggataaccttaaccgcgctaccttttcacatatccaactgcaagatagacacgaaactaaagatgtacgcactaaaataaattatgaccctgtgggatggcacaactatcaatttccatacggagatggctcaaaatcttcatgggtaatgaatcgtgggcatctagtcggatatcaattttgtggattaaacgatgaaccaagaaatttagtggcaatgacagcctggctaaacacaggtgcttattcaggagcaaatgacagcaatcctgaagggatgttatactatgaaaaccgtttagattcttggcttgcacttcaccctgacttttggctagattataaagtcactcctatatatagtggcaatgaagtagtgcctcgacaaattgaattacagtatgttggaattgattcatctggtgagttgcttactataaggctaaatagtaataaagaaagtattgatgaaaatggtgttactacagtaatcttagaaaactctgctccaaatatcaaccttgactatttaaatggaactgccactcctaaaaac

SEQ ID NO: 3962 - protein, 252 aa, Streptococcus pyogenes
MKLSKQKASLLTAVLLLLSLSITTITVDAARVRTYPNVSHANTHYKNTVSSKLLPFTANYQLQLGELDNLNRATFSHIQLQDRHETKDVRTKINYDPVGWHNYQFPYGDGSKSSWVMNRGHLVGYQFCGLNDEPRNLVAMTAWLNTGAYSGANDSNPEGMLYYENRLDSWLALHPDFWLDYKVTPIYSGNEVVPRQIELQYVGIDSSGELLTIRLNSNKESIDENGVTTVILENSAPNINLDYLNGTATPKN

SEQ ID NO: 3963 - DNA, 1305 bp, Streptococcus agalactiae
atgtcaattattactgatgtttacgcacgcgaagtccttgactcacgcggtaacccaacacttgaagtagaagtttatacagaatcaggtgctttcggacgtggtatggttccttcaggagcttctactggtgaacacgaagcagttgaacttcgcgacggcgacaagtctcgttacggtggtcttggaacacaaaaagctgttgacaatgtaaataacgttattgcagaagcaatcattggttatgatgtacgcgaccaacaagctatcgaccgtgctatgatcgctcttgacggaactcctaataaaggtaaattaggtgcaaatgctattcttggtgtttctattgccgtagcacgtgctgcagctgattaccttgaagtaccactttacagctaccttggtggattcaacactaaagttcttccaactccaatgatgaacatcatcaacggtggttctcactcagacgctccaatcgcattccaagaattcatgattatgccagttggtgcaccaactttcaaagaagcacttcgttggggtgctgaagtattccatgctcttaagaaaatccttaaagaacgtggtcttgaaacagctgttggtgatgaaggtggatttgcacctaaatttgaaggtactgaagatggcgtagaaactattcttaaagctattgaagcagctggttacgaagctggcgaaaacggaatcatgattggttttgactgtgcttcatcagagttctacgatgcagaacgtaaagtatacgactacagtaaattcgaaggtgaaggtggagcagttcgtactgctgcagaacaaatcgattaccttgaagagttggttaacaaatacccaatcatcactattgaagatggtatggatgaaaacgactgggatggttggaaagctcttacagaacgccttggtggacgtgtacaattagttggtgacgatttcttcgttacaaatactgattacttagcacgtggtatcaaagaagaagctgctaactcaatccttatcaaagttaaccaaatcggtactttgacagaaactttcgaagctattgaaatggctaaagaagctggttacactgcagttgtatcacaccgttcaggtgaaactgaagattcaacaatcgctgatatcgcagttgcaactaacgctggtcaaattaaaacaggttcattatcacgtactgaccgtattgctaaatacaaccaattacttcgtatcgaagaccaacttggtgaagttgctcaatacaaaggtatcaaatcattctacaacttaaaaaaa

SEQ ID NO: 3964 - protein, 435 aa, Streptococcus agalactiae
MSIITDVYAREVLDSRGNPTLEVEVYTESGAFGRGMVPSGASTGEHEAVELRDGDKSRYGGLGTQKAVDNVNNVIAEAIIGYDVRDQQAIDRAMIALDGTPNKGKLGANAILGVSIAVARAAADYLEVPLYSYLGGFNTKVLPTPMMNIINGGSHSDAPIAFQEFMIMPVGAPTFKEALRWGAEVFHALKKILKERGLETAVGDEGGFAPKFEGTEDGVETILKAIEAAGYEAGENGIMIGFDCASSEFYDAERKVYDYSKFEGEGGAVRTAAEQIDYLEELVNKYPIITIEDGMDENDWDGWKALTERLGGRVQLVGDDFFVTNTDYLARGIKEEAANSILIKVNQIGTLTETFEAIEMAKEAGYTAVVSHRSGETEDSTIADIAVATNAGQIKTGSLSRTDRIAKYNQLLRIEDQLGEVAQYKGIKSFYNLKK

SEQ ID NO: 3965 - DNA, 1305 bp, Streptococcus pyogenes
atgtcaattattactgatgtatacgctcgcgaagtccttgactcacgcggtaacccaacacttgaagtagaagtttatacagaatcaggtgcattcggacgtggtatggttccttcaggagcttcaactggtgaacatgaagccgttgaacttcgtgatggtgacaaatctcgttaccttggtctaggtactcaaaaagcagttgataacgttaataacattatcgctgaggcaatcatcggttacgatgttcgcgatcaacaagctatcgaccgtgcaatgatcgctcttgacggtactcctaacaaaggcaaacttggtgctaatgctattcttggtgtttctatcgctgttgctcgtgcagctgctgactatcttgaagtgccactttacacttaccttggcggattcaacactaaagttcttccaactcctatgatgaacatcatcaacggtggatcacactcagatgccccaattgcattccaagagttcatgatcatgccagttggtgcacctactttcaaagaaggtcttcgttggggtgctgaagttttccacgctcttaagaaaattcttaaagaacgcggacttgttacagctgtaggtgacgaaggtggatttgctcctaaatttgaaggaactgaagacggtgtagaaactatccttaaagctattgaagcagctggttacgaagctggtgaaaacggcattatgatcggttttgactgtgcatcatcagaattctacgacaaagaacgtaaagtttacgactatactaaatttgaaggtgaaggcgctgctgttcgtacatctgcagaacaagttgattaccttgaagagttggttaacaaatacccaattattactatcgaagatggtatggatgaaaacgactgggatggttggaaagttcttactgaacgcctaggcaaacgtgttcaattggttggtgacgacttcttcgttacaaacactgaataccttgctcgtggtatcaaagaaaatgcagctaactcaatccttatcaaagttaaccaaatcggtactttgactgaaacgtttgaagctatcgaaatggctaaagaagctggatatactgccgttgtatcacaccgttcaggtgaaactgaagattcaacaatcgctgacatcgcagttgcaacaaacgctggccaaatcaaaacaggttcattgtcacgtacagaccgtattgctaaatacaaccaattacttcgtatcgaagatcaacttggtgaagttgctcaatacaaaggtatcaaatcattctataacttaaaaaaa

SEQ ID NO: 3966 - protein, 435 aa, Streptococcus pyogenes
MSIITDVYAREVLDSRGNPTLEVEVYTESGAFGRGMVPSGASTGEHEAVELRDGDKSRYLGLGTQKAVDNVNNIIAEAIIGYDVRDQQAIDRAMIALDGTPNKGKLGANAILGVSIAVARAAADYLEVPLYTYLGGFNTKVLPTPMMNIINGGSHSDAPIAFQEFMIMPVGAPTFKEGLRWGAEVFHALKKILKERGLVTAVGDEGGFAPKFEGTEDGVETILKAIEAAGYEAGENGIMIGFDCASSEFYDKERKVYDYTKFEGEGAAVRTSAEQVDYLEELVNKYPIITIEDGMDENDWDGWKVLTERLGKRVQLVGDDFFVTNTEYLARGIKENAANSILIKVNQIGTLTETFEAIEMAKEAGYTAVVSHRSGETEDSTIADIAVATNAGQIKTGSLSRTDRIAKYNQLLRIEDQLGEVAQYKGIKSFYNLKK

SEQ ID NO: 3967 - DNA, 186 bp, Streptococcus agalactiae
atgacaatagcccaactcattgttaaccaaagagggcttactttagcgttaactccaaagagtaaacctggtagcatcatccataagaatgaagctccagcaaagaaaagtccatacgcaaattttttaggtgatgaaggttgcttacttccccatttagcccataaccaagcaaagaatggtaca

SEQ ID NO: 3968 - protein, 62 aa, Streptococcus agalactiae
MTIAQLIVNQRGLTLALTPKSKPGSIIHKNEAPAKKSPYANFLGDEGCLLPHLAHNQAKNGT

SEQ ID NO: 3969 - DNA, 1080 bp, Streptococcus agalactiae
atggttggtaatttatatggagaaaatgattctcgtcgtgatgctggttttagtatctttgtttttggtattaaccttggtgcttttatttcacccattgtagtggggtacctcggacaagaagtaaatttccatcttggtttctcacttgctgctattggtatgttctttggtctcctccaatataccttagatggaaaaaaatatttgactgaagagagtctcagaccaaacgatcctttaagtcctgaagaaaagtcctctctatataaaaaagttgggcttatccttattggtattgttattgtacttattctacttcacttgatgcatatgctaacaattgaagtaattatcgatatttttagtattattgcaatcgccatcccaattatttattttatcaagattttaagtagtaaaaagatttcttctgttgagcgttctcgagtgtgggcatatatccctctctttatcgcctcaattctattttggtcaattgaagaacaaggttcagttgtcttagccttatttgcagatgaacaaacaaaactttaccttaacttctttgggcatcatattaatttcccatcaagttatttccaaagtatgaaccctctcttcattatgctttatgtaccattctttgcttggttatgggctaaatggggaagtaagcaaccttcatcacctaaaaaatttgcgtatggacttttctttgctggagcttcattcttatggatgatgctaccaggtttactctttggagttaacgctaaagtaagccctctttggttaacaatgagttgggctattgtcatcgttggggaaatgctaatctcaccagttggattatcagcaactagtaagctcgcacctaaagcattccaagctcaaatgatgagcatctggttcttaagtaatgctgcagcacaagctattaacgctcaaatcgttaaattgtacacacctgatactcaaactctttattatggtgttgttggtggtataacagttgtatttggatttatcctcttattttatgttccacgcattgaaaaactaatgtctggagttaaa

SEQ ID NO: 3970 - protein, 360 aa, Streptococcus agalactiae
MVGNLYGENDSRRDAGFSIFVFGINLGAFISPIVVGYLGQEVNFHLGFSLAAIGMFFGLLQYTLDGKKYLTEESLRPNDPLSPEEKSSLYKKVGLILIGIVIVLILLHLMHMLTIEVIIDIFSIIAIAIPIIYFIKILSSKKISSVERSRVWAYIPLFIASILFWSIEEQGSVVLALFADEQTKLYLNFFGHHINFPSSYFQSMNPLFIMLYVPFFAWLWAKWGSKQPSSPKKFAYGLFFAGASFLWMMLPGLLFGVNAKVSPLWLTMSWAIVIVGEMLISPVGLSATSKLAPKAFQAQMMSIWFLSNAAAQAINAQIVKLYTPDTQTLYYGVVGGITVVFGFILLFYVPRIEKLMSGVK

SEQ ID NO: 3971 - DNA, 189 bp, Streptococcus agalactiae
atgtcacgcagtcaaaaagttattttaactaatatgtgtcttattgaagataataaaggacgtattgtgatgcaaatccgtgatcctaaacgttattcttggtcaggagctgctttaccaggcggccatattgaagaaggagaatgctctcgttcgagaagttcacgaggagacaggtttaacaataag

SEQ ID NO: 3972 - protein, 63 aa, Streptococcus agalactiae
MSRSQKVILTNMCLIEDNKGRIVMQIRDPKRYSWSGAALPGGHIEEGECSRSRSSRGDRFNNK

SEQ ID NO: 3973 - DNA, 1323 bp, Streptococcus agalactiae
atgattaacttatttgatagttacactcaatcaagttgggatttacatttttccttgataaaatcaggttatattaaccctactatagctttgaatgatgatggttttttaccagacgacgtaacatcaccctatttatattacactggttttgcaaagacaggtgctggccgcccactttactacaatgaacttagagttcctgatacatgggaaattattggttttagtagtggtgctgatattgttgacttaggtgtcaaaaagggcagaattatttatgcaaacccaaatcataagcgtctaataaaagaggtagactggtttgatgagcaaggtagagtcattttaaaagatcgctttaataagtttgggttctgttttgcacaaaccttttataacgcggatggtcaagcgattcagacgtcatattataataaggataggcaagaggttatatcagagaaccatatgacaggggattatattttaaatgataataatcagtttaaggtttttaaatctaaagttgaatttgtcataaattatcttcaagaagcaaaatttaacttagatagaatcttctataattctctgtcaacaccatttttagtaagcttttaccttaatcgtctagagagtaaagatgttctcttttggcaggagcctctcgtagatgatattccaggaaatatgcgcttattattgaacaatccttccccaaacactaaaattgtaattcaaagttatgaagcttatgctaatgctatgaggttattaactgacgaagaacaaaaacaagttagctttttaggatttatgtatcctcttaaagagacagaaaaattacataaccaagctcttattttgacgaattctgatcaaatcgaagcattagaaagtttagtgacttctcttcctaatttgacttttaacataggtgctttgaccgagatgtctagtgatctcatgaattttggcaaatatgataatgttgtactctacccaaatatcacaacaaatcaaatacaatatttatcaaatatttgtgctttttatcttgatattaatcatcataatgagatattatcagcagttcgctctgcttttgaacatcaacagttaatttttgctttcgaagagactagtcatcaaattcgttttgtatcacctaaaaatatttttccaaaaaaagatatttttacatttatttcgcacttgcagccactaattggcaataaatgtaatatagaaaaagcattaaaacagcagcttgaagattgtcatgtttcaagctctactcagtatcaatctgtaattaat

SEQ ID NO: 3974 - protein, 441 aa, Streptococcus agalactiae
MINLFDSYTQSSWDLHFSLIKSGYINPTIALNDDGFLPDDVTSPYLYYTGFAKTGAGRPLYYNELRVPDTWEIIGFSSGADIVDLGVKKGRIIYANPNHKRLIKEVDWFDEQGRVILKDRFNKFGFCFAQTFYNADGQAIQTSYYNKDRQEVISENHMTGDYILNDNNQFKVFKSKVEFVINYLQEAKFNLDRIFYNSLSTPFLVSFYLNRLESKDVLFWQEPLVDDIPGNMRLLLNNPSPNTKIVIQSYEAYANAMRLLTDEEQKQVSFLGFMYPLKETEKLHNQALILTNSDQIEALESLVTSLPNLTFNIGALTEMSSDLMNFGKYDNVVLYPNITTNQIQYLSNICAFYLDINHHNEILSAVRSAFEHQQLIFAFEETSHQIRFVSPKNIFPKKDIFTFISHLQPLIGNKCNIEKALKQQLEDCHVSSSTQYQSVIN

SEQ ID NO: 3975 - DNA, 1506 bp, Streptococcus agalactiae
atgacagtttataatataaaccatggaattggttgggcaagcagcggtgttgagtacgctcaagcataccgaggttctgttttgagaaaacttggaattgatgctaagtttatttttacagattttttttcagctgataatattattagcctcacgcgaaatataggttttcaggataaagaaattatttggttatataattttttttcagatattgagcttgccccgacaacttttagtatagaagatttgcaaaaacaatatcttggaaaacttgttcgaaaagaagataaaggtcgggtaatcaagtttttctacgaagatgaaaatatctatttaacagtttaccttgataattttaacaaggataaagtgcatcgtgtagaaatcgtttcaaataacaaccttatcagaaaagattattatagttatacacgtactttctcagagtattactatcctaaagatggtgtagctcacctttatcaacgtagattctacaatgaagatgaaagtacagcctttttggagatggtagaaaatagctcaagtcgttttattatcaatggcagacttttaccatccaaagtagctttttttgattattttttggaatcaatgactttcacttcaaaagatattattcttttggatagaggaactgataccgctcagagtcttttgcgccatggtaaacccgctaagctagggactgttgttcatgcggaacattttagtgagaatgctgtgactgctgacactattttatggaataactattacgattatcagtttactaacgctaatagatttgatttttttattacctccactgataaacaaacagaacttttggaacaacaatttaaacaatttacaaatcataatcctagaattataactatcccggtaggctcaattgacaatcttaaaatgccaatggacaatcgccgtccgtactctattttgacagcttcacgcctagctagtgaaaaacatgtagattggttagtacgtgcagttattaggataagagaaattcttcctgaagtgacctttgatatctatggatcaggtggagaagaagaaaaaattagaaatattataaatgcagccaatgcaacggaatacattcgattgatgggacataaaaatctctcgaatgtttatcaaaattatgagttatatttgacagcttctaaaagtgaggggtttggcttaactttacttgaagctattggcgcaggacttcctttgattgggtttgatgttcgttatggtaatcaaacttttatcaaagacggagaaaatggttatctaattcctcgatttgatatggatgatgaggaagctattgtagaagcttttaaagagaaagtgttacaattattccaacaggatcaaaaggctttacgagaagcttcttacgccattgccgaaggattcttaacaaatgaagtagaaggaaaatggtataacttagttaaggagttggtacaagatgat

SEQ ID NO: 3976 - protein, 502 aa, Streptococcus agalactiae
MTVYNINHGIGWASSGVEYAQAYRGSVLRKLGIDAKFIFTDFFSADNIISLTRNIGFQDKEIIWLYNFFSDIELAPTTFSIEDLQKQYLGKLVRKEDKGRVIKFFYEDENIYLTVYLDNFNKDKVHRVEIVSNNNLIRKDYYSYTRTFSEYYYPKDGVAHLYQRRFYNEDESTAFLEMVENSSSRFIINGRLLPSKVAFFDYFLESMTFTSKDIILLDRGTDTAQSLLRHGKPAKLGTVVHAEHFSENAVTADTILWNNYYDYQFTNANRFDFFITSTDKQTELLEQQFKQFTNHNPRIITIPVGSIDNLKMPMDNRRPYSILTASRLASEKHVDWLVRAVIRIREILPEVTFDIYGSGGEEEKIRNIINAANATEYIRLMGHKNLSNVYQNYELYLTASKSEGFGLTLLEAIGAGLPLIGFDVRYGNQTFIKDGENGYLIPRFDMDDEEAIVEAFKEKVLQLFQQDQKALREASYAIAEGFLTNEVEGKWYNLVKELVQDD

SEQ ID NO: 3977 - DNA, 2385 bp, Streptococcus agalactiae
atgatagcctttaatagtttattttcgttagataagaaacgtttaaaaaaacttcagcgtactttaaatactatcaatagtttaaagggccaaatggcaacactatcaaatgaggagttgcaagctaagacaactgaatttagaaaacgtttagttaatggggaaacactagatgatatttgtgctgaagcttttgctgttgttagggaagctgatgagcgcgtattaggtctatttccgtatgatgtacaggtaatcggtggtcttgttctgcaccaaggaaatactgctgagatgaaaactggtgaaggaaaaacattaactgccactatgcctttgtatctcaatgctttagaagggaagggggcaatgttgctgactaataattcctaccttgctattcgagatgcggaagaaatgggaaaagtatatcgttttttaggattgagtgtcggtgtgggagtttctgataatgaggaagaggatagagatgctgcgactaagcgagctgtttatagttcggatattgtctatagtacaagtagtgcactaggctttgattatttaattgataacctagcttcatctaaatctcaaaaatatatgcccaagttacattatgctattgtagatgaagctgatgcagttcttctagatatggcccagactcctttagttatttcaggttcacctcgagtacaatctaatctctataaaatagcagatgaactaattcttagttttgaagaacaagttgattattattttgacaaagagcgtcaggaagtgtggataaaaaaccagggtgttcgtgaagctgagagatattttagaatccctcatttttataaacagtctaatcgagaacttgtgcgacatttgaacttatctttaaaagcacataaattatttgaacgaggaaaagattatgtggttgacgatggtgaaatcaagttgctagatgcgactaatggccgtgttttagaaggtactaaacttcaaggaggtgttcatcaagctattgagcaaaaagagcatcttaatgtcacaccagagtctcgagcaatggcttccattacctatcaaaatctttttagaatgtttactaaattggctggaatgacaggaactggaaaaactgctgaaaaagagtttattgaggtctatgatatggaagtagttagaattccaactaattctcctgttagacgaattgactatcctgataagatttatacaaccttaccagagaaaatccatgcaacgattgaatttgttaaacaggttcatgatacaggacaaccaatcctactagttgccggttctgtgagaatgtcagagctattctcagaattattattactaagtggtatccctcatagcctgttaaatgctcaaagtgcggttaaggaagcacagatgattgcagaagcagggcaaaaaggtgcggtcactgttgcaacgaatatggctggtcgtggtacagatattaagttaggtaagggagtatcagaattaggtggtcttgcagttattggaacggagagaatgaagagtcaaagaatggatttacaattaaggggacgttcgggtcgacaaggcgatattggttttagtcaattttttgtatcatttgaagatgatctaatgatagaatcaggtcctaaatgggcgcaagattactttaggaaaaatcgtgacaaagttaatccagaaaaacctaaagccttaggtcagagaagatttcagaagttattccagcaaactcaggaagctagtgacggtaagggagagtctgcacgtagtcaaacgatagagtttgattcgagtgtacagcttcagcgagagtatgtttatcgtgagagaaatgctttgatcaatggagaaagtggacattttagtccaagacagattattgatacagtgatttcttccttcattgcttatttagatggtgaagtagaaaaagaagaactcatttttgaagtaaatcgttttatatttgataatatgtcttacaatcttcaagggatttctaaagagatgtcacttgaagaaattaaaaactatttattcaaaatagccgatgagattcttcgagaaaagcataatttgcttggtgatagttttggtgactttgaacgtactgctgctttaaaagcgattgatgaagcttggattgaagaagtagattatctacaacaattacgtactgtggcaacagctcgtcaaacggcacagcgtaacccggttttcgaatatcataaagaagcatataaatcctacaatatcatgaaaaaagaaattcgtgaacaaacttttagaaatctacttttgagtgaagtatccttcaatgagaatggagatcttcaaatttattttata

SEQ ID NO: 3978 - protein, 795 aa, Streptococcus agalactiae
MIAFNSLFSLDKKRLKKLQRTLNTINSLKGQMATLSNEELQAKTTEFRKRLVNGETLDDICAEAFAVVREADERVLGLFPYDVQVIGGLVLHQGNTAEMKTGEGKTLTATMPLYLNALEGKGAMLLTNNSYLAIRDAEEMGKVYRFLGLSVGVGVSDNEEEDRDAATKRAVYSSDIVYSTSSALGFDYLIDNLASSKSQKYMPKLHYAIVDEADAVLLDMAQTPLVISGSPRVQSNLYKIADELILSFEEQVDYYFDKERQEVWIKNQGVREAERYFRIPHFYKQSNRELVRHLNLSLKAHKLFERGKDYVVDDGEIKLLDATNGRVLEGTKLQGGVHQAIEQKEHLNVTPESRAMASITYQNLFRMFTKLAGMTGTGKTAEKEFIEVYDMEVVRIPTNSPVRRIDYPDKIYTTLPEKIHATIEFVKQVHDTGQPILLVAGSVRMSELFSELLLLSGIPHSLLNAQSAVKEAQMIAEAGQKGAVTVATNMAGRGTDIKLGKGVSELGGLAVIGTERMKSQRMDLQLRGRSGRQGDIGFSQFFVSFEDDLMIESGPKWAQDYFRKNRDKVNPEKPKALGQRRFQKLFQQTQEASDGKGESARSQTIEFDSSVQLQREYVYRERNALINGESGHFSPRQIIDTVISSFIAYLDGEVEKEELIFEVNRFIFDNMSYNLQGISKEMSLEEIKNYLFKIADEILREKHNLLGDSFGDFERTAALKAIDEAWIEEVDYLQQLRTVATARQTAQRNPVFEYHKEAYKSYNIMKKEIREQTFRNLLLSEVSFNENGDLQIYFI

SEQ ID NO: 3979 - DNA, 990 bp, Streptococcus agalactiae
atgagtacgataagctacatttattgggatgatttttcaaggttttcttataattttggaacaaaattacaatttttaggaaaatcagtatgctttgaaaatccattagctccttctagcacaaacttgtatacatggagctcccagactaattatcagtcaaaaagaatttctcctaacttacctttactaagaaagggaactcgttatagcttgtcattaaatgcagaactcgatttagttagctctctttttgttcgcattgaattttacaatcgctttaatgagtctgttggttttgaactgttaaaaaaagatagtattatttttatctatcctaaagaggcttatacctataccattagtttgattaatgcaggttgtagcgattttacttttcattatttgaaacttgaggaagttacagatagcgttattcaggagaaaaatctatcgacagagtttactattgaagaacatcaagacgttttaaatcttcttttggtcgagaaaaaagatagtgtatatattaataaaatagaaagcatttctcaattgcaacagaaagtcgagttggtcagcaatccctcattaaattctgatagtttgatattacctgagttggaaaaggggttagaagatgcattaaaagtttttcctaacattaagattaatgtcattgcgtatggaacacaaggtaattttgctgctttatattatgctaaaaaatttcccagaataactgcctatattaatgattgttttgctcctttcggaattttacttaaatccttaccacacttgactgccaaacaacaaatatttcttagagaagtctgggatacgagagagacgtctccaaatgtaaagcactatggattggtttcagaaaattcctctttaaatttagtatcaatgatcttatctggtaatgaacatctaccttacctcacacttttaaaaaagcaggacgacaattatgatagcctt

SEQ ID NO: 3980 - protein, 330 aa, Streptococcus agalactiae
MSTISYIYWDDFSRFSYNFGTKLQFLGKSVCFENPLAPSSTNLYTWSSQTNYQSKRISPNLPLLRKGTRYSLSLNAELDLVSSLFVRIEFYNRFNESVGFELLKKDSIIFIYPKEAYTYTISLINAGCSDFTFHYLKLEEVTDSVIQEKNLSTEFTIEEHQDVLNLLLVEKKDSVYINKIESISQLQQKVELVSNPSLNSDSLILPELEKGLEDALKVFPNIKINVIAYGTQGNFAALYYAKKFPRITAYINDCFAPFGILLKSLPHLTAKQQIFLREVWDTRETSPNVKHYGLVSENSSLNLVSMILSGNEHLPYLTLLKKQDDNYDSL

SEQ ID NO: 3981 - DNA, 1557 bp, Streptococcus agalactiae
atgtcaaaaataaaacttacaattcttcaagttggtgaagagaactgggcaactaaagagaatatccctaataatatggaatggctctttattaaaccagatcaaatttctgactttgtaactacagaaaataattatcttacatcgtcaaagttattgcaaaaactacctcgaaaaatatctgctcttttgttgacagagcaaacttatggaccagagttatctagtttatcgtcattctttgaggtttatgaagtattttatcctaaagataaacatgctacggggataacagaagagtttttacgctcgaaaatggcccaacgatatgatagtagctctccagatcagctaattcgtcaattttataaagggctttttataggacaatacggagagaaacttcaagtttcacaaatacaaattagaaatgattttgaaggtgtagtaaactatcagggaaataactatcttgaattagaagggcaatttggtgagaactatagttttttgcttaattttgcttacaatattccattttcatcggatttttataatgagttatttttagaacacattatagagggtgatatagatattcgattggttatctcgttgattgttgatggttctgttgatgatattgctaaagagtggtactttgagaaggaagacctaaatcaacttatttctttagagtccgatattagtggtagccttgcagttaaactttttgctaagggaaagggtatcgttaagttaggtccattgcaccgtcgtaatggtagaggaggattgggcacatttctactaggaggagaacgtcacatagatgctataggtcatgaatttatgacttattttgatccagtagatttcaaaccacctctaactgtttatttttcgggatttcgttcagctgaaggctttgagggattctggatgatgaagagtatgaagactccattcatgttaatttgtgatccacgattacaaggtggtgccttttatataggaagcaaagaatatgaacaaaaaatagttgatgctattcaagaaaaactggcctttttaaattttagttctgatcagttaattttatccggactttcaatggggacttatggtgctacttaccatggtgctaagctaaatcctcatgctattattattggtaaaccaatatttaatttaggaacagttgctcaacgtgaaagattagagagaccagatggatttgctacttcattagatattcaactactcaatcaaggtgacttgaccagttcctcttctgagaagttaaataactatttttggaaatctatagaagaaggagatttttcaaatacgacttttgccttagcctatatgaaaaacgatgactatgatgcgactgccttttctgatttattgcaatattttagaggaaagaagcataagatattaggcagaggttgggatggccgacatggtgattgttctgcagaagttggtgcatggtttacaagtcagtataggcgaatgctatctaatgattttggaaggaaagaagaa

SEQ ID NO: 3982 - protein, 519 aa, Streptococcus agalactiae
MSKIKLTILQVGEENWATKENIPNNMEWLFIKPDQISDFVTTENNYLTSSKLLQKLPRKISALLLTEQTYGPELSSLSSFFEVYEVFYPKDKHATGITEEFLRSKMAQRYDSSSPDQLIRQFYKGLFIGQYGEKLQVSQIQIRNDFEGVVNYQGNNYLELEGQFGENYSFLLNFAYNIPFSSDFYNELFLEHIIEGDIDIRLVISLIVDGSVDDIAKEWYFEKEDLNQLISLESDISGSLAVKLFAKGKGIVKLGPLHRRNGRGGLGTFLLGGERHIDAIGHEFMTYFDPVDFKPPLTVYFSGFRSAEGFEGFWMMKSMKTPFMLICDPRLQGGAFYIGSKEYEQKIVDAIQEKLAFLNFSSDQLILSGLSMGTYGATYHGAKLNPHAIIIGKPIFNLGTVAQRERLERPDGFATSLDIQLLNQGDLTSSSSEKLNNYFWKSIEEGDFSNTTFALAYMKNDDYDATAFSDLLQYFRGKKHKILGRGWDGRHGDCSAEVGAWFTSQYRRMLSNDFGRKEE

SEQ ID NO: 3983 - DNA, 1542 bp, Streptococcus agalactiae
atgtttcattttattccatcttggtataatgaaaatcgtacttggtatgataataattacttgtggtatttcaagccgactaatgtcggttttgatgatactatcaaccaaatgaagatgtttgattatgctggaaaagagagtagattagttgtcttaaactatatgcccaatttacgttattatttacatcgctatgacttgttagaatcaggttattattcagtttttgatgatattcaagaaattgggaatgtaagacagcaaatgattgacttccgacaactcaattggcctgaaggggtggactttacctatactccgtttatagttttggtaaaaaagtcaggagatttaattgctaaggttcaatttggtgaagaaggaaatttaacgcatattgattattttgcaaatgaacaaatagctaagaaatacctctttgatgatagaggatttctatctagtattctctattatgataatggtggtgaagcctatcaagattatttagcaccatcaggggaaaggatcatgagagaatacctaagagaaggtgaccaccatgttgaaattaatcctaagaaagctattcattttttaaagttatcttactccgatattgaagagttgattagagagaaatatctgacctatctccataaagaagttagtaaatcagatactatcattgttagctttaatcaagttcataacgcatttattgttgggaacactagtaaaggaaatttaatattatctgttttctcggagaggaataatgctcacaatgtattggaggattactcttccttatctcgagcagacgctattatttgtgatagactagatattgctgcacaattgaaagaaaaaatagataaaccagttgttcatgtttctccctttgatacgcgtttagctttgggaaaaagtaatcaagttagagatttagaaatatattttgtcgtagatagactttcccataaagaattgcaaaagtctttaacatccttatataaggttatgctcaaaaataatgatataaaagtaacatttgtcagctacgaacgagaatttgaaagtcggcaattgacatatgactaccttaaagaagcaacaaaagtttttgatcagaaattctttagtttatcagacgatgatgccaatcaagttcttatgcaatctgatgaagtagaaaaggaaaaaacacgcctttcttttacccatcctttgtcagaaacagatatcataaaccggttagagtatgtccgtttgattattgatatctcgaaaataccagacttatacacgcaaattgcagggataagttcaggtatccctcagataaatacaatattaacagaatttgttgaacacaggaaaaacggttacattattgaagagatccaagaattggaaaaggcaattccttattattgtgaacaattaactaattggaaccgttctttaatttattctattgataaaatcaatgactatacaggtggtcaattggtagaaagaattataaatagttat

SEQ ID NO: 3984 - protein, 514 aa, Streptococcus agalactiae
MFHFIPSWYNENRTWYDNNYLWYFKPTNVGFDDTINQMKMFDYAGKESRLVVLNYMPNLRYYLHRYDLLESGYYSVFDDIQEIGNVRQQMIDFRQLNWPEGVDFTYTPFIVLVKKSGDLIAKVQFGEEGNLTHIDYFANEQIAKKYLFDDRGFLSSILYYDNGGEAYQDYLAPSGERIMREYLREGDHHVEINPKKAIHFLKLSYSDIEELIREKYLTYLHKEVSKSDTIIVSFNQVHNAFIVGNTSKGNLILSVFSERNNAHNVLEDYSSLSRADAIICDRLDIAAQLKEKIDKPVVHVSPFDTRLALGKSNQVRDLEIYFVVDRLSHKELQKSLTSLYKVMLKNNDIKVTFVSYEREFESRQLTYDYLKEATKVFDQKFFSLSDDDANQVLMQSDEVEKEKTRLSFTHPLSETDIINRLEYVRLIIDISKIPDLYTQIAGISSGIPQINTILTEFVEHRKNGYIIEEIQELEKAIPYYCEQLTNWNRSLIYSIDKINDYTGGQLVERIINSY

SEQ ID NO: 3985 - DNA, 1227 bp, Streptococcus agalactiae
ttgaaattactatatatttttgaaaaaaatattattcttcgtaaaatattgataacattttcattaataatcatttttttacttggtcgctatgttccaatacctggtgtcttgatttctgcttataagggacaagacaataactttgcgacgctttattcaacagtaactggtggtaatttgtctcaggttggggtcttttcattgggtattggtcctatgatgaccacaatgattttactaagactatttacgattggtaaatactctagtggagtatctcaaaaagttcaacagtttcgccaaaatgtggtgatgcttgtcatagcaattattcaagggctagccataaccatatcttttcaatatcataatggtttttctctgaccaaattattactcgcgacaatgatacttgtgactggtgcatatattatttcctggattggtaatctaaatgcggaatacgggtttggtggaatgactattttagtggtggtaggtatgcttgttgggcaatttaataatattcctcttatttttgaattattccaagatggttatcaacttgctatcatcttatttcttttgtggacactagtagcaatgtacttaatgataacttttgaacgttcagaatatcgtataccagtaatgcgtacttcaatccataatcgtctcgttgatgatgcctacatgccaataaaagtaaatgcttcgggggggatggcatttatgtatgtttataccttactaatgttcccccagtatattattattttactaagaagtattttcccaactaatccagatatcacatcatacaatgactattttagtttatcttctattcagggagtggttatttatatgattttaatgcttgttttatcagttgcatttacttttgtgaatatcgatccgactaaaatttctgaggcaatgcgagaaagtggtgattttattcctaattatagacctggtaaagaaacacaaagttatttatcgaaaatctgttatttatttggaacttttagtggttttttcatggctttcttaggaggggtaccattattatttgctcttggaaatgatgatcttaggacagtttcatctatgacagggatttttatgatgatcacagggatgtcatttatgatattggatgaattccaagttattcgtattcgtaaacaatacacttctgtatttgaaaatgaggagaat

SEQ ID NO: 3986 - protein, 409 aa, Streptococcus agalactiae
MKLLYIFEKNIILRKILITFSLIIIFLLGRYVPIPGVLISAYKGQDNNFATLYSTVTGGNLSQVGVFSLGIGPMMTTMILLRLFTIGKYSSGVSQKVQQFRQNVVMLVIAIIQGLAITISFQYHNGFSLTKLLLATMILVTGAYIISWIGNLNAEYGFGGMTILVVVGMLVGQFNNIPLIFELFQDGYQLAIILFLLWTLVAMYLMITFERSEYRIPVMRTSIHNRLVDDAYMPIKVNASGGMAFMYVYTLLMFPQYIIILLRSIFPTNPDITSYNDYFSLSSIQGVVIYMILMLVLSVAFTFVNIDPTKISEAMRESGDFIPNYRPGKETQSYLSKICYLFGTFSGFFMAFLGGVPLLFALGNDDLRTVSSMTGIFMMITGMSFMILDEFQVIRIRKQYTSVFENEEN

SEQ ID NO: 3987 - DNA, 1350 bp, Streptococcus pyogenes
ttgctaaaggtggttcaatcgaagtcatctaatgaggggatactcattatgttcttaaaaatactaaaagacgcgttaaagataaagactgtacggaataaaattttctttactatatttatcattcttgtattccgaattgggacacatattaccgtacctggtgtaaatgccaagagcttagagcaattaagtgaactccctttcttaaatatgttaaacttagttagtggtaatgcgatgagaaatttctcagtattttcaatgggggttagcccatatattactgcttctatcgttgttcagttattgcagatggatattttacctaagtttgttgagtggggcaaacaaggtgaggttggacgtcgtaaattaaatcaagcgacgcgctatatttcacttgttttggcttttgcccaatccattggtatcactgcagggtttaatactttgtcgaacgttgcacttgttaagacaccagacatcaaaacatatttactgatcggggcattactgacaacaggtagcgttattgttacctggcttggagaacaaatcacagataaaggatttggtaatggcgtatcaatgattatctttgcgggtattatttcgtctattccaagtgcaattgcaacaattcgtgaagactattttgtaaatgttaaggcaagtgatttacactcgtcttatctcattgttgggattttaatcatagctgttcttgctattgttttctttacaacatatgtccaacaagcggaatataaaattccaatccaatacacaaagctaatgcaaggtgcacctacaagttcatatcttccattaaaagtaaatccagccggcgttattcccgttatctttgctagctcgattacaactatcccaagtacgattattccttttgttcaaaatggtagagatttaccgtggttaaaccgtttgcaagaaatttttaattatcaaactccagtcggaatgatagtttacgccttgttgattatattgttctcattcttctatacctttgtacaagttaatcctgagaagacagcagaaaatcttcagaagaattcctcatatataccaagtgttcgccctggacgtgagacagaacaatttatgtccgcattgctaaaaaaactagcaaccgtaggagctatcttcttagcatttatctctttagcgccaatagcagcacaacaagctctcaacctttcttctagtattgctttaggtggaactagtttgctcattttgatttcaactggtatcgaaggtatgaaacagcttgagggatatcttctaaagagaaaatatgtcggatttatgaatacagcagaa

SEQ ID NO: 3988 - protein, 450 aa, Streptococcus pyogenes
LLKVVQSKSSNEGILIMFLKILKDALKIKTVRNKIFFTIFIILVFRIGTHITVPGVNAKSLEQLSELPFLNMLNLVSGNAMRNFSVFSMGVSPYITASIVVQLLQMDILPKFVEWGKQGEVGRRKLNQATRYISLVLAFAQSIGITAGFNTLSNVALVKTPDIKTYLLIGALLTTGSVIVTWLGEQITDKGFGNGVSMIIFAGIISSIPSAIATIREDYFVNVKASDLHSSYLIVGILIIAVLAIVFFTTYVQQAEYKIPIQYTKLMQGAPTSSYLPLKVNPAGVIPVIFASSITTIPSTIIPFVQNGRDLPWLNRLQEIFNYQTPVGMIVYALLIILFSFFYTFVQVNPEKTAENLQKNSSYIPSVRPGRETEQFMSALLKKLATVGAIFLAFISLAPIAAQQALNLSSSIALGGTSLLILISTGIEGMKQLEGYLLKRKYVGFMNTAE

SEQ ID NO: 3989 - DNA, 1194 bp, Streptococcus agalactiae
atgagagttattaaagtaaaaacaatttcggaaactttagattatatttctaaacataccgcttcggtagcgcgttttggtgatggagaaattgatattattgcggggaattctattccttaccaggtttatgattctgaacttgctaagcgattagaacgtttattaaatcgacagagtaatgagaagttagttatctgtgtaagtgatgtttttgataatttaggtagatacaacgatttttcacaacaattttggagggatcatctatatcagtataatgatttgtaccaaaaaaattgtcaggctgaatggtatggttcaacttttatttctagaccctatatggatttactggataagagtttgtcagtaacgtactttgaacagctaaaagcattatggaaaaataaagatattttaattgtcgagggtgagacttctcgttcaggcgttggcaatgacttatttaatgatgccaatactatttcgcgtatcatttgtccttcgaaagatgcattttcatctttttatgaaatcaaggaaactatacttgaacatagtagaggtaagctaattttacttatgcttggtccaactgcaaagctattagctgaagatttatcgcagctaggacatcaagctattgatttaggtcatatcgattcagaatatgagtggtttaagatgggagcagtttctaaggtgaaactttctcataaacatacggcagaacataattttgacgaagatattactttaatagaagacaatagttacgaaaatcaaattgtatcaaaaattggtacatcagatagacagtacgctttgacagtgacgttaacagatgatatatgggagctagaacatttattacaaagatgtcctaatactgattttcatattgctgccccagtttattgttcggatagacttaagcagttagtaggttatccaaattattacctacatgaagctattactgaagagcaattcgaagtactcctattaaatagcgatatatatttagatattaatcatggtgaagaagtttggaatgttgttgatagatgtataactgagggtaaaactatatatggaatcagacgggcaagaaaagataatcaatatatttcttttgagcgaaccatggatgattttgaatatttgtgtgacactattaaacaaaataga

SEQ ID NO: 3990 - protein, 398 aa, Streptococcus agalactiae
MRVIKVKTISETLDYISKHTASVARFGDGEIDIIAGNSIPYQVYDSELAKRLERLLNRQSNEKLVICVSDVFDNLGRYNDFSQQFWRDHLYQYNDLYQKNCQAEWYGSTFISRPYMDLLDKSLSVTYFEQLKALWKNKDILIVEGETSRSGVGNDLFNDANTISRIICPSKDAFSSFYEIKETILEHSRGKLILLMLGPTAKLLAEDLSQLGHQAIDLGHIDSEYEWFKMGAVSKVKLSHKHTAEHNFDEDITLIEDNSYENQIVSKIGTSDRQYALTVTLTDDIWELEHLLQRCPNTDFHIAAPVYCSDRLKQLVGYPNYYLHEAITEEQFEVLLLNSDIYLDINHGEEVWNVVDRCITEGKTIYGIRRARKDNQYISFERTMDDFEYLCDTIKQNR

SEQ ID NO: 3991 - DNA, 885 bp, Streptococcus agalactiae
atggaggcaatagtgactgataaattagtttctgttattattccagtctataatgcagcaccatatttagaggggtgtgtaaataccattttaggacaaacataccaagtttttgaaattctactgatagatgacggttctacagatacatctgctagtatctgcgatcaattatccctaagagataaccgtattagagttttccatatcgaaaatggcggtgcttctaaagctagaaactttggattagcacgaattagtccagagagccaatttgttacgtttgttgattcggacgattgggtaaaggaaaattatttggaagtactgctagctcagcaagaaaaatataatgctgatattgttatcagtaattactatatctacagagaaacagaagatatttttggttactacatcactgacaaagattttgttatcgaagaaatctctgctcaaacagctattgatagacaagtgcattggcatttaaatagttcagtattcatcgttatttgggggaaattatatcgaagagaactatttgataccatcaccttcccaatagataaagtatttgaagatgagttggtaagtgttttactttttataaaaagtaaaaaaacaattttagttaatggaagctattatggctatagaattcgtccaaatagcattatgacatcggcgttttcatccaaaagagcagaggatcttatttatatttttgatagtaaattgtcggagattatactatcaggattggattcaactgcaactgtagagagatatttttggttaatgcgtgactataaacagcgcttagaacaagaaaatttacagaaaacaataatatataaagtgatatcaaatcggttatcaagg

SEQ ID NO: 3992 - protein, 295 aa, Streptococcus agalactiae
MEAIVTDKLVSVIIPVYNAAPYLEGCVNTILGQTYQVFEILLIDDGSTDTSASICDQLSLRDNRIRVFHIENGGASKARNFGLARISPESQFVTFVDSDDWVKENYLEVLLAQQEKYNADIVISNYYIYRETEDIFGYYITDKDFVIEEISAQTAIDRQVHWHLNSSVFIVIWGKLYRRELFDTITFPIDKVFEDELVSVLLFIKSKKTILVNGSYYGYRIRPNSIMTSAFSSKRAEDLIYIFDSKLSEIILSGLDSTATVERYFWLMRDYKQRLEQENLQKTIIYKVISNRLSR

SEQ ID NO: 3993 - DNA, 90 bp, Streptococcus agalactiae
gtggctaacttaagtaatcttgggccaaaagaggtccaagcagctatatggaagcaactattggggaatagttcaaccaattcttcaata

SEQ ID NO: 3994 - protein, 30 aa, Streptococcus agalactiae
MANLSNLGPKEVQAAIWKQLLGNSSTNSSI

SEQ ID NO: 3995 - DNA, 93 bp, Streptococcus agalactiae
ttgggccaaaagaggtccaagcagctatatggaagcaactattggggaatagttcaaccaattcttcaatataaagcaaatccacggacgttg

SEQ ID NO: 3996 - protein, 31 aa, Streptococcus agalactiae
MGQKRSKQLYGSNYWGIVQPILQYKANPRTL

SEQ ID NO: 3997 - DNA, 936 bp, Streptococcus agalactiae
atggcttatgcaaggtactacattccgcaactgattgatgcagagaaagttctttatttagatattgatactttggttgttgataacttagataagttgtttgagatagaattaggggactacccgatagcagctatcttagatggagacggtatttattttaactcaggtgttatgctaataaactcgctttactggatgagatatcgagtaacagaaaaacttctggaaataacagaacgagaattggataatggaatttttggagaccaaggggttctcaatcttctttttgataataattggcttaagttagaagataagtataatgctcaagttggaaatgatttaggtgccttttatgaaaattggcaagggtattttgatcgtaactttgaatcgcctactattatccattactgtactcatgataaaccatggaatactttttcttcttcaaggtttagggagacatggtggcaatatgagcaactagattggaatgaggtgtttaattttgaaacgtatctgttacctgagccaacatttgaaaaacacttctttactttcacaacgtccgtggatttgctttatattgaagaattggttgaactattccccaatagttgcttccatatagctgcttggacctcttttggcccaagattacttaagttagccacaaactctaacgttcgtctgtatccttcaataaccagcccactttttgaacaactaatgactaaagcaaattattaccttgatatctcaacttcttggaaggaaatacaattttgtcaaaaagctattgagaaatcaattccgatattgagttttaatgaagcagtgacatttgaatatagggagttaagtcattgctttattaatttggaggatatgcgacagtttttatgtaaaaatggaggcaatagtgac

SEQ ID NO: 3998 - protein, 312 aa, Streptococcus agalactiae
MAYARYYIPQLIDAEKVLYLDIDTLVVDNLDKLFEIELGDYPIAAILDGDGIYFNSGVMLINSLYWMRYRVTEKLLEITERELDNGIFGDQGVLNLLFDNNWLKLEDKYNAQVGNDLGAFYENWQGYFDRNFESPTIIHYCTHDKPWNTFSSSRFRETWWQYEQLDWNEVFNFETYLLPEPTFEKHFFTFTTSVDLLYIEELVELFPNSCFHIAAWTSFGPRLLKLATNSNVRLYPSITSPLFEQLMTKANYYLDISTSWKEIQFCQKAIEKSIPILSFNEAVTFEYRELSHCFINLEDMRQFLCKNGGNSD

SEQ ID NO: 3999 - DNA, 1239 bp, Streptococcus agalactiae
atgaaaaatagaaaagctatcgcgttagcggcagattttggctatcaagagcaagttaagactataattaaatcaatatgctttcataatcaatttattgatttttatatcttaaatgacgattttccagttgaatggtttcaaatgatggaatatcatttatctaaaatggattgcacaatatctaacactaaaatttttaatgaagaaattaaacattttaaatttcaaaaaccgatgccctatcctacttactttcgatactttatacctgaagttattcatgaagataaggtactatatttagactgtgatatgattatcaccagtgatttaacatcgatatttactcttgatatttcaaaatatggtgtagcggctgttcgagatgatttgctcgaagaatatgatggtaaagaagattattttaattcaggtttgctattaattaataatattttttggcgagaacaagggattagtcagcgactgttagattatactagagaaaaccaaggggctcttcaatatcatgaccaggatgttttgaatgatgtactgtgcgataattggctagaacttgatgaaacttataactatcatacaggagcagatatgttatataacctattccaacagtctgaacgtcaattaaatcgcaggaaagatttacctaaagttattcattatacagcgacaaaaccatggaaataccttgaaacatctgttcgttggcgcgatatatggtgggaatataatagacttgaatggcgcgatatttttacaagatggcaagtcaatgatggtgtagatgtttcattgaagaaagtgttacaacctatccatcgagctttcatttttacttactcagattcaattgaaggaattgagaggttggctaaggatttaccaaactggcaatttcatattgctgcctatactcaaatttcagaaaaattgaaacaattggaaatgcattcaaatataaaactttatccacttgtttatcgtttcaaattaaatgagctagttgaaaattcagatatttaccttgatattaatcatggtgatgcagatactcaggttctggagcaagtgaagaaattaggtaaagatattttatccctttctacaacttatcatggtcaaggcaaacaatttgagagagttacggatattattgattatttaaagaatgaacgatttaaagaacatattagaaaggaatattgtgaaaaa

SEQ ID NO: 4000 - protein, 413 aa, Streptococcus agalactiae
MKNRKAIALAADFGYQEQVKTIIKSICFHNQFIDFYILNDDFPVEWFQMMEYHLSKMDCTISNTKIFNEEIKHFKFQKPMPYPTYFRYFIPEVIHEDKVLYLDCDMIITSDLTSIFTLDISKYGVAAVRDDLLEEYDGKEDYFNSGLLLINNIFWREQGISQRLLDYTRENQGALQYHDQDVLNDVLCDNWLELDETYNYHTGADMLYNLFQQSERQLNRRKDLPKVIHYTATKPWKYLETSVRWRDIWWEYNRLEWRDIFTRWQVNDGVDVSLKKVLQPIHRAFIFTYSDSIEGIERLAKDLPNWQFHIAAYTQISEKLKQLEMHSNIKLYPLVYRFKLNELVENSDIYLDINHGDADTQVLEQVKKLGKDILSLSTTYHGQGKQFERVTDIIDYLKNERFKEHIRKEYCEK

SEQ ID NO: 4001 - DNA, 1203 bp, Streptococcus agalactiae
atgaagaaaacaattgttttaggtgcagatttccaatatcgtgatcaagttatgacaactataaaatctattgttagtcataatcaacatttaactatttatatcattaacacagattttcccgtagaatggtttaatatccttaaccattctttagaacagtttgactgtagagtaaaaaatattcccataagttcagatgtctttgaggggatacctaccctgagccatatcagtgtggcgggatttttcagatggtttattccaattcaccttgaagaagagatagttttatatttagatagtgatgtaatagttaggggttctttggatcctctatttgacataaaccttgaagagaatttattaggagctgtagcagatcatttttcaacgctttactatggagatacagcaccagttagttttaattcaggtgttatgctaatcaataattcattatggaaaaaagaagaaatttataatagccttatgaggattgctgataagggttctgctgttggggtaggagatcaagaataccttaatattttgactcagaatcgttggatagatatcggtaaacaatataatgttcagattggtcaagatgtcaatattaatgcatatgggcgaccagatttgtatcatttttatgatgattgcgaacctgttattgttcattataatagtcaagataaaccgtggaataaatatagtcaatcgcgataccgttcagaatggtggtattattttggtttagaatggtcagttatttatgctcaacaacaaaaaaatttgaacaggttaacaggtaaaacactgaatttatttacattaacagcctcagatacattagaacatattgaagtacttgcaaaagctctaccagattatcagtttcatattgcagcacgtagtgatatttcagagaaattagctaatctagaaacttatagcaatattaaagtttataaattagttatcaaccctatcttggaagagcttatacgtaactgtgatgtgtacttggatattaatcattcttacgaagtagaaggtattctagataaaataaaagaagagaataaaccgattttagcctttgattctacagcacatacgacaaaaaatatagaagttatctcagaaacaatgcctgaattgatggttaaaagaataagggaagtaggtcctcttaga

SEQ ID NO: 4002 - protein, 401 aa, Streptococcus agalactiae
MKKTIVLGADFQYRDQVMTTIKSIVSHNQHLTIYIINTDFPVEWFNILNHSLEQFDCRVKNIPISSDVFEGIPTLSHISVAGFFRWFIPIHLEEEIVLYLDSDVIVRGSLDPLFDINLEENLLGAVADHFSTLYYGDTAPVSFNSGVMLINNSLWKKEEIYNSLMRIADKGSAVGVGDQEYLNILTQNRWIDIGKQYNVQIGQDVNINAYGRPDLYHFYDDCEPVIVHYNSQDKPWNKYSQSRYRSEWWYYFGLEWSVIYAQQQKNLNRLTGKTLNLFTLTASDTLEHIEVLAKALPDYQFHIAARSDISEKLANLETYSNIKVYKLVINPILEELIRNCDVYLDINHSYEVEGILDKIKEENKPILAFDSTAHTTKNIEVISETMPELMVKRIREVGPLR

SEQ ID NO: 4003 - DNA, 1080 bp, Streptococcus agalactiae
gtgttaataaaactattatttaactggtatgatatggtctggataagagagagttttaaagagagattaactaaaatgcgagtacatattacaagtatatatgggcagtcaccgcgtagcattgcccttatatcacaaaaactagttaaggatgtcggacgtcaacttggttatgatgaaatgggaatctacttttataatgatcatgctgaaacgcatggtgaaagaagtactaggatggatggtatcattgcgggattaggcagaggggatattgttgtttttcaagtacctacatggaattcaacagaatttgatgaactttttctagataaattacaggcatacggtgctagaattataacttttgtacatgatattgttcccttaatgtttgagtctaatttttatttattagatagagtaattgacatgtataatcgttcggatgttgttattctacctacaaaagcgatgcatgattatctaattgaaaaagggatgactacctctaaagttctttatcaagaagtatgggatcatccagttaatatagacctccctcgtccagaatgtcaaaaagtccttagttttgcaggcgatattcaacgctttccctttgtcaatgactggaaggaaaatatcccgctcatctattatggagacggaagcagactcaattctgaggcaaatgttcatgctcagggatggaaagatgatgtagaattgatgctaagtctttctaagcggggaggatttggcctgtgttggagtgaagatagagaggagttagtcgagcgtcgttattcgaggatgaatgcctcgtataaattatctactttcttggctgctggacttccaattattgctaaccatgatatttcaagtagagactttatcaaacaacacggattaggatttacagttgaaacgctagaagaagctgttgaaaaaattaataatatggaaaaagagacttatgacagctatgtggaaaatgttgagaagatagcaactctcttgcgaaatggttatatcactaaaaaattgttgatagatgctgtgcatatgctttataga

SEQ ID NO: 4004 - protein, 360 aa, Streptococcus agalactiae
MLIKLLFNWYDMVWIRESFKERLTKMRVHITSIYGQSPRSIALISQKLVKDVGRQLGYDEMGIYFYNDHAETHGERSTRMDGIIAGLGRGDIVVFQVPTWNSTEFDELFLDKLQAYGARIITFVHDIVPLMFESNFYLLDRVIDMYNRSDVVILPTKAMHDYLIEKGMTTSKVLYQEVWDHPVNIDLPRPECQKVLSFAGDIQRFPFVNDWKENIPLIYYGDGSRLNSEANVHAQGWKDDVELMLSLSKRGGFGLCWSEDREELVERRYSRMNASYKLSTFLAAGLPIIANHDISSRDFIKQHGLGFTVETLEEAVEKINNMEKETYDSYVENVEKIATLLRNGYITKKLLIDAVHMLYR

SEQ ID NO: 4005 - DNA, 213 bp, Streptococcus agalactiae
gtgcctcgacgtcagccagcaccagcgcttcaacgagtgcgtcaatgtcagccagcaccagtgcttcaaccagtgcctcgatgtcagccagcactagcgcttcaacgagtgcgtcaatgtcagccagcacaagtgcttcaacaagtgcctcgatgtcagccagcacaagtgcttcaacaagtgcctcgatgtcagccagcactagcgcttcaa

SEQ ID NO: 4006 - protein, 71 aa, Streptococcus agalactiae
MPRRQPAPALQRVRQCQPAPVLQPVPRCQPALALQRVRQCQPAQVLQQVPRCQPAQVLQQVPRCQPALALQ

SEQ ID NO: 4007 - DNA, 876 bp, Streptococcus agalactiae
gtggaagcgctggtacttgctgatgtcgatgcactcgttgagacgctggtgctggctgacgtcgtggcactcattgaagcgctagtgctggctgacatcgaggcacttgttgaagcacttgtgctggctgacatcgaggcacttgttgaagcacttgtgctggctgacattgacgcactcgttgaagcgctagtgctggctgacatcgaggcactggttgaagcactggtgctggctgacattgacgcactcgttgaagcgctggtgctggctgacgtcgaggcactcattgaggcgctagtacttgcacttgtggaagcactggtgctggctgacgtcgaggcactcattgaggcgctagtacttgcacttgtggaagcactggtgctggctgacgtcgaggcactcattgaggcgctagtacttgcacttgtggaagcactggtgctggctgacgtcgaggcactcattgaggcgctagtacttgcacttgtggaagcactggtgctggctgacgtcgaggcactcattgaggcgctagtacttgctgacgtggatgcactggtactggcacttgtggaagcgctagtacttgcacttgttgaggcgctcatacttgctgaggtggaagcactggtactggcactggttgaggcgctggtacttgcacttgttgaagcactcatacttgcacttgttgaagcactggtgctggctgacgtcgacgcactcatggaagcgctggtacttgctgatgtcgaggcactcatggaagcgctggtacttgctgacgtcgacgcactcgtagaagcactttctgataaaagtttaatttcggcattcgcatctgagtcaccacttatattcgtatgccca

SEQ ID NO: 4008 - protein, 292 aa, Streptococcus agalactiae
MEALVLADVDALVETLVLADVVALIEALVLADIEALVEALVLADIEALVEALVLADIDALVEALVLADIEALVEALVLADIDALVEALVLADVEALIEALVLALVEALVLADVEALIEALVLALVEALVLADVEALIEALVLALVEALVLADVEALIEALVLALVEALVLADVEALIEALVLADVDALVLALVEALVLALVEALILAEVEALVLALVEALVLALVEALILALVEALVLADVDALMEALVLADVEALMEALVLADVDALVEALSDKSLISAFASESPLIFVCP

SEQ ID NO: 4009 - DNA, 174 bp, Streptococcus agalactiae
gtgcttatcgattctgaagcacttgttaaagcagatgtacttacagattcacttacacttgttaaagttgaccctgacatagacatacttacagattcactagtacttgttgaggctgactctgacatagatacactattagaatcaataatgtttttcgatactgtcccatct

SEQ ID NO: 4010 - protein, 58 aa, Streptococcus agalactiae
MLIDSEALVKADVLTDSLTLVKVDPDIDILTDSLVLVEADSDIDTLLESIMFFDTVPS

SEQ ID NO: 4011 - DNA, 2910 bp, Streptococcus agalactiae
atgtcccaaaagacttttggcaagcagttaacagttgtagatactaagagtagagtcaagatgcataaatcagaaaaaaactgggtaagaacagtaatgtcgcattttaatctatttaaagcgattaaagggagagcaactgttgaagcagatgtgtgtattcaagatgttgaaaaagaagaccgactatcttcaggaaatttgacctatctcaaaggaatactagctgctggagctctggtaggtggagcgagtttaaccagtcgtgtttatgcagatgagactccagttgttcaagaacaatcaagttctgtaccaacactggcagaacaaacggaagtgactgttaaaacaactactgttcaaaatcatcaagatgggacagtatcgaaaaacattattgattctaatagtgtatctatgtcagagtcagcctcaacaagtactagtgaatctgtaagtatgtctatgtcagggtcaactttaacaagtgtaagtgaatctgtaagtacatctgctttaacaagtgcttcagaatcgataagcacgtcagcctcagaaagtgtttcaaaatctacaagtattagtgaggtttcaaatattcttgaaactcaagcttctttaactgataaaggaagagagtcgttttcggcaaaccagatagtaacagaaagtagcttagttactgatgctggtaaaaatgcttcagtatctagcctaattgaaattacaaaaccaaaatcggagttacagacttccaaaatgtcaaatgagtcgcttataactccagagaaatcccaagtaatgattgcaagcgataaaactgggaatgagagtctaactccgacaattagattaaaatcagttattcagccaaggagtatgaacttgatgactttgagttcggagatggacttgataccactagaagaagtgtctgatactgaaatgttaggtaaagatgtatcaagcgagttgcagaaagttaatattgcgttaaaagataacactcttagtgagcctggaacagttaaattagatagttcagaaaaccttgttttgaactttgccttttcaatcgcttctgttaacgagggagatgtctttactgtaaagctttctgataaccttgacacacaagggattggtactattctaaaagttcaagatataatggatgaaacggggcagttattagcgactgggtcatatagtcctttaacacataatattacatacacctggacaaggtatgcttctacgttgaataatattaaagctagagtcaatatgccagtttggcctgaccagagaataatttctaaaacaacttcagataagcagtgctttactgcaacattgaacaatcaagttgcttcaattgaggaacgtgttcagtataatagtccttcagtgacagaacatactaatgttaagacaaatgtaagatctcggatcatgaagcttgatgatgaaagacagacagaaacttatattactcaaattaatcctgaaggtaaggaaatgtatttcgcatcaggacttgggaatctatatactattatcggttcagatggaacatcaggttcaccagttaatttattaaatgcggaagtaaagattctaaaaactaattcaaaaaatcttacagatagtatggatcaaaattatgattcgcctgagtttgaagatgtgacttcccagtatagttatactaacgatggttctaaaattaccatagattggaaaacaaattctatttcttccactacatcttatgttgttttggtcaaaatacctaaacaaagtggtgtattgtattcaactgtttctgatataaatcaaacatatggttctaaatattcttatgggcatacgaatataagtggtgactcagatgcgaatgccgaaattaaacttttatcagaaagtgcttctacgagtgcgtcgacgtcagcaagtaccagcgcttccatgagtgcctcgacatcagcaagtaccagcgcttccatgagtgcgtcgacgtcagccagcaccagtgcttcaacaagtgcaagtatgagtgcttcaacaagtgcaagtaccagcgcctcaaccagtgccagtaccagtgcttccacctcagcaagtatgagcgcctcaacaagtgcaagtactagcgcttccacaagtgccagtaccagtgcatccacgtcagcaagtactagcgcctcaatgagtgcctcgacgtcagccagcaccagtgcttccacaagtgcaagtactagcgcctcaatgagtgcctcgacgtcagccagcaccagtgcttccacaagtgcaagtactagcgcctcaatgagtgcctcgacgtcagccagcaccagtgcttccacaagtgcaagtactagcgcctcaatgagtgcctcgacgtcagccagcaccagtgcttccacaagtgcaagtactagcgcctcaatgagtgcctcgacgtcagccagcaccagcgcttcaacgagtgcgtcaatgtcagccagcaccagtgcttcaaccagtgcctcgatgtcagccagcactagcgcttcaacgagtgcgtcaatgtcagccagcacaagtgcttcaacaagtgcctcgatgtcagccagcacaagtgcttcaacaagtgcctcgatgtcagccagcactagcgcttcaatgagtgccacgacgtcagccagcaccagcgtctcaacgagtgcatcgacatcagcaagtaccagcgcttccacaagttcttcaagctcagtgacttctaattcatcaaaagagaaggtgtattctgccttaccttctacgggtgaccaagattattctgtaactgctactgccttaggtttaggtttaatgactggtgcaacccttttgggacgaaaaaaatctaaaaaagataaagac

SEQ ID NO: 4012 - protein, 970 aa, Streptococcus agalactiae
MSQKTFGKQLTVVDTKSRVKMHKSEKNWVRTVMSHFNLFKAIKGRATVEADVCIQDVEKEDRLSSGNLTYLKGILAAGALVGGASLTSRVYADETPVVQEQSSSVPTLAEQTEVTVKTTTVQNHQDGTVSKNIIDSNSVSMSESASTSTSESVSMSMSGSTLTSVSESVSTSALTSASESISTSASESVSKSTSISEVSNILETQASLTDKGRESFSANQIVTESSLVTDAGKNASVSSLIEITKPKSELQTSKMSNESLITPEKSQVMIASDKTGNESLTPTIRLKSVIQPRSMNLMTLSSEMDLIPLEEVSDTEMLGKDVSSELQKVNIALKDNTLSEPGTVKLDSSENLVLNFAFSIASVNEGDVFTVKLSDNLDTQGIGTILKVQDIMDETGQLLATGSYSPLTHNITYTWTRYASTLNNIKARVNMPVWPDQRIISKTTSDKQCFTATLNNQVASIEERVQYNSPSVTEHTNVKTNVRSRIMKLDDERQTETYITQINPEGKEMYFASGLGNLYTIIGSDGTSGSPVNLLNAEVKILKTNSKNLTDSMDQNYDSPEFEDVTSQYSYTNDGSKITIDWKTNSISSTTSYVVLVKIPKQSGVLYSTVSDINQTYGSKYSYGHTNISGDSDANAEIKLLSESASTSASTSASTSASMSASTSASTSASMSASTSASTSASTSASMSASTSASTSASTSASTSASTSASMSASTSASTSASTSASTSASTSASTSASMSASTSASTSASTSASTSASMSASTSASTSASTSASTSASMSASTSASTSASTSASTSASMSASTSASTSASTSASTSASMSASTSASTSASTSASMSASTSASTSASMSASTSASTSASMSASTSASTSASMSASTSASTSASMSASTSASMSATTSASTSVSTSASTSASTSASTSSSSSVTSNSSKEKVYSALPSTGDQDYSVTATALGLGLMTGATLLGRKKSKKDKD

SEQ ID NO: 4013 - DNA, 627 bp, Streptococcus agalactiae
ttgtgtaatatgatagaaaattttttagaaaaaaatattcttaataaagttaaattacttactttatgttatgataccccctcactatccttagataccgcctgtaaccgactccacttatcaccagttgagcttaaaaactattgtcataaattaaatgttttatttggtcataaactttctatccatatccaaaaaaaacggattttatgtaagctaaataaacttactcaggaagatgccttaaaaatagtttataatgagtcaaacactttacaacttcttaaatttttaattgatgactcgtctgataaaaaatctctagtagcttttggaaatgatctcttcttatctcgttcttctgtctatcgtctgcgagaaaatttaattcctttaattaaagatttaggattatctttatctaaaaataccattgtaggtgacgaatatcgcattagatatctcatcgcatacctcactactaaatttggtattaaaatttacgatctgtctgctctagatattaagattattcgacaatttttatttgagagtggtactaatataagacctactacgcacctttctgatatctttgttttttttgatacgcttttcattttaacc

SEQ ID NO: 4014 - protein, 209 aa, Streptococcus agalactiae
MCNMIENFLEKNILNKVKLLTLCYDTPSLSLDTACNRLHLSPVELKNYCHKLNVLFGHKLSIHIQKKRILCKLNKLTQEDALKIVYNESNTLQLLKFLIDDSSDKKSLVAFGNDLFLSRSSVYRLRENLIPLIKDLGLSLSKNTIVGDEYRIRYLIAYLTTKFGIKIYDLSALDIKIIRQFLFESGTNIRPTTHLSDIFVFFDTLFILT

SEQ ID NO: 4015 - DNA, 732 bp, Streptococcus agalactiae
atggattatatttttcttatctatcttacaagcgctaactcttttgctgctcaaaagtggactgaaacacatgtcgatgaagtgttagctatttttaaaagtcttcctaaattccaaatgctactacaacctttgaaagaagctcttccatactctgacacctactacgatgagctagtgaaagtcactatttacttttctcgaaacttcatagttggtctgaatcaattaattcctgaaacacttagttttccttcaacattctatcctggaaataatcctaaactaatatccattatcgaaccaatagtcactcattggctaactgaaattggagaatcaaagttcaaaaaaacgcacttcttcttgctctgtgctcaccttgaaagagtaataaagaatagcatgcctcctataaatattgtgttgctgacaactgattttattaataatgaaattttaaaagactatattttgcaatccctttcaacagataaaattagatttcattcctattacttattgacagataatattagtcaaatatcgaccttaaaacccgatttaattatcactaatcgaaaactgtttacctatgttacaaaggaactagctacaaatagtttagtcgctcatattgattacaacgatacaccctctcaaatcagtaatatccaaactattatttctaatattaaagaagaaaaatatcgaaaaatctttgataaaata

SEQ ID NO: 4016 - protein, 244 aa, Streptococcus agalactiae
MDYIFLIYLTSANSFAAQKWTETHVDEVLAIFKSLPKFQMLLQPLKEALPYSDTYYDELVKVTIYFSRNFIVGLNQLIPETLSFPSTFYPGNNPKLISIIEPIVTHWLTEIGESKFKKTHFFLLCAHLERVIKNSMPPINIVLLTTDFINNEILKDYILQSLSTDKIRFHSYYLLTDNISQISTLKPDLIITNRKLFTYVTKELATNSLVAHIDYNDTPSQISNIQTIISNIKEEKYRKIFDKI

SEQ ID NO: 4017 - DNA, 1989 bp, Streptococcus agalactiae
atgatagatagaaaagatactaaccgatttaaattagtttccaaatatagcccttcgggagatcaacctcaagctattgaaacgttggttgacaatattgaaggaggagaaaaagctcagattttaaaaggtgctactggtactggtaaaacctacacaatgagccaagttatcgcccaagttaacaagccaaccttggtgattgcacataataaaaccttagcaggtcaactttatggagagtttaaagaattttttcctgacaatgccgtagagtactttgtttcatattatgattattatcaaccagaagcttatgtgccttcttcggatacttatattgaaaaagatagttcagtcaatgacgaaattgacaaattacgtcactcagcgacttcttcgttattagaaagaaatgacgttattgttgtagcatctgtttcttgtatttacggtttaggttctcctaaagagtatgcagacagtgttgttagccttaggccaggtcaagaaatttcacgtgatcagttattgaacaatctcgttgatattcaatttgagcgtaacgatattgattttcaacgtggaaaatttcgcgttcgtggcgatgttgtagaagtttttcctgcgagtcgtgatgagcatgcctttcgaattgaattttttggtgatgaaattgatcgtataagagaaatagaatcgttaacagggcgtgtgctaggagaagtggaacatttagctattttcccagcaacacactttatgacaaatgatgaacatatggaagaagctatttcaaaaatacaagctgaaatggaaaatcaagtagaactttttgaaaaagaagggaaattgattgaagcgcaacgtattcgacaaaggacagaatatgatattgaaatgcttcgtgaaatgggatatacaaatggtgttgagaactactcacgtcacatggatggtagaagtgaaggtgagccaccttttactttgttagatttcttcccagaagattttttgattatgattgatgagagtcacatgacaatggggcaaatcaaagggatgtataatggagaccgttcgcgtaaagaaatgttggttaattacggtttccgtttaccatctgccttagataaccgtccacttcgtcgtgaagaattcgaaagccatgtccatcaaattgtctatgtatctgcaacgccaggagactatgaaatggagcaaacagatacagttgttgagcaaattatccggccaacaggacttcttgatccagaagttgaagttagaccaagtatggggcagatggatgacttgcttggtgaaatcaatttgaggactgaaaaaggtgagcgtacctttattacaacattgacaaagcgtatggcagaagacttaacagattatctcaaagaaatgggagttaaagttaagtatatgcacagcgatattaaaaccttagaacgtacagagattattcgtgatttacgacttggtgtgtttgatgttttaattggtattaatctcttacgtgaaggaatagatgttcctgaggtttcccttgttgcaatcttagatgctgataaggaaggtttccttcgtaatgagcgtggtcttatccaaacaatcggacgtgcagcacgtaacagtaatggtcatgttattatgtatgctgataaaataacagattctatgcaaagagctatggatgaaaccgctcgccgtcgtcgtttacaaatggattataatgaaaagcatggaattgtgccacaaacaattaaaaaagaaatccgtgatttaattgctattactaaaagtaatgacagcgataagcctgaaaaagttgtcgattacagtagtttatctaaaaaagaaaggcaagctgaaattaaagctcttcaacagcaaatgcaagaagcagctgaattattggactttgagctagctgcacaaatccgagatgttatcttagaactaaaagcaatcgat

SEQ ID NO: 4018 - protein, 663 aa, Streptococcus agalactiae
MIDRKDTNRFKLVSKYSPSGDQPQAIETLVDNIEGGEKAQILKGATGTGKTYTMSQVIAQVNKPTLVIAHNKTLAGQLYGEFKEFFPDNAVEYFVSYYDYYQPEAYVPSSDTYIEKDSSVNDEIDKLRHSATSSLLERNDVIVVASVSCIYGLGSPKEYADSVVSLRPGQEISRDQLLNNLVDIQFERNDIDFQRGKFRVRGDVVEVFPASRDEHAFRIEFFGDEIDRIREIESLTGRVLGEVEHLAIFPATHFMTNDEHMEEAISKIQAEMENQVELFEKEGKLIEAQRIRQRTEYDIEMLREMGYTNGVENYSRHMDGRSEGEPPFTLLDFFPEDFLIMIDESHMTMGQIKGMYNGDRSRKEMLVNYGFRLPSALDNRPLRREEFESHVHQIVYVSATPGDYEMEQTDTVVEQIIRPTGLLDPEVEVRPSMGQMDDLLGEINLRTEKGERTFITTLTKRMAEDLTDYLKEMGVKVKYMHSDIKTLERTEIIRDLRLGVFDVLIGINLLREGIDVPEVSLVAILDADKEGFLRNERGLIQTIGRAARNSNGHVIMYADKITDSMQRAMDETARRRRLQMDYNEKHGIVPQTIKKEIRDLIAITKSNDSDKPEKVVDYSSLSKKERQAEIKALQQQMQEAAELLDFELAAQIRDVILELKAID

SEQ ID NO: 4019 - DNA, 1989 bp, Streptococcus pyogenes
atgattgataaacgtgatgataaaccatttaaactaaaatcaaagtataaaccgtctggtgatcagccacaagctattgaaagcctagttgataatatcgagggcggagaaaaagctcagattctcctaggtgctacaggaacgggaaaaacatacaccatgagccaagtaattagtaaagtaaataaacctaccttagtgatagctcacaataaaaccttagcaggacaattatatggtgaatttaaagaattttttccagacaatgctgtggaatattttgtttcctattatgattactaccaacctgaagcatatgtcccatcaagcgacacctatatcgaaaaagatagttcagtcaatgatgaaatcgataaacttcgccattcagccacctcttctttacttgagcgtaacgatgtcatagtggtagcttctgtatcttgtatttatggactaggttcgccaaaagagtacgcagattcagcagtcagcctacgtccaggtcaggagatatcacgtgacactttgctaaatcaattagtagatattcaatttgagcgtaatgatattgattttcaacgcggctgttttcgtgtacgtggcgatgttgttgaggtctttccagcatccagggatgaacatgcttttcgggtggaatttttcggggatgagattgaccgtatatgtgaaatcgaaagtttaactgggaaaactattggagaagttgaccatttggttttatttccagctactcactttgtaacaaatgatgagcatatggagcaatcaatagccaaaattcaagcagagttagcagagcagttacagttatttgaatctgaaggtaaactactagaagcacagcgattacgccaaagaacggaatatgatattgaaatgttacgtgaaatgggctatactagcggagtcgaaaactattcccgtcatatggatggcaggtcaccaggagaacctccttataccttgttagatttcttcccagaagattttttaattatgattgatgaaagtcacatgacaatgggacaaatcaaaggcatgtataatggtgaccaagccagaaaacaaatgctagttgactatggttttcgattgccatcagctcttgataatcgtcccttaagacgcgaggaatttgaaagtcatgtgcaccaaattgtctatgtttcagcaacgcctggtgaatacgaaatgtcacagactaatacaattattgagcaaattattcgtccgactgggctacttgatcctgaaattgatgtaaggtcaagtatggggcaaatggatgatttgttgggagaaattaaccagcgcgtagcgcgcgatgaacggacgttcatcacaaccttaactaaaaaaatggcagaagatttgactgattatctaaaagagatgggtgtcaaggtcaagtatatgcacagtgatattaaaaccttagagcgaacagaaattattcgtgatttacgacttggtgtttttgatgtcttgattggaatcaatctgctccgtgaagggattgatgtgccagaagttagtcttgtagccattttggatgctgataaagagggtttcctccgtaatgaacgcggcttgattcagaccatcggtagagcagctcgaaacgtagatggtcatgtcattatgtatgcggacaagatgacagattctatgcagcgagctattgacgaaacggctcgtcgtcgtgagattcaaatagcatataacaaagcgcacggcatcgttccacaaactataaaaaaagacatcagaggccttattagtataagtaaaacaagccacaatgatatatcaaaagaagagatggattatgaaagtatgtcaagaggagaacgaaaagaagcgatcaatgctctgcaaaaacaaatgcaagaggcagctgaattacttgatttcgaattggcagctcaaatgcgagacttgattttagaacttaaattaatggac

SEQ ID NO: 4020 - protein, 663 aa, Streptococcus pyogenes
MIDKRDDKPFKLKSKYKPSGDQPQAIESLVDNIEGGEKAQILLGATGTGKTYTMSQVISKVNKPTLVIAHNKTLAGQLYGEFKEFFPDNAVEYFVSYYDYYQPEAYVPSSDTYIEKDSSVNDEIDKLRHSATSSLLERNDVIVVASVSCIYGLGSPKEYADSAVSLRPGQEISRDTLLNQLVDIQFERNDIDFQRGCFRVRGDVVEVFPASRDEHAFRVEFFGDEIDRICEIESLTGKTIGEVDHLVLFPATHFVTNDEHMEQSIAKIQAELAEQLQLFESEGKLLEAQRLRQRTEYDIEMLREMGYTSGVENYSRHMDGRSPGEPPYTLLDFFPEDFLIMIDESHMTMGQIKGMYNGDQARKQMLVDYGFRLPSALDNRPLRREEFESHVHQIVYVSATPGEYEMSQTNTIIEQIIRPTGLLDPEIDVRSSMGQMDDLLGEINQRVARDERTFITTLTKKMAEDLTDYLKEMGVKVKYMHSDIKTLERTEIIRDLRLGVFDVLIGINLLREGIDVPEVSLVAILDADKEGFLRNERGLIQTIGRAARNVDGHVIMYADKMTDSMQRAIDETARRREIQIAYNKAHGIVPQTIKKDIRGLISISKTSHNDISKEEMDYESMSRGERKEAINALQKQMQEAAELLDFELAAQMRDLILELKLMD

SEQ ID NO: 4021 - DNA, 918 bp, Streptococcus agalactiae
atgaataaaaggattttaaatagtcagttcgctgtctataaaaactggccgtcatggctattattgttatttgcttgttttatggtatacctattttttttcgttggtctaactctaggtggtgtgggaattgttctagtgtcttctgtactctataagttttcttcctatactttttttgagtttattaatttatttaataatatctatggagaattaggaacctttagtttttcagcattccttttgcttatctgggtaaaattcgtagaaaaaagacctttttcagaattggggttttctacaaagtttaaaagaactctgtggtcacttataaaaggctggagtataggttttattctattttcaatttctgtcatcactgcttatatattgggaggacttgactttcatagctatgatgtttctaaggcaacgattttctatgttgtaactctccttcctttttggcttattcaaagcggtacggaagaattgctaacacgagggtggcttcttcctctaattaatcatcgttttcatttagctgttgccataggggtctcatccactttatttggcattttgcacttggtaaatgcccatgtcacttttctttctattgtaagtattatatgttcgggagttttaatgtccttgtatatgattaaaagtggtaatatttggagtgttgcagccttacatggagcttggaattttagccaaggtaatctctatggtattgccgtaagtggtcagaaagcaggagcatctcttttgcattttaccgttaaagaaaacgcaccggactggatatcaggtggtgcattcggaatagaaggaagtttgatttctatttttgttctcttagcagcaattatataccttctatggctaattaagactgaagaaacagat

SEQ ID NO: 4022 - protein, 306 aa, Streptococcus agalactiae
MNKRILNSQFAVYKNWPSWLLLLFACFMVYLFFFVGLTLGGVGIVLVSSVLYKFSSYTFFEFINLFNNIYGELGTFSFSAFLLLIWVKFVEKRPFSELGFSTKFKRTLWSLIKGWSIGFILFSISVITAYILGGLDFHSYDVSKATIFYVVTLLPFWLIQSGTEELLTRGWLLPLINHRFHLAVAIGVSSTLFGILHLVNAHVTFLSIVSIICSGVLMSLYMIKSGNIWSVAALHGAWNFSQGNLYGIAVSGQKAGASLLHFTVKENAPDWISGGAFGIEGSLISIFVLLAAIIYLLWLIKTEETD

SEQ ID NO: 4023 - DNA, 2181 bp, Streptococcus agalactiae
atgaagcacaagttaaaagcttttacgcttgctttactctcaatattctttgtgtttggtggaaaggtcagtgcagagactgtgaatattgtttctgatacagcatacgctccattcgaatttaaagattctgatcaaacttataaaggaatcgatgttgacatcgttaacgaagtcgctaagcgtgctggctggaatgttaacatgacgtacccaggttttgatgccgcagttaacgctgttcaatctggacaggcagacgcgctaatggccggaactactgttactgaagcacgtaaaaaagtctttaatttctcagatacttattacgatacttccgttattctttatactaaaaataataataaagtcacaaactacaaacaactaaaaggaaaagtagtcggtgtaaaaaatggaacagctgctcaaagcttcttagaggaaaataaatctaaatacggctataaagttaaaacatttgatacaagtgacctaatgaataacagccttgattctggttctatttacgccgctatggacgatcaaccagttgtgcaatttgcgataaatcaaggaaaagcttacgccattaacatggaaggcgaggcagttggtagctttgcatttgctgtcaaaaaaggtagtggacacgataacctaattaaagaatttaacacagcttttgcacaaatgaaatcagatggcacttataatgacatcatggataaatggcttgggaaagacgctacaaaaacaagcggcaaagcaacaggtaatgccaatgaaaaagcaactcctgtaaagccaagttataaaattgtttctgattcttcattcgcaccattcgaatatcaaaacggtaaagggaaatatactggttttgatatggaattaatcaagaaaattgctaaacagcaaggttttaaacttgatatctcaaatccaggttttgatgccgctttaaatgctgtccaatctggacaagctgacggtgttattgcaggagctacaatcacagaagcacgccaaaaaatctttgatttttctgatccttattacacatctagcgttatcttagcggttaaaaaaggaagcaatgtcaaatcataccaagatttaaaaggaaaaacagttggtgctaaaaatggtactgcctcatatacttggttatcagaccacgcagataagtacaactatcatgttaaagcatttgatgaagcatctacaatgtatgatagtatgaactcaggttcaattgatgctctaatggatgacgaagcagttcttgcttacgctattaatcaaggtcgtaaatttgaaacacctatcaaaggtgaaaaatcaggcgatatcggatttgcagtgaaaaaaggggcaaatccagaattaattaaaatgtttaacaacggtcttgcttcactcaaaaaatcgggtgagtacgataaacttgttaaaaaatacctttccacagccagcacctcttcaaacgataaagctgctaaacctgtagatgaatcaactattttagggttaatttctaataactacaaacaattgctatctggtattggaactactttaagtttaactcttatctcatttgcgattgctatggttattggtattatctttggtatgatgagcgtatcaccaagtaatactctccgcacaatttcaatgatttttgttgatattgtccgtggtattccactcatgattgtggccgcttttattttctggggtattcctaatttaatcgaaagcatcacaggtcaccaaagtccaattaatgacttcgttgctgctactatcgctctttctttaaatggtggtgcgtacattgctgaaattgtacgtggtggtattgaagctgttccttctggtcaaatggaagcaagtcgtagtttaggtatttcttacggcaaaactatgcaaaaggttatcttgcctcaagcagtacgccttatgttaccaaactttatcaaccaatttgtcatctcattaaaggatacaacaattgtatcagcaatcggacttgtggaactcttccaaactggtaaaatcataattgcacgtaactatcaatcattccgtatgtatgctatccttgcaattatgtatcttgtaatcattacccttctcacccgtctagcaaaacgtttagaaaagaggcttaaa

SEQ ID NO: 4024 - protein, 727 aa, Streptococcus agalactiae
MKHKLKAFTLALLSIFFVFGGKVSAETVNIVSDTAYAPFEFKDSDQTYKGIDVDIVNEVAKRAGWNVNMTYPGFDAAVNAVQSGQADALMAGTTVTEARKKVFNFSDTYYDTSVILYTKNNNKVTNYKQLKGKVVGVKNGTAAQSFLEENKSKYGYKVKTFDTSDLMNNSLDSGSIYAAMDDQPVVQFAINQGKAYAINMEGEAVGSFAFAVKKGSGHDNLIKEFNTAFAQMKSDGTYNDIMDKWLGKDATKTSGKATGNANEKATPVKPSYKIVSDSSFAPFEYQNGKGKYTGFDMELIKKIAKQQGFKLDISNPGFDAALNAVQSGQADGVIAGATITEARQKIFDFSDPYYTSSVILAVKKGSNVKSYQDLKGKTVGAKNGTASYTWLSDHADKYNYHVKAFDEASTMYDSMNSGSIDALMDDEAVLAYAINQGRKFETPIKGEKSGDIGFAVKKGANPELIKMFNNGLASLKKSGEYDKLVKKYLSTASTSSNDKAAKPVDESTILGLISNNYKQLLSGIGTTLSLTLISFAIAMVIGIIFGMMSVSPSNTLRTISMIFVDIVRGIPLMIVAAFIFWGIPNLIESITGHQSPINDFVAATIALSLNGGAYIAEIVRGGIEAVPSGQMEASRSLGISYGKTMQKVILPQAVRLMLPNFINQFVISLKDTTIVSAIGLVELFQTGKIIIARNYQSFRMYAILAIMYLVIITLLTRLAKRLEKRLK

SEQ ID NO: 4025 - DNA, 738 bp, Streptococcus agalactiae
atggcagaattaaaaattgatgtccaagatttacacaagtcgtatgggcaaaatgaagttttaaaaggtattgatgctaaattttatgaaggtgatgttgtttgtattattggaccttctggttcaggaaaatcaactttccttcgcacattgaacttacttgaatcaatcacaagtggaaaagttgttgtggacggctttgagttatcaaacccaaaaacagacatagacaaagcacgtgaaaatatcggaatggtatttcaacacttcaatcttttcccacatatgtcagttcttgaaaacatcacttttgctcctatagaacttggtaaagaatctaaagaagcagctgaaaagcatgggatggaattacttgaaaaagttggtttagccgataaagctaatgccaaaccagatagtttatctggaggacaaaaacaacgtgtagctatcgcaagaagcttagcgatgaatccagatatcttactttttgacgaaccaacttctgcacttgatccagaaatggttggagatgttctcaatgttatgaaagatttagctgaacaaggtatgactatgttaattgtgacacacgaaatgggatttgctcgtcaagttgccaatcgtgttatctttacagatggtggtcgtttcctcgaagatgggacacctgagcaaatctttgatacacctcaacacccacgtctccaagacttccttaataaagttttaaacgtt

SEQ ID NO: 4026 - protein, 246 aa, Streptococcus agalactiae
MAELKIDVQDLHKSYGQNEVLKGIDAKFYEGDVVCIIGPSGSGKSTFLRTLNLLESITSGKVVVDGFELSNPKTDIDKARENIGMVFQHFNLFPHMSVLENITFAPIELGKESKEAAEKHGMELLEKVGLADKANAKPDSLSGGQKQRVAIARSLAMNPDILLFDEPTSALDPEMVGDVLNVMKDLAEQGMTMLIVTHEMGFARQVANRVIFTDGGRFLEDGTPEQIFDTPQHPRLQDFLNKVLNV

SEQ ID NO: 4027 - DNA, 738 bp, Streptococcus pyogenes
atgacagaattaaaaattgatgttcaagatttacacaaatcttatggtcaaaatgaagtcttaaaaggaattgatgccaaattctacgaaggcgatgtcgtttgtatcattggtccttctggttctgggaaatcaacctttctacgtaccctcaacctcctagagacgattaccagtggtaaggtcatggtggacggttttgaattatcagatcctaagactaatattgacaaggcacgtgaaaatatcgggatggtattccaacacttcaaccttttccctcacatgactgttcttgagaatattatctttgctcctgttgaattaggtaaagagtctaaagaagttgctaaaaagcatggcatggcacttctagaaaaagtcggactttctgataaggccgacgccttcccaggaagtttatccggcgggcaaaaacagcgtgtcgccatcgccagaagtttagcaatgaacccagatattatgctctttgatgaaccaacttctgctcttgaccccgaaatggttggggacgttttgaacgttatgaaagacttggcagaacaaggcatgaccatgttaattgttactcacgaaatgggatttgctcgccaagtagctaaccgtgttatctttacagacggtggtcaattcttggaggatggtactcctgaagagatttttgatcatcctaagcaccctcgtctcattgaatttttagacaaggtcttaaacgtc

SEQ ID NO: 4028 - protein, 246 aa, Streptococcus pyogenes
MTELKIDVQDLHKSYGQNEVLKGIDAKFYEGDVVCIIGPSGSGKSTFLRTLNLLETITSGKVMVDGFELSDPKTNIDKARENIGMVFQHFNLFPHMTVLENIIFAPVELGKESKEVAKKHGMALLEKVGLSDKADAFPGSLSGGQKQRVAIARSLAMNPDIMLFDEPTSALDPEMVGDVLNVMKDLAEQGMTMLIVTHEMGFARQVANRVIFTDGGQFLEDGTPEEIFDHPKHPRLIEFLDKVLNV

SEQ ID NO: 4029 - DNA, 156 bp, Streptococcus agalactiae
atgggagataaaccgatatcatttcgtgataaagatgggaattttgtttcagcggccgatgtctggaatgctgaaaaattagaagaactctttaacacattaaatcctaatcgtaaacttcgtttagaacgcgaaaaattagcaaaagaaaaagga

SEQ ID NO: 4030 - protein, 52 aa, Streptococcus agalactiae
MGDKPISFRDKDGNFVSAADVWNAEKLEELFNTLNPNRKLRLEREKLAKEKG

SEQ ID NO: 4031 - DNA, 186 bp, Streptococcus pyogenes
gtgttatctttaagatggaggtttctgattatgggtgataaaccgatatcctttaaggataaggatggaaattttgtatcggcagcagatgtttggaatgctgagaaattagaagaattgtttaatcttttaaatcccaatagacgtttgcgcttagaacgtgaaaaattgaaaaaggatgaggct

SEQ ID NO: 4032 - protein, 62 aa, Streptococcus pyogenes
VLSLRWRFLIMGDKPISFKDKDGNFVSAADVWNAEKLEELFNLLNPNRRLRLEREKLKKDEA

SEQ ID NO: 4033 - DNA, 1311 bp, Streptococcus agalactiae
atgagtatgtttttagatactgccaaaattagtgttaaggcaggtcgcggtggtgatggcatggttgcttttcgccgtgagaaatatgtccccaatggaggcccgtggggcggtgatggcggtaaaggcggatcggtcatttttaaagtaaacgaaggtttacgaactttgatggattttcgatataaccgtaattttaaagcaaaagctggtgaaaaagggatgactaaaggtatgcacggtcgaggtgcagaagaccttattgtgtcattaccacctggaacaactgttcgtgatgctactacaggtaaggttattaccgaccttgtggagcatgatcaggaattcgttgtagccagaggtggccgcggtggtcgtggaaatattcgctttgcaaccccacgtaatccagctcctgaaattgctgaaaatggggagcctggtgaagaacgtgaattacaattagaattaaaaattttggctgatgttggtctcgttggtttcccatcagttgggaagtcgacgctacttagtgttgtttcagcagcaaagcctaaaattggtgcctatcattttacgacaattgtccctaatttagggatggttcgtacaaaatcaggtgatagctttgcaatggctgatcttcctggtttgattgaaggggctagtcaaggtgtcggattaggaactcagtttcttagacatattgagcgtacacgtgttattctacatgttattgatatgtcggcaagtgaaggacgagacccttacgatgactatgtttcaattaataatgagttggaaacttacaatcttcgattgatggaacgtccgcaaattattgttgccaataaaatggacatgcctgattcagaagagaatttggcagcattcaaagaaaaattagcagcaaactatgatgagtttgatgacatgcctatgatttttccaatttcaagtttagcacatcaaggactagaaaaccttatggatgcgacggctgaattattagccaatacagaagagtttcttctttatgacgaaactgacatgcaagaagatgaagcatactatggatttaacgaagatgaacgtccatttgagattacacgtgatgatgatgcaacgtgggtattgtatggtgataagctagaaaaactctttgttatgacaaatatggaacgcgatgaatcaataatgaaatttgctcgtcagttacgtggtatgggcgttgatgaagcccttcgagagcgcggagctaaggatggagatattgttcgtataggtaacttcgaatttgaatttgtagat

SEQ ID NO: 4034 - protein, 437 aa, Streptococcus agalactiae
MSMFLDTAKISVKAGRGGDGMVAFRREKYVPNGGPWGGDGGKGGSVIFKVNEGLRTLMDFRYNRNFKAKAGEKGMTKGMHGRGAEDLIVSLPPGTTVRDATTGKVITDLVEHDQEFVVARGGRGGRGNIRFATPRNPAPEIAENGEPGEERELQLELKILADVGLVGFPSVGKSTLLSVVSAAKPKIGAYHFTTIVPNLGMVRTKSGDSFAMADLPGLIEGASQGVGLGTQFLRHIERTRVILHVIDMSASEGRDPYDDYVSINNELETYNLRLMERPQIIVANKMDMPDSEENLAAFKEKLAANYDEFDDMPMIFPISSLAHQGLENLMDATAELLANTEEFLLYDETDMQEDEAYYGFNEDERPFEITRDDDATWVLYGDKLEKLFVMTNMERDESIMKFARQLRGMGVDEALRERGAKDGDIVRIGNFEFEFVD

SEQ ID NO: 4035 - DNA, 1311 bp, Streptococcus pyogenes
atgagtatgtttttagatacggcaaaaatcagtgtccaagcaggccgtggtggcgatggtatggtagcttttcgtcgtgaaaagtacgtcccaaatggcggtccttggggaggagacggcggtaaaggtggctcagttatcttccgagtggacgaaggtttgcgtaccttgatggatttccggtataatcgtaaattcaaggcgaaatctggtgaaaaaggtatgaccaaaggcatgcacggccgtggtgcagaagatttgattgtctttgttcctcaagggacaacggttcgtgatgctgaaactggaaaagtaattacagacttagtagaacatggtcaagaagtggtcattgctaagggtggtcgtggtggccgtgggaatattcgttttgcaactcctcgtaatcctgcgccagagattgctgaaaatggtgagccaggtgaggaacgtcagttagagttagaactcaaaatcttagctgacgttggcttggtcggattcccatctgttgggaaatcaaccttgttaagtgttgtgtcatcagctaaaccgaaaattggtgcctatcattttaccactattgttcctaatcttggaatggttcgtacaaagtcaggtgatagctttgctatggcagatctgccaggtttgattgaaggtgctagccaaggggttggtttaggaactcaattcctccgtcatatcgagcggacacgggttattcttcatgtgattgacatgtctgctagtgagggtcgtgatccttacgaagattatgtttccattaataacgagctggaaacctataatttgcgattgatggagcgcccacagattattgtggctaataaaatggacataccagaggctcaagaaaacttgaaagccttcaagaaaaaattggctgcccaatatgacgagtttgatgatttgccaatgattttccctatttcaagcctagcacatcaaggcttagagaacttgttagaagcaacggcagaattactcgctaaaacagacgaattcttattatatgatgaatctgatctggtggacgaggaagcttactatggctttgctgagactgaaaaagactttgagatcacacgtgacgatgacgctacttgggtcttgtctggtgagaagttagaacgtctctttgtcatgaccaatatggaacgtgatgagtccatcatgaaatttgcccgtcaattgcgcggtatgggggttgacgaagctcttcgtgaacgtggagcaaaagatggggatcctgttcgtattggcaagtttgaatttgaatttgtggat

SEQ ID NO: 4036 - protein, 437 aa, Streptococcus pyogenes
MSMFLDTAKISVQAGRGGDGMVAFRREKYVPNGGPWGGDGGKGGSVIFRVDEGLRTLMDFRYNRKFKAKSGEKGMTKGMHGRGAEDLIVFVPQGTTVRDAETGKVITDLVEHGQEVVIAKGGRGGRGNIRFATPRNPAPEIAENGEPGEERQLELELKILADVGLVGFPSVGKSTLLSVVSSAKPKIGAYHFTTIVPNLGMVRTKSGDSFAMADLPGLIEGASQGVGLGTQFLRHIERTRVILHVIDMSASEGRDPYEDYVSINNELETYNLRLMERPQIIVANKMDIPEAQENLKAFKKKLAAQYDEFDDLPMIFPISSLAHQGLENLLEATAELLAKTDEFLLYDESDLVDEEAYYGFAETEKDFEITRDDDATWVLSGEKLERLFVMTNMERDESIMKFARQLRGMGVDEALRERGAKDGDPVRIGKFEFEFVD

SEQ ID NO: 4037 - DNA, 126 bp, Streptococcus agalactiae
gtggcttttggagataacggacaacgaaaaaaaactgggtttgaaaaactaactctttttgttgttattttgatggtactagtaacagttggtggtttggtatttggtgctattagtgcaatcatg

SEQ ID NO: 4038 - protein, 42 aa, Streptococcus agalactiae
MAFGDNGQRKKTGFEKLTLFVVILMVLVTVGGLVFGAISAIM

SEQ ID NO: 4039 - DNA, 126 bp, Streptococcus pyogenes
gtggcatttggagaaaatggacctcgcaaaaaaacaacctttgaaaaagtgacaatgtttgttgttatcctaatggttcttgtaactgttggcgggcttattgcgagtgccctatcagtattaatg

SEQ ID NO: 4040 - protein, 42 aa, Streptococcus pyogenes
VAFGENGPRKKTTFEKVTMFVVILMVLVTVGGLIASALSVLM

SEQ ID NO: 4041 - DNA, 1239 bp, Streptococcus agalactiae
atggttttacaagatttcgacaaccttttaaaaaaatatgcccaattaattatttctaaaggtttaaatgtccaaaaagggcacactctcgctttaacaatcgatgtggaacaagtccacttagcaaggcttttaactgaagccgcttatgaaaagggagcaagtgaagttattgttgattatacagatgattttatcacgcgccagcgactacttcatgcttcagacgaagttctcacgaatgttccacagtataccgttgataaatctttagcactattaaataagaaggctagtcgattagttgtgaaatcttctaaccctaacgctttcgctactgttgatcctaaacgtttatctgaaacaactagagcaaccgctattgccttagaggaacaaagtagagcaatacaagctaataaagtatcttggaacgtggctgcagctgctggtagagaatgggctgcacttgtcttcccagaattaaaaacaagcgaccaacaagttgatgctctttgggataccattttcaaattaaatcgtatttatgaagatgatcctattgctgcttgggacgcacatgaagctaaattattagaaaaagctactagactaaatcaagaacaatttgatgctcttcattataccgcaccaggtacagatttaacgcttggtatgcctaaaaatcatatttgggaggcagccggtagtctcaacgctcagggagagacttttatcgctaatatgcctactgaagaaatcttttcagcacctgattaccgtcgtgcagatgggtatgtgacaagtacaaaacctctcagttatgctggcgttattatcgaaaatatgacatttacctttaaagacggtaaaattatcaatgtcactgcagaaaaagggcaagaaacagtccaacgcttaatcgaggaaaatgatggggcaagatcgcttggggaagttgcacttgtcccacataaaacaccaatttcactatctggactgattttctttaatactttattcgatgaaaatgcctctaatcacctcgctattggaactgcatatgccttcaatgtagaaggaggaacagaaatgacaagtcaagaattggatgaagctggtttaaatcgttcttcaacacatgttgattttatgattggttcagaacaaatggatattgatggtattcgtgcagatggaactgctgtcccaatctttagaaatggcgaatgggctatt

SEQ ID NO: 4042 - protein, 413 aa, Streptococcus agalactiae
MVLQDFDNLLKKYAQLIISKGLNVQKGHTLALTIDVEQVHLARLLTEAAYEKGASEVIVDYTDDFITRQRLLHASDEVLTNVPQYTVDKSLALLNKKASRLVVKSSNPNAFATVDPKRLSETTRATAIALEEQSRAIQANKVSWNVAAAAGREWAALVFPELKTSDQQVDALWDTIFKLNRIYEDDPIAAWDAHEAKLLEKATRLNQEQFDALHYTAPGTDLTLGMPKNHIWEAAGSLNAQGETFIANMPTEEIFSAPDYRRADGYVTSTKPLSYAGVIIENMTFTFKDGKIINVTAEKGQETVQRLIEENDGARSLGEVALVPHKTPISLSGLIFFNTLFDENASNHLAIGTAYAFNVEGGTEMTSQELDEAGLNRSSTHVDFMIGSEQMDIDGIRADGTAVPIFRNGEWAI

SEQ ID NO: 4043 - DNA, 504 bp, Streptococcus agalactiae
ttgaaccttgaaaatggtattatttactcaaaaaatattgctaagcaattaattgctaaagatccaaaaaacaaagctacttatgagaaaaacagagatgcttatgtagctaaattagaaaaattggataaagaagcaaaatctaaatttaatgccattccagctaataaaaaattaattgttactagtgaaggttgctttaaatatttctcaaaagcttatggagttccatcagcatacatctgggaaattaacactgaagaagaaggtacaccagatcaaattactagcttagttaagaaattaaaacaagtaagaccttcagctttattcgttgaatcaagtgttgacaagcgtcctatgaaatctgtttcaagagaatcaggtatcccaatttacgcagaaatcttcacagactcaattgctaaaaaaggtcaaaagggtgacagctactacgctatgatgaaatggaatcttgataagattgcagaaggtttagcaaaa

SEQ ID NO: 4044 - protein, 168 aa, Streptococcus agalactiae
MNLENGIIYSKNIAKQLIAKDPKNKATYEKNRDAYVAKLEKLDKEAKSKFNAIPANKKLIVTSEGCFKYFSKAYGVPSAYIWEINTEEEGTPDQITSLVKKLKQVRPSALFVESSVDKRPMKSVSRESGIPIYAEIFTDSIAKKGQKGDSYYAMMKWNLDKIAEGLAK

SEQ ID NO: 4045 - DNA, 2052 bp, Streptococcus agalactiae
ttggaagatcaaatgaaacgtaaatactttattcttaatacggtgacggttttaacgttagctgctgcaatgaatactagcagtatctatgctaatagtactgagacaagtgcttcagtagttcctactacaaatactatcgttcaaactaatgacagtaatcctaccgcaaaatttgtatcagaatcaggacaatctgtaataggtcaagtaaaaccagataattctgcggcgcttacaacagttgacacgcctcatcatatttcagctccagatgctttaaaaacaactcaatcaagtcctgtcgttgagagtacttctactaagttaactgaagagacttacaaacaaaaagatggtcaagatttagccaacatggtgagaagtggtcaagttactagtgaggaactcgttaatatggcatacgatattattgctaaagaaaacccatctttaaatgcagtcattactactagacgccaagaagctattgaagaggctagaaaacttaaagataccaatcagccgtttttaggtgttcccttgttagtcaaggggttagggcacagtattaaaggtggtgaaaccaataatggcttgatctatgcagatggaaaaattagcacatttgacagtagctatgtcaaaaaatataaagatttaggatttattattttaggacaaacgaactttccagagtatgggtggcgtaatataacagattctaaattatacggtctaacgcataatccttgggatcttgctcataatgctggtggctcttctggtggaagtgcagcagccattgctagcggaatgacgccaattgctagcggtagtgatgctggtggttctatccgtattccatcttcttggacgggcttggtaggtttaaaaccaacaagaggattggtgagtaatgaaaagccagattcgtatagtacagcagttcattttccattaactaagtcatctagagacgcagaaacattattaacttatctaaagaaaagcgatcaaacgctagtatcagttaatgatttaaaatctttaccaattgcttatactttgaaatcaccaatgggaacagaagttagtcaagatgctaaaaacgctattatggacaacgtcacattcttaagaaaacaaggattcaaagtaacagagatagacttaccaattgatggtagagcattaatgcgtgattattcaaccttggctattggcatgggaggagctttttcaacaattgaaaaagacttaaaaaaacatggttttactaaagaagacgttgatcctattacttgggcagttcatgttatttatcaaaattcagataaggctgaacttaagaaatctattatggaagcccaaaaacatatggatgattatcgtaaggcaatggagaagcttcacaagcaatttcctattttcttatcgccaacgaccgcaagtttagcccctctaaatacagatccatatgtaacagaggaagataaaagagcgatttataatatggaaaacttgagccaagaagaaagaattgctctctttaatcgccagtgggagcctatgttgcgtagaacaccttttacacaaattgctaatatgacaggactcccagctatcagtatcccgacttacttatctgagtctggtttacccatagggacgatgttaatggcaggtgcaaactatgatatggtattaattaaatttgcaactttctttgaaaaacatcatggttttaatgttaaatggcaaagaataatagataaagaagtgaaaccatctactggcctaatacagcctactaactccctctttaaagctcattcatcattagtaaatttagaagaaaattcacaagttactcaagtatctatctctaaaaaatggatgaaatcgtctgttaaaaataaaccatccgtaatggcatatcaaaaagcacttcctaaaacaggtgatacagaatcaagcctatctccagttttagtagtaacccttttattagcttgttttagctttgtaacaaaaaagaatcagaaaagt

SEQ ID NO: 4046 - protein, 684 aa, Streptococcus agalactiae
MEDQMKRKYFILNTVTVLTLAAAMNTSSIYANSTETSASVVPTTNTIVQTNDSNPTAKFVSESGQSVIGQVKPDNSAALTTVDTPHHISAPDALKTTQSSPVVESTSTKLTEETYKQKDGQDLANMVRSGQVTSEELVNMAYDIIAKENPSLNAVITTRRQEAIEEARKLKDTNQPFLGVPLLVKGLGHSIKGGETNNGLIYADGKISTFDSSYVKKYKDLGFIILGQTNFPEYGWRNITDSKLYGLTHNPWDLAHNAGGSSGGSAAAIASGMTPIASGSDAGGSIRIPSSWTGLVGLKPTRGLVSNEKPDSYSTAVHFPLTKSSRDAETLLTYLKKSDQTLVSVNDLKSLPIAYTLKSPMGTEVSQDAKNAIMDNVTFLRKQGFKVTEIDLPIDGRALMRDYSTLAIGMGGAFSTIEKDLKKHGFTKEDVDPITWAVHVIYQNSDKAELKKSIMEAQKHMDDYRKAMEKLHKQFPIFLSPTTASLAPLNTDPYVTEEDKRAIYNMENLSQEERIALFNRQWEPMLRRTPFTQIANMTGLPAISIPTYLSESGLPIGTMLMAGANYDMVLIKFATFFEKHHGFNVKWQRIIDKEVKPSTGLIQPTNSLFKAHSSLVNLEENSQVTQVSISKKWMKSSVKNKPSVMAYQKALPKTGDTESSLSPVLVVTLLLACFSFVTKKNQKS

SEQ ID NO: 4047 - DNA, 1452 bp, Streptococcus pyogenes
atgacttatcaagatgcgacggctatggctattgctgttcagactggtcagaccacaccactagaattagtaacccaggctatttataaggctaaaaagttgaaccctaccttaaatgctattacctcagaacgctttgaagcagccctagaagaagccaaacaaagggatttttcaggtctgccttttgctggtgtgcctctttttttaaaagatttgggacaagaattaaaaggtcactcatcaacctcaggttccagattgtttaaagagtatcaagcgactaaaacggatttatttgtgaaaagattagaagctttaggctttattattttagggcgctccaacacgcctgaatttggctttaaaaatattagcgatagcagtttgcacggaccagtgaatttaccaagggataatacacgaaatgctggtggctcatctgggggagctgctgctctagtgtcatcaggaattagtgcgctagcaactgctagtgatggtggtggttctattcgaattccagcctcgtttaatggcttaattgggctcaaacctagccgtgggcgcatgcctgtcggacctggttcttatcgaagctggcaaggagcctcagttcattttgccttgaccaaatccgttagagatactagaaatctactctactatttacagatggaacaaatggaaagccccttccccctagccaccttaacaaaagatagtatttatcaatcgctacaacgtcccttgacaattgctttttatcaacggttaagtgacggtagcccagtatctttagatactgcaaaagctttaagacaagcagtaacttggctaagagaacaagggcatcagctagttgaattggaagagtttcctgtaaatatgacagaagtgattcgtcattattatattatgaatagtgtggaaacggctgctatgtttgctgatattgaagacacttttggacgtccgatgaccaaagacgatatggaaaccatgacctgggctatttaccaatcaggtaaagacatcccagcttggcgttactcacaggtccttcaaaaatgggatacgtacagtgcaaccatggctagttttcatgagacttatgacctgttgttgacgttcacaaccaacacaccagctcctaagcacggagaacttgtcccagattcgaaactcatggctaacttggctcaagctgaaattttcagcagtgaagagcaattcaatttggtcgaaaccatgtttggtaagagtctggctattaatccttacacagctctgcctaatctaactggccagccagctattagtttacctacttatgaaactaaggaaggtctctcaatgggcattcaactaattgcagccaaaggtagagaggacctattattaggaattgcagaacagtttgaggcagcaggattattgaagattcctcaa

SEQ ID NO: 4048 - protein, 484 aa, Streptococcus pyogenes
MTYQDATAMAIAVQTGQTTPLELVTQAIYKAKKLNPTLNAITSERFEAALEEAKQRDFSGLPFAGVPLFLKDLGQELKGHSSTSGSRLFKEYQATKTDLFVKRLEALGFIILGRSNTPEFGFKNISDSSLHGPVNLPRDNTRNAGGSSGGAAALVSSGISALATASDGGGSIRIPASFNGLIGLKPSRGRMPVGPGSYRSWQGASVHFALTKSVRDTRNLLYYLQMEQMESPFPLATLTKDSIYQSLQRPLTIAFYQRLSDGSPVSLDTAKALRQAVTWLREQGHQLVELEEFPVNMTEVIRHYYIMNSVETAAMFADIEDTFGRPMTKDDMETMTWAIYQSGKDIPAWRYSQVLQKWDTYSATMASFHETYDLLLTFTTNTPAPKHGELVPDSKLMANLAQAEIFSSEEQFNLVETMFGKSLAINPYTALPNLTGQPAISLPTYETKEGLSMGIQLIAAKGREDLLLGIAEQFEAAGLLKIPQ

SEQ ID NO: 4049 - DNA, 720 bp, Streptococcus agalactiae
atgagacttgataaatttttagtagaatgcggacttggttcacgtactcaagtcaaattaatattgaaaaaaaagcagattagtgttaatggtaatagcgagacatctccaaaagtacaggtagatgaatatagagatgagattaaatataatggaactctagtgtcatatgaaaagtttgtttattatatgcttcataaacccaaaggtgttatatcagcaacggatgatccttcgcataaaaccgtgttagatttgctagacaaaactgctcgagataaagctgttttcccagtggggcgtttagatattgatacaacaggccttttgttattaactaataatggggaattagcgcataaaatgttatcacctaaaaaacacgttgataaatgctatgaggtaaaaatctcagggataatgacagaagacgatattttggcatttgataaagggattattctgaaagattttacttgtttaccagcattattagaaattgtggaagtaaatcaggtgaagaagcagagtcttgttaaaatcaccattaaggaaggaaaattccatcaagttaaacgtatggttgctgcgtgtggtaaggaagtcttagagctaaagcgtctaaggatgggaaatctacaattagataaacagctagaaagtggacaatggagacggctaacaataaaagaaatagaaaaattagaaaaatatatgcaa

SEQ ID NO: 4050 - protein, 240 aa, Streptococcus agalactiae
MRLDKFLVECGLGSRTQVKLILKKKQISVNGNSETSPKVQVDEYRDEIKYNGTLVSYEKFVYYMLHKPKGVISATDDPSHKTVLDLLDKTARDKAVFPVGRLDIDTTGLLLLTNNGELAHKMLSPKKHVDKCYEVKISGIMTEDDILAFDKGIILKDFTCLPALLEIVEVNQVKKQSLVKITIKEGKFHQVKRMVAACGKEVLELKRLRMGNLQLDKQLESGQWRRLTIKEIEKLEKYMQ

SEQ ID NO: 4051 - DNA, 732 bp, Streptococcus pyogenes
atgatgcgcttagataaatttttagtggcaactggtgttggaactaggagccaagtcaaacttctcttaaaaaagaaggctattttcgtcaatcaaaaggttgaaacctctgccaaagcacacattgatgaatacaaggatttggtgacgtatcaaggtacgcccttggtctatgaatcctttgtttattacctgttaaacaagccgtcagggtatgtgtcagcaacccaggacagacagcaggctactgttatggagttgttagatgacacggctaggcaaaaagcagtttttcctgtgggtaggttagataaggatacccgtggacttttgctcttgaccaataatggacaactagcccatgaccttttatcccctaaaaaacatgttacgaaagagtacttggctaaagtagcaggcatcatgactgaagctgataaagattattttgctagaggtatttccttaaaggatcaccagtgcctacctgctcatttagaagtgcttgctagtgatttacagcagcaaacaagtttggttaaaattaccatacaagaaggaaaattccatcaggtgaaacgcatggtagcagcctgtggaaaggaagtgcttgacttacagcgtctcagcatgggaccattaaaactagaccctagccttgcagaaggggagtttaggcgcctgacgcctgaggaattgcagagcctggcaccttattgtcagagctcacta

SEQ ID NO: 4052 - protein, 244 aa, Streptococcus pyogenes
MMRLDKFLVATGVGTRSQVKLLLKKKAIFVNQKVETSAKAHIDEYKDLVTYQGTPLVYESFVYYLLNKPSGYVSATQDRQQATVMELLDDTARQKAVFPVGRLDKDTRGLLLLTNNGQLAHDLLSPKKHVTKEYLAKVAGIMTEADKDYFARGISLKDHQCLPAHLEVLASDLQQQTSLVKITIQEGKFHQVKRMVAACGKEVLDLQRLSMGPLKLDPSLAEGEFRRLTPEELQSLAPYCQSSL

SEQ ID NO: 4053 - DNA, 903 bp, Streptococcus agalactiae
atgtttaaaatagatgtttttcactatgaaattcatttttgtcacatagaaaaggagattgttatggaaacatatactttatcgaatactcttaacattcctaaaattggttttgggacatggcaactaactgaaggtgaagaagcttataaggcagtgactcatgctttaaaagttggttatactcatattgatactgctcagatttatggtaatgaacatagtgttggacgtgctataagagacagtggtttggcaagagaaagtatctttttgacaactaagatttggaatgacaaacatgactatcatttagccaaagcttctattgatgaatctctgcagaaattaggtgttgattatattgatcttcttttgattcattggccaaatccaaaagctcttcgtgaaaatgatgcgtggaaagctgggaatgcaggcacttggaaagcgatggaagaagcttataaagaaggaaaggtaaaagctattggtgtttcgaatttcatgaaacatcacttagaggctttatttgaaactgccgaaataaaacctatggttaatcaaattatcctagcaccaggttgtgctcaagaggatttggttcgcttctgtaaaggaaatgatatcttattagaagcttacagtccatttggaacaggtgctatttttgaaaatgaatctataaaagctattgctgaaaaatatggtaaatcagttgcgcaagtagctcttcgctggtcacttgataatggctttttaccattacctaagtcagcgactcccaaaaatattgaagcaaaccttgatatttttgattttcaattaaacgaagatgatattgctaccttaatacaactagattcaggtattaaacccaaagatccagataatgtctcattt

SEQ ID NO: 4054 - protein, 301 aa, Streptococcus agalactiae
MFKIDVFHYEIHFCHIEKEIVMETYTLSNTLNIPKIGFGTWQLTEGEEAYKAVTHALKVGYTHIDTAQIYGNEHSVGRAIRDSGLARESIFLTTKIWNDKHDYHLAKASIDESLQKLGVDYIDLLLIHWPNPKALRENDAWKAGNAGTWKAMEEAYKEGKVKAIGVSNFMKHHLEALFETAEIKPMVNQIILAPGCAQEDLVRFCKGNDILLEAYSPFGTGAIFENESIKAIAEKYGKSVAQVALRWSLDNGFLPLPKSATPKNIEANLDIFDFQLNEDDIATLIQLDSGIKPKDPDNVSF

SEQ ID NO: 4055 - DNA, 744 bp, Streptococcus agalactiae
ttgctacgatatcgcctgctgagattttttctaaattgtgatatgatagcattaataacaggaggatctaaaatgacaaaagaagatatcaaaaaacaagttcgaagagcttttgattttcgtatggcgattcgtgtttataataataatgatattcctaaagaagatatggagtatattttagatactgcttggttgagtccttcttcagtcggtttagaaggctggcgatttttggtactagatagacaaacaattgcaaaatttcgagataaacttaaggaagttgcttggggagcacaatatcaactagatactgctagtcactttgttttactactagctgaaaaaggtgcttattataacgctgatagcatgattaacagtctcattcgacgtggtctaggtgatccagctgcccttgagagtaggatacctctctacaaatccttccaagaaaacgatatgaaaattgattctgaacgttctctttgggattggacagcaaaacaaacttatatcgcactcggtaatatgatgacggctgctgctatgatcggcgtagattcatgcccaattgaaggatttgactatgaaaaggtcaataatatccttagtaaagaaggattaatagacgataagaaagaagctatttcttgtatggtttcatttggttatcgtttgcgtgaacctaaacattcccgtgctaggaaagaacgccaagaagtcattacttgggttgag

SEQ ID NO: 4056 - protein, 248 aa, Streptococcus agalactiae
MLRYRLLRFFLNCDMIALITGGSKMTKEDIKKQVRRAFDFRMAIRVYNNNDIPKEDMEYILDTAWLSPSSVGLEGWRFLVLDRQTIAKFRDKLKEVAWGAQYQLDTASHFVLLLAEKGAYYNADSMINSLIRRGLGDPAALESRIPLYKSFQENDMKIDSERSLWDWTAKQTYIALGNMMTAAAMIGVDSCPIEGFDYEKVNNILSKEGLIDDKKEAISCMVSFGYRLREPKHSRARKERQEVITWVE

SEQ ID NO: 4057 - DNA, 663 bp, Streptococcus pyogenes
atggatcaaaccattcatcaccaaatacagcaagcactacactttagaacagccgttcgtgtttataaggaagaaaagatttctgatgaggatttagcccttatccttgatgctgcttggttaagcccttcttctattggcttagaaggctggcgctttgtcgttttagacaacaagcctattaaagaagaaatcaagccctttgcctggggagcccagtatcaactggaaacagctagtcactttattcttttaatagccgaaaaacatgcaagatacgatagccctgctatcaaaaatagccttttacggcgtggtatcaaagaaggtgatggtctcaacagccgcctaaaactctatgaatctttccaaaaagaggacatggatatggcagataatcctcgggcactctttgattggacagctaaacaaacctatatcgctcttggtaatatgatgatgacagctgctcttttgggcattgatacttgccctattgaaggctttcattatgataaggtcaatcatatcctagctaagcataatgtgattgatttagaaaaagaaggcattgctagcatgttatccctaggctatcgtttgcgagatcccaaacatgctcaagttcgtaagcctaaagaagaagtgatttcagtcgttaaa

SEQ ID NO: 4058 - protein, 221 aa, Streptococcus pyogenes
MDQTIHHQIQQALHFRTAVRVYKEEKISDEDLALILDAAWLSPSSIGLEGWRFVVLDNKPIKEEIKPFAWGAQYQLETASHFILLIAEKHARYDSPAIKNSLLRRGIKEGDGLNSRLKLYESFQKEDMDMADNPRALFDWTAKQTYIALGNMMMTAALLGIDTCPIEGFHYDKVNHILAKHNVIDLEKEGIASMLSLGYRLRDPKHAQVRKPKEEVISVVK

SEQ ID NO: 4059 - DNA, 390 bp, Streptococcus agalactiae
atgccatttttacatacttgtattcgcgttaaagatttggacgcctcaattgctttttatcaagaagcacttggttttaaggaagttcgtcgtaatgactttcctgaaaatcaatttactttagtctatatggccctagaggacgaccctagttacgaattagagttaacctataactatgatcacgaagcttatgatttaggaaatgggtatggtcatattgctgttggtgtagacgatttggaaactacttatgatgcccatcagaaagcaggttactctgtaacaaaaatttctggattaccaggtaaacctaatatgttctactttattcaagatccagatggctataaaattgaagttattcgactcagtcaatttaaagctgac

SEQ ID NO: 4060 - protein, 130 aa, Streptococcus agalactiae
MPFLHTCIRVKDLDASIAFYQEALGFKEVRRNDFPENQFTLVYMALEDDPSYELELTYNYDHEAYDLGNGYGHIAVGVDDLETTYDAHQKAGYSVTKISGLPGKPNMFYFIQDPDGYKIEVIRLSQFKAD

SEQ ID NO: 4061 - DNA, 375 bp, Streptococcus pyogenes
atgaaagcattacatacctgtatccgcgtcaaagaccttgaccagtcggttgctttttacacaagtgccttcccttttaaggaaaactatcgtaaagattttccagatagtcaatttactcttgtttatctggctttagaaggagaaagttatgaattagaattaacctacaattatggtcatggcgactacgacttaggaaatggctatggtcatattgcccttggctctgaacattttgaagcagaccataaaaaacatcgacaagcaggttttccagttaccgatatcaaagaactggctgacaaatctgcccgctattatttcattcaggatccagatggctacaaaattgaagtcattgatttaaacaac

SEQ ID NO: 4062 - protein, 125 aa, Streptococcus pyogenes
MKALHTCIRVKDLDQSVAFYTSAFPFKENYRKDFPDSQFTLVYLALEGESYELELTYNYGHGDYDLGNGYGHIALGSEHFEADHKKHRQAGFPVTDIKELADKSARYYFIQDPDGYKIEVIDLNN

SEQ ID NO: 4063 - DNA, 924 bp, Streptococcus agalactiae
atggctttattatcagttattgtcccttgttataatgaacaagagactgtctcaacttttttaacagaaatcaaaaaagttgaatccgaaatggctcgttacacccattttgaatacattttcgtaaacgatggttctactgatcgtacactcgaacttcttaagaaagcagctaaacaatttgacaatgttcattacctttcattttcacgccattttggtaaagatgctgctttattggctggtttagaacatactactggtgattttatcactgttatggatgttgacttgcaagatccacccactttattaccagaaatgtacctaaaacttcaagaaggttatgatattgtcgctacaaggcgaaaagatcgtaaaggggagccgttgatacgctctctttttgccaagcttttttataaattaatcaatcaagtgtcagatactaaaatggttgatggtgcgcgtgattttcgtctcatgacaaaacaagttgttgacagtattctcgagctaaatgaagtgaatcgcttctcaaaagggattttttcctggattggatatgatgtcgcttatattagttatgagaatcgagaacgaattgcgggtaagacctcatggagtttctttaatctcttaaaatactctctagacggtttcatcaacttctcagaaattccattagctatagctacctggattggaacccttagttcagtactatcacttttagctatcatttttattataattcgaaaattactatttggggatcccgtttcaggttgggcaagcacagttaccattgtactttttatgggtggtattcagttattgtcgctaggaattataggcaaatacatctctaagattttcctagaaactaaaaaacgcccagtctatattgtcaaggaagaggga

SEQ ID NO: 4064 - protein, 308 aa, Streptococcus agalactiae
MALLSVIVPCYNEQETVSTFLTEIKKVESEMARYTHFEYIFVNDGSTDRTLELLKKAAKQFDNVHYLSFSRHFGKDAALLAGLEHTTGDFITVMDVDLQDPPTLLPEMYLKLQEGYDIVATRRKDRKGEPLIRSLFAKLFYKLINQVSDTKMVDGARDFRLMTKQVVDSILELNEVNRFSKGIFSWIGYDVAYISYENRERIAGKTSWSFFNLLKYSLDGFINFSEIPLAIATWIGTLSSVLSLLAIIFIIIRKLLFGDPVSGWASTVTIVLFMGGIQLLSLGIIGKYISKIFLETKKRPVYIVKEEG

SEQ ID NO: 4065 - DNA, 984 bp, Streptococcus pyogenes
ttgaaatatctcagcttttgtgttacaattgccctaaaattccatttgaaagaaaagtctatgacactactatctatcattgtcccctgctttaatgaagaagcaaacattctcccttattttgaagaaatgcatcaactagaaacgtccatgaccaaccaacttgcttttgaatacatttttattgatgatggttctaaggataacaccttgggtattttgcgtgagctagctgctcgctttccaaatgtgcattatctgtctttttcacgccattttggcaaggaagctgggctcttagctggactaaaagaagccaaaggcaattacattactgtgatggatgtggatctgcaagatccacccgaacttttgccaattatgtacgctaagctaaaagaaggttatgacatcgttggcaccaggcgccaaaatagacaaggagaaccactaattcgttcaatgtgttcgaatctattttatggactgatcaaacacttatcagatactgaaatggtcaatggagttcgggattatcggttaatgaccagacaagtcgttgatagcattcttgagttgggagaggttaatcgtttttcaaaagggatcttttcgtgggttggttatcgtatcacctatcttagttttgaaaaccaaaaacgcaaatatggaaaaagtcgttggcatttttgggagttgctccgatattctttagatggctttatcaacttttcagaaatgccgttaaccattgctacctggacagggactttcagctttttgatttctattttcgccatcttatttatcattatcagaaagatactctttggtgatcctgtctctggttgggccagcactgtctctattattttattcatgggaggcattcagctcttttgcatgggtattattggaaaatatatttcaaaaatattccttgaaactaaaaaaaggcctctctatattatcaaagaaaaacat

SEQ ID NO: 4066 - protein, 328 aa, Streptococcus pyogenes
LKYLSFCVTIALKFHLKEKSMTLLSIIVPCFNEEANILPYFEEMHQLETSMTNQLAFEYIFIDDGSKDNTLGILRELAARFPNVHYLSFSRHFGKEAGLLAGLKEAKGNYITVMDVDLQDPPELLPIMYAKLKEGYDIVGTRRQNRQGEPLIRSMCSNLFYGLIKHLSDTEMVNGVRDYRLMTRQVVDSILELGEVNRFSKGIFSWVGYRITYLSFENQKRKYGKSRWHFWELLRYSLDGFINFSEMPLTIATWTGTFSFLISIFAILFIIIRKILFGDPVSGWASTVSIILFMGGIQLFCMGIIGKYISKIFLETKKRPLYIIKEKH

SEQ ID NO: 4067 - DNA, 201 bp, Streptococcus agalactiae
  misc_feature (1)..(201): n = a, c, g, or t
atgtcaaaaaataataatgaccacactcaaaaatctgagaatggtatggtacgcggcctagaaaatcgtcacgtacagttaattgcgattgcagggacaatcggaactgggctttttcttggtgcaggtcgttcaattagcctgacgggtccttcaatagttcttgtctatgctatcactggcgcttnnnnnttaattaat

SEQ ID NO: 4068 - protein, 67 aa, Streptococcus agalactiae
  MISC_FEATURE (1)..(67): Xaa = Any Amino Acid
MSKNNNDHTQKSENGMVRGLENRHVQLIAIAGTIGTGLFLGAGRSISLTGPSIVLVYAITGAXXLIN

SEQ ID NO: 4069 - DNA, 1389 bp, Streptococcus pyogenes
atggagtttagaatgtctataaaagaacaaacagacaataacgaactagaaaatggaatggtaaggggcttagaaaatcgtcatgtgcagttaattgcgatcgcaggaacgattggaacaggtctctttttaggggcaggacgctctattgccctaacaggaccatctattatttttgtgtatatgattacaggtgccttcatgtttatgatgatgcgtgccatcggtgaaatgctctattatgatccagatcaacacacctttatcaattttatttccaaatacattggtccaggctggggttatttttcgggtctatcctattggatttcccttatttttattggaatggcagaaatcacagcagtaggtgcttatgtgcaattttggttcccaagctggccagcctggttgattcagttggttttcttagtcttacttagttcgatcaacttaattgctgtgcgcgtttttggggaaacagagttttggtttgccatgattaagattttagctattttagctttgattgcaacagctattttcatggtattgacaggttttgaaactcacacaggccatgctagcctttccaatatttttgaccatttttccatgttcccaaatgggaaactaaagttctttatggccttccaaatggttttctttgcttatcaagctatcgaatttgtgggaattaccacttctgagacggctaacccaagaaaagttctaccaaaggctattcaagaaattccaacccgtattgtgatcttttatgtgggagccttggtctctattatggcaattgtgccatggcatcagttaccagttgatgaatctccttttgtgatggtgttcaaattgattggtattaaatgggcagcagccttgattaactttgtggtcttgacatcagcagcgtcagcgcttaactcaaccctttattcaaccggtcgtcatctctatcagattgctaatgagactccaaacgctttgaccaatcgcttaaagattaatactttatctcgacaaggggtgccaagtcgtgccattattgcttcagcggttgtggttggtatctcagctttgattaatatcctaccaggagttgcagatgcgttctcactcattacggcctcctcatcaggtgtatatattgctatctacgccttaaccatgattgctcactggaagtaccgtcaatctaaggactttatggcagatggttatttgatgccaaaatataaagtgacaacgcctttgacccttgctttctttgcctttgtctttatctctcttttcttacaagaatccacctatatcggcgccattggagcaacgatttggattattatttttgggatttatagcaatgtcaaatttaaa

SEQ ID NO: 4070 - protein, 463 aa, Streptococcus pyogenes
MEFRMSIKEQTDNNELENGMVRGLENRHVQLIAIAGTIGTGLFLGAGRSIALTGPSIIFVYMITGAFMFMMMRAIGEMLYYDPDQHTFINFISKYIGPGWGYFSGLSYWISLIFIGMAEITAVGAYVQFWFPSWPAWLIQLVFLVLLSSINLIAVRVFGETEFWFAMIKILAILALIATAIFMVLTGFETHTGHASLSNIFDHFSMFPNGKLKFFMAFQMVFFAYQAIEFVGITTSETANPRKVLPKAIQEIPTRIVIFYVGALVSIMAIVPWHQLPVDESPFVMVFKLIGIKWAAALINFVVLTSAASALNSTLYSTGRHLYQIANETPNALTNRLKINTLSRQGVPSRAIIASAVVVGISALINILPGVADAFSLITASSSGVYIAIYALTMIAHWKYRQSKDFMADGYLMPKYKVTTPLTLAFFAFVFISLFLQESTYIGAIGATIWIIIFGIYSNVKFK

SEQ ID NO: 4071 - DNA, 327 bp, Streptococcus agalactiae
atgtcattaccaaattgccctaagtgtaactctgaatatgtctatgaagacggtattttactggtttgtccagaatgtgcttacgagtggaatccagaagaaatcgaagaagaagtaggtttaattgtattggatagcaatggaacgcgcttatcagatggagatactgtgacagttattaaggatttaaaagtaaaaggagcgcctaaggatattaagcaaggcactcgtgttaaaaatattcgtttagttgatggcgatcataatatcgattgtaaaattgatggttttggagctatgaaactaaaatctgagtttgtaaaaaaa

SEQ ID NO: 4072 - protein, 109 aa, Streptococcus agalactiae
MSLPNCPKCNSEYVYEDGILLVCPECAYEWNPEEIEEEVGLIVLDSNGTRLSDGDTVTVIKDLKVKGAPKDIKQGTRVKNIRLVDGDHNIDCKIDGFGAMKLKSEFVKK

SEQ ID NO: 4073 - DNA, 261 bp, Streptococcus pyogenes
atgtgtgcttttgaatggacaccaggcgaagaagcgactgaagaagaaggacttgttgttttggatagcaatggtgtccgactgtctgatggtgataccattactgtggttaaagatttgaaagtaaaaggcgctccaaaagacctgaaacaagggactcgagttaaaaatattcgcctggtggaaggtgatcataatattgattgtaagattgatgggtttggcgcgatgaaattgaaatcagaatttgtcaagaaaatc

SEQ ID NO: 4074 - protein, 87 aa, Streptococcus pyogenes
MCAFEWTPGEEATEEEGLVVLDSNGVRLSDGDTITVVKDLKVKGAPKDLKQGTRVKNIRLVEGDHNIDCKIDGFGAMKLKSEFVKKI

SEQ ID NO: 4075 - DNA, 138 bp, Streptococcus agalactiae
ttggagaaagaggctaagcagatcattgatttaaaaaggaatcttttcaaaattgatgtccgggcacaaaaggatgaagagaaagttttcatgcgtacggcgtggaaaataggctttttcctattgtcaagaagccta

SEQ ID NO: 4076 - protein, 46 aa, Streptococcus agalactiae
MEKEAKQIIDLKRNLFKIDVRAQKDEEKVFMRTAWKIGFFLLSRSL

SEQ ID NO: 4077 - DNA, 1812 bp, Streptococcus agalactiae
atgtgtggtatcgtaggtgtagttggaaatacaaatgcaacggatattttaattcaaggcttagaaaagctagagtaccgaggatatgactcagcaggtatttttgtagtaggtgataacaaaagtcaacttgtgaagtcagtcggtcgaatcgcggagattcaggcaaaagtaggagattctgttagtggtacgacaggtatcggtcatacacgttgggcaacccatggtaaacctactgaaggaaatgcacatcctcacacttcaggatctggtcgttttgtattggtacacaatggtgttattgaaaattaccttcaaattaaagaaacttacttaacaaaacataacctcaagggtgaaactgatacagaaatagctattcatttagttgaacactttgttgaagaagataacttatcagtgcttgaagcctttaaaaaagccttacatattatagaaggatcatacgcatttgctcttattgattctcaagatgctgatacgatttacgtagctaaaaataaatcacctcttctaataggtttgggaaatggttataatatggtgtgttcagatgccatggctatgatacgtgagacaagtgaatatatggaaatccacgataaagaactcgttattgttaaaaaagatagcgttgaagttcaagattatgatggtaatgtcattgaacgtggtagctacacagcagagcttgacttatcagatattggtaaggggacttatccattctacatgcttaaagaaattgatgagcaaccaactgtgatgcgtaagttgatttcaacttatgcgaacgaatctggagatatgaatgtggattctgatattataaaatcagtccaagaagcagatcgtctttacatattggctgcaggaacgtcatatcatgctggttttgctgctaagaccatgatcgaaaaattaactgatacacctgttgaacttggagtttcttcagaatggggttacaacatgccacttttgagtaagaagccaatgtttattttacttagtcaatcgggagaaacagcagatagtagacaagttttagttaaagcaaacgaaatgggaatccctagtttaactataacaaatgtgcctggctcaacactttctcgtgaagcaacctatacgatgctcattcatgcaggacctgaaatcgctgttgcttctacaaaagcatatactgctcaagttgcaacgttagctttcttagcaaaagcggtaggagaagcaaatggtaaggcagaagcaaaagattttgatttggttcatgaattgtcaattgtagcacaatcaattgaagcgaccttatcagaaaaagatgttatctctgagaaggtagagcagttgttaatctcgacacgtaatgccttctacattggtcgtggtaacgactattatgttacaatggaggctgcactgaagctaaaagagatttcttatattcagacagaaggttttgctgcaggtgaattaaaacatggtacaatttcgttgattgaagacaatactcctgttattgctttaatatctgctgattcaactattgcagcgcatactcgtggaaatatccaagaagttgtttctcgcggagcaaatgctttgattattgtagaagaagggttggaacgtgaaggtgatgatattattgttaataaagttcacccattcttatcagccatttcaatggttattccgactcaattaattgcttactatgcttcattacaacgtggcttagatgttgataaaccacgtaatttggcaaaagctgtaactgttgaa

SEQ ID NO: 4078 - protein, 604 aa, Streptococcus agalactiae
MCGIVGVVGNTNATDILIQGLEKLEYRGYDSAGIFVVGDNKSQLVKSVGRIAEIQAKVGDSVSGTTGIGHTRWATHGKPTEGNAHPHTSGSGRFVLVHNGVIENYLQIKETYLTKHNLKGETDTEIAIHLVEHFVEEDNLSVLEAFKKALHIIEGSYAFALIDSQDADTIYVAKNKSPLLIGLGNGYNMVCSDAMAMIRETSEYMEIHDKELVIVKKDSVEVQDYDGNVIERGSYTAELDLSDIGKGTYPFYMLKEIDEQPTVMRKLISTYANESGDMNVDSDIIKSVQEADRLYILAAGTSYHAGFAAKTMIEKLTDTPVELGVSSEWGYNMPLLSKKPMFILLSQSGETADSRQVLVKANEMGIPSLTITNVPGSTLSREATYTMLIHAGPEIAVASTKAYTAQVATLAFLAKAVGEANGKAEAKDFDLVHELSIVAQSIEATLSEKDVISEKVEQLLISTRNAFYIGRGNDYYVTMEAALKLKEISYIQTEGFAAGELKHGTISLIEDNTPVIALISADSTIAAHTRGNIQEVVSRGANALIIVEEGLEREGDDIIVNKVHPFLSAISMVIPTQLIAYYASLQRGLDVDKPRNLAKAVTVE

SEQ ID NO: 4079 - DNA, 1812 bp, Streptococcus pyogenes
atgtgtggaattgttggagttgttggaaatcgcaatgcaacggatattttaatgcaaggccttgaaaagcttgaataccggggttatgattcagcaggaatttttgtggctaatgccaatcaaacaaacttgattaaatcagtggggcggattgctgatttgcgtgccaagattggcattgatgttgctggttcaacagggattggtcacacccgttgggcaacgcatggccaatcaacagaggataatgcccatcctcacacgtcacaaactggacgttttgtacttgttcataatggtgtgattgaaaattaccttcacattaaaacagagttcctagctggacatgattttaaggggcagacagatactgagattgcagtacacttgattggaaaatttgtggaagaagacaagttgtcagtactggaagcttttaaaaaatctttaagcattattgaaggttcctacgcctttgcattaatggatagccaagcaactgatactatttatgtggctaaaaacaagtctccattgttgattggacttggtgaaggttacaacatggtttgttcagatgccatggccatgattcgtgaaaccagtgaatttatggaaattcatgataaggagctagttattttaaccaaagataaggtaactgttacagactacgatggtaaagagctgatacgagattcctacactgctgaattagacttatctgatattggcaaagggacttatcctttctatatgctgaaagaaattgatgagcaaccaaccgtaatgcgtcaattaatttcaacttatgcagatgaaactggtaacgtacaggttgatccggctatcattacctctatccaagaggctgaccgtctttatattttagcggcagggacttcctaccatgctggttttgcaacaaaaaatatgcttgagcaattgacagatacaccagttgagttgggcgtggcttctgagtggggttaccacatgcctctgcttagcaagaaaccaatgtttattctactaagccaatcaggagaaaccgcagatagtcgtcaagttttagtaaaggcaaatgctatgggcattccgagtttgacagtaactaacgttccaggatcaaccttatcacgtgaagcaacatacaccatgttgattcatgctggacctgaaattgctgttgcgtctacaaaagcttacactgcacaaattgctgcccttgcctttttggctaaggcagttggtgaggcaaatggtaagcaagaagctcttgactttaacttggtacatgagttgtcattggttgcccaatctattgaggcgactttgtctgaaaaagatctcgtggcagaaaaggttcaagctttgctagctactactcgtaatgctttttacatcgggcgtggcaatgattattacgttgcgatggaagctgctttgaaattaaaagagatttcttatattcaatgcgaaggctttgcggctggtgaattgaaacatggaaccatttcattaattgaggaggacacgccagtaatcgctttaatatcgtctagtcagttggttgcctctcatacgcgtggtaatattcaagaagttgctgcccgtggggctcatgttttaacagttgtggaagaagggcttgaccgtgagggagatgacattattgtcaataaggttcatcctttcctagccccgattgctatggtcattccaactcaactgattgcttactacgcttcattacaacgtggacttgatgttgataagccacgtaatttggctaaagctgtaacagtagaa

SEQ ID NO: 4080 - protein, 604 aa, Streptococcus pyogenes
MCGIVGVVGNRNATDILMQGLEKLEYRGYDSAGIFVANANQTNLIKSVGRIADLRAKIGIDVAGSTGIGHTRWATHGQSTEDNAHPHTSQTGRFVLVHNGVIENYLHIKTEFLAGHDFKGQTDTEIAVHLIGKFVEEDKLSVLEAFKKSLSIIEGSYAFALMDSQATDTIYVAKNKSPLLIGLGEGYNMVCSDAMAMIRETSEFMEIHDKELVILTKDKVTVTDYDGKELIRDSYTAELDLSDIGKGTYPFYMLKEIDEQPTVMRQLISTYADETGNVQVDPAIITSIQEADRLYILAAGTSYHAGFATKNMLEQLTDTPVELGVASEWGYHMPLLSKKPMFILLSQSGETADSRQVLVKANAMGIPSLTVTNVPGSTLSREATYTMLIHAGPEIAVASTKAYTAQIAALAFLAKAVGEANGKQEALDFNLVHELSLVAQSIEATLSEKDLVAEKVQALLATTRNAFYIGRGNDYYVAMEAALKLKEISYIQCEGFAAGELKHGTISLIEEDTPVIALISSSQLVASHTRGNIQEVAARGAHVLTVVEEGLDREGDDIIVNKVHPFLAPIAMVIPTQLIAYYASLQRGLDVDKPRNLAKAVTVE

SEQ ID NO: 4081 - DNA, 579 bp, Streptococcus agalactiae
atggaaaaaagattaggagtagttatggttaaacgcgattttattagaaatattattttagcattgattgctgtattgattttgattctcttgagatattttgtttttgcaacctttaaagtacataaggatgctacaaattcttattttagcaacggagatgttgttgttgttaatcgtaataggacgcctaagtacaaagactttattgtctataaggttggaaagattttctatattagtcgtgttattggtgagccaaatcaaaaagtgagagtaatggatgatattttatatttgaatgatgttttcaaggatgagccttacattgaaaaaatgaaaaatgcttattctgaaaagaaagacggtcaaatgccctttacttccgacttctcagttgaaacattaacacgaaataaagaaagcagagttcctaagggttcttatcttgtgttaaatgataatcgacaaaataaaaatgatagtcgaaaatttggattaatcaaagagaaagatattcgtggtgttattacctttaaagtataccctctaagtgaatttggttttacagcttcagag

SEQ ID NO: 4082 - protein, 193 aa, Streptococcus agalactiae
MEKRLGVVMVKRDFIRNIILALIAVLILILLRYFVFATFKVHKDATNSYFSNGDVVVVNRNRTPKYKDFIVYKVGKIFYISRVIGEPNQKVRVMDDILYLNDVFKDEPYIEKMKNAYSEKKDGQMPFTSDFSVETLTRNKESRVPKGSYLVLNDNRQNKNDSRKFGLIKEKDIRGVITFKVYPLSEFGFTASE

SEQ ID NO: 4083 - DNA, 555 bp, Streptococcus pyogenes
atggtaaagcgagattttataagaaatatattattgttattaattgtgattattggggctattttgttgagaatctttgttttttcaacttttaaagtttctccagaaacagctaatacttatttaaagagtggtgatttagtcacaatcaaaaaaaatattcagcccaaatataaagattttgtggtttatagagttggaaaaaaagattatgtcagtcgagtcattgctgttgaaggcgatagcgtgacttatatggacgatattttttacctcaataatatggtagagtcacaggcttaccttgaaaagatgaaagcacattacttgaatcatgcaccgtttggcacattgtatacagatgattttacagttgctaccatcacagctgataagtatcaaaaagttcctaaggggaagtatcttcttttgaatgataaccggaaaaatacgaatgacagtcgtcgatttgggttaataaatgcctcgcagattaaaggtttagtgacctttagagttttgcctctcagcgattttggatttgtagaagtagag

SEQ ID NO: 4084 - protein, 185 aa, Streptococcus pyogenes
MVKRDFIRNILLLLIVIIGAILLRIFVFSTFKVSPETANTYLKSGDLVTIKKNIQPKYKDFVVYRVGKKDYVSRVIAVEGDSVTYMDDIFYLNNMVESQAYLEKMKAHYLNHAPFGTLYTDDFTVATITADKYQKVPKGKYLLLNDNRKNTNDSRRFGLINASQIKGLVTFRVLPLSDFGFVEVE

SEQ ID NO: 4085 - DNA, 1500 bp, Streptococcus agalactiae
atgaataaacgcgtaaaaatcgttgcaacacttggtcctgcggttgaattccgtggtggtaagaagtttggtgagtctggatactggggtgaaagccttgacgtagaagcttcagcagaaaaaattgctcaattgattaaagaaggtgctaacgttttccgtttcaacttctcacatggagatcatgctgagcaaggagctcgtatggctactgttcgtaaagcagaagagattgcaggacaaaaagttggcttcctccttgatactaaaggacctgaaattcgtacagaactttttgaagatggtgcagatttccattcatatacaacaggtacaaaattacgtgttgctactaagcaaggtatcaaatcaactccagaagtgattgcattgaatgttgctggtggacttgacatctttgatgacgttgaagttggtaagcaaatccttgttgatgatggtaaactaggtcttactgtgtttgcaaaagataaagacactcgtgaatttgaagtagttgttgagaatgatggccttattggtaaacaaaaaggtgtaaacatcccttatactaaaattcctttcccagcacttgcagaacgcgataatgctgatatccgttttggacttgagcaaggacttaactttattgctatctcatttgtacgtactgctaaagatgttaatgaagttcgtgctatttgtgaagaaactggcaatggacacgttaagttgtttgctaaaattgaaaatcaacaaggtatcgataatattgatgagattatcgaagcagcagatggtattatgattgctcgtggtgatatgggtatcgaagttccatttgaaatggttccagtttaccaaaaaatgatcattactaaagttaatgcagctggtaaagcagttattacagcaacaaatatgcttgaaacaatgactgataaaccacgtgcgactcgttcagaagtatctgatgtcttcaatgctgttattgatggtactgatgctacaatgctttcaggtgagtcagctaatggtaaatacccagttgagtcagttcgtacaatggctactattgataaaaatgctcaaacattactcaatgagtatggtcgcttagactcatctgcattcccacgtaataacaaaactgatgttattgcatctgcggttaaagatgcaacacactcaatggatatcaaacttgttgtaacaattactgaaacaggtaatacagctcgtgccatttctaaattccgtccagatgcagacattttggctgttacatttgatgaaaaagtacaacgttcattgatgattaactggggtgttatccctgtccttgcagacaaaccagcatctacagatgatatgtttgaggttgcagaacgtgtagcacttgaagcaggatttgttgaatcaggcgataatatcgttatcgttgcaggtgttcctgtaggtacaggtggaactaacacaatgcgtgttcgtactgttaaa

SEQ ID NO: 4086 - protein, 500 aa, Streptococcus agalactiae
MNKRVKIVATLGPAVEFRGGKKFGESGYWGESLDVEASAEKIAQLIKEGANVFRFNFSHGDHAEQGARMATVRKAEEIAGQKVGFLLDTKGPEIRTELFEDGADFHSYTTGTKLRVATKQGIKSTPEVIALNVAGGLDIFDDVEVGKQILVDDGKLGLTVFAKDKDTREFEVVVENDGLIGKQKGVNIPYTKIPFPALAERDNADIRFGLEQGLNFIAISFVRTAKDVNEVRAICEETGNGHVKLFAKIENQQGIDNIDEIIEAADGIMIARGDMGIEVPFEMVPVYQKMIITKVNAAGKAVITATNMLETMTDKPRATRSEVSDVFNAVIDGTDATMLSGESANGKYPVESVRTMATIDKNAQTLLNEYGRLDSSAFPRNNKTDVIASAVKDATHSMDIKLVVTITETGNTARAISKFRPDADILAVTFDEKVQRSLMINWGVIPVLADKPASTDDMFEVAERVALEAGFVESGDNIVIVAGVPVGTGGTNTMRVRTVK

SEQ ID NO: 4087 - DNA, 1500 bp, Streptococcus pyogenes
atgaataaacgcgtaaaaatcgttgcaacacttggtcctgcggttgaaatccgtggtggtaaaaaatacggagaagatggctactgggctggtcaacttgatgttgaagaatcagcaaaaaaaatcgctgaattaattgaagctggtgcgaatgttttccgtttcaatttctcacacggtgaccacaaagagcaaggtgaccgtatggcaactgttcgccttgcagaagaaattgctcgtcaaaaagttggtttccttttggatactaaaggtcctgaaatgcgtacggaattgtttgcagatgatgctaaagagtttagctatgttactggagaaaaaatccgtgtagcgactacacaaggtattcaatcaactcgcgatgttattgctttgaacgttgctggtagccttgacatctacgatgaagtagaagtaggtcatactattcttatcgatgatggtaaacttggtttgaaagtgatcgacaaagatatcgcaacacgtcaatttatcgttgaagtagaaaacgacggtattattgctaaacaaaaaggtgttaatatccctaacactaaaattcctttcccagcacttgcggaacgcgacaatgctgatatccgttttggtcttgaacaaggacttaactttattgcaatctcatttgttcgtacagccaaagacgttgaggaagttcgtgaaatctgtcgcgaaactggtaacgaccatgtgcaattatttgctaagattgaaaaccaacaaggtatcgataatcttgatgaaatcatcgaagctgctgatggtatcatgattgcacgtggcgacatgggtatcgaagtaccatttgaaatggttccagttttccaaaaaatgattatcactaaagtgaatgcagctggtaaagcagttatcacagcaacaaacatgcttgaaacaatgactgaaaaaccacgtgcgacacgttctgaagtatctgacgtcttcaatgctgttatcgatggtactgatgcaacaatgctttcaggagagtcagctaacggtaaatacccggttgaatctgttcgtacaatggcgactattgatcgtaatgcacaaactcttcttaacgaatatggtcgtttagattcatctgccttcccacgtaccaataaaacagatgttattgcttcagctgttaaagatgccactcattcaatggacatcaaacttgttgtgactattactgagacaggtaatacagctcgtgcgatttctaaattccgtccagatgcggacatcttagctgtaacatttgatgaaaaagtacaacgtgctttgatgattaactggggtgttattcctgttcttgctgaaaaacctgcatctactgatgacatgtttgaagtagcagagcgtgttgctgtggaggcaggcttagttcaatctggggataatattgttattgttgctggtgttccagttggtactggtggaacgaatactatgcgtgttcgtacagtaaaa

SEQ ID NO: 4088 - protein, 500 aa, Streptococcus pyogenes
MNKRVKIVATLGPAVEIRGGKKYGEDGYWAGQLDVEESAKKIAELIEAGANVFRFNFSHGDHKEQGDRMATVRLAEEIARQKVGFLLDTKGPEMRTELFADDAKEFSYVTGEKIRVATTQGIQSTRDVIALNVAGSLDIYDEVEVGHTILIDDGKLGLKVIDKDIATRQFIVEVENDGIIAKQKGVNIPNTKIPFPALAERDNADIRFGLEQGLNFIAISFVRTAKDVEEVREICRETGNDHVQLFAKIENQQGIDNLDEIIEAADGIMIARGDMGIEVPFEMVPVFQKMIITKVNAAGKAVITATNMLETMTEKPRATRSEVSDVFNAVIDGTDATMLSGESANGKYPVESVRTMATIDRNAQTLLNEYGRLDSSAFPRTNKTDVIASAVKDATHSMDIKLVVTITETGNTARAISKFRPDADILAVTFDEKVQRALMINWGVIPVLAEKPASTDDMFEVAERVAVEAGLVQSGDNIVIVAGVPVGTGGTNTMRVRTVK

SEQ ID NO: 4089 - DNA, 1020 bp, Streptococcus agalactiae
atgaaacgtattgctgttttaactagtggtggtgacgcccctggtatgaacgctgctatccgtgcagttgttcgtaaagcaatttctgaaggtatggaagtttacggcatcaaccaaggttactatggtatggtgacaggggatattttccctttggatgctaattctgttggggatactatcaaccgtggaggaacgtttttacgttcagcacgttatcctgaatttgctgaacttgaaggtcagcttaaagggattgaacagcttaaaaaacacggtattgaaggtgtagtagttatcggtggtgatggttcttatcatggtgctatgcgtctaactgagcacggtttcccagctgttggtttgccgggtacaattgataacgatatcgttggcactgactatactattggttttgacacagcagttgcgacagcagttgagaatcttgaccgtcttcgtgatacatcagcaagtcataaccgtacttttgttgttgaggttatgggaagaaatgcaggagatatcgctctttggtcaggtatcgctgcaggtgcagatcaaattattgttcctgaagaagagttcaatattgatgaagttgtctcaaatgttagagctggctatgcagctggtaaacatcaccaaatcatcgtccttgcagaaggtgttatgagtggtgatgagtttgcaaaaacaatgaaagcagcaggagacgatagcgatcttcgtgtgacgaatttaggacatctgctccgtggtggtagtccgacggctcgtgatcgtgtcttagcatctcgtatgggagcgtacgctgttcaattgttgaaagaaggtcgtggtggtttagccgttggtgtccacaacgaagaaatggttgaaagtccaattttaggtttagcagaagaaggtgctttgttcagcttgactgatgaaggaaaaatcgttgttaataatccgcataaagcggaccttcgcttggcagcacttaatcgtgaccttgccaaccaaagtagtaaa

SEQ ID NO: 4090 - protein, 340 aa, Streptococcus agalactiae
MKRIAVLTSGGDAPGMNAAIRAVVRKAISEGMEVYGINQGYYGMVTGDIFPLDANSVGDTINRGGTFLRSARYPEFAELEGQLKGIEQLKKHGIEGVVVIGGDGSYHGAMRLTEHGFPAVGLPGTIDNDIVGTDYTIGFDTAVATAVENLDRLRDTSASHNRTFVVEVMGRNAGDIALWSGIAAGADQIIVPEEEFNIDEVVSNVRAGYAAGKHHQIIVLAEGVMSGDEFAKTMKAAGDDSDLRVTNLGHLLRGGSPTARDRVLASRMGAYAVQLLKEGRGGLAVGVHNEEMVESPILGLAEEGALFSLTDEGKIVVNNPHKADLRLAALNRDLANQSSK

SEQ ID NO: 4091 - DNA, 1011 bp, Streptococcus pyogenes
atgaaacgtattgctgttttaaccagtggcggcgacgctcctggtatgaacgctgctattcgtgcagtcgttcgtaaagcaatttcagaaggaatggaagtttatggtatcaaccgtggctatgcaggtatggttgatggcgacattttcccactgggttcaaaagaagttggtgataaaatctcacgtggtggaactttcttatactcagctcgttatccagagtttgctcaacttgaaggtcaattggctggtattgagcaacttaaaaaacatggtattgaaggtgttgttgttattggtggggatggttcttatcatggcgctatgcgcttgacagagcacggcttcccagcggtaggtatcccaggaacaatcgataacgatattgcgggaactgactacactatcggatttgatacagcagttaacacagcagttgaagctattgataaacttcgtgacacctcatcaagtcacggacgtacttttgtggttgaagtgatgggtcgcaatgcgggtgatattgctctttgggcaggtattgctagtggtgctgatcaaatcattgttccagaagaagagtttgatattgaaaaagtggcatcaacaatccaatatgattttgaacacaaaggtaaaaatcaccacattatcgtcttagctgaaggtgttatgagcggtgaagcttttgctcaaaaactgaaagaagctggcgataagagtgaccttcgtgtgacaaatcttggccacattcttcgtgggggttcaccaactgctcgtgaccgtgtcattgcttcttggatgggttcacatgctgttgagctacttaaagatggcaaaggtggtttggctgttggtattcacaatgaagaacttgttgaaagcccaatccttggtactgcagaagaaggtgctttgttcagcttgactgaagaaggcaagattattgttaataatccacacaaagctcgtttagactttgcagctttgaaccgttcattgtcacaa

SEQ ID NO: 4092 - protein, 337 aa, Streptococcus pyogenes
MKRIAVLTSGGDAPGMNAAIRAVVRKAISEGMEVYGINRGYAGMVDGDIFPLGSKEVGDKISRGGTFLYSARYPEFAQLEGQLAGIEQLKKHGIEGVVVIGGDGSYHGAMRLTEHGFPAVGIPGTIDNDIAGTDYTIGFDTAVNTAVEAIDKLRDTSSSHGRTFVVEVMGRNAGDIALWAGIASGADQIIVPEEEFDIEKVASTIQYDFEHKGKNHHIIVLAEGVMSGEAFAQKLKEAGDKSDLRVTNLGHILRGGSPTARDRVIASWMGSHAVELLKDGKGGLAVGIHNEELVESPILGTAEEGALFSLTEEGKIIVNNPHKARLDFAALNRSLSQ

SEQ ID NO: 4093 - DNA, 3102 bp, Streptococcus agalactiae
atgtttgcacaacttgatacaagaaccgtttattcttttatggatagcttggttgatttaaagacatatgtctctaaatcgaaatcattaggatatcaaactattggtatcttggaccacagtaatctttatgcagcatatcattttattcaagaggcgcaaaaggcaaacctaagaccaatagttggatttagctttgatatagtggttgaaaatagatcaatagaagtttactgtattgcgataaatacagttggttataagaatctcttgaagttgtcaacggctcaaatgtctgagaagatgtctctaaatttattgacagaacatcttgaaggggtgcaattgattcttccctatcaagatgttcttgatcagctcaatttaccctttgattatgttattggtgttaatttgacctctccgcagattccatataccaaacccattatagccatagatactgttcgatattttcaaaaaaatgatattgagacattacagatgcttcatgctataagagataatgtcctgttaaaagacgcacaatatgcgagcaaaaatcaagaattaaaaccttgtcaagaaatgactctagcattcaaggaacgttttcctgaagctttagctaacctagaatctttggtagagaatgttgcttatcactttgattctgactttaagttacctatttttaatagagaaattcctgctggagaagaattaagaaccttaactcaaaataacttaaaaagtaaaggtttatggagcgatgcttatcaagagcgtctcgaaaaagaattaacaatcattcacaaaatgggctttgatgactatttccttattgtgtgggatttattaagatttggtcgtagtaagggctactatatgggaatgggacgtggttcagcagcgggaagtttagtctcatatgctttaaatattaccggtatcgatcctgtcaaacataatttaatttttgaacgttttttaaatgaagagcgttattcgatgccagatattgatattgatcttccggatatttatcgtggagaattcttgcgctatgtacgtaatcgatatggttcaatgcattctgcacagattgtaaccttctcaacttttggtgcgaaacaggctattcgagatgtttttaaacgctttggtgcatcagagtatgagttaacaaacataactaaaaaaattcatttcagagataatttgaccagtgtttataaccgcaacttagctttcagacaaataatagatagtaaaattgaataccaaaaagcctatgatattgctaagcgtattgaaggaaatcctagacagacttctattcatgccgctggggtagtaatgagtgacgatttgttaacagatcatattcctttaaaaaacggtgaggatatgatgataacgcaatatgatgctagttctgttgaggataatggtcttctaaaaatggactttctaggtcttcgaaatttgacatttgttcagaaaatgaaggagaaagtcgataaggactacggtatctctatacaattagaaactattgatttagaagataaagagactctaaaactatttgcagctggtcaaacaaaggggatttttcaatttgagcaaagtggagctattaatttgttgcgacgtattaggccagagtgttttgaagatgtggtagctaccaccagcttgaataggcctggtgcaagtgattatactgagaattttataaaccgtcgttttggtaaagaaaaaatcgatttagtagatcctgtcatagctccaattttacaacctacctatggcataatgctctatcaagaacaggttatgcagattgcccagacctacgcaggttttacgctaggcaagtctgatttgctcagacgtgctatgtctaagaaaaattctaaggagatgcaaaagatgtctcaatccttcttagagggtgcagtatctaagggacatcgtcaagaagatgctcgacttatatttgaacgcatggctaaatttgcaggttatgggtttaatcgcagccatgcgtttgcttattcggctttagcttttcaattagcctatttcaaagcccattattccgatgtcttttatgacatcatgataaattattcaaatagtgattatctaatcgatgctattgattttggttttgttattgaaaaaccttcaattaatactatttcatacagagaccgcatctataaaaagaaaatttatttaggtttaaaaaatattaagggtgttcctaacgatttggcttattggatttctaaaaatcaaccgtttcagagtattgaagattttctaatgaggctgccacagcagtttcaaaaaagtggttttatttctccgctaattgctattggagcatttgacgaatttgataataatagacggaaaatcacctctaatcttgattctttatttacatttgtaaatgaactaggtagtttatttgcagatacctcatatcattggctagaagtagaagatttctctaattctgagaaatatgaaatggaacaagatatcttaggagtaggaatcagcccgcaccctttagtggggatttcacaaaaagctagccgtccgtttataccaattagtcaagttcaagaaaatagcgaagctactattttagttcagctaaagcaggtcaaagttattaggacaaaaagttctgggcaacaaatggctttcttgactgttatggatattaattcaaaaatggatattactgtttttcctgaaactttcaatattgtaagagatgatttacaagaagggaaatattattacttgcatggaaaaattcagaagcgagatgagcgattacagatggttttaaacggtgttcaagaagcaacggaggaacgtttttggatacttctaaaaaatcatgataacgacaaaaaaatatcggaaatattgtccaaatacaaagggcatattcctgtctatttgcattatgaaacaactaaagaaactatccaaagcaaagtacatttggttagaaaagatagtggcttagcccttgatttatctgaatttgttgtgaaaacggtttatcaa

SEQ ID NO: 4094 - protein, 1034 aa, Streptococcus agalactiae
MFAQLDTRTVYSFMDSLVDLKTYVSKSKSLGYQTIGILDHSNLYAAYHFIQEAQKANLRPIVGFSFDIVVENRSIEVYCIAINTVGYKNLLKLSTAQMSEKMSLNLLTEHLEGVQLILPYQDVLDQLNLPFDYVIGVNLTSPQIPYTKPIIAIDTVRYFQKNDIETLQMLHAIRDNVLLKDAQYASKNQELKPCQEMTLAFKERFPEALANLESLVENVAYHFDSDFKLPIFNREIPAGEELRTLTQNNLKSKGLWSDAYQERLEKELTIIHKMGFDDYFLIVWDLLRFGRSKGYYMGMGRGSAAGSLVSYALNITGIDPVKHNLIFERFLNEERYSMPDIDIDLPDIYRGEFLRYVRNRYGSMHSAQIVTFSTFGAKQAIRDVFKRFGASEYELTNITKKIHFRDNLTSVYNRNLAFRQIIDSKIEYQKAYDIAKRIEGNPRQTSIHAAGVVMSDDLLTDHIPLKNGEDMMITQYDASSVEDNGLLKMDFLGLRNLTFVQKMKEKVDKDYGISIQLETIDLEDKETLKLFAAGQTKGIFQFEQSGAINLLRRIRPECFEDVVATTSLNRPGASDYTENFINRRFGKEKIDLVDPVIAPILQPTYGIMLYQEQVMQIAQTYAGFTLGKSDLLRRAMSKKNSKEMQKMSQSFLEGAVSKGHRQEDARLIFERMAKFAGYGFNRSHAFAYSALAFQLAYFKAHYSDVFYDIMINYSNSDYLIDAIDFGFVIEKPSINTISYRDRIYKKKIYLGLKNIKGVPNDLAYWISKNQPFQSIEDFLMRLPQQFQKSGFISPLIAIGAFDEFDNNRRKITSNLDSLFTFVNELGSLFADTSYHWLEVEDFSNSEKYEMEQDILGVGISPHPLVGISQKASRPFIPISQVQENSEATILVQLKQVKVIRTKSSGQQMAFLTVMDINSKMDITVFPETFNIVRDDLQEGKYYYLHGKIQKRDERLQMVLNGVQEATEERFWILLKNHDNDKKISEILSKYKGHIPVYLHYETTKETIQSKVHLVRKDSGLALDLSEFVVKTVYQ

SEQ ID NO: 4095 - DNA, 3108 bp, Streptococcus pyogenes
atgtttgctcaacttgatactaaaactgtatactcatttatggatagtttaattgacttaaatcattattttgaacgagcaaagcaatttggttaccacaccataggaatcatggataaggataatctttatggtgcttaccattttattaaaggttgtcaaaaaaatggactgcagccagttttaggtttggaaatagagattctctatcaagagcggcaggtgctccttaacttaatcgcccagaatacacaaggctatcatcagcttttaaaaatttccacggcaaaaatgtctggcaagcttcatatggattacttctgccaacatttggaagggatagcggttattattcctagtaagggttggagcgatacattagtggtcccttttgactactatatcggtgttgatcagtatactgatttatctcatatggattctaagaggcagcttatacccctaaggacagttcgttattttgcgcaagatgatatggaaaccctgcacatgttgcatgccattcgagataacctcagtctggcagagacccctgtggtagaaagtgatcaagagttagcagattgtcaacaactaaccgccttctatcaaacacactgccctcaagctctacagaatttagaagacttagtgtcaggaatctattatgatttcgatacaaatttaaaattgcctcattttaatagagataagtctgccaagcaagaattgcaagacttgactgaggctggtttgaaggaaaaaggattgtggaaagagccttatcaatcgcgcttactacatgaattggtcattatttctgacatgggctttgatgattattttttgattgtgtgggatttacttcgctttggacgcagtaaaggctattatatgggaatgggacgtggctcggcggcaggtagtctagtggcttatgctctgaacattacagggattgatccagttcaacatgatttgctatttgagcgctttttaaacaaagaacgttatagcatgcctgatattgatatcgatcttccagatatttaccgttcagaatttctacggtatgtccgaaatcgttatggtagcgaccattcggcgcaaattgtgaccttttcaacctttggccctaaacaggctattcgtgatgttttcaaacggttcggggttccagaatacgaactgactaatctcactaaaaaaattggttttaaagatagcttggctactgtctatgaaaagtcaatctcttttaggcaggttattaatagtagaactgaatttcaaaaggcttttgccattgccaagcgtatcgaaggaaatccaagacaaacgtccattcacgcagctggtattgtgatgagtgatgatgccttgaccaatcatattcctctaaaatcgggcgatgacatgatgatcacccagtatgatgctcatgcggtcgaagctaatggcctgttaaaaatggattttttggggttaagaaatttgacctttgttcaaaaaatgcaagagaaggttgctaaagactacgggtgtcagattgatattacagccattgatttagaagacccgcaaacgttggcactttttgctaaaggggataccaagggaattttccaatttgaacaaaatggtgctattaatcttttaaaacggattaagccacaacgttttgaagaaattgttgccactaccagtctaaatagaccaggggcaagtgactataccactaatttcattaaacgaagagaaggacaagaaaaaattgatttgattgatcctgtgattgctcccattttagagccaacttacggtattatgctttatcaagaacaagttatgcagattgcacaggtttatgctggttttacgttaggcaaggccgacttgttaaggcgtgccatgtctaaaaaaaatctacaagaaatgcaaaaaatggaagaagactttattgcttctgctaagcacctagggagagctgaagaaacagctagaggactttttaaacggatggaaaaatttgcaggttatggttttaaccgcagccatgcctttgcctattcagctttagcttttcaattggcttatttcaaagcccattacccggctgttttttacgatatcatgatgaattattctagcagtgactatatcacagatgctctagaatcagattttcaagtagcgcaagttaccattaatagtattccttacactgataaaattgaagctagcaagatttacatggggctgaaaaatattaaggggttgccaagggattttgcttattggattatcgagcaaagaccatttaatagcgtagaggattttctcactagaactccagaaaaatatcaaaaaaaggttttccttgagcctctgataaaaataggtctgtttgattgctttgagcctaaccgtaaaaaaattctggacaatttggatggtttactggtatttgttaatgagcttggttctcttttttcagattcttcctttagttgggtagatacgaaagattactcagtaactgaaaaatattctttggaacaggagatcgttggagttggcatgagcaagcatcctttaattgatattgctgagaaaagtacccaaacttttactcctatttcacagttagtcaaagaaagcgaagcagtcgtactgattcaaatagatagcattaggatcattagaaccaaaacaagtgggcagcaaatggcttttttaagtgtgaatgacactaagaaaaagctcgatgtcacactttttccacaagagtatgccatttataaagaccaattaaaagaaggagaattctattacttaaaaggtagaataaaagaaagagaccatcgactgcagatggtgtgtcagcaagtgcaaatggctattagtcaaaaatattggttattagttgaaaaccatcagtttgattcccaaatttctgagattttaggtgcctttccaggaacgactccagttgttattcactatcaaaaaaataaggaaacaattgcattaactaagattcaggttcatgtaacagagaatttaaaggaaaaacttcgtccttttgttctgaaaacggtttttcga

SEQ ID NO: 4096 - protein, 1036 aa, Streptococcus pyogenes
MFAQLDTKTVYSFMDSLIDLNHYFERAKQFGYHTIGIMDKDNLYGAYHFIKGCQKNGLQPVLGLEIEILYQERQVLLNLIAQNTQGYHQLLKISTAKMSGKLHMDYFCQHLEGIAVIIPSKGWSDTLVVPFDYYIGVDQYTDLSHMDSKRQLIPLRTVRYFAQDDMETLHMLHAIRDNLSLAETPVVESDQELADCQQLTAFYQTHCPQALQNLEDLVSGIYYDFDTNLKLPHFNRDKSAKQELQDLTEAGLKEKGLWKEPYQSRLLHELVIISDMGFDDYFLIVWDLLRFGRSKGYYMGMGRGSAAGSLVAYALNITGIDPVQHDLLFERFLNKERYSMPDIDIDLPDIYRSEFLRYVRNRYGSDHSAQIVTFSTFGPKQAIRDVFKRFGVPEYELTNLTKKIGFKDSLATVYEKSISFRQVINSRTEFQKAFAIAKRIEGNPRQTSIHAAGIVMSDDALTNHIPLKSGDDMMITQYDAHAVEANGLLKMDFLGLRNLTFVQKMQEKVAKDYGCQIDITAIDLEDPQTLALFAKGDTKGIFQFEQNGAINLLKRIKPQRFEEIVATTSLNRPGASDYTTNFIKRREGQEKIDLIDPVIAPILEPTYGIMLYQEQVMQIAQVYAGFTLGKADLLRRAMSKKNLQEMQKMEEDFIASAKHLGRAEETARGLFKRMEKFAGYGFNRSHAFAYSALAFQLAYFKAHYPAVFYDIMMNYSSSDYITDALESDFQVAQVTINSIPYTDKIEASKIYMGLKNIKGLPRDFAYWIIEQRPFNSVEDFLTRTPEKYQKKVFLEPLIKIGLFDCFEPNRKKILDNLDGLLVFVNELGSLFSDSSFSWVDTKDYSVTEKYSLEQEIVGVGMSKHPLIDIAEKSTQTFTPISQLVKESEAVVLIQIDSIRIIRTKTSGQQMAFLSVNDTKKKLDVTLFPQEYAIYKDQLKEGEFYYLKGRIKERDHRLQMVCQQVQMAISQKYWLLVENHQFDSQISEILGAFPGTTPVVIHYQKNKETIALTKIQVHVTENLKEKLRPFVLKTVFR

SEQ ID NO: 4097 - DNA, 366 bp, Streptococcus agalactiae
atggcttgggaattcaatgaaaaatcacctatttattcacaaattgctgaacatataaagatgcaaattgttagtcaagaaataaaaagtggtgaccaattgcctaccgtgagagagttagctcaagaagctggtgttaacccaaataccatgcaacgtgccttcactgaattggaacgtgaaggaatggtattctcacaacgtacttccggacgctttgttacagaagacaacttactaattggtaaaattcgtcaacaagttgcaaaagcagagttagcaacttttgtcaacaacatgaaaaaaataggatataaattagatgaaattacggttgctctcgatcattttataaaggagattaat

SEQ ID NO: 4098 - protein, 122 aa, Streptococcus agalactiae
MAWEFNEKSPIYSQIAEHIKMQIVSQEIKSGDQLPTVRELAQEAGVNPNTMQRAFTELEREGMVFSQRTSGRFVTEDNLLIGKIRQQVAKAELATFVNNMKKIGYKLDEITVALDHFIKEIN

SEQ ID NO: 4099 - DNA, 369 bp, Streptococcus pyogenes
atgtcttggaaatttgaggaaaaatctcctatttatgcgcagatagcacaacatgtcatgatgcaaattattagccaagaaatcaagagtggtgatcaacttccaactgttcgtgaatatgcagaaatcgcaggtgttaatcctaacaccatgcaacgagcgtttacagaacttgaacgggaaggaatggtttattcgcaacgtactgctggccgttttgtaactgacgatcaaaaattaattgctcgtaaaagacgagagttagcaattagtgaattagaatcatttatcaccaatatgacaaaaatgggatttagtcacactgagattatccctgttttgacgagctttttaaaggaggattcacaa

SEQ ID NO: 4100 - protein, 123 aa, Streptococcus pyogenes
MSWKFEEKSPIYAQIAQHVMMQIISQEIKSGDQLPTVREYAEIAGVNPNTMQRAFTELEREGMVYSQRTAGRFVTDDQKLIARKRRELAISELESFITNMTKMGFSHTEIIPVLTSFLKEDSQ

SEQ ID NO: 4101 - DNA, 696 bp, Streptococcus agalactiae
atgacacagttattacaacttcatcatgttacaaagaaatatcacaaacatactgctgttaatgatgtgactgtaagtattccaacaggaaagattataggtttattaggtccaaatggtagcggaaaaacaacaatcatcaaaatgataaatggattacttcagccagataagggagatatcgttattgatggttacagaccgtctgttgaaaccaaaaaaattatttcatatctccctgatacttcatatttacaagaaaatatgaaaatcaaagacgtcgttacattatttgaagatttctataacgattttgattcaaaggtagcatatcaactatttgaggatcttaacctaaatcctagggaacgtctaaaaaacctatcaaaagggaacaaggaaaaagttcaattaatacttgttatgagtcgtaaagctaggctctacatccttgatgaacctattggtggtgtagaccctgcagcgcgtgactacattttaaaaacaatcattagcaactactctaatgatgcttctgttttaatttcgactcacttaatttctgacattgaacctatccttgatgaagttatcttccttaaagaaggagaaattgacctacaaggcaatgctgatgacttaagagaagagcacaactgttcgattgatgctctctttcgtgaaagattcaagaaa

SEQ ID NO: 4102 - protein, 232 aa, Streptococcus agalactiae
MTQLLQLHHVTKKYHKHTAVNDVTVSIPTGKIIGLLGPNGSGKTTIIKMINGLLQPDKGDIVIDGYRPSVETKKIISYLPDTSYLQENMKIKDVVTLFEDFYNDFDSKVAYQLFEDLNLNPRERLKNLSKGNKEKVQLILVMSRKARLYILDEPIGGVDPAARDYILKTIISNYSNDASVLISTHLISDIEPILDEVIFLKEGEIDLQGNADDLREEHNCSIDALFRERFKK

SEQ ID NO: 4103 - DNA, 696 bp, Streptococcus pyogenes
atggcacacctattgcaactacatcatgtttcaaaatcttaccgtgaaaaaaaagctattgatgacttaaccattactatcccgaacggtaaaattatcggattattaggtccaaatggaagtggtaaaacaactttaattaaactcattaatggccttttacaaccaaataaaggagaaattgtcattgatggctaccgtccctgtgttgagacaaaaaaaattatttcttatttaccagatactacttatcttaatgaaaatatgagaattaaggacatgttggagttctttagtgatttttacagcgactttgacaaatccaaagcaacaagccttctaagagatttagaactagaccctgaagaccgcttcaaaactctatccaaaggaaacaaagaaaaagtacaattaattcttgtgatgagtcgtaaagccagactctatgtacttgatgaacctattggtggagttgaccctgccgcaagagactacatcctaaaaaccatcattaatagttattgtgaaaatgcttctgttattatctcaacccacttgatttcggacattgaacctatccttgacgaagtcattttcttgaaacaaggaagacttttcttatctggcaatgctgatgatctaagacaagaataccagcaatccattgattccctctttagggaaacttataaggtt

SEQ ID NO: 4104 - protein, 232 aa, Streptococcus pyogenes
MAHLLQLHHVSKSYREKKAIDDLTITIPNGKIIGLLGPNGSGKTTLIKLINGLLQPNKGEIVIDGYRPCVETKKIISYLPDTTYLNENMRIKDMLEFFSDFYSDFDKSKATSLLRDLELDPEDRFKTLSKGNKEKVQLILVMSRKARLYVLDEPIGGVDPAARDYILKTIINSYCENASVIISTHLISDIEPILDEVIFLKQGRLFLSGNADDLRQEYQQSIDSLFRETYKV

SEQ ID NO: 4105 - DNA, 780 bp, Streptococcus agalactiae
atgtttggaaaattattaaaatatgaattaaaatcagttggtaagtggtatctaacactcaacgctgcggttttattagtatctattattttaggactggtattaaaggcacttggcggcaatttttctactgatactaatagtactagcgcccaaatattcactataatactcgttttattgttagcgatggttatttcaggatctctgttatccacccttgctattattatcaaacgtttttatagcaatatcttcggccgtcaaggatatctaaccttaacgctcccagtaactacgaatcagattatttgttcaaagctactagcttctcttctttggagtatttttaatatttttattgtcattattggaatcatattggtcatattacctttagtaggtattggtcagttcgttgtcgcttttccagaaatctataaaattatttcatcttcgaacgctccactttttatcgcctatttctttctatcgtacgttgcagggacattactgatttatctctctatcgctgtagggcaattatttacaaacaaacgtgtattgatgggaattgtttcttattttggaatatcactcttaattactttcttaacattaataatagatagtatttttcatattgatttattcaactctcatgcaaatgcaacattctctcaacctgtattgctctacaatatacttgttagcattgttgaaattgctatattctatatgttgacacactctattattaagtacaaacttaatatacaa

SEQ ID NO: 4106 - protein, 260 aa, Streptococcus agalactiae
MFGKLLKYELKSVGKWYLTLNAAVLLVSIILGLVLKALGGNFSTDTNSTSAQIFTIILVLLLAMVISGSLLSTLAIIIKRFYSNIFGRQGYLTLTLPVTTNQIICSKLLASLLWSIFNIFIVIIGIILVILPLVGIGQFVVAFPEIYKIISSSNAPLFIAYFFLSYVAGTLLIYLSIAVGQLFTNKRVLMGIVSYFGISLLITFLTLIIDSIFHIDLFNSHANATFSQPVLLYNILVSIVEIAIFYMLTHSIIKYKLNIQ

SEQ ID NO: 4107 - DNA, 783 bp, Streptococcus pyogenes
atgtttggaaaattattaaaatacgaatttagatctattggaaaatggtactttgcgcttaatgctttcgttattgccatcgctgccattttgtcatttacgataaaactgtttgctcaaagcaatagtgatggactatttggagtactaaccaataagatgttgcctctgacattaggtttaacttttggctccctgatcgctggttccctcttatcaacattacttatcattatcaaacgtttcagcaaaagtgtttttggatgggaaggatacttaacgttgactttacccgtcaattcgcatcaaattattttatcaaaactactagcttcttttatttgcagtgttttcaatactatcatccttgcatttgctatcgctattgtaattgtaccaatgtttaacatcaacgaactattagaaggattctttaatagttttaagatggattatttcatcaatatgctaactgtactagcctatgtcctattatcaacatttacgagtatcttattaatttatctttccatttctataggtcaacttttttccaatcggcgaggcttgatggcctttattgcatattttatattagttattctgattagcgttgctgcaacatatgttcacagtcacatctttaatattaatacaagtgccgatagtttcccatttactgagcaaaaaacaatttatcttcttattttggaacaatttattgaaatgataatgttttacctcgccactaattttattatcaaaaataaactcaacctacag

SEQ ID NO: 4108 - protein, 261 aa, Streptococcus pyogenes
MFGKLLKYEFRSIGKWYFALNAFVIAIAAILSFTIKLFAQSNSDGLFGVLTNKMLPLTLGLTFGSLIAGSLLSTLLIIIKRFSKSVFGWEGYLTLTLPVNSHQIILSKLLASFICSVFNTIILAFAIAIVIVPMFNINELLEGFFNSFKMDYFINMLTVLAYVLLSTFTSILLIYLSISIGQLFSNRRGLMAFIAYFILVILISVAATYVHSHIFNINTSADSFPFTEQKTIYLLILEQFIEMIMFYLATNFIIKNKLNLQ

SEQ ID NO: 4109 - DNA, 117 bp, Streptococcus agalactiae
atgaggtgtctatttttttacccgattttgaaaggaagtgaacttatgaaaacaaaaaatcaagaatcaaaaggtcgttccccactctttaagaccatcaaacattcattcagccaa

SEQ ID NO: 4110 - protein, 39 aa, Streptococcus agalactiae
MRCLFFYPILKGSELMKTKNQESKGRSPLFKTIKHSFSQ

SEQ ID NO: 4111 - DNA, 312 bp, Streptococcus agalactiae
atggaacttaaatttgtgattcccaacatggaaaaaacattcggcaatttagaatttgctggcgaggataaagtcgttcagcgaagaatcaacggacggctaactgtcttatcaagaagctataatctctattctgatgttcaaagagcagatgatattgtggtggtgcttcctgctgaagctggcgaaaaacatttcggctttgaggaacgtgtgaagttagtcaatccacgtattaccgcagagggctacaaaatcggcactcgtggttttacaaattaccttttacatgctgacgacatgataaaagaa

SEQ ID NO: 4112 - protein, 104 aa, Streptococcus agalactiae
MELKFVIPNMEKTFGNLEFAGEDKVVQRRINGRLTVLSRSYNLYSDVQRADDIVVVLPAEAGEKHFGFEERVKLVNPRITAEGYKIGTRGFTNYLLHADDMIKE

SEQ ID NO: 4113 - DNA, 384 bp, Streptococcus agalactiae
atgatgagattagcaaatggcattgtattagataaagacacgacttttggagaattgaaattctctgctctacgtcgtgaagtgagaatccaaaatgaagacgggtcggtttcagatgaaatcaaggaacgtacctatgacttaaaatccaaaggacaaggacgcatgattcaagtaagtattcctgccagcgtgcctttgaaagagtttgattataacgcacgggtggaacttatcaatcccattgcggacaccgttgctactgccacctatcaaggagcagatgttgactggtatatcaaggcagacgatattgtgctgacaaaggattctagttcattcaaagctcaaccacaagcaaagaaagaaccgacacaagacaaa

SEQ ID NO: 4114 - protein, 128 aa, Streptococcus agalactiae
MMRLANGIVLDKDTTFGELKFSALRREVRIQNEDGSVSDEIKERTYDLKSKGQGRMIQVSIPASVPLKEFDYNARVELINPIADTVATATYQGADVDWYIKADDIVLTKDSSSFKAQPQAKKEPTQDK

SEQ ID NO: 4115 - DNA, 1383 bp, Streptococcus agalactiae
atgaaacagcgtggtaaaaggattcgcccatctggtaaagatttagtctttcattttacgatagcgtcactcctgcctgttttcctgctggttgtcggactgtttcatgtgaagacaatccagcagatcaactggcaggattttaacctatcacaagcagataagattgacattccctatttaattatcagtttcagtgtcgcaattcttatctgcttgctggtagcgtttgtattcaaacgggttcgctatgatacggttaaacaactttaccaccgtcaaaaactggcaaagatgatacttgaaaacaagtggtatgaatctgaacaggtcaaaacagagggtttctttaaagatagtgctggtcgtacaaaggaaaagataacctacttccctaaaatgtattatcgacttaaaaatggcttgatacagatacgggtggaaatcacgctgggaaaatatcaagaccaactcttacacttggaaaagaaattagagagtggcttgtactgtgagctgacggataaagagttaaaggattcctatgtggaatatactttgctctatgacaccatagccagtcgtatttctattgatgaagtagaagctaaagatggtaaacttcgcttaatgaaaaacgtatggtgggaatatgataagctccctcatatgttgattgctggtggtacaggtggcggtaaaacttactttatactgacactgattgaagccttgcttcatacagattcaaaactgtatattcttgacccgaaaaatgctgatcttgcggacttaggttctgtgatggcaaatgtctactatagaaaagaagacttgctttcttgcattgaaacattctatgaagaaatgatgaaacgtagtgaggaaatgaagcagatgaagaactataagactggcaaaaattatgcttacttaggtctcccggcacacttcttaatctttgatgaatacgtcgctttcatggaaatgctgggaacaaaagaaaacaccgcagttatgaataagctgaaacagattgtcatgttaggtcgtcaagctggcttctttctaatactggcttgtcaacgtccagacgcaaaatatttaggcgacggaatccgtgatcagtttaatttcagagtggctttaggtcgtatgtctgaaatgggctatggcatgatgtttggcagtgacgtacaaaaggatttcttcttaaagcgaatcaaaggtcgtggctatgttgatgtaggaacaagtgtcatatcagagttttatactccccttgtaccaaaaggatatgatttcttggaggaaattaaaaagttatccaacagcagacagtccacgcaggcgacgtgcgaagcggaagtcgcaggtgtggac

SEQ ID NO: 4116 - protein, 461 aa, Streptococcus agalactiae
MKQRGKRIRPSGKDLVFHFTIASLLPVFLLVVGLFHVKTIQQINWQDFNLSQADKIDIPYLIISFSVAILICLLVAFVFKRVRYDTVKQLYHRQKLAKMILENKWYESEQVKTEGFFKDSAGRTKEKITYFPKMYYRLKNGLIQIRVEITLGKYQDQLLHLEKKLESGLYCELTDKELKDSYVEYTLLYDTIASRISIDEVEAKDGKLRLMKNVWWEYDKLPHMLIAGGTGGGKTYFILTLIEALLHTDSKLYILDPKNADLADLGSVMANVYYRKEDLLSCIETFYEEMMKRSEEMKQMKNYKTGKNYAYLGLPAHFLIFDEYVAFMEMLGTKENTAVMNKLKQIVMLGRQAGFFLILACQRPDAKYLGDGIRDQFNFRVALGRMSEMGYGMMFGSDVQKDFFLKRIKGRGYVDVGTSVISEFYTPLVPKGYDFLEEIKKLSNSRQSTQATCEAEVAGVD

SEQ ID NO: 4117 - DNA, 750 bp, Streptococcus pyogenes
ttggcgattcctgatttagataaattttcatctaacttacaacaggggaaaattcctgtcataaagcacttcgaactcaatttagataaggggagtcactgggctattgctggaaattcaggttctgggaaaccgtacgctctcacttacttcttgagtgtcctgaaacctaagtccggcctaattatcattgacccaaaattcgatacccctagccaatgggcaagagaaaataaaattgccgttatccacccagtagaaaaccattcaaaatctgatttcgtttcacaagtcaatgaacaattaaaccagtgtgcaactctcattcagaaacgacaagctatcttgtatgataatcccaatcatcaatttacccatctaactattgttattgatgaagtcctcgctctatcagagggagtcaataagaatatcaaagaagcttttttctccctactatcacaaattgccttgttgggacatgctactaaaatccatctattcttgggaagccagcgttttgaccataacactattcccatttcagtgagggaacagctaaacgtattattgcaaattggaaatatcaatcagaaaaccactcaattcttatttccagacctagatccagagggaattgtcattccaacaggacacggaacaggtatcattcaagttgtcgataatgaacactcctatcaagttctacccttactctgtccaacctactatactaagcgaggtatccta

SEQ ID NO: 4118 - protein, 250 aa, Streptococcus pyogenes
LAIPDLDKFSSNLQQGKIPVIKHFELNLDKGSHWAIAGNSGSGKPYALTYFLSVLKPKSGLIIIDPKFDTPSQWARENKIAVIHPVENHSKSDFVSQVNEQLNQCATLIQKRQAILYDNPNHQFTHLTIVIDEVLALSEGVNKNIKEAFFSLLSQIALLGHATKIHLFLGSQRFDHNTIPISVREQLNVLLQIGNINQKTTQFLFPDLDPEGIVIPTGHGTGIIQVVDNEHSYQVLPLLCPTYYTKRGIL

SEQ ID NO: 4119 - DNA, 183 bp, Streptococcus agalactiae
gtgcgaagcggaagtcgcaggtgtggactgatcttgctggctggtgtggcaatagccacgccagcacttaaccccccgtatctaacaggggggtacaaatcgacaggaaacagtcaaaaaaacattagaaaatcctttggttacaagggatttacaaaatttcagcgtatgtcaaatgggctt

SEQ ID NO: 4120 - protein, 61 aa, Streptococcus agalactiae
MRSGSRRCGLILLAGVAIATPALNPPYLTGGYKSTGNSQKNIRKSFGYKGFTKFQRMSNGL

SEQ ID NO: 4121 - DNA, 1203 bp, Streptococcus agalactiae
ttggagggatttttactgaatgaacaaacttggttacagcatttaaaagaaaaacgcttggcttatggactatctcaaaaccgtttagctgttgcgactggtattacaaggcagtatctaagcgatattgaaacaggaaaagtcaagccatcagaggatttacagcagtccctttgggaagctctggaacgcttcaatcccgacgctccccttgaaatgctgtttgattatgtaagaattcgctttccgacaacagacgtacagcaggtggtcgaaaacatcttacaactgaaactgtcctattttcttcatgaggactatggtttctattcttattcagagcattatgctttaggcgacatattcgtcctttgctcccatgaactggacaaaggagttctggtggaattgaaaggtcgtgggtgcagacaatttgaaagctatcttctggcacaacaaagaagctggtatgagttctttatggacgttttggtggctggcggtgtgatgaaacgccttgaccttgccattaacgataagacagggattttaaatatccctgtactcactgaaaagtgccaacaggaagaatgtatctccgtcttccgcagttttaaaagctatcgcagtggcgaactggtacgcaaagaggaaaaggaatgtatgggaaacaccctctatatcggttcattacaaagtgaagtttatttctgtatctatgaaaaggactacgagcagtacaagaaaaatgatattcccattgaagacgcagaagtaaaaaaccgttttgagattcgattgaaaaatgagcgtgcctattatgcagtccgtgatttactcgtctatgacaatccagagcataccgcctttaaaattatcaatcggtatatccgttttgtagataaagacgattccaaacctcgttctgattggaaactgaatgaagaatgggcttggtttattgggaacaatcgtgaacgattaaaactaaccacaaaaccagagccttactccttccaaaggacgctgaactggctatctcatcaagttgccccgaccttaaaggttgcgattaaacttgatgaaatcaaccagacgcaggttgtaaaagacattctcgaccatgcgaaactgacagaccgacacaagcagattttgaagcaacagtcagtaaaagaacaggacgtgataacaacaaaaaaa

SEQ ID NO: 4122 - protein, 401 aa, Streptococcus agalactiae
MEGFLLNEQTWLQHLKEKRLAYGLSQNRLAVATGITRQYLSDIETGKVKPSEDLQQSLWEALERFNPDAPLEMLFDYVRIRFPTTDVQQVVENILQLKLSYFLHEDYGFYSYSEHYALGDIFVLCSHELDKGVLVELKGRGCRQFESYLLAQQRSWYEFFMDVLVAGGVMKRLDLAINDKTGILNIPVLTEKCQQEECISVFRSFKSYRSGELVRKEEKECMGNTLYIGSLQSEVYFCIYEKDYEQYKKNDIPIEDAEVKNRFEIRLKNERAYYAVRDLLVYDNPEHTAFKIINRYIRFVDKDDSKPRSDWKLNEEWAWFIGNNRERLKLTTKPEPYSFQRTLNWLSHQVAPTLKVAIKLDEINQTQVVKDILDHAKLTDRHKQILKQQSVKEQDVITTKK

SEQ ID NO: 4123 - DNA, 162 bp, Streptococcus agalactiae
atgcgattgaatagctctagtaaaatgtcttttactccagcagcgttgaagactaagccaaccgcaataatcgcaataattaaaaagccaatcagtttgctaaactcacgcttgaagccaagatacaagccaatcacaacgattgctaaaagcaccagtgat

SEQ ID NO: 4124 - protein, 54 aa, Streptococcus agalactiae
MRLNSSSKMSFTPAALKTKPTAIIAIIKKPISLLNSRLKPRYKPITTIAKSTSD

SEQ ID NO: 4125 - DNA, 219 bp, Streptococcus agalactiae
atgaattttggacaaaacctttataactggtttctatcaaacgctcaatcactggtgcttttagcaatcgttgtgattggcttgtatcttggcttcaagcgtgagtttagcaaactgattggctttttaattattgcgattattgcggttggcttagtcttcaacgctgctggagtaaaagacattttactagagctattcaatcgcattattggtgct

SEQ ID NO: 4126 - protein, 73 aa, Streptococcus agalactiae
MNFGQNLYNWFLSNAQSLVLLAIVVIGLYLGFKREFSKLIGFLIIAIIAVGLVFNAAGVKDILLELFNRIIGA

SEQ ID NO: 4127 - DNA, 495 bp, Streptococcus agalactiae
atggacgatatgcaagtctatattgcgaatttaggcaaatacaatgagggcgaattggtcggtgcgtggtttacctttcccattgactttgaggaagtcaaagagaaaatcggcttgaatgatgaatatgaggaatacgccattcatgactacgagttaccctttacggttgacgaatacacttccattggcgaactcaatcgactatgggaaatggtatcggaattacccgaagaattacaatcggagctatctgctctgctcactcatttttcaagcattgaagaactaagcgaacatcaagaggatattatcattcattccgattgtgatgatatgtatgacgtggcacgctactacattgaagaaacgggtgctttaggcgaagtaccagctagtcttcaaaactatattgattatcaagcctatggtcgggatttagacctttcaggaacgtttatctcaaccaatcatgggatttttgaaatcgtctat

SEQ ID NO: 4128 - protein, 165 aa, Streptococcus agalactiae
MDDMQVYIANLGKYNEGELVGAWFTFPIDFEEVKEKIGLNDEYEEYAIHDYELPFTVDEYTSIGELNRLWEMVSELPEELQSELSALLTHFSSIEELSEHQEDIIIHSDCDDMYDVARYYIEETGALGEVPASLQNYIDYQAYGRDLDLSGTFISTNHGIFEIVY

SEQ ID NO: 4129 - DNA, 504 bp, Streptococcus agalactiae
atgggatttttgaaatcgtctattaaatctgtcggtacattactactggcagattttctattttacggggtggctcaatcagctacccctattttttatgaaaggattgattacatgaagaaaatacgaagctataccagtatctggtctgtggaaaaggtactgtattctatcaatgattttagacttccgtttcccataacctttacgcaaatgacatggtttgtcgtgtcactctttgcagtgatgatacttggcaacttgccccctctttccatgatagagggagcatttctcaaatactttgggattcctgtggctttcacatggtttatgtctacaaaaacttttgatggtaaaaagccttatggatttttgaagtctgtcattgcttatgcactgcgaccaaagctgacctatgcaggaaaaaaagtaacgcttggcagaaaccagccacaagaagccattacagcagttaggagtgaattttatggcatatccaat

SEQ ID NO: 4130 - protein, 168 aa, Streptococcus agalactiae
MGFLKSSIKSVGTLLLADFLFYGVAQSATPIFYERIDYMKKIRSYTSIWSVEKVLYSINDFRLPFPITFTQMTWFVVSLFAVMILGNLPPLSMIEGAFLKYFGIPVAFTWFMSTKTFDGKKPYGFLKSVIAYALRPKLTYAGKKVTLGRNQPQEAITAVRSEFYGISN

SEQ ID NO: 4131 - DNA, 933 bp, Streptococcus agalactiae
gtgaattttatggcatatccaattaaatacattgaaaacaatctcgtctggaataaagacggggaatgttatgcttactatgagcttgttccttacaattactcatttctaagtccagaacagaaaatacaagtgcatgattctttcagacagcttatcgcacaaaatcgtgatggcaaaattcatgctttacaaatcagtacagaatccagcatacgttctgcacaagagcgttccaaaaatgaagtcactggcaagctcaaagcggttgcctatgacaaaatcgaccaacagacagacgctttaatatccatgattggcgaaaatcaagtgaactaccgtttctttatcggctttaagttgcttctcaacgatcaggagttttctatgaaaagtcttaccgttgaagcaaaaaatgctttgtctgattttgtctatgatgtgaaccataagctgatgggcgattttgttagtatgagtaatgatgaaatcctgcgttttcagaagatggaaaagctcttagaaaataaaatctctcgtcgtttcaaaatccgcaggttagataaggacgacttcggctatctgattgaacacctttacggacagacaggcactgcctatgaagagtatgagtaccatctatcaaagaaaaagctggataatgaaacgctgattaaatactatgacttgattaagcctactcgctgtttggtggaagaaaaacagcgatatttgaaaatccagcaggaagatgaaaccgtctatgtagcttactttaccattaacagcattgtcggagaactggacttcccgtcctctgaaatcttctactaccagcaacagcaatttacattcccgattgatacgtcaatgaatgtggaaattgtagcgaatcgtaaagccctatctactgtccgcaaaaaaagaaagaac

SEQ ID NO: 4132 - protein, 311 aa, Streptococcus agalactiae
MNFMAYPIKYIENNLVWNKDGECYAYYELVPYNYSFLSPEQKIQVHDSFRQLIAQNRDGKIHALQISTESSIRSAQERSKNEVTGKLKAVAYDKIDQQTDALISMIGENQVNYRFFIGFKLLLNDQEFSMKSLTVEAKNALSDFVYDVNHKLMGDFVSMSNDEILRFQKMEKLLENKISRRFKIRRLDKDDFGYLIEHLYGQTGTAYEEYEYHLSKKKLDNETLIKYYDLIKPTRCLVEEKQRYLKIQQEDETVYVAYFTINSIVGELDFPSSEIFYYQQQQFTFPIDTSMNVEIVANRKALSTVRKKRKN

SEQ ID NO: 4133 - DNA, 1512 bp, Streptococcus agalactiae
ttggataaccacgcttggcaaagtgataatgaaaccagctccaatgtggcggaagctctggaaagtgtgaatgagctggaaaccaatttagaccaaagcaaggaatctatgtacaagctgtcttatgtggtaagggtatcagcaaatgatcttgacgaactcaaacgtcgttgtaatgaagtgaaagatttttatgacgatttaagcgtaaaactggtacgaccatttggggatatgctcggcttacatgaagaatttttacctgccagcaagcgttatatgaatgattatattcaatacgtgacctctgatttcctcgctggtttaggttttggtgctactcaaatgctgggggaaaatgaggggatttatgttggctacagcttagatactggacgcaatgtctatctgaaacctgctcttgccagtcaaggggttaagggttcagtaaccaatgcgttagcgtcggcttttgttggttcgctgggtggtggtaaatcctttgcgaataaccttatcgtctattatgcggtgctttatggggcacaagcagtgattgtagacccaaaagcagaacgtggcagatggaaagaaaccttgccagagatttcccatgaaatcaatatcgtcactctgacttctgatgagaaaaacaaaggcttacttgacccttatgtgattatgaaaaatcccaaagattctgaatcactggctattgatattctgacattccttacggggatttcctctcgtgatggggaacgcttcccaatccttagaaaagccattcgtgcagtaaccaatagtgaagtacgagggttgatgaaagtgattgaggaattacgggttgagaatacgccactaagtaccagtatagccgaccatatcgaaagttttacagactatgactttgcacatttattattcagtaatggttatgtggagcagtctatcagcttagaaaaacaactgaacattatacaggttgcggacttggtacttcccgacaaggaaacttcctttgaggaatataccactatggagcttttatccgttgctatgctgattgtcattagtacctttgctttagactttatccatacagaccgaagcattttcaagattgtagatttagacgaagcatggagctttttacaggtagcacaaggaaaaacactatctatgaagctggttcgggctggtcgtgctatgaacgctggggtatatttcgtgacccaaaatacagacgacctcttagatgaaaaactgaaaaataacctcggcttaaaatttgcatttcgttccactgaccttaacgagattaaaaagaccttagccttttttggtgtagacccagaggacgaaaacaatcagaagcgattgcgtgatttggaaaacgggcaatgccttatcagtgatttatatggtcgtgtcggtgtgatacagttccaccctgtatttgaagaactgctccatgcctttgataccagaccacctgtgcgaaaagaggtg

SEQ ID NO: 4134 - protein, 504 aa, Streptococcus agalactiae
MDNHAWQSDNETSSNVAEALESVNELETNLDQSKESMYKLSYVVRVSANDLDELKRRCNEVKDFYDDLSVKLVRPFGDMLGLHEEFLPASKRYMNDYIQYVTSDFLAGLGFGATQMLGENEGIYVGYSLDTGRNVYLKPALASQGVKGSVTNALASAFVGSLGGGKSFANNLIVYYAVLYGAQAVIVDPKAERGRWKETLPEISHEINIVTLTSDEKNKGLLDPYVIMKNPKDSESLAIDILTFLTGISSRDGERFPILRKAIRAVTNSEVRGLMKVIEELRVENTPLSTSIADHIESFTDYDFAHLLFSNGYVEQSISLEKQLNIIQVADLVLPDKETSFEEYTTMELLSVAMLIVISTFALDFIHTDRSIFKIVDLDEAWSFLQVAQGKTLSMKLVRAGRAMNAGVYFVTQNTDDLLDEKLKNNLGLKFAFRSTDLNEIKKTLAFFGVDPEDENNQKRLRDLENGQCLISDLYGRVGVIQFHPVFEELLHAFDTRPPVRKEV

SEQ ID NO: 4135 - DNA, 2175 bp, Streptococcus agalactiae
gtgaaaccatcaatagtaaacagaataaaatcaaactggacgctgaaacgtctaggtaaagtggcaatgacagtggctttcacacttgtgattgccatttttcttttagccatgctgggaacggtggttcaagctgcgggcttggtagatgatacggtcaatgtggcaaatgaatacagccgatacccacttgaaaactatcaactggatttttatgtggataatagctggggctggcttccgtggaactggtcggacgggattggaaaacaggtcatgtatggactatatgccattaccaattttatttggacaatcagtttgtatgtttccaatgcgacaggttacttagtacaggaagcctattccttagacttcatttccgctacagcagattccattggtaagaatatgcagaccttagctggtgtgagtgcaaacggattttcaacagagggtttctatgttggattcctcttactcttgattttggttcttggggtttatgttgcctatacgggactgataaagagagaaaccacaaaggcaattcatgccattatgaattttgtgctggtgtttatcctatcggcttcctttattgcctacgctcccgactacattaaaaaaatcaatgacttttcatcagacatcagtaatgccagtttatcacttggcacgaagattgtcatgccccattccgatagtcaaggcaaggacagcgtggacttaatcagagatagcctgttttccatacaggttcagcaaccgtggctactgcttcaatacaacagttcagacattgaaagtatcggtattgaccgtgtggaaagcctgctctccaccagcccagattccaacaatggcgaagacagagaaaaaattgttgcggaagaaattgaagacagaagcaataccaatctaaccattacaaagaccattaaccgtttaggtacagtcttcttcctatttgtcttcaatattgggatttccatatttgtattcctattaacaggaatcatgattttctcgcaggtactttttatcatctatgctatgtttctgcctgtgagctttattttaagcatgattccatcatttgatggtatgtcaaaacgagccataacaaagctctttaataccattttgacacgagctggaatcacattgattattacgacagcatttagtatttcaaccatgctctataccttatcggctggttatccgttctttttgattgcttttctacagattgtgacctttgcaggaatctacttcaagctgggcgatttaatgagtatgttttctctacagagtaacgattctcaaagtgtgggaagtcgtgtgatgagaaaacctcgtatgcttatgcacgctcacatgcaccgtctacagcggaaacttggacgttccatgactactctaggggctgggtctgccattgttacaggtaaaaaaggacagtcgggttcggggagttctgcaaggacacaagcagatcactcccgaccagacggaaaggaaaaatcaacacttggaaaacgtatcggtcaaaccatcggtacagtagctgataccaaagacagaatggtagacactgctagtggtttgaaagaacaggttaaagatttgccgaccaatgcaagatatgcagtatatcaaggaaaatccaaagtaaaagagaatgtccgtgatttaaccagtagtatttctcaaaccaaagcggacagagccagtggacgcaaggaacagcaggaacaaaggcgaaaaaccattgcgaagcgtcgctctgaaatggaacaggtcaaacagaaaaaacagcctgcttcttctgttcatgaaagaccgactacaagacaagaacaatatcatgatgaacagacctcaaaacagtctaatattcagacttcatataaggaatctcaacaagccaaacaagagcgtccagcagttaagtccgatttttcaagtccaaaagtggaacgccaaggcaataccgttcaagaaaaaaccgttcaaaagccagcaacttcaaccactacagcagatagaacttcacaacgtccaatcacaaaagaacgtccgtctactgttcaaagagtaccactacaaaatacaagaagtagaccaccaatcaaaaccgccaccattaagaaagtcggtaagaaacca

SEQ ID NO: 4136 - protein, 725 aa, Streptococcus agalactiae
MKPSIVNRIKSNWTLKRLGKVAMTVAFTLVIAIFLLAMLGTVVQAAGLVDDTVNVANEYSRYPLENYQLDFYVDNSWGWLPWNWSDGIGKQVMYGLYAITNFIWTISLYVSNATGYLVQEAYSLDFISATADSIGKNMQTLAGVSANGFSTEGFYVGFLLLLILVLGVYVAYTGLIKRETTKAIHAIMNFVLVFILSASFIAYAPDYIKKINDFSSDISNASLSLGTKIVMPHSDSQGKDSVDLIRDSLFSIQVQQPWLLLQYNSSDIESIGIDRVESLLSTSPDSNNGEDREKIVAEEIEDRSNTNLTITKTINRLGTVFFLFVFNIGISIFVFLLTGIMIFSQVLFIIYAMFLPVSFILSMIPSFDGMSKRAITKLFNTILTRAGITLIITTAFSISTMLYTLSAGYPFFLIAFLQIVTFAGIYFKLGDLMSMFSLQSNDSQSVGSRVMRKPRMLMHAHMHRLQRKLGRSMTTLGAGSAIVTGKKGQSGSGSSARTQADHSRPDGKEKSTLGKRIGQTIGTVADTKDRMVDTASGLKEQVKDLPTNARYAVYQGKSKVKENVRDLTSSISQTKADRASGRKEQQEQRRKTIAKRRSEMEQVKQKKQPASSVHERPTTRQEQYHDEQTSKQSNIQTSYKESQQAKQERPAVKSDFSSPKVERQGNTVQEKTVQKPATSTTTADRTSQRPITKERPSTVQRVPLQNTRSRPPIKTATIKKVGKKP

SEQ ID NO: 4137 - DNA, 132 bp, Streptococcus agalactiae
ttggaaattccgctgtcctgttcatctgaaaataaaatggcaacaaacagaagcagtgagaagaccatcaagaataatccagaaccaccaatcactaaagttttcaacttcatggtttcttaccgactttct

SEQ ID NO: 4138 - protein, 44 aa, Streptococcus agalactiae
MEIPLSCSSENKMATNRSSEKTIKNNPEPPITKVFNFMVSYRLS

SEQ ID NO: 4139 - DNA, 96 bp, Streptococcus agalactiae
atgtggctaatcgtggaaataaatatacctttgaactggctcaaagtttctcaaaagagtattcaggtggcgaaaaagtgtcttaccccaatccca

SEQ ID NO: 4140 - protein, 32 aa, Streptococcus agalactiae
MWLIVEINIPLNWLKVSQKSIQVAKKCLTPIP

SEQ ID NO: 4141 - DNA, 870 bp, Streptococcus agalactiae
gtgaatgtttccgcagaagtgctggctcataagcctatggtagaaaaatatgccaaagaatatggcgttgaagaatatgtcaacatacttcttgcgattatacaggtggaatcgggcggtactgcggaagatgttatgcagtcctcggaatccctcggtcttccacctaattcattgagtacagaagaatccattaagcaaggtgtgaagtatttcagtgaattattagccagtagcgaaaggctcagtgtagatttagaatcggttatccagtcctacaattatggtggtggtttcttagggtatgtggctaatcgtggaaataaatatacctttgaactggctcaaagtttctcaaaagagtattcaggtggcgaaaaagtgtcttaccccaatcccatagccatacctatcaatgggggctggcgatacaactatggcaatatgttttatgtgcaactggtaacgcagtatcttgtcacaacagagtttgatgatgatacggtacaagccatcatggacgaagcactgaaatatgagggctggcgatacgtttacggtggagcttccccgactacttcttttgattgtagcggactgacacaatggacgtatggaaaagctggaattaacttaccacgaaccgcacaacagcaatatgatgtgacccagcatatcccactatcggaagcacaagctggcgatttggttttctttcattctacctataacgctggctcttatattactcatgttgggatataccttggcaataaccgtatgtttcatgcaggcgacccaatcggttatgccgacttaacaagcccctactggcaacagcatttagtgggagcaggacgaatcaaacaa

SEQ ID NO: 4142 - protein, 290 aa, Streptococcus agalactiae
MNVSAEVLAHKPMVEKYAKEYGVEEYVNILLAIIQVESGGTAEDVMQSSESLGLPPNSLSTEESIKQGVKYFSELLASSERLSVDLESVIQSYNYGGGFLGYVANRGNKYTFELAQSFSKEYSGGEKVSYPNPIAIPINGGWRYNYGNMFYVQLVTQYLVTTEFDDDTVQAIMDEALKYEGWRYVYGGASPTTSFDCSGLTQWTYGKAGINLPRTAQQQYDVTQHIPLSEAQAGDLVFFHSTYNAGSYITHVGIYLGNNRMFHAGDPIGYADLTSPYWQQHLVGAGRIKQ

SEQ ID NO: 4143 - DNA, 597 bp, Streptococcus pyogenes
atgtttagacttttaaagcgtgcctgcagttttcttcttctttttgtcatttatcaatcctttgttattcatcacaatgttcaacgtgttttggcatataagcctatggttgagaaaacattagcagaaaatgatacaaaggcaaatgtagacttagtcttagctatgatatacaccgagacaaaaggaggagaagcagatgtcatgcaatccagtgaaagcagttcaggacaaaaaaactcgattacagatagtcaggccagtattgagcacggggtgaatttactgtctcataatcttgctctagctgaggaagcaggagtagattcttggacggctgttcaggcctataattttggaacagcttatattgattatattgctgaacatggaggtcaaaataccgttgatttagcgactacctattccaaaaccgttgtggcgccaagcctaggcaacactagtggtcaaacctatttttattaccaccccctcgccttgatttctggaggtaagctttataagaatggcggcaatatctattactcacgagaagttcatttcaatctttatttaattgaactgatgagccttttt

SEQ ID NO: 4144 - protein, 199 aa, Streptococcus pyogenes
MFRLLKRACSFLLLFVIYQSFVIHHNVQRVLAYKPMVEKTLAENDTKANVDLVLAMIYTETKGGEADVMQSSESSSGQKNSITDSQASIEHGVNLLSHNLALAEEAGVDSWTAVQAYNFGTAYIDYIAEHGGQNTVDLATTYSKTVVAPSLGNTSGQTYFYYHPLALISGGKLYKNGGNIYYSREVHFNLYLIELMSLF

SEQ ID NO: 4145 - DNA, 930 bp, Streptococcus agalactiae
atgagaaaggaagatttaatgatgaaatttagaaaaaatcagaataaagaaaaacagataccaaaggaaaagaaacctcgtgtctataaggtcaatcctcataaaaaggttgtgattgccttgtgggtacttttagggcttagtttcagctttgcgatattcaagcactttacagctatagatactcatactattcacgaaacaactatcatagaaaaggaatacgttgatactcatcatgtagaaaattttgtagagaactttgcgaaagtctactattcatgggagcaatccgataagtccattgataatcgaatggaaagtctaaaaggctatctgacagatgaacttcaagctctcaatgttgatacagtacgcaaagatattcctgtatcgtcttctgtaagaggatttcagatatggacggtagagccaactggcgacaatgagtttaatgtaacctacagtgtagaccagctcattacagagggagaaaatacaaagaccgtccactctgcttatatagtgagtgtctatgtagatggttctggaaatatggtactggttaagaatccgaccattaccaacatacctaagaaatcaagttataaaccaaaagccattgaaagtgaggggacggttgattccattacaaccaatgaaatcaatgagtttttaacgacgttcttcaagctctatcctacagcgacagccagtgaactttcctactatgtgaatgacgggatattaaaaccaatcggaaaagagtacatctttcaagaactggtaaatcctattcacaatcgtaaggataatcaagtcacggtatcgctgacagtggagtatatcgaccagcagaccaaagcaacgcaggtatctcaatttgatttggtacttgaaaagaacgggagtaattggaagattgtaaaa

SEQ ID NO: 4146 - protein, 310 aa, Streptococcus agalactiae
MRKEDLMMKFRKNQNKEKQIPKEKKPRVYKVNPHKKVVIALWVLLGLSFSFAIFKHFTAIDTHTIHETTIIEKEYVDTHHVENFVENFAKVYYSWEQSDKSIDNRMESLKGYLTDELQALNVDTVRKDIPVSSSVRGFQIWTVEPTGDNEFNVTYSVDQLITEGENTKTVHSAYIVSVYVDGSGNMVLVKNPTITNIPKKSSYKPKAIESEGTVDSITTNEINEFLTTFFKLYPTATASELSYYVNDGILKPIGKEYIFQELVNPIHNRKDNQVTVSLTVEYIDQQTKATQVSQFDLVLEKNGSNWKIVK

SEQ ID NO: 4147 - DNA, 1932 bp, Streptococcus agalactiae
atggaggaaaatcacatgaaaattattaatattggagttttagctcatgttgatgcaggaaaaactaccttaacagaaagcttattatataacagtggagcgattacagaattaggaagcgtggacaaaggtacaacgaggacggataatacgcttttagaacgtcagagaggaattacaattcagacaggaataacctcttttcagtgggaaaatacgaaggtgaacatcatagacacgccaggacatatggatttcttagcagaagtatatcgttcattatcagttttagatggggcaattctactgatttctgcaaaagatggcgtacaagcacaaactcgtatattatttcatgcacttaggaaaatggggattcccacaatcttttttatcaataagattgaccaaaatggaattgatttatcaacggtttatcaggatattaaagagaaactttctgccgaaattgtaatcaaacagaaggtagaactgtatcctaatatgtgtgtgacgaactttaccgaatctgaacaatgggatacggtaatagagggaaacgatgaccttttagagaaatatatgtccggtaaatcattagaagcattggaactcgaacaagaggaaagcataagatttcataattgttccctgttccctgtttatcacggaagtgcaaaaaacaatatagggattgataaccttatagaagtgattacgaataaattttattcatcaacacatcgaggtccgtctgaactttgcggaaatgttttcaaaattgaatatacaaaaaaaagacaacgtcttgcatatatacgcctttatagtggagtactacatttacgagattcggttagagtatcagaaaaagaaaaaataaaagttacagaaatgtatacttcaataaatggtgaattatgtaagattgatagagcttattctggagaaattgttattttgcaaaatgagtttttgaagttaaatagtgttcttggagatacaaaactattgccacagagaaaaaagattgaaaatccgcaccctctactacaaacaactgttgaaccgagtaaacctgaacagagagaaatgttgcttgatgcccttttggaaatctcagatagtgatccgcttctacgatattacgtggattctacgacacatgaaattatactttctttcttagggaaagtacaaatggaagtgattagtgcactgttgcaagaaaagtatcatgtggagatagaactaaaagagcctacagtcatttatatggagagaccgttaaaaaatgcagaatataccattcacatcgaagtgccgccaaatcctttctgggcttccattggtttatctgtatcaccgcttccgttgggaagtggaatgcagtatgagagctcggtttctcttggatacttaaatcaatcatttcaaaatgcagttatggaagggatacgctatggttgcgaacaaggattatatggttggaatgtgacggattgtaaaatctgttttaagtatggcttatactatagccctgttagtaccccagcagattttcggatgcttgctcctattgtattggaacaagtcttaaaaaaagctggaacagaattgttagagccatatcttagttttaaaatttatgcgccacaggaatatctttcacgagcatacaacgatgctcctaaatattgtgcgaacatcgtagacactcaattgaaaaataatgaggtcattcttagtggagaaatccctgctcggtgtattcaagaatatcgtagtgatttaactttctttacaaatggacgtagtgtttgtttaacagagttaaaagggtaccatgttactaccggtgaacctgtttgccagccccgtcgtccaaatagtcggatagataaagtacgatatatgttcaataaaataact

SEQ ID NO: 4148 - protein, 644 aa, Streptococcus agalactiae
MEENHMKIINIGVLAHVDAGKTTLTESLLYNSGAITELGSVDKGTTRTDNTLLERQRGITIQTGITSFQWENTKVNIIDTPGHMDFLAEVYRSLSVLDGAILLISAKDGVQAQTRILFHALRKMGIPTIFFINKIDQNGIDLSTVYQDIKEKLSAEIVIKQKVELYPNMCVTNFTESEQWDTVIEGNDDLLEKYMSGKSLEALELEQEESIRFHNCSLFPVYHGSAKNNIGIDNLIEVITNKFYSSTHRGPSELCGNVFKIEYTKKRQRLAYIRLYSGVLHLRDSVRVSEKEKIKVTEMYTSINGELCKIDRAYSGEIVILQNEFLKLNSVLGDTKLLPQRKKIENPHPLLQTTVEPSKPEQREMLLDALLEISDSDPLLRYYVDSTTHEIILSFLGKVQMEVISALLQEKYHVEIELKEPTVIYMERPLKNAEYTIHIEVPPNPFWASIGLSVSPLPLGSGMQYESSVSLGYLNQSFQNAVMEGIRYGCEQGLYGWNVTDCKICFKYGLYYSPVSTPADFRMLAPIVLEQVLKKAGTELLEPYLSFKIYAPQEYLSRAYNDAPKYCANIVDTQLKNNEVILSGEIPARCIQEYRSDLTFFTNGRSVCLTELKGYHVTTGEPVCQPRRPNSRIDKVRYMFNKIT

SEQ ID NO: 4149 - DNA, 2076 bp, Streptococcus pyogenes
atggctcgcgaattttcacttgcaaaaactcgtaatatcggtatcatggctcacgtcgatgctggtaaaacaactacaacagagcgtatcctttactacactggtaaaattcataaaatcggtgaaacgcacgaaggcgcatcacaaatggactggatggagcaagagcaagaacgtggtatcactattacttctgccgctacaacagctcaatgggatggtcaccgcgttaacatcatcgacacaccaggacacgtggacttcaccatcgaagtacaacgttctctccgtgttcttgatggtgctgtaaccgttcttgactcacaatcgggtgttgagcctcaaactgaaacagtttggcgtcaagcaactgaatacggtgttccacgtatcgttttcgccaacaaaatggataaaatcggtgctgacttcctttactcagtacaaacccttcatgaccgtcttcaagcaaatgcacacccaatccaattgccaatcggtgcagaagatgatttccgtggtatcattgacttgatcaagatgaaagcagaaatctataccaacgaccttggtacagatattcttgaagaagatattccagaagaatacttagaacaagctcaagaataccgtgaaaaattaatcgaagcagttgctgaaactgatgaagacttgatgatgaaataccttgaaggtgaagaaatcactaacgacgaattgattgctggtatccgtaaagcaacaatcaacgttgaattcttcccagtactttgtggttctgccttcaaaaacaaaggtgttcaattgatgcttgatgcggttatcgcataccttccaagcccacttgacatccctgcaatcaaaggtgttaacccggatacagatgctgaagaagaacgtccagcatctgatgaagagccatttgcagctcttgccttcaagatcatgactgacccattcgtaggtcgtttgacattcttccgtgtttactcaggtgttcttaatagcggttcttacgttatgaacacatcaaaaggtaaacgtgagcgtatcggacgtatccttcaaatgcacgcaaacagccgtcaagaaattgaaacagtttacgctggtgacatcgctgccgctgttggtttgaaagacacaacaactggtgactcattgactgatgaaaaagcaaaagttattcttgagtcaatcgaagttccagaaccagttatccagttgatggttgagccaaaatctaaagcagaccaagacaagatgggtgttgcccttcaaaaacttgctgaagaagatccaacattccgtgttgaaacaaacgttgaaactggtgaaacagttatcgctggtatgggtgaacttcaccttgatgtccttgttgaccgtatgaaacgtgagttcaaagttgaagctaacgttggtgctcctcaagtatcttaccgtgaaacattccgtgcttctacacaagctcgtggattcttcaaacgccaatctggtggtaaaggtcaattcggtgatgtttggattgaatttacaccaaatgaagaaggtaaaggtttcgaattcgaaaatgctatcgttggtggtgtggttcctcgtgaatttatcccagctgttgaaaaagggttgatcgaatctatggcaaacggtgttcttgctggttacccaatggttgacgttaaagctaaactttacgatggttcataccacgatgtcgactcatctgaaactgccttcaagatcgcagcatctcttgctcttaaagaagcagctaaatcagcacaaccagctatccttgagccgatgatgcttgtaacgattacagctccagaagacaatcttggagacgttatgggacacgtgacagctcgtcgtggacgcgttgatggtatggaagcacatggtaacagccaaatcgttcgtgcttatgttccacttgctgaaatgttcggttatgcaacagttcttcgttctgctactcaaggacgtggtacattcatgatggtatttgaccactatgaagatgttcctaagtcagttcaagaagaaatcattaagaaaaacaaaggtgaa

SEQ ID NO: 4150 - protein, 692 aa, Streptococcus pyogenes
MAREFSLAKTRNIGIMAHVDAGKTTTTERILYYTGKIHKIGETHEGASQMDWMEQEQERGITITSAATTAQWDGHRVNIIDTPGHVDFTIEVQRSLRVLDGAVTVLDSQSGVEPQTETVWRQATEYGVPRIVFANKMDKIGADFLYSVQTLHDRLQANAHPIQLPIGAEDDFRGIIDLIKMKAEIYTNDLGTDILEEDIPEEYLEQAQEYREKLIEAVAETDEDLMMKYLEGEEITNDELIAGIRKATINVEFFPVLCGSAFKNKGVQLMLDAVIAYLPSPLDIPAIKGVNPDTDAEEERPASDEEPFAALAFKIMTDPFVGRLTFFRVYSGVLNSGSYVMNTSKGKRERIGRILQMHANSRQEIETVYAGDIAAAVGLKDTTTGDSLTDEKAKVILESIEVPEPVIQLMVEPKSKADQDKMGVALQKLAEEDPTFRVETNVETGETVIAGMGELHLDVLVDRMKREFKVEANVGAPQVSYRETFRASTQARGFFKRQSGGKGQFGDVWIEFTPNEEGKGFEFENAIVGGVVPREFIPAVEKGLIESMANGVLAGYPMVDVKAKLYDGSYHDVDSSETAFKIAASLALKEAAKSAQPAILEPMMLVTITAPEDNLGDVMGHVTARRGRVDGMEAHGNSQIVRAYVPLAEMFGYATVLRSATQGRGTFMMVFDHYEDVPKSVQEEIIKKNKGE

SEQ ID NO: 4151 - DNA, 351 bp, Streptococcus agalactiae
atgcgtaaaaaagaagataaatatgattttagagcctttggtttagccattaaagaagctcgattgaaacgaggtttaactcgtgaacaagtgggagcattgattgaaattgacccacggtacttaactaatattgaaaataaagggcaacaccccagcatacaagttctttatgaccttgtatcgttacttcatgtttccgttgatgaatttttcttacctgctaataacttggtaaaaagcacccgacgattacagatagagaaatacatggatagctttacagacaaagaactatccttaatggaatctttagccagcggtatcaacgaagcaagaaacatcgaagac

SEQ ID NO: 4152 - protein, 117 aa, Streptococcus agalactiae
MRKKEDKYDFRAFGLAIKEARLKRGLTREQVGALIEIDPRYLTNIENKGQHPSIQVLYDLVSLLHVSVDEFFLPANNLVKSTRRLQIEKYMDSFTDKELSLMESLASGINEARNIED

SEQ ID NO: 4153 - DNA, 186 bp, Streptococcus agalactiae
atgcttttttggctattcagaacttttttacaaagtttatttatcagtaatgcaacaaatccccctttcacattgggactaagagtgaaaggagataaacgagcaaggctcacttcctttcctagacagaaagggggtgagaaacatgaaaccatcttcttttcagaccacaatagaaaatcagtt

SEQ ID NO: 4154 - protein, 62 aa, Streptococcus agalactiae
MLFWLFRTFLQSLFISNATNPPFTLGLRVKGDKRARLTSFPRQKGGEKHETIFFSDHNRKSV

SEQ ID NO: 4155 - DNA, 126 bp, Streptococcus agalactiae
atggcggttagttccgttggctcttttcttatcgaaacgtattcgattacttttattcagttttcaaagaacaatggctcgttagcctatcaaaacacattgaaagctcaatatgctttggtggaa

SEQ ID NO: 4156 - protein, 42 aa, Streptococcus agalactiae
MAVSSVGSFLIETYSITFIQFSKNNGSLAYQNTLKAQYALVE

SEQ ID NO: 4157 - DNA, 201 bp, Streptococcus agalactiae
atgaagcagactgacattcctatttgggaacgttataccctaaccattgaagaagcgtcaaaatattttcgtattggcgaaaacaagctacgacgcttggcagaggaaaataaaaatgcaaattggctgattatgaatggcaatcgtattcagattaaacgaaaacaatttgaaaaaattatagatacattggacgcaatc

SEQ ID NO: 4158 - protein, 67 aa, Streptococcus agalactiae
MKQTDIPIWERYTLTIEEASKYFRIGENKLRRLAEENKNANWLIMNGNRIQIKRKQFEKIIDTLDAI

SEQ ID NO: 4159 - DNA, 1215 bp, Streptococcus agalactiae
atgtcagaaaaaagacgtgacaataaaggtcgaatcttaaagactggagagagccaacgaaaagacggaagatacttatacaaatatatagattcatttggagaaccgcaatttgtttactcgtggaaacttgtggctacagaccgagtaccagcaggaaagcgtgattgtatctcacttagagagaaaatcgcagagttacagaaagacattcatgatggtattgatgttgtaggaaagaaaatgacactctgccagctttacgcaaaacagaacgctcaaagaccaaaggttagaaaaaacactgaaactggacgcaaatatcttatggatattttgaagaaagacaagttaggtgtaagaagtattgacagtattaagccatcagacgctaaagaatgggctattagaatgagtgaaaatggttatgcttatcaaaccatcaataactacaaacgttctttaaaggcttcattctatattgctatacaagatgattgtgttcggaagaatccatttgactttcaactgaaagcagttcttgatgatgatactgtccctaagaccgtactaacagaagaacaggaagaaaaactgttagcctttgcaaaagctgataaaacctacagcaaaaattatgatgaaattctgatactcttaaaaacaggtcttcgtatttcagagtttggtggtttgacacttccagatttagattttgagaatcgtcttgtcaatatagaccatcagctattgagagatactgaaattgggtactacattgaaacaccaaagaccaaaagtggcgaacgtcaagttcctatggttgaagaagcctatcaagcatttaagcgagtgttagcgaatcgaaagaatgataagcgtgttgagattgatggatatagtgatttcctctttcttaatagaaagaactatccaaaagtggcaagtgattacaacggcatgatgaaaggtcttgttaagaaatacaataagtataacgaggataaattgccacacatcactccacatagtttgcgacatacattctgtaccaactatgcaaatgcaggaatgaatccaaaggcattacagtacattatgggacatgctaatatagccatgacgctgaactattacgcacatgcaacattcgattctgcaatggcagaaatgaaacgcttgaataaagagaagcaacaggagcgtcttgttgct

SEQ ID NO: 4160 - protein, 405 aa, Streptococcus agalactiae
MSEKRRDNKGRILKTGESQRKDGRYLYKYIDSFGEPQFVYSWKLVATDRVPAGKRDCISLREKIAELQKDIHDGIDVVGKKMTLCQLYAKQNAQRPKVRKNTETGRKYLMDILKKDKLGVRSIDSIKPSDAKEWAIRMSENGYAYQTINNYKRSLKASFYIAIQDDCVRKNPFDFQLKAVLDDDTVPKTVLTEEQEEKLLAFAKADKTYSKNYDEILILLKTGLRISEFGGLTLPDLDFENRLVNIDHQLLRDTEIGYYIETPKTKSGERQVPMVEEAYQAFKRVLANRKNDKRVEIDGYSDFLFLNRKNYPKVASDYNGMMKGLVKKYNKYNEDKLPHITPHSLRHTFCTNYANAGMNPKALQYIMGHANIAMTLNYYAHATFDSAMAEMKRLNKEKQQERLVA

SEQ ID NO: 4161 - DNA, 609 bp, Streptococcus agalactiae
atgaatatgaaattatcaaaacgttaccgcttttggcagaaggttattaaggctttgggtgtcttagcgttaatagcgactcttgtcttagttgtttatttgtacaaacttggtattttgaatgatagcaatgaattaaaagacctagtacacaagtatgaattttggggtccaatgatttttattgtggctcaaattgtacagattgtttttccagtaattcctggaggtgttacaacagtagcaggtttcttaatttttggtcctaccttaggctttatttataactatattgggattatcatcggaagtgtcatccttttttggttagtcaaattttatggacgaaaattcgttttgctatttatggatcagaagacatttgataaatatgagtctaagctagaaacatccggatatgaaaagttttttatcttttgtatggcatctcccatttcaccagcggacatcatggtgatgattaccggtctatctaatatgtctattaagcgctttgtgacaatcattatgataacgaaacctatttctatcatcggttatagctatttgtggatttatggcggtgatattttgaaaaattttttgaat

SEQ ID NO: 4162 - protein, 203 aa, Streptococcus agalactiae
MNMKLSKRYRFWQKVIKALGVLALIATLVLVVYLYKLGILNDSNELKDLVHKYEFWGPMIFIVAQIVQIVFPVIPGGVTTVAGFLIFGPTLGFIYNYIGIIIGSVILFWLVKFYGRKFVLLFMDQKTFDKYESKLETSGYEKFFIFCMASPISPADIMVMITGLSNMSIKRFVTIIMITKPISIIGYSYLWIYGGDILKNFLN

SEQ ID NO: 4163 - DNA, 354 bp, Streptococcus pyogenes
ttggcccctgtaacaggttttatttataattatgtaggcatcattattggcagtatagccctcttcttgctcgttaagacttatggtcgtaaatttatcttactctttgtaaatgacaaaacattttacaagtatgaaaggcgtttggagacaccaggatatgaaaaattatttattttttgtatggcatcgcctgtttctccagctgatattatggttatgattacgggattgacggacatgtctttaaagcgctttgtaactattcttttaataactaaaccaatttctattatcggctacagttatttatttatttttggaaaagatgttatatcttggttcttacagcat

SEQ ID NO: 4164 - protein, 118 aa, Streptococcus pyogenes
LAPVTGFIYNYVGIIIGSIALFLLVKTYGRKFILLFVNDKTFYKYERRLETPGYEKLFIFCMASPVSPADIMVMITGLTDMSLKRFVTILLITKPISIIGYSYLFIFGKDVISWFLQH

SEQ ID NO: 4165 - DNA, 636 bp, Streptococcus agalactiae
atggctagtattttaaaaaaacatttagagaaacgtttagagcttaaaaatgatcctatgaggacagatatgagtactggtgccagttaccctaaatatggattctcggtaggaaagtacacatatggatatcaacaattcttttacgaaggcgttaacttaaaagaaattggagcattttgctcaatagcccagaacgttactattactggtctgaatcatccaaccgatcacattaccactaacccttttatttactataagtcaaggggatttataaatgaggatagggcggacttaatagatgaaaagaaaaatggaaaagttattattggcaacgatgtctggataggaactaatgtcactatacttccatctgttacaataggtaatggagcaattattggagcaggttcagttattaccaaagacattcctgactatgctgttgtcgctggaacacctgctaaaattatcaaatatcgcttttcagaggaagaaataacattattaaatgcatctcagtggtggaattggtcagatgaagctattaaggaacatattagcgaattttcagataagaaggaattcttcaatactctaaaaagtatttccgaaaacaaaaatcataaactc

SEQ ID NO: 4166 - protein, 212 aa, Streptococcus agalactiae
MASILKKHLEKRLELKNDPMRTDMSTGASYPKYGFSVGKYTYGYQQFFYEGVNLKEIGAFCSIAQNVTITGLNHPTDHITTNPFIYYKSRGFINEDRADLIDEKKNGKVIIGNDVWIGTNVTILPSVTIGNGAIIGAGSVITKDIPDYAVVAGTPAKIIKYRFSEEEITLLNASQWWNWSDEAIKEHISEFSDKKEFFNTLKSISENKNHKL

SEQ ID NO: 4167 - DNA, 1104 bp, Streptococcus agalactiae
gtgatgtcaaatataataacttatttaaaaaataattcaaacttaacttttgatgaattagcattaaacgatgttgacattctttgtttaaatgaatttggctatatttcttttgaaaaacttataaacactacagaaatgaagtcagttttagtctgtgagttatatcatgagtaccttcaaactatggctaaatcatatagctttatgttcacatcacaacgacatgatttatgtcagttaatgatgacctcgaaacgttttaaaaacttaactttatcttattatcgagctgagattagtttagaatttgaaaaacaatttgcagctatggtttttactattcctaacattaattatcatcaggttgtatttcgtggtactgatgccaaccttattggttggaaagaagattttaaattgacttatatgagagaaatatcggctcatcgttcagcgattaaatacttaaatacaatactgccttattttgataaagtagttctctcaggtcattctaaggggggtaatttagccttgtacgctgcaatgtttacaaagccagatttaaaagcaaaaattgatttgatttggcttattgactccccaggactacaaaaaactttgttacctactacagagtataaaactactaaacaaaagtgcattcgcttactaccagaagaatctattgttggtatgatgctttatagtgatatagagccgctaattattagtagcaatgcgcgtggaattctgcaacacgatgttacaacttgggaaattcaagaaccagctattttaaagactggaacaggactatcgctaaaaagtatttgttttgaaaagacatttcaacagtggatggctgaattaaaaagtcaagaaagaaaattattttttgatttattatttgatagcttcctatcaagtggcgtatctagtttggatgacttcaacttggcttccagagcaaaaatgatgaaagcttttcatagctttagagaactagatgatgataaaaaaaggttatttaacaaatctttaaaattattagtaaccatattttggggagcttatcatgataatagcagagagactaag

SEQ ID NO: 4168 - protein, 368 aa, Streptococcus agalactiae
MMSNIITYLKNNSNLTFDELALNDVDILCLNEFGYISFEKLINTTEMKSVLVCELYHEYLQTMAKSYSFMFTSQRHDLCQLMMTSKRFKNLTLSYYRAEISLEFEKQFAAMVFTIPNINYHQVVFRGTDANLIGWKEDFKLTYMREISAHRSAIKYLNTILPYFDKVVLSGHSKGGNLALYAAMFTKPDLKAKIDLIWLIDSPGLQKTLLPTTEYKTTKQKCIRLLPEESIVGMMLYSDIEPLIISSNARGILQHDVTTWEIQEPAILKTGTGLSLKSICFEKTFQQWMAELKSQERKLFFDLLFDSFLSSGVSSLDDFNLASRAKMMKAFHSFRELDDDKKRLFNKSLKLLVTIFWGAYHDNSRETK

SEQ ID NO: 4169 - DNA, 2790 bp, Streptococcus agalactiae
atggcttctacaaataatgtttcagatacaaacacacgttttgctaaagaggagttagaagaggttttcgaagaattagggacaactcaaggtggtttatcagatgaagaggttgctgtacgtcagaaaaaatatggtttaaacctgttatctgaagtaaagcaagaatcgattattttattgtttctgaaaaattttactagtcttatggcaatactattatgggttggaggatttgtggctattgtttctaatagcttagagctaggtcttgccatttggatggttaatgtgattaatggtatttttagtttcattcaggaataccgtgcaagccaagcaacacaagctctcgagaaaatgttaccatcttattcacgtgttcttagaaaaggctcagaagaaaagatattatcagagcaactagtcccaggcgatattgttcttattgaagaaggagaccgtatttcagcagatggtcgcttgattaaaacaacagatttgcaagtaaaccaatcagccttgacaggggaatcaaatcctatttataaagatagcaatgttgaaaacgaccagtctaaaacattgattgaatgtgataatatggttttcgcaggaacgacggtctccagtggtagcgcaacaatggttgttacggcaattggaatgcaaactcaatttggtcaaatcgctgatttaacacaagggatgaaatcagaaaaaagccctcttcaaagagaacttgatcggttgaccaaacagatttctatcatttcaattacggtaggaattatctttttcttagcagcgactttttttgttaaggagccagtgtcaaaatcatttatctttgccttggggatgatcgttgcatttatcccagaaggtttactacctaccgttacactttctctagctatggcagtccaacgaatggctaaagaacacgcacttgtcaaaaaactttcttcagttgagactcttggagcaacctcagttatctgttctgataagactggtacattaacgcaaaatgaaatgaccgtcaatcatttgtggcaaaatggaaagagttaccaagtgacaggactgggttatgctccagaaggacagattctttttgaaggtgacaatatttgctttggtaatagtgatagaggagacttagaaaaacttattcgttttgctcatctctgtagcaacgctcaagtattaccaccaaatgatgatcgttcaacttatactgtacttggagatccgacagaagcttgtttgaatgttttattggaaaaatcagggataaacatacaagaaaatcgtaagtttgcaccacgtttgaaagaattaccttttgattcggttagaaaacgcatgacaactattcatagcttaggaggcgatgaaaaggataaaaaaatttcaattacaaaaggtgcgccgaaagaaatacttgatttatcagattatgtcttatctgatggcaaagttatccccttaaacaaggaagaacgtaataaaatacagttggctaacgatacatttgctaaagatggacttcgcgtcttagctgtttcatactgcgatattgaaggcttttcaaaagaacaatggacgcaagaaaatttggaacaacacatggtgtttatagggttgatagcaatgagtgatccacctcgtgaaggcgttcgcgaagctattgataaatgtcatgcagcaagcattcgtattattatggtgactggagattacggattaacggcactaagtatcgctaaaaatattggtattattcgtaacgatgatgctaaagtaatttcaggtttagagttatcagaaatgacggatagccaattgaaaaaagaattgtcaggtgaagtcgtttttgctcgtgtagcaccagaacaaaaatatcgagtagtaacgatattacaggagatgggtgaagtagtagcagttacaggagacggggtcaatgatgcgcctgcgctaaaaaaatccgatattggtgtagccatgggtgttaccggtactgatgttgctaaagaatcagctgatatgattctgacagatgatcattttgcttctattgtacatgctgtggaagaaggacgggctgtttatcaaaacattaagaaattcttgacgtatatttttaatagtaatactcctgaggctgttccgtcggcattcttccttttttctaaaggttttattcctttaccattgactgtaatgcaaatacttgctgttgatttgggaaccgatatgcttcccgctttaggtctgggcgtggaaccaccagaaacagacgttatgaatcgtcctccaagacggctaacagatcgcttattggacaaagggctacttataaaatctttcctttggtacggcactattgaatccgtattagctatgggtggttttttctgggctcattacttacgttatggtaattttacttttttcgtcgcaaacggcataccgtacagagaagcgacaactatgacacttggagctattatctttagccagataggtatggttatgaatagcagaacgagctatcaatctattaaagcactatctatttttggtaataaattaattaattttggtataataatggagattttagcatttttagtcttagtatacgtgccactattccataacttattcaacacagcaagcctaggtttatcacattggctctatttaataagctgcccatttatcatgataggtttagatgaagttcggaaattattcagcagtagaaagaataaacgg

SEQ ID NO: 4170 - protein, 930 aa, Streptococcus agalactiae
MASTNNVSDTNTRFAKEELEEVFEELGTTQGGLSDEEVAVRQKKYGLNLLSEVKQESIILLFLKNFTSLMAILLWVGGFVAIVSNSLELGLAIWMVNVINGIFSFIQEYRASQATQALEKMLPSYSRVLRKGSEEKILSEQLVPGDIVLIEEGDRISADGRLIKTTDLQVNQSALTGESNPIYKDSNVENDQSKTLIECDNMVFAGTTVSSGSATMVVTAIGMQTQFGQIADLTQGMKSEKSPLQRELDRLTKQISIISITVGIIFFLAATFFVKEPVSKSFIFALGMIVAFIPEGLLPTVTLSLAMAVQRMAKEHALVKKLSSVETLGATSVICSDKTGTLTQNEMTVNHLWQNGKSYQVTGLGYAPEGQILFEGDNICFGNSDRGDLEKLIRFAHLCSNAQVLPPNDDRSTYTVLGDPTEACLNVLLEKSGINIQENRKFAPRLKELPFDSVRKRMTTIHSLGGDEKDKKISITKGAPKEILDLSDYVLSDGKVIPLNKEERNKIQLANDTFAKDGLRVLAVSYCDIEGFSKEQWTQENLEQHMVFIGLIAMSDPPREGVREAIDKCHAASIRIIMVTGDYGLTALSIAKNIGIIRNDDAKVISGLELSEMTDSQLKKELSGEVVFARVAPEQKYRVVTILQEMGEVVAVTGDGVNDAPALKKSDIGVAMGVTGTDVAKESADMILTDDHFASIVHAVEEGRAVYQNIKKFLTYIFNSNTPEAVPSAFFLFSKGFIPLPLTVMQILAVDLGTDMLPALGLGVEPPETDVMNRPPRRLTDRLLDKGLLIKSFLWYGTIESVLAMGGFFWAHYLRYGNFTFFVANGIPYREATTMTLGAIIFSQIGMVMNSRTSYQSIKALSIFGNKLINFGIIMEILAFLVLVYVPLFHNLFNTASLGLSHWLYLISCPFIMIGLDEVRKLFSSRKNKR

SEQ ID NO: 4171 - DNA, 2679 bp, Streptococcus pyogenes
ttgtctaaagaacaaagacatgaagcattttacacgcaaagtgaagagaccgtactggctcaattagagaccagtcgcgaaggtcttacgtctgcccaagcaaaagagcgcttagcagagtatggtcgtaatgagcttgatgaaggcgaaaaacgaagtttatttatgaaattccttgatcaatttaaggatttgatgattattattttgattgtggcagcccttctttcagttcttacagaggggatggaaggtttgacagacgccattattatcttggctgttgttatcctaaatgctgcttttggtgtttaccaagaaggacaagctgaagctgctattgaagccttgaaatcaatgtcaagtccactggctcgtattcgccgcgatgggcatgtgactgagatagactctaaagaattggtccctggagatattgtcttgctagaagcgggagatgttgtccctgctgatctgcgtcttttggaagctaactccttaaaaatcgaagaagcagcgcttactggagaatctgtaccggttgaaaaagacttgtcaacggctgtttcagaagatgccggtattggtgatcgcgtcaatatgggatatcaaaactcaaatgtgacatatggtcgtgggattggggttatcactaacactggcatgtacaccgaggttgggcatattgctggtatgcttgctaatgctgatgagacagatacaccattgaagcaaaaccttgacaacctttctaagattttgacttatgcgatccttgtgattgcagcggtgacttttgctgttggagtcttcttgcgtggtcaacacccgcttgaaggcttgatgacttcagtagcgcttgctgttgcagctattccagagggacttcctgcgattgttactgttgtgctttctcttggaactcaagtacttgctaaacgtaacgccattatccgtaaattaccagctgttgaaacgctaggatcaactgaaatcattgcttctgataaaacgggtaccttgacaatgaatcaaatgaccgttgaaaaagtttataccaacgggacactccaaagttcatcagctgatattgcttttgacaatacgacacttcgtgtaatgaactttgctaatgatactaaagttgatccttcagggaagttaattggtgacccaacagaaacagctttggtagagtttgggttagaccacaattttgacgtacgtgaggctatggtggcagaacctcgtgtggcagaactgccatttgattctgaccgtaagttgatgtcaaccattcataaacaagctgatggcaaatatttcatcgctgttaaaggtgcaccagatcagttattgaaacgtgtcacacagattgaagaaaatggacaaattcgtcctattacggatgctgataaaaaaaccattcttgataccaataagagtcttgccaaacaagctcttcgtgtcttgatgatggcttacaaatattctgatgcccttccaacactggaaacagaaattgttgaggctaatcttgtcttctctggtttggtagggatgattgaccctgaacgtcctgaagcagcacaggctgttaaagtagctaaggaagctggcattcgtccaatcatgattactggtgaccaccaagatacagcaaaagctattgcgaaacgtcttggtattatcgaagaagatggcgttgatcatgtctttacaggtgctgaactcaacgaattatcagatgaagagttccaaaaagtctttaaacaatactccgtgtatgcccgtgtatctcctgagcataaagttcgtatcgttaaggcttggcaaaatgaaggcaaagttgttgccatgactggcgatggggttaacgatgcaccatctcttaaaacggcagatattggtattggtatgggaattacaggtacagaggtttctaagggagcttctgacatggttcttgccgatgataactttgcaaccattatcgttgcggttgaagaaggacgtaaggtcttctcaaacattcaaaaaacaattcaatacttactttctgctaacatggcagaagtctttaccatcttccttgcaaccttgtttggttgggatgtgcttcaaccagttcacttgctttggattaacttggtaactgataccctaccagctattgctcttggtgttgaacctgctgagcctggtgtgatgaaacacaaacctcgtggacgtaagtcaagcttctttgatggtggggtgaaggaagccattctttaccaaggtgccttccaaaccattttggtgcttggggtttatggttttgccttgatgttcccagaacacacaagctatcatgatgtccatgcagatgctttgaccatggcttatgtgaccctcggtttgattcagttggtacatgcctacaacgtgaaatctgtttaccaatccatctttactgttggattgttcaaaaacaaattgttcaactattctattccagtggcctttgtagcattaatggcaacagttgttgttcctggatttaatcaattctttcatgtgacacacttgacgatcacacaatggttagtggttattatcggaagtctcttgatggttgttcttgttgaattggtgaaagctgttcaacgatcacttggtcaagatgaaaaagcaatt

SEQ ID NO: 4172 - protein, 893 aa, Streptococcus pyogenes
LSKEQRHEAFYTQSEETVLAQLETSREGLTSAQAKERLAEYGRNELDEGEKRSLFMKFLDQFKDLMIIILIVAALLSVLTEGMEGLTDAIIILAVVILNAAFGVYQEGQAEAAIEALKSMSSPLARIRRDGHVTEIDSKELVPGDIVLLEAGDVVPADLRLLEANSLKIEEAALTGESVPVEKDLSTAVSEDAGIGDRVNMGYQNSNVTYGRGIGVITNTGMYTEVGHIAGMLANADETDTPLKQNLDNLSKILTYAILVIAAVTFAVGVFLRGQHPLEGLMTSVALAVAAIPEGLPAIVTVVLSLGTQVLAKRNAIIRKLPAVETLGSTEIIASDKTGTLTMNQMTVEKVYTNGTLQSSSADIAFDNTTLRVMNFANDTKVDPSGKLIGDPTETALVEFGLDHNFDVREAMVAEPRVAELPFDSDRKLMSTIHKQADGKYFIAVKGAPDQLLKRVTQIEENGQIRPITDADKKTILDTNKSLAKQALRVLMMAYKYSDALPTLETEIVEANLVFSGLVGMIDPERPEAAQAVKVAKEAGIRPIMITGDHQDTAKAIAKRLGIIEEDGVDHVFTGAELNELSDEEFQKVFKQYSVYARVSPEHKVRIVKAWQNEGKVVAMTGDGVNDAPSLKTADIGIGMGITGTEVSKGASDMVLADDNFATIIVAVEEGRKVFSNIQKTIQYLLSANMAEVFTIFLATLFGWDVLQPVHLLWINLVTDTLPAIALGVEPAEPGVMKHKPRGRKSSFFDGGVKEAILYQGAFQTILVLGVYGFALMFPEHTSYHDVHADALTMAYVTLGLIQLVHAYNVKSVYQSIFTVGLFKNKLFNYSIPVAFVALMATVVVPGFNQFFHVTHLTITQWLVVIIGSLLMVVLVELVKAVQRSLGQDEKAI

SEQ ID NO: 4173 - DNA, 432 bp, Streptococcus agalactiae
atgaaagaaacacaagaagaattacgtcagcgtattggacatacagcttatcaagtaacccaaaattcagctacggaacatgcttttactgggaagtatgatgatttttttgaagaggggatatatgtagatatcgtcagtggagaggttttattctcttctttagataaatttcaatctggttgtggttggccagcattttcaaaaccaattgagaatcgaatggtgacaaatcatcaagatcactctcatggaatgcatcgtattgaggttaggagtcgtcaagctgactctcatttagggcatgtatttaatgatggaccggttgatgcaggtggtttacgctattgtatcaattcagctgccttagattttattccttatgaccagatggcaaagagaggctatggggactacctatcactttttgat

SEQ ID NO: 4174 - protein, 144 aa, Streptococcus agalactiae
MKETQEELRQRIGHTAYQVTQNSATEHAFTGKYDDFFEEGIYVDIVSGEVLFSSLDKFQSGCGWPAFSKPIENRMVTNHQDHSHGMHRIEVRSRQADSHLGHVFNDGPVDAGGLRYCINSAALDFIPYDQMAKRGYGDYLSLFD

SEQ ID NO: 4175 - DNA, 435 bp, Streptococcus pyogenes
atggaaacatcagatgagttaaaacaacgcattggtgatctttcttacgaggtcacccagcatgcagcaacagaatctccctttacaggagaatatgataatttttttgagaagggtatctatgtcgatatcgtcagtggtgaggtcttgttttcatcactggataaatttaattctggctgtggttggcctgccttttcaaaacctattgaaaatcgtatggtcacaaaccacgatgactcttcttatgggatgagacgagttgaggttaaaagccgtgaagcaggatcgcatttggggcatgtctttagtgacggccccaaagaagctggaggcttgcgttactgtatcaattcagcagctcttaaatttattccttatgaccagatggaaaaagaaggctatgcccaatggctcacattgtttgatgagaca

SEQ ID NO: 4176 - protein, 145 aa, Streptococcus pyogenes
METSDELKQRIGDLSYEVTQHAATESPFTGEYDNFFEKGIYVDIVSGEVLFSSLDKFNSGCGWPAFSKPIENRMVTNHDDSSYGMRRVEVKSREAGSHLGHVFSDGPKEAGGLRYCINSAALKFIPYDQMEKEGYAQWLTLFDET

SEQ ID NO: 4177 - DNA, 462 bp, Streptococcus agalactiae
atgattcgtagagcgaaagaaaaagatttgcctgatattgcagagctattgaaacaaattttaatgttacatcatgaggttcgcccagatatttttcatacaagaggaagtaagttttctaaagaacaattgaaagaaatgctgatagacgaatcaaagcctatctttgtttatgaatcagacgagggtaaagttgttgcccacttgtttcttcaattacaagaaaaacgtgacttacctcgaaagtcatttaaaactctctatatagatgatttgtgcattgatgaggaagtaagaggtcagcaaattggacaaaagttgatggattttgcaagacaatatgctaagaaacatgggtgttataatataactttaaatgtttggaatgataatcagagagcggtctctttttatgaaaaattaggttttaaacctcaacaaactcaaatggaggagatacta

SEQ ID NO: 4178 - protein, 154 aa, Streptococcus agalactiae
MIRRAKEKDLPDIAELLKQILMLHHEVRPDIFHTRGSKFSKEQLKEMLIDESKPIFVYESDEGKVVAHLFLQLQEKRDLPRKSFKTLYIDDLCIDEEVRGQQIGQKLMDFARQYAKKHGCYNITLNVWNDNQRAVSFYEKLGFKPQQTQMEEIL

SEQ ID NO: 4179 - DNA, 657 bp, Streptococcus agalactiae
atgactatggttaaaagagaagatgtgattttaaatgcaactgaaaatatggttcaccataaattaaaaaatgatccaagtggccatgactggtttcatattgttagagtaagaaatcttgcggtagaattagcacacaaagaaggggctaatacctttatttgtcaaatggctgcacttttgcatgatattattgatgacaaaatctgccaagatagtaagcaagcgtcgtatgaattgactcaatggttatatagtcaagatcttgccatagcagaagtagaacatatccttgatattcttgaaaatatttcattcaaagcaggaactggattgactatgaaaacattggaaggtcaaattgttcaagatgcagatcgcctagatgctatgggggctattggtattgcaagaacgatggcttattcagggagtaaaggacgtttaattcatgaccctaacttaaaaccacgagaaaacctcactttagaagagtatcgtaatggtcaggatacagctatcattcatttttacgaaaaattattaaagttaaaagaccttatgaatacaaaacaagggaaaatgcttgctcaaaaacgtcatgattttttagaactatatttagccgaattttatgctgaatggaatggtaaacgt

SEQ ID NO: 4180 - protein, 219 aa, Streptococcus agalactiae
MTMVKREDVILNATENMVHHKLKNDPSGHDWFHIVRVRNLAVELAHKEGANTFICQMAALLHDIIDDKICQDSKQASYELTQWLYSQDLAIAEVEHILDILENISFKAGTGLTMKTLEGQIVQDADRLDAMGAIGIARTMAYSGSKGRLIHDPNLKPRENLTLEEYRNGQDTAIIHFYEKLLKLKDLMNTKQGKMLAQKRHDFLELYLAEFYAEWNGKR

SEQ ID NO: 4181 - DNA, 2631 bp, Streptococcus agalactiae
atgaaaggtcaaaaaattattgctctagctggtcttgtcctgtcatgccattttgctcttacggcatgtcatactcaagaacacaaaaattctcatcatattaaaacaaagcaggttgctaagaaaaaagctaataaaaagaaagtctctgttaaggaaagtcataaaaaacgcaagggtgttgcaggggttgactttccaactgatgatggctttttactgactaaagattcgaagattttatctcatacagattctggaatcgttgtagcacatggaaatcattctcattttattttttactctgatttaaaaggttcaaaatttagctatttaatccctaatgctaatacaaaaactaataaaaatcaagcggtaagaaactttaaagcaggggcggtagctgttaatacattaaatgatggctatgtttttaatcccgcagatattgtttcagaagatgctaatggctacgtggtcagacatggtgatcatttccactatattccaaaagcaagtttatctcagcaaaagcaagtacaagcaagtagagctgtttcacgtttaggaaatcaaagtaatagccattacagggttaatagttctaaaattgcagggcttcactacccaacaagtaatggtttcttatttaatggacgaggaataaaaggcactaccccaacaggtattttagtagaacatcataatcatctgcattttattagttttgctgatttaagaaaaggggggtggggatcaattgctgaccgttaccaaccacaaaagaaagctgattctaaaaaacagtcaccatcaagtaaaaagccaagaactgaaaatactttacctaaggacatcaaagataagctagcttaccttgctcgtgaattacatttagatatttcacgtatcagagtccttaaaacactaaatggtgaaattggatttgaatacccacatgatgatcatacacatgttattatggccaaagatattgatctaagtaagccaattccaaatccacatcatgatgatgaagatcatcacaaaggtcatcaccatgatgagtccgaccataagcatgaagaacacgagcacactaagtcaaataaattatctgatgaagatcaaaagaaattaatttatttagcagagaagcttggtttaaatcctaatcaaattgaagtattaacgtcagaggatggaagtatcatctttaagtatccacatgatgaccactcacacaccatagcaagtaaggatattgaaattgggaagcctatcccagatggacaccacgatcactctcatgcaaaagataaagttggtatggcaactctaaaacaaattggttttgatgatgagattattcaggatattctgcatgcagatgctccaacaccattcccatcaaatgaaactaatcctgaaaaaatgcgtcagtggcttgcaactgttactaagattaacattggacaaagaaccaatccattccagcgttttggtctatcattgatgcctaatattgaagttctaggaattgggtttactccgattaatgatatgacgccagttttgcaattcaaaaaacttaaacagctttggatgacaaatactggtattacagattattctttccttgataagatgccactattagaaggattggatatttcacaaaacggtattaaggatttatctttccttacaaaatataaacaattaagtcttattgctgcagctaataatggcattacttcgctaaaaccattggctgaattaccaaaccttcaattcttagttttgagtcataacaatatctctgacttgacaccgttatcaaacttgacaaaactccaagaattgtaccttgatcataataatgtgaagaatttaagtgcactttctggtaaaaaagatttgaaagttctagatttatcaaacaataaatccgcagacttatcgactctaaaaacaactagtcttgagacgcttcttttaaatgagacgaatacaagcaatctaagtttcttaaagcaaaatcctaaggtatctaatttaacaattaataatgcgaaattagcatcattagatggtattgaagagagcgatgaaattgttaaagtagaagctgaagggaaccaaattaagtcactagtattgaaaaataaacaaggttcgttaaaattcttgaatgtgactaataatcagttaacatcacttgaaggtgttaataattatacttcacttgagaccttaagtgtttctaaaaataaacttgaatctttagatattaaaacacctaacaaaacagttacaaatcttgattttagccataacaatgttccaacatcacaattgaaattgaatgaaaaaaatattcctgaagcagtagctaagaattttccagcagttgtagaaggttcaatggttggaaatggtagtcttgctgaaaaagcagctatggcttctaaagaggacaaacaagtttcagataatactaatcaccaaaaaaacactgaaaaatctgctcaagcgaatgctgatagtaaaaaagaaaaccctaaaacacatgatgaacatcatgaccatgaagaaacagatcatgcacatgtaggtcatcatcaccat

SEQ ID NO: 4182 - protein, 877 aa, Streptococcus agalactiae
MKGQKIIALAGLVLSCHFALTACHTQEHKNSHHIKTKQVAKKKANKKKVSVKESHKKRKGVAGVDFPTDDGFLLTKDSKILSHTDSGIVVAHGNHSHFIFYSDLKGSKFSYLIPNANTKTNKNQAVRNFKAGAVAVNTLNDGYVFNPADIVSEDANGYVVRHGDHFHYIPKASLSQQKQVQASRAVSRLGNQSNSHYRVNSSKIAGLHYPTSNGFLFNGRGIKGTTPTGILVEHHNHLHFISFADLRKGGWGSIADRYQPQKKADSKKQSPSSKKPRTENTLPKDIKDKLAYLARELHLDISRIRVLKTLNGEIGFEYPHDDHTHVIMAKDIDLSKPIPNPHHDDEDHHKGHHHDESDHKHEEHEHTKSNKLSDEDQKKLIYLAEKLGLNPNQIEVLTSEDGSIIFKYPHDDHSHTIASKDIEIGKPIPDGHHDHSHAKDKVGMATLKQIGFDDEIIQDILHADAPTPFPSNETNPEKMRQWLATVTKINIGQRTNPFQRFGLSLMPNIEVLGIGFTPINDMTPVLQFKKLKQLWMTNTGITDYSFLDKMPLLEGLDISQNGIKDLSFLTKYKQLSLIAAANNGITSLKPLAELPNLQFLVLSHNNISDLTPLSNLTKLQELYLDHNNVKNLSALSGKKDLKVLDLSNNKSADLSTLKTTSLETLLLNETNTSNLSFLKQNPKVSNLTINNAKLASLDGIEESDEIVKVEAEGNQIKSLVLKNKQGSLKFLNVTNNQLTSLEGVNNYTSLETLSVSKNKLESLDIKTPNKTVTNLDFSHNNVPTSQLKLNEKNIPEAVAKNFPAVVEGSMVGNGSLAEKAAMASKEDKQVSDNTNHQKNTEKSAQANADSKKENPKTHDEHHDHEETDHAHVGHHHH

SEQ ID NO: 4183 - DNA, 2376 bp, Streptococcus pyogenes
atgaaaacgaaaaaagttattattttagttggtctattgttatcatctcagttgactttgatagcttgtcaatcacgaggtaatggtacatatcccattaaaacgaaacaatcacgtaagggaatgacgtcaaacaaaattaaaccgattaaaaaaagcaaaaagacaaacaagactcacaaaggtgtggcgggtgtcgattttcctacagatgatgggtttattttaaccaaagactcaaaaatcttatcaaaaacagatcagggaatcgttgttgaccatgatggtcattcgcattttattttttatgccgatttaaagggaagtccatttgaataccttattccaaaaggagcaagtttagctaagccagctgttgctcagcgagcagctagtcaagggacttctaaagtagcagatcctcatcaccattatgaatttaacccagcggatattgtggctgaagatgctttaggctacacggttcgccacgatgatcacttccattatattttgaagtcaagcttatcaggtcagacacaggcacaagctaaacaggttgctactcgcttgccacaaaccagtagccttgtttcaacagctacagctaatggtattccaggcttgcatttcccaacctcagatggttttcaatttaacggtcaaggtattgttggggtaacaaaagacagtattttagtggaccacgatggtcacttacatcctatttcttttgcggaccttcgtcagggtggctgggcacatgtggcagatcaatacgatcccgctaaaaaagcagaaaagccagcagaaacccatcagacaccagagctatctgaacgtgaaaaggaataccaagaaaaattagcttatttggcagaaaaattggggattgatccatcaactattaaacgtgtggaaacacaagacggtaaacttggtttggaataccctcaccatgaccacgcacacgtattgatgttatctgatattgaaatcggaaaagacattccagatccacatgctattgagcatgcccgtgaattggaaaaacataaggttggaatggataccttgcgtgccttagggtttgatgaagaagtgattttggatatcgttcgcactcacgatgctccaaccccattcccatcaaatgaaaaagatccgaatatgatgaaagaatggttagcaacggttatcaaacttgacttgggcagccgtaaagatcctttgcaacgtaaaggactttcactgttacccaacttagaaactttaggaattggctttacaccaatcaaagatatctcacctgttttgcaatttaaaaaattgaaacagttgttaatgacaaaaacaggggtgactgattatagatttttggataatatgccacagttagaaggcattgatatttcacaaaacaatctcaaagatattagtttcttgagcaaatataaaaacttaactctagtagcggctgctgataatggtattgaagatattaggccgcttggtcaattaccaaatctcaaattcctcgtattgagtaacaataagatttctgatttaagcccactggcatcgttacatcaattgcaagaattgcacattgataataatcagattacagatttaagccctgtttctcataaagaatcattgacggttgttgatttatcaagaaatgctgatgttgacttagcaacacttcaagcacccaaattagaaacgttaatggtcaatgataccaaggtttctcatttggatttcttgaaaaataatcctaatctatctagcctatctattaaccgtgcgcaattgcaatctcttgaaggtattgaagcaagtagcgtcattgtcagagtagaagcagaaggtaaccaaattaaatcgcttgtgcttaaagacaagcaagggtcacttactttcttggatgtgacaggcaaccagttgacttctctagaaggtgttaataattttacagcacttgacattttaagcgtgtctaaaaaccaattaacaaatgtcaacctatctaaacccaataagacagttactaacattgatattagtcataacaatatctcattagcagaccttaaattgaacgagcaacatattccagaagccattgcgaaaaacttcccagcggtttacgaaggttctatggtaggtaatggaacagctgaagaaaaagcagctatggctactaaggcgaaagaaagtgctcaagaagcatcggaatcacatgactacaaccataatcatacctatgaagatgaagaaggtcatgctcacgagcacagagacaaagatgatcacgaccatgaacatgaggatgaaaatgaagctaaagatgagcaaaaccatgctgac

SEQ ID NO: 4184 - protein, 792 aa, Streptococcus pyogenes
MKTKKVIILVGLLLSSQLTLIACQSRGNGTYPIKTKQSRKGMTSNKIKPIKKSKKTNKTHKGVAGVDFPTDDGFILTKDSKILSKTDQGIVVDHDGHSHFIFYADLKGSPFEYLIPKGASLAKPAVAQRAASQGTSKVADPHHHYEFNPADIVAEDALGYTVRHDDHFHYILKSSLSGQTQAQAKQVATRLPQTSSLVSTATANGIPGLHFPTSDGFQFNGQGIVGVTKDSILVDHDGHLHPISFADLRQGGWAHVADQYDPAKKAEKPAETHQTPELSEREKEYQEKLAYLAEKLGIDPSTIKRVETQDGKLGLEYPHHDHAHVLMLSDIEIGKDIPDPHAIEHARELEKHKVGMDTLRALGFDEEVILDIVRTHDAPTPFPSNEKDPNMMKEWLATVIKLDLGSRKDPLQRKGLSLLPNLETLGIGFTPIKDISPVLQFKKLKQLLMTKTGVTDYRFLDNMPQLEGIDISQNNLKDISFLSKYKNLTLVAAADNGIEDIRPLGQLPNLKFLVLSNNKISDLSPLASLHQLQELHIDNNQITDLSPVSHKESLTVVDLSRNADVDLATLQAPKLETLMVNDTKVSHLDFLKNNPNLSSLSINRAQLQSLEGIEASSVIVRVEAEGNQIKSLVLKDKQGSLTFLDVTGNQLTSLEGVNNFTALDILSVSKNQLTNVNLSKPNKTVTNIDISHNNISLADLKLNEQHIPEAIAKNFPAVYEGSMVGNGTAEEKAAMATKAKESAQEASESHDYNHNHTYEDEEGHAHEHRDKDDHDHEHEDENEAKDEQNHAD

SEQ ID NO: 4185 - DNA, 1830 bp, Streptococcus agalactiae
atgaatattgaagatttgaagaaacgtcaagaaaagattagaaacttttcgattatcgctcatattgaccatggaaaatcaaccttagcagaccgtattttagagaaaacagaaacggtttctagtcgtgaaatgcaggcgcaactgttggactctatggatctagaacgtgagcgtggaattactataaagttaaatgctattgagcttaattatactgctaaagatggtgaaacttacatttttcacttgattgacacgccagggcatgttgacttcacatatgaagtatcacgttcattggcagcttgtgagggtgctatactggttgttgatgcagcccaaggaattgaagctcaaactctggcaaatgtttatttggctctagacaatgatttagagatactaccagttattaataaaattgatttaccagcagcagatccagaacgtgtacgtgcagaagtagaggatgttattggtctagatgcttcagaagctgtgcttgcctcagctaaggcagggattggtattgaagaaattttagagcagatcgttgaaaaagttcctgcaccgactggggaagtagatgctcctcttcaagctctaatttttgattctgtttatgatgcttatcgtggagtaattcttcaagtaaggattgtaaatggtatggttaagccaggagataagattcaaatgatgtctaatggtaaaaccttcgacgttactgaggttggtattttcactcccaaagcagttggacgtgattttttagcaactggagatgtagggtatattgctgcctcaattaaaacggttgctgatacacgtgttggtgataccattacccttgctaataacccagcaatagaacccttgcatggctataagcaaatgaacccaatggtttttgccggtctttatccaattgaatcaaataagtataacgatctgcgtgaagcccttgaaaaattacaattgaatgatgctagtctacagtttgaaccggaaacatcacaagcattagggtttggtttccgttgtggtttcttaggacttttacatatggacgttatccaagagcgcttggaacgagagttcaatattgatcttattatgactgcaccatcagtagtttatcatgttaatacaactgacggtgaaatgcttgaagtttcgaatccatctgaatttcctgatcctactcgtgttgacagcattgaagaaccatatgttaaggcgcaaattatggttcctcaagaatttgtcggtgctgtaatggagttagcacaacgtaaacgtggtgactttgtaacaatggattatattgatgataatcgtgttaatgttatttaccaaattcctttagctgaaattgtgtttgacttctttgataagcttaaatcatcaacacgtggctatgctagttttgattatgaaatttccgaatatcgtcgctcacaattagwtaaaatggatattcttttaaatggtgataaagtggatgctttaagctttattgttcacaaagaatttgcctatgaacgtggtaaattgatcgttgataagttgaaaaaaatcattcctcgtcagcagtttgaagttcctatccaagcagctattggacaaaaaattgtggcccgttctgatataaaagcactacgtaaaaatgtcttagcaaaatgttatggtggtgacgtttcacgtaaacgtaagttgcttgaaaaacaaaaagctggtaaaaagcgcatgaaagcaattggttccgtcgaagttcctcaggaagctttcttaagtgttttatcaatggacgatgatgacaaaaaa

SEQ ID NO: 4186 - protein, 610 aa, Streptococcus agalactiae
  MISC_FEATURE (1)..(610): Xaa = Any Amino Acid
MNIEDLKKRQEKIRNFSIIAHIDHGKSTLADRILEKTETVSSREMQAQLLDSMDLERERGITIKLNAIELNYTAKDGETYIFHLIDTPGHVDFTYEVSRSLAACEGAILVVDAAQGIEAQTLANVYLALDNDLEILPVINKIDLPAADPERVRAEVEDVIGLDASEAVLASAKAGIGIEEILEQIVEKVPAPTGEVDAPLQALIFDSVYDAYRGVILQVRIVNGMVKPGDKIQMMSNGKTFDVTEVGIFTPKAVGRDFLATGDVGYIAASIKTVADTRVGDTITLANNPAIEPLHGYKQMNPMVFAGLYPIESNKYNDLREALEKLQLNDASLQFEPETSQALGFGFRCGFLGLLHMDVIQERLEREFNIDLIMTAPSVVYHVNTTDGEMLEVSNPSEFPDPTRVDSIEEPYVKAQIMVPQEFVGAVMELAQRKRGDFVTMDYIDDNRVNVIYQIPLAEIVFDFFDKLKSSTRGYASFDYEISEYRRSQLXKMDILLNGDKVDALSFIVHKEFAYERGKLIVDKLKKIIPRQQFEVPIQAAIGQKIVARSDIKALRKNVLAKCYGGDVSRKRKLLEKQKAGKKRMKAIGSVEVPQEAFLSVLSMDDDDKK

SEQ ID NO: 4187 - DNA, 1830 bp, Streptococcus pyogenes
atgaacagtcaagatttaaaaaaacgtcaggagaagattcgtaatttctccattatcgcacatattgaccatggcaaatctactctcgctgaccgcattttggaaaagacagagacggtttcgtctcgtgaaatgcaggctcagttattggactccatggatttggagcgtgagcgtgggattaccatcaagttaaacgccattgagcttaattacacggctaaagatggggaaacctacattttccaccttattgataccccagggcatgtggactttacttatgaagtatcgcgttcgttggcagcctgtgagggagcgattttagttgttgatgcagcgcagggaattgaagcgcagacattggctaatgtttacctagcccttgataatgatttggaaattttaccggttatcaataaaattgatttgcctgctgctgaccctgagagagtccgtcatgaagtagaagatgtcattggacttgatgcttctgaggctgttctggcatcagccaaggctggtattgggatcgaagagattcttgagcaaattgttgagaaggttcctgctcctacgggtgatgtggatgcgcctttacaggccttgatttttgactctgtgtatgatgcttaccgaggggtaattttgcaggttcggattgtgaacggtattgtcaagcctggcgataaaatccagatgatgtctaatggaaaaacctttgatgttacagaagttgggattttcactcctaaggcagttggacgagatttccttgcgacgggagatgttggttatgttgcggcttctatcaaaacggtagcagatacccgtgtgggggatacggtgactttagctaataaccctgctaaggaagccttgcatggctacaagcagatgaacccgatggtctttgcagggatttatccgattgaatcaaataaatacaatgacttgcgtgaagcacttgaaaaattacaactgaacgatgccagtttacagtttgaacccgaaacgtcacaagcgcttggatttggttttcgatgcggttttttaggcttgcttcacatggatgtgattcaagaacgtttggaacgtgaatttaacattgatttgatcatgacagcaccatctgtagtctaccatgttcacacaacagatgaggacatgattgaagtgtctaacccttcagaatttccagacccaacacgggtggcttttattgaagagccttatgttaaagcgcaaatcatggtgccacaagagttcgtaggggctgttatggaattatcgcagcgcaagcgtggtgattttgtgaccatggattacattgatgataaccgtgtcaatgtgatctaccaaatcccgctggctgaaattgtgtttgatttctttgataaattgaaatcctcaacgcgaggctatgcgagttttgattatgacatgtcagaataccgcaggtcacaattggtgaaaatggacattcttttgaacggtgataaggtcgatgcgctcagctttattgttcataaagaatttgcttatgaacgcgggaaaattattgttgagaaattgaaaaaaatcattccacgtcaacagtttgaagttccgatccaagccgctattggtcaaaaaattgttgcgcgttcagacatcaaggcccttcgtaaaaacgttttagcgaagtgttatggtggtgacgtgtctcgtaaacgtaaattgctcgaaaaacaaaaggctggtaaaaaacggatgaaggctattggttctgtcgaagtccctcaagaagccttcttgagtgttctttcaatggatgacgataccaagaaa

SEQ ID NO: 4188 - protein, 610 aa, Streptococcus pyogenes
MNSQDLKKRQEKIRNFSIIAHIDHGKSTLADRILEKTETVSSREMQAQLLDSMDLERERGITIKLNAIELNYTAKDGETYIFHLIDTPGHVDFTYEVSRSLAACEGAILVVDAAQGIEAQTLANVYLALDNDLEILPVINKIDLPAADPERVRHEVEDVIGLDASEAVLASAKAGIGIEEILEQIVEKVPAPTGDVDAPLQALIFDSVYDAYRGVILQVRIVNGIVKPGDKIQMMSNGKTFDVTEVGIFTPKAVGRDFLATGDVGYVAASIKTVADTRVGDTVTLANNPAKEALHGYKQMNPMVFAGIYPIESNKYNDLREALEKLQLNDASLQFEPETSQALGFGFRCGFLGLLHMDVIQERLEREFNIDLIMTAPSVVYHVHTTDEDMIEVSNPSEFPDPTRVAFIEEPYVKAQIMVPQEFVGAVMELSQRKRGDFVTMDYIDDNRVNVIYQIPLAEIVFDFFDKLKSSTRGYASFDYDMSEYRRSQLVKMDILLNGDKVDALSFIVHKEFAYERGKIIVEKLKKIIPRQQFEVPIQAAIGQKIVARSDIKALRKNVLAKCYGGDVSRKRKLLEKQKAGKKRMKAIGSVEVPQEAFLSVLSMDDDTKK

SEQ ID NO: 4189 - DNA, 414 bp, Streptococcus agalactiae
atggaacaaaccttttttatgataaaacctgatggtgtaaaacgtggttttattggagaagttattagtcgtattgagcgtcgaggcttctctattgatcgcttagaggttagatatgcagatgcagatattttgaaaagacattatgcagaactgacggatagaccattctttccaacattagtagattatatgactagtggtccagtaatcattggagttatttcgggagaagaggtcatttcaacttggcgcaccatgatggggagtactaaccccaaagatgcccttccaggaactattcgaggagattttgcacaagctccctctccaaaccaagcgacatgtaatattgttcatgggtcagactcacctgaatctgcaactcgcgagatagccatttggttcaataac

SEQ ID NO: 4190 - protein, 138 aa, Streptococcus agalactiae
MEQTFFMIKPDGVKRGFIGEVISRIERRGFSIDRLEVRYADADILKRHYAELTDRPFFPTLVDYMTSGPVIIGVISGEEVISTWRTMMGSTNPKDALPGTIRGDFAQAPSPNQATCNIVHGSDSPESATREIAIWFNN

SEQ ID NO: 4191 - DNA, 144 bp, Streptococcus pyogenes
atgatgagagtaaccaatcctaaggatgctctttgcggaaccattcgtgagaattttgctcaggctcctggtgatgatggaggtatttttaacatggtgcatgggtctcattcaagagactctgctaggcgtgagatcgctctt

SEQ ID NO: 4192 - protein, 48 aa, Streptococcus pyogenes
MMRVTNPKDALCGTIRENFAQAPGDDGGIFNMVHGSHSRDSARREIAL

SEQ ID NO: 4193 - DNA, 195 bp, Streptococcus agalactiae
ttgggtctagcagcaagttttggaaccattcgaaacagcacagctctaaaactttatgcaaagcagtcaccagcatttagaagttttggaaccattcgaaacagcacagctctaaaacaattgacgcttgatagtttaaatcttttaagttttggaaccattcgaaacagcacagctctaaaacacagcttgcgg

SEQ ID NO: 4194 - protein, 65 aa, Streptococcus agalactiae
MGLAASFGTIRNSTALKLYAKQSPAFRSFGTIRNSTALKQLTLDSLNLLSFGTIRNSTALKHSLR

SEQ ID NO: 4195 - DNA, 174 bp, Streptococcus pyogenes
ttgagttatgttcatataagttttgggaccattcaaaacagcatagctctaaaacaaaaagcgcaagaagaaatcaaccagcgcagttttgggaccattcaaaacagcatagctctaaaacctcgtagactatttttgtctaaaaaatttcgtaatcgcactatttgtctcagc

SEQ ID NO: 4196 - protein, 58 aa, Streptococcus pyogenes
LSYVHISFGTIQNSIALKQKAQEEINQRSFGTIQNSIALKPRRLFLSKKFRNRTICLS

SEQ ID NO: 4197 - DNA, 663 bp, Streptococcus agalactiae
atgatcaagattaattttccaattttagatgaaccattagtgttaagtaatgctacgattttaacgatagaagatgtttcagtttattcttcattggtgaaacatttttatcaatatgacgtagatgaacatttgaaattatttgatgataagcagaaaagtctgaaggcaacagagttaatgctggttacagatatcttaggatacgatgtcaactcagcacctattctaaagttgatacatggtgacttagaaaatcaattcaacgaaaagccagaagtgaaatcaatggtagaaaaattagcagctactattacagaacttatcgcatttgagtgtctagagaatgagcttgatttagaatacgatgaaattaagattttagaactcattaaggcactgggagtcaaaattgagacacagagcgacactatctttgaaaaatgttttgaaattatacaagtttaccattatttaacgaaaaagaatctcttggtttttgttaatagcggagcttatcttaccaaagatgaagttataaaattatgtgaatacatcaatttaatgcaaaagtcagtactctttctagaacctagaagactctatgatttaccgcaatatgttattgataaggattatttcttgataggcgaaaatatggta

SEQ ID NO: 4198 - protein, 221 aa, Streptococcus agalactiae
MIKINFPILDEPLVLSNATILTIEDVSVYSSLVKHFYQYDVDEHLKLFDDKQKSLKATELMLVTDILGYDVNSAPILKLIHGDLENQFNEKPEVKSMVEKLAATITELIAFECLENELDLEYDEIKILELIKALGVKIETQSDTIFEKCFEIIQVYHYLTKKNLLVFVNSGAYLTKDEVIKLCEYINLMQKSVLFLEPRRLYDLPQYVIDKDYFLIGENMV

SEQ ID NO: 4199 - DNA, 684 bp, Streptococcus pyogenes
ttgtatttcttggggaggcttttgatgaatcttaatttttccttactagatgaaccgattccattaagaggcggtacaattcttgtgctcgaagatgtctgtgtattttcaaaaatagtgcaatattgttaccaatatgaggaagattctgaacttaaattttttgatcacaagatgaaaacaatcaaagaatcagaaatcatgcttgtaacagatattttaggatttgatgttaactcctcaaccattttaaaattgattcatgcagatttagaatctcaatttaatgagaaacccgaagtgaaatcgatgattgacaaattggttgctacgattacagaactgattgtctttgaatgcttagaaaatgaattagatttagagtatgatgaaatcacaatcctggaattgattaagtccttaggagtaaaagtagaaacgcaaagtgatactatttttgaaaaatgtctagagatacttcaaattttcaaatatctcactaagaaaaagttgcttatttttgtcaatagcggagcttttctaacaaaggatgaagtggctagtttacaagagtatatatcattgacaaatttaacagttctctttttagaaccacgtgaactatatgattttccgcagtatattttagatgaagattatttcttaataactaaaaatatggta

SEQ ID NO: 4200 - protein, 228 aa, Streptococcus pyogenes
LYFLGRLLMNLNFSLLDEPIPLRGGTILVLEDVCVFSKIVQYCYQYEEDSELKFFDHKMKTIKESEIMLVTDILGFDVNSSTILKLIHADLESQFNEKPEVKSMIDKLVATITELIVFECLENELDLEYDEITILELIKSLGVKVETQSDTIFEKCLEILQIFKYLTKKKLLIFVNSGAFLTKDEVASLQEYISLTNLTVLFLEPRELYDFPQYILDEDYFLITKNMV

SEQ ID NO: 4201 - DNA, 339 bp, Streptococcus agalactiae
atgagttatcggtatatgcgaatgattttaatgtttgatatgcctactgaaacagcagaagaacggaaggcgtatcgtaagtttagaaagtttctcttgagcgaaggctttatcatgcatcagttttctgtttatagtaaattattactcaataatacagctaataatgctatgataggtcggcttaaagtgaataatcctaaaaagggtaatatcacactcttaacagttacggaaaaacaatttgcgagaatggtttacctccatggagaacgcaacacaagtgttgccaactctgatagtcgcttggttttcctaggagattcttatgatcaagat

SEQ ID NO: 4202 - protein, 113 aa, Streptococcus agalactiae
MSYRYMRMILMFDMPTETAEERKAYRKFRKFLLSEGFIMHQFSVYSKLLLNNTANNAMIGRLKVNNPKKGNITLLTVTEKQFARMVYLHGERNTSVANSDSRLVFLGDSYDQD

SEQ ID NO: 4203 - DNA, 339 bp, Streptococcus pyogenes
atgagttatagatatatgagaatgatacttatgtttgatatgccgacggacaccgctgaggaacgaaaagcctatcgaaaatttcggaaatttttacttagtgaagggtttatcatgcatcaattttctatttatagtaagttgctgttgaataatacagctaacaatgccatgattggtcggctgagggagcataatcctaataaaggaaatattacattactaacggtcacggaaaaacagtttgcacgaatgatttatttacatggtgaaagaaataattgtattgcaaactccgatgaaagacttgtatttcttggggaggcttttgatgaatct

SEQ ID NO: 4204 - protein, 113 aa, Streptococcus pyogenes
MSYRYMRMILMFDMPTDTAEERKAYRKFRKFLLSEGFIMHQFSIYSKLLLNNTANNAMIGRLREHNPNKGNITLLTVTEKQFARMIYLHGERNNCIANSDERLVFLGEAFDES

SEQ ID NO: 4205 - DNA, 867 bp, Streptococcus agalactiae
atggcaggttggcgaaccgttgttgtaaatacacattctaagctctcttataaaaataatcatctgatttttaaagattcttatcagacggaaatgattcatctatcagagattgacattctaatcatggaaacaacagatatcgttttgtcgaccatgctgattaaacgtttggttgatgaaaatattttagttatattttgtgacgataaacgcttgccaacagctatgttaatgccgtactatgccagacatgattcgagtttacaattatctaggcagatgtcatggattgaagatgtcaaagcagatgtttggacatcaattattgcacaaaaaattttgaatcagtctttttatctcggtgagtgttctttctttgaaaaatcccagtctattatgaatctctaccatgacttagaaccttttgatccttctaatcgtgaggggcatgctgctaggatttatttcaatacactttttggaaatgatttttcaagagagcaggataatccaataaatgctggtttagactacggatattcattgcttttgagtatgtttgcgcgtgaagttgttaagtgtggttgcatgacacaatttggcttgaagcatgctaatcaatttaatcagttcaacctagcaagcgatattatggaaccatttcgcccaatcgttgataggattatttatgaaaataggcagagtgattttgtcaaaatgaaaagagaactcttttctatgttttcagagacatacagctacaatggtaaagaaatgtatctctcaaatattgtcagcgactataccaaaaaagttattaagtcgctaaatagtgatgggaatggaattccggagtttaggata

SEQ ID NO: 4206 - protein, 289 aa, Streptococcus agalactiae
MAGWRTVVVNTHSKLSYKNNHLIFKDSYQTEMIHLSEIDILIMETTDIVLSTMLIKRLVDENILVIFCDDKRLPTAMLMPYYARHDSSLQLSRQMSWIEDVKADVWTSIIAQKILNQSFYLGECSFFEKSQSIMNLYHDLEPFDPSNREGHAARIYFNTLFGNDFSREQDNPINAGLDYGYSLLLSMFAREVVKCGCMTQFGLKHANQFNQFNLASDIMEPFRPIVDRIIYENRQSDFVKMKRELFSMFSETYSYNGKEMYLSNIVSDYTKKVIKSLNSDGNGIPEFRI

SEQ ID NO: 4207 - DNA, 867 bp, Streptococcus pyogenes
atggctggttggcgtactgttgtggtaaatacccactcgaaattatcctataagaataatcatctgatttttaaggatgcctataaaacggagctgatccatttatcagaaattgatattttgttattagaaacgaccgatattgtcttgtccactatgctggtaaaacggctagtggatgagaatgtccttgtcatattctgtgatgataaacgattaccaacagctatgctgatgcctttttatggtcgtcatgattcgagtttacagcttgggaaacaaatgtcctggtcagaaacagtcaaatcgcaggtttggacgacgattattgctcaaaagattttgaatcaatcttgctatctaggagcatgctcctattttgaaaaatcccaatctattatggatttatatcatggtttggaaaattttgatccgagtaatcgagaagggcatgcagcgagaatttattttaatacactttttgggaacgatttctcaagagatttggagcatccaatcaatgcaggtctggattatggttatactttattattgagtatgtttgcgcgtgaagtggttgtgtctggatgtatgactcagtttgggcttaaacacgctaatcagtttaatcagttcaattttgctagcgatattatggaaccatttaggcctttagtggataagattgtttatgaaaatcgaaatcagccttttcccaaaataaagagagagttatttactttgttttcagatacattttcatataatggtaaagagatgtatctcacgaatattattagcgattatactaaaaaagttgtcaaagctctgaataatgaagggaaaggagttcctgaatttaggata

SEQ ID NO: 4208 - protein, 289 aa, Streptococcus pyogenes
MAGWRTVVVNTHSKLSYKNNHLIFKDAYKTELIHLSEIDILLLETTDIVLSTMLVKRLVDENVLVIFCDDKRLPTAMLMPFYGRHDSSLQLGKQMSWSETVKSQVWTTIIAQKILNQSCYLGACSYFEKSQSIMDLYHGLENFDPSNREGHAARIYFNTLFGNDFSRDLEHPINAGLDYGYTLLLSMFAREVVVSGCMTQFGLKHANQFNQFNFASDIMEPFRPLVDKIVYENRNQPFPKIKRELFTLFSDTFSYNGKEMYLTNIISDYTKKVVKALNNEGKGVPEFRI

SEQ ID NO: 4209 - DNA, 4110 bp, Streptococcus agalactiae
atgaataagccatattcaataggccttgacatcggtactaattccgtcggatggagcattattacagatgattataaagtacctgctaagaagatgagagttttagggaacactgataaagaatatattaagaagaatctcataggtgctctgctttttgatggcgggaatactgctgcagatagacgcttgaagcgaactgctcgtcgtcgttatacacgtcgtagaaatcgtattctatatttacaagaaatttttgcagaggaaatgagtaaagttgatgatagtttctttcatcgattagaggattcttttctagttgaggaagataagagagggagcaagtatcctatctttgcaacattgcaggaagagaaagattatcatgaaaaattttcgacaatctatcatttgagaaaagaattagctgacaagaaagaaaaagcagaccttcgtcttatttatattgctctagctcatatcattaaatttagagggcatttcctaattgaggatgatagctttgatgtcaggaatacagacatttcaaaacaatatcaagattttttagaaatctttaatacaacttttgaaaataatgatttgttatctcaaaacgttgacgtagaggcaatactaacagataagattagcaagtctgcgaagaaagatcgtattttagcgcagtatcctaaccaaaaatctactggcatttttgcagaatttttgaaattgattgtcggaaatcaagctgacttcaagaaatatttcaatttggaggataaaacgccgcttcaattcgctaaggatagctacgatgaagatttagaaaatcttcttggacagattggtgatgaatttgcagacttattctcagcagcgaaaaagttatatgatagtgtccttttgtctggcattcttacagtaatcgacctcagtaccaaggcgccactttcagcttctatgattcagcgttatgatgaacatagagaggacttgaaacagttaaaacaattcgtaaaagcttcattgccggaaaaatatcaagaaatatttgctgattcatcaaaagatggctacgctggttatattgaaggtaaaactaatcaagaagctttttataaatacctgtcaaaattgttgaccaagcaagaagatagcgagaattttcttgaaaaaatcaagaatgaagatttcttgagaaaacaaaggacctttgataatggctcaattccacaccaagtccatttgacagagctgaaagctattatccgccgtcaatcagaatactatcccttcttgaaagagaatcaagataggattgaaaaaatccttacctttagaattccttattatatcgggccactagcacgtgagaagagtgattttgcatggatgactcgcaaaacagatgacagtattcgaccttggaattttgaagacttggttgataaagaaaaatctgcggaagcttttatccatcgtatgaccaacaatgatttttatcttcctgaagaaaaagttttaccaaagcatagtcttatttatgaaaaatttacggtctataatgagttgactaaggttagatataaaaatgagcaaggtgagacttatttttttgatagcaatattaaacaagaaatctttgatggagtattcaaggaacatcgtaaggtatccaagaagaagttgctagattttctggctaaagaatatgaggagtttaggatagtagatgttattggtctagataaagaaaataaagctttcaacgcctcattgggaacttaccacgatctcgaaaaaatactagacaaagattttctagataatccagataatgagtctattctggaagatatcgtccaaactctaacattatttgaagacagagaaatgattaagaagcgtcttgaaaactataaagatctttttacagagtcacaactaaaaaaactctatcgtcgtcactatactggctggggacgattgtctgctaagttaatcaatggtattcgagataaagagagtcaaaaaacaatcttggactatcttattgatgatggtagatctaatcgcaactttatgcagttgataaatgatgatggtctatctttcaaatcaattatcagtaaggcacaggctggtagtcattcagataatctaaaagaagttgtaggtgagcttgcaggtagccctgctattaaaaagggaattctacaaagtttgaaaattgttgatgagcttgttaaagtcatgggatacgaacctgaacaaattgtggttgagatggcgcgtgagaatcaaacaacaaatcaaggtcgtcgtaactctcgacaacgctataaacttcttgatgatggcgttaagaatctagctagtgacttgaatggcaatattttgaaagaatatcctacggataatcaagcgttgcaaaatgaaagacttttcctttactacttacaaaacggaagagatatgtatacaggggaagctctagatattgacaatttaagtcaatatgatattgaccacattattcctcaagctttcataaaagatgattctattgataatcgtgttttggtatcatctgctaaaaatcgtggaaagtcagatgatgttcctagccttgaaattgtaaaagattgtaaagttttctggaaaaaattacttgatgctaagttaatgagtcagcgtaagtatgataatttgactaaggcagagcgcggaggcctaacttccgatgataaggcaagatttatccaacgtcagttggttgagacacgacaaattaccaagcatgttgcccgtatcttggatgaacgctttaataatgagcttgatagtaaaggtagaaggatccgcaaagttaaaattgtaaccttgaagtcaaatttggtttcaaatttccgaaaagaatttggattctataaaattcgtgaagttaacaattatcaccatgcacatgatgcctatcttaatgcagtagttgctaaagctattctaaccaaatatcctcagttagagccagaatttgtctacggcgactatccaaaatataatagttacaaaacgcgtaaatccgctacagaaaagctatttttctattcaaatattatgaacttctttaaaactaaggtaactttagcggatggaaccgttgttgtaaaagatgatattgaagttaataatgatacgggtgaaattgtttgggataaaaagaaacactttgcgacagttagaaaagtcttgtcataccctcagaacaatatcgtgaagaagacagagattcagacaggtggtttctctaaggaatcaatcttggcgcatggtaactcagataagttgattccaagaaaaacgaaggatatttatttagatcctaagaaatatggaggttttgatagtccgatagtagcttactctgttttagttgtagctgatatcaaaaagggtaaagcacaaaaactaaaaacagttacggaacttttaggaattaccatcatggagaggtccagatttgagaaaaatccatcagctttccttgaatcaaaaggctatttaaatattagggctgataaactaattattttgcccaagtatagtctgttcgaattagaaaatgggcgtcgtcgattacttgctagtgctggtgaattacaaaaaggtaatgagctagccttaccaacacaatttatgaagttcttataccttgcaagtcgttataatgagtcaaaaggtaaaccagaggagattgagaagaaacaagaatttgtaaatcaacatgtctcttattttgatgacatccttcaattaattaatgatttttcaaaacgagttattctagcagatgctaatttagagaaaatcaataagctttaccaagataataaggaaaatatatcagtagatgaacttgctaataatattatcaatctatttacttttaccagtctaggagctccagcagcttttaaattttttgataaaatagttgatagaaaacgctatacatcaactaaagaagtacttaattctaccctaattcatcaatctattactggactttatgaaacacgtattgatttgggtaagttaggagaagat

SEQ ID NO: 4210 - protein, 1370 aa, Streptococcus agalactiae
MNKPYSIGLDIGTNSVGWSIITDDYKVPAKKMRVLGNTDKEYIKKNLIGALLFDGGNTAADRRLKRTARRRYTRRRNRILYLQEIFAEEMSKVDDSFFHRLEDSFLVEEDKRGSKYPIFATLQEEKDYHEKFSTIYHLRKELADKKEKADLRLIYIALAHIIKFRGHFLIEDDSFDVRNTDISKQYQDFLEIFNTTFENNDLLSQNVDVEAILTDKISKSAKKDRILAQYPNQKSTGIFAEFLKLIVGNQADFKKYFNLEDKTPLQFAKDSYDEDLENLLGQIGDEFADLFSAAKKLYDSVLLSGILTVIDLSTKAPLSASMIQRYDEHREDLKQLKQFVKASLPEKYQEIFADSSKDGYAGYIEGKTNQEAFYKYLSKLLTKQEDSENFLEKIKNEDFLRKQRTFDNGSIPHQVHLTELKAIIRRQSEYYPFLKENQDRIEKILTFRIPYYIGPLAREKSDFAWMTRKTDDSIRPWNFEDLVDKEKSAEAFIHRMTNNDFYLPEEKVLPKHSLIYEKFTVYNELTKVRYKNEQGETYFFDSNIKQEIFDGVFKEHRKVSKKKLLDFLAKEYEEFRIVDVIGLDKENKAFNASLGTYHDLEKILDKDFLDNPDNESILEDIVQTLTLFEDREMIKKRLENYKDLFTESQLKKLYRRHYTGWGRLSAKLINGIRDKESQKTILDYLIDDGRSNRNFMQLINDDGLSFKSIISKAQAGSHSDNLKEVVGELAGSPAIKKGILQSLKIVDELVKVMGYEPEQIVVEMARENQTTNQGRRNSRQRYKLLDDGVKNLASDLNGNILKEYPTDNQALQNERLFLYYLQNGRDMYTGEALDIDNLSQYDIDHIIPQAFIKDDSIDNRVLVSSAKNRGKSDDVPSLEIVKDCKVFWKKLLDAKLMSQRKYDNLTKAERGGLTSDDKARFIQRQLVETRQITKHVARILDERFNNELDSKGRRIRKVKIVTLKSNLVSNFRKEFGFYKIREVNNYHHAHDAYLNAVVAKAILTKYPQLEPEFVYGDYPKYNSYKTRKSATEKLFFYSNIMNFFKTKVTLADGTVVVKDDIEVNNDTGEIVWDKKKHFATVRKVLSYPQNNIVKKTEIQTGGFSKESILAHGNSDKLIPRKTKDIYLDPKKYGGFDSPIVAYSVLVVADIKKGKAQKLKTVTELLGITIMERSRFEKNPSAFLESKGYLNIRADKLIILPKYSLFELENGRRRLLASAGELQKGNELALPTQFMKFLYLASRYNESKGKPEEIEKKQEFVNQHVSYFDDILQLINDFSKRVILADANLEKINKLYQDNKENISVDELANNIINLFTFTSLGAPAAFKFFDKIVDRKRYTSTKEVLNSTLIHQSITGLYETRIDLGKLGED

SEQ ID NO: 4211 - DNA, 4104 bp, Streptococcus pyogenes
atggataagaaatactcaataggcttagatatcggcacaaatagcgtcggatgggcggtgatcactgatgaatataaggttccgtctaaaaagttcaaggttctgggaaatacagaccgccacagtatcaaaaaaaatcttataggggctcttttatttgacagtggagagacagcggaagcgactcgtctcaaacggacagctcgtagaaggtatacacgtcggaagaatcgtatttgttatctacaggagattttttcaaatgagatggcgaaagtagatgatagtttctttcatcgacttgaagagtcttttttggtggaagaagacaagaagcatgaacgtcatcctatttttggaaatatagtagatgaagttgcttatcatgagaaatatccaactatctatcatctgcgaaaaaaattggtagattctactgataaagcggatttgcgcttaatctatttggccttagcgcatatgattaagtttcgtggtcattttttgattgagggagatttaaatcctgataatagtgatgtggacaaactatttatccagttggtacaaacctacaatcaattatttgaagaaaaccctattaacgcaagtggagtagatgctaaagcgattctttctgcacgattgagtaaatcaagacgattagaaaatctcattgctcagctccccggtgagaagaaaaatggcttatttgggaatctcattgctttgtcattgggtttgacccctaattttaaatcaaattttgatttggcagaagatgctaaattacagctttcaaaagatacttacgatgatgatttagataatttattggcgcaaattggagatcaatatgctgatttgtttttggcagctaagaatttatcagatgctattttactttcagatatcctaagagtaaatactgaaataactaaggctcccctatcagcttcaatgattaaacgctacgatgaacatcatcaagacttgactcttttaaaagctttagttcgacaacaacttccagaaaagtataaagaaatcttttttgatcaatcaaaaaacggatatgcaggttatattgatgggggagctagccaagaagaattttataaatttatcaaaccaattttagaaaaaatggatggtactgaggaattattggtgaaactaaatcgtgaagatttgctgcgcaagcaacggacctttgacaacggctctattccccatcaaattcacttgggtgagctgcatgctattttgagaagacaagaagacttttatccatttttaaaagacaatcgtgagaagattgaaaaaatcttgacttttcgaattccttattatgttggtccattggcgcgtggcaatagtcgttttgcatggatgactcggaagtctgaagaaacaattaccccatggaattttgaagaagttgtcgataaaggtgcttcagctcaatcatttattgaacgcatgacaaactttgataaaaatcttccaaatgaaaaagtactaccaaaacatagtttgctttatgagtattttacggtttataacgaattgacaaaggtcaaatatgttactgaaggaatgcgaaaaccagcatttctttcaggtgaacagaagaaagccattgttgatttactcttcaaaacaaatcgaaaagtaaccgttaagcaattaaaagaagattatttcaaaaaaatagaatgttttgatagtgttgaaatttcaggagttgaagatagatttaatgcttcattaggtacctaccatgatttgctaaaaattattaaagataaagattttttggataatgaagaaaatgaagatatcttagaggatattgttttaacattgaccttatttgaagatagggagatgattgaggaaagacttaaaacatatgctcacctctttgatgataaggtgatgaaacagcttaaacgtcgccgttatactggttggggacgtttgtctcgaaaattgattaatggtattagggataagcaatctggcaaaacaatattagattttttgaaatcagatggttttgccaatcgcaattttatgcagctgatccatgatgatagtttgacatttaaagaagacattcaaaaagcacaagtgtctggacaaggcgatagtttacatgaacatattgcaaatttagctggtagccctgctattaaaaaaggtattttacagactgtaaaagttgttgatgaattggtcaaagtaatggggcggcataagccagaaaatatcgttattgaaatggcacgtgaaaatcagacaactcaaaagggccagaaaaattcgcgagagcgtatgaaacgaatcgaagaaggtatcaaagaattaggaagtcagattcttaaagagcatcctgttgaaaatactcaattgcaaaatgaaaagctctatctctattatctccaaaatggaagagacatgtatgtggaccaagaattagatattaatcgtttaagtgattatgatgtcgatcacattgttccacaaagtttccttaaagacgattcaatagacaataaggtcttaacgcgttctgataaaaatcgtggtaaatcggataacgttccaagtgaagaagtagtcaaaaagatgaaaaactattggagacaacttctaaacgccaagttaatcactcaacgtaagtttgataatttaacgaaagctgaacgtggaggtttgagtgaacttgataaagctggttttatcaaacgccaattggttgaaactcgccaaatcactaagcatgtggcacaaattttggatagtcgcatgaatactaaatacgatgaaaatgataaacttattcgagaggttaaagtgattaccttaaaatctaaattagtttctgacttccgaaaagatttccaattctataaagtacgtgagattaacaattaccatcatgcccatgatgcgtatctaaatgccgtcgttggaactgctttgattaagaaatatccaaaacttgaatcggagtttgtctatggtgattataaagtttatgatgttcgtaaaatgattgctaagtctgagcaagaaataggcaaagcaaccgcaaaatatttcttttactctaatatcatgaacttcttcaaaacagaaattacacttgcaaatggagagattcgcaaacgccctctaatcgaaactaatggggaaactggagaaattgtctgggataaagggcgagattttgccacagtgcgcaaagtattgtccatgccccaagtcaatattgtcaagaaaacagaagtacagacaggcggattctccaaggagtcaattttaccaaaaagaaattcggacaagcttattgctcgtaaaaaagactgggatccaaaaaaatatggtggttttgatagtccaacggtagcttattcagtcctagtggttgctaaggtggaaaaagggaaatcgaagaagttaaaatccgttaaagagttactagggatcacaattatggaaagaagttcctttgaaaaaaatccgattgactttttagaagctaaaggatataaggaagttaaaaaagacttaatcattaaactacctaaatatagtctttttgagttagaaaacggtcgtaaacggatgctggctagtgccggagaattacaaaaaggaaatgagctggctctgccaagcaaatatgtgaattttttatatttagctagtcattatgaaaagttgaagggtagtccagaagataacgaacaaaaacaattgtttgtggagcagcataagcattatttagatgagattattgagcaaatcagtgaattttctaagcgtgttattttagcagatgccaatttagataaagttcttagtgcatataacaaacatagagacaaaccaatacgtgaacaagcagaaaatattattcatttatttacgttgacgaatcttggagctcccgctgcttttaaatattttgatacaacaattgatcgtaaacgatatacgtctacaaaagaagttttagatgccactcttatccatcaatccatcactggtctttatgaaacacgcattgatttgagtcagctaggaggtgac

SEQ ID NO: 4212 - protein, 1368 aa, Streptococcus pyogenes [sequence omitted]

SEQ ID NO: 4213 - DNA, 669 bp, Streptococcus agalactiae
atgaatggacatttaatgaaggataagttattagtagttttaacttggatttggattatatcgttagcaactctagctacaatttatattgcttggttgatctatcctatagaaattcagtttttaaaattagaaaaggttgtgtatttaaaggctgaaacaatttattataattttaataagttgatgatatatctgactcatccttttatctctgatttaaatatgcccagctttccttcttcagaggatggtttaaagcattttgcggatgtaaaatatctttttactctagcgcatgggctttttgttatactaacttttccagttatttattttttaagacgtggatggaagcaaaaaagtatctttctatatgaaggctttttcaagatagctattatgttgcctatttttattgtagtatgtgcctttctgttgggttttgaccagtttttcactctatttcatgaggtgctttttccaggagattctacttggcaatttaatcctctaacggatccagtaatttggatacttcctgaaacttttttcctccattgtttcatcatttttttgttaatctatgaaacaataactataattcttttgataataggtagaaaacatttaaaattaagaaaatataaaaacaaaatgcaagcctta

SEQ ID NO: 4214 - protein, 223 aa, Streptococcus agalactiae
MNGHLMKDKLLVVLTWIWIISLATLATIYIAWLIYPIEIQFLKLEKVVYLKAETIYYNFNKLMIYLTHPFISDLNMPSFPSSEDGLKHFADVKYLFTLAHGLFVILTFPVIYFLRRGWKQKSIFLYEGFFKIAIMLPIFIVVCAFLLGFDQFFTLFHEVLFPGDSTWQFNPLTDPVIWILPETFFLHCFIIFLLIYETITIILLIIGRKHLKLRKYKNKMQAL

SEQ ID NO: 4215 - DNA, 642 bp, Streptococcus pyogenes
gtggaggttgtgatggtagaaaacactaaattactatgtagctgggtatggttattagcgttagctattctcataacgatctattcaacgtggctgtggtatcctcttgaggtggaccatctaaagttagaacaagttgtttttatgagcaaggatgctatcttgcataactataacggactactcaattacctcaccaatccttttgtgacaaggttggaatttgctaattttcactcatcggcagacggactcaagcattttgcagatgtgaagtggctttttcacctaactcaagtcgtttttcttggccttctttacccaacccttaagactttcacacaaaggttaaaaaccaaacgtttctggctccttcaaaaacctttaatactagcagctttgtttcctcttatgattggtctaatggctagtttcattgggtttgaacatttttttactctttttcatcaggtgctttttgtaggagatagcagctggctctttgatcccttgaaagattctgtgatttggatccttccagaagtctttttcttgcactgtttccttttctttatgatagtttacgaaatcatcctgtggagcttagtaggtttagcaagatggcagcgcctaaatgtagaa

SEQ ID NO: 4216 - protein, 214 aa, Streptococcus pyogenes
VEVVMVENTKLLCSWVWLLALAILITIYSTWLWYPLEVDHLKLEQVVFMSKDAILHNYNGLLNYLTNPFVTRLEFANFHSSADGLKHFADVKWLFHLTQVVFLGLLYPTLKTFTQRLKTKRFWLLQKPLILAALFPLMIGLMASFIGFEHFFTLFHQVLFVGDSSWLFDPLKDSVIWILPEVFFLHCFLFFMIVYEIILWSLVGLARWQRLNVE

SEQ ID NO: 4217 - DNA, 768 bp, Streptococcus agalactiae
atggcttataaaggatatcttattgatttagatggtactatttacaaagggaaaagtcgtatcccagcaggagagcgttttatcgaacgtttgcaagaaaaaggcattccttatatgttagtaactaataatacgactcgtacaccagaaagcgttcaggaaatgcttcgaggcttcaatgttgaaacaccacttgaaacaatctataccgcaactatggctacggttgactatatgaatgatatgaaccgtggaaaaacagcttacgttattggtgaagaagggcttaaaaaagctattgcagatgcaggttatgtggaggatacaaaaaatccagcctatgtggttgttggtttagattggaatgttacttatgataaattggcaactgctacgttagcaattcaaaatggtgctttatttattggaaccaatccagatttgaatattcctactgaacgtggtttattacccggtgctggctccttaaatgctttattagaagccgcaacgcgtataaaaccagtctttattggaaagccaaatgccatcattatgaataaggcacttgaaattttaaatattcctagaaatcaagcagtcatggtcggtgataattatttgacagatatcatggctggtattaataatgatattgatactttgttagtaacaacgggttttacaacagttgaagaagtaccagatttaccaattcaaccaagttatgttttagcaagtttagatgaatggacatttaatgaagga

SEQ ID NO: 4218 - protein, 256 aa, Streptococcus agalactiae
MAYKGYLIDLDGTIYKGKSRIPAGERFIERLQEKGIPYMLVTNNTTRTPESVQEMLRGFNVETPLETIYTATMATVDYMNDMNRGKTAYVIGEEGLKKAIADAGYVEDTKNPAYVVVGLDWNVTYDKLATATLAIQNGALFIGTNPDLNIPTERGLLPGAGSLNALLEAATRIKPVFIGKPNAIIMNKALEILNIPRNQAVMVGDNYLTDIMAGINNDIDTLLVTTGFTTVEEVPDLPIQPSYVLASLDEWTFNEG

SEQ ID NO: 4219 - DNA, 762 bp, Streptococcus pyogenes
gtgccttataagggttatttaattgatttagacggaacgatttaccaagggaaaaaccgtattccagcaggggagcggtttatcaaacgcctacaagaaagaggcattccctatttattagtgactaataataccacaagaacacccgaaatggtgcaaagcatgctggctaatcagtttcatgttgagacaagcattgagaccatttatacggctaccatggcaaccgtcgattacatgaatgacatgaaccgtggcaagacagcttacgttattggagaaacagggctcaaatcagctattgcagcagcaggttacgtagaagaacttgagaatcccgcttacgtggtggttggtttagacagtcaggtgacctatgagatgttggctatagccaccttggctattcaaaaaggtgccctctttattgggacaaatcctgatttaaacattccaaccgaacgtggtttgatgccaggagcaggtgcattgaatgccttactagaagctgccacacgtgtaaaacctgtttttattggcaagcccaacgctatcattatgaataaatcactagaggtattgggcattcagcgctctgaggctgtcatggttggcgataattacttgactgatatcatggcaggtattcaaaatgatattgcaacgatcctcgtgacaacaggctttaccagacctgaagaggtaccaaccttaccaattcagccagatcatgtcctatccagccttgatgagtggaggttg

SEQ ID NO: 4220 - protein, 254 aa, Streptococcus pyogenes
VPYKGYLIDLDGTIYQGKNRIPAGERFIKRLQERGIPYLLVTNNTTRTPEMVQSMLANQFHVETSIETIYTATMATVDYMNDMNRGKTAYVIGETGLKSAIAAAGYVEELENPAYVVVGLDSQVTYEMLAIATLAIQKGALFIGTNPDLNIPTERGLMPGAGALNALLEAATRVKPVFIGKPNAIIMNKSLEVLGIQRSEAVMVGDNYLTDIMAGIQNDIATILVTTGFTRPEEVPTLPIQPDHVLSSLDEWRL

SEQ ID NO: 4221 - DNA, 735 bp, Streptococcus agalactiae
atgggtttattatatcgagaaacttacgaagtgcctttttatgaatcagacactaatcattatatgaaattaccgcagttgttggctttagcgttacaaatttcagccaaacaatctttaaaattaggaataggcgatgacatcgtttttaaaagatacggattggtttgggtcgttacagattatattattgatattgagcgtttacccaagcatgctgaaaagatagtcattgagactgaagccaaagctcataataaattattgtgttaccgctatttttatatttatggtgaagacgggcaaaaaataataacgatttcatctgcttttgtcttaatggattttaaaacacggaagattcatcctgttcttgatgatattacttcaatttaccaatcccaaagaatcaaaaaagttattcgagggccgaaatatcatcccattggagatagtaaagttaaacaataccatgttcgttattttgatttagatatgaatggacatgttaataatagtaagtatctagaatggatgtatgatgtgttggacttagattttctaagtagccacattcctaaaaaaattgatttaaaatatattaaggaaattcaatatggaacggatattaagtctcattggtatcaagatggtcttgtgacacgtcatgatattattggtggcgatgctattcatgctcaagctaggattgaatggcaggaaaaaaaggaggat

SEQ ID NO: 4222 - protein, 245 aa, Streptococcus agalactiae
MGLLYRETYEVPFYESDTNHYMKLPQLLALALQISAKQSLKLGIGDDIVFKRYGLVWVVTDYIIDIERLPKHAEKIVIETEAKAHNKLLCYRYFYIYGEDGQKIITISSAFVLMDFKTRKIHPVLDDITSIYQSQRIKKVIRGPKYHPIGDSKVKQYHVRYFDLDMNGHVNNSKYLEWMYDVLDLDFLSSHIPKKIDLKYIKEIQYGTDIKSHWYQDGLVTRHDIIGGDAIHAQARIEWQEKKED

SEQ ID NO: 4223 - DNA, 567 bp, Streptococcus pyogenes
atgagatcactattcatcgcttgccacattttcaagaaaccatcaccattgaaacaaaagccctttcctataataaatttttttgttatcgccaattttatatttatgatcaagagggggggtcttttagtggatatcttagcctattttgctttgttaaacccagatacgcgaaaagtggcaactattccagaagatttagtagcgccatttgagactgattttgttaaaaagctacaccgtgttcctaaaatgcctcttttagaacaatcaattgatcgtgattattatgtgcgttattttgatattgatatgaatggtcatgtcaacaacagtaaatatttagattggatgtatgatgtgttggggtgtgagtttttaaaaacgcatcagcctcttaagatgactttgaaatatgttaaagaagtctcaccaggcggtcaaattacttccagttaccatttggaccaattaacttcttaccatcaaatcacctcagatgggcagctgaatgcccaagccatgattgaatggcgagcgattaaacaaacagaaagcgagacagac

SEQ ID NO: 4224 - protein, 189 aa, Streptococcus pyogenes
MRSLFIACHIFKKPSPLKQKPFPIINFFVIANFIFMIKRGGLLVDILAYFALLNPDTRKVATIPEDLVAPFETDFVKKLHRVPKMPLLEQSIDRDYYVRYFDIDMNGHVNNSKYLDWMYDVLGCEFLKTHQPLKMTLKYVKEVSPGGQITSSYHLDQLTSYHQITSDGQLNAQAMIEWRAIKQTESETD

SEQ ID NO: 4225 - DNA, 1128 bp, Streptococcus agalactiae
atgttaaagaaaccaacctcagcatatgtacacattccattttgtacccaaatatgttattattgtgatttttcaaaagtttttattaaaaatcagcctgtagacgcttatcttcaggctcttatccgtgaatttcggtcttatgatattacagaattgcgcaccttatatattggaggagggacacctacatctataagcgctgtgcaactggactatttattgacggagttaagtagagatttaaacttaaatactttagaggagttcactatcgaagctaatccaggagatttaaccgttgataaaatagaggtgcttcaaaagtcagctgtcaatagagtttctctaggagttcagacctttaatgataaacatttaaagcgtattggacgcagtcacaatgaggcacaaatttattctacaattgatgctcttaaaacagctggttttcaaaatatctctattgacctaatttatgccttacctggacaaacgatggatgatgttagaagtaatgtagccaaagctctctctctaaatattcctcatttgagtttatatagtttaattttagaacaccatactgtatttatgaataaaatgcgtcgtgggaaattacatttgccaacagaagatttagaagccgagatgtttgaatatatcatttctgaaatggaaagaaatggttttgagcattatgaaatttctaattttacaaagccgggttttgaaagtcgtcataatttgatgtactgggataatgtagaatattatggtgttggtgcaggcgcttctggttatcttgatggtattcgttatcgtaatagagggccaatacaacattatctaaagggggtttcagaaggtaatgcaaggttatctgaagaagtattatcaaaaaatgaaatgatggaagaggagcttttcctcggtcttcgtaaaaaagagggtgtttccatcggaaaatttgaacaaaaatttggaacgtcctttgagaaacgttacggtcagattgttcaagaactccaaagtgatgggcttttgaaagaaaataatggttttatccagatgactaaaaaaggtctcttcttaggagatacggttgccgagaaatttattgtggag

SEQ ID NO: 4226 - protein, 376 aa, Streptococcus agalactiae
MLKKPTSAYVHIPFCTQICYYCDFSKVFIKNQPVDAYLQALIREFRSYDITELRTLYIGGGTPTSISAVQLDYLLTELSRDLNLNTLEEFTIEANPGDLTVDKIEVLQKSAVNRVSLGVQTFNDKHLKRIGRSHNEAQIYSTIDALKTAGFQNISIDLIYALPGQTMDDVRSNVAKALSLNIPHLSLYSLILEHHTVFMNKMRRGKLHLPTEDLEAEMFEYIISEMERNGFEHYEISNFTKPGFESRHNLMYWDNVEYYGVGAGASGYLDGIRYRNRGPIQHYLKGVSEGNARLSEEVLSKNEMMEEELFLGLRKKEGVSIGKFEQKFGTSFEKRYGQIVQELQSDGLLKENNGFIQMTKKGLFLGDTVAEKFIVE

SEQ ID NO: 4227 - DNA, 1224 bp, Streptococcus pyogenes
ttgtcagctcgtaaaatacttttccaagccatgaagaatcaagggaaatggtttattcatagaaacattttatcatcaaagtggtataataagaccatgtcaaaaaaacctacttcagcctatgtgcacattcctttttgcacacaaatttgttattattgcgatttttcaaaagtctttatccaaaatcaacctgttgatgcttatttgaaagccttgattcaagaatttgactcttatggcattcgagacctaaaaaccctttatattggaggaggtacgcctacagctatcactgctaaacagttggagtatctcctaaatcaccttgaacgaaacctcaatttagatgatcttgaagaattcacaattgaggcaaatcctggtgatttgacgccagaaaaaattgcggtgcttcagaggtcagctgtcaatcggatttccttgggggtgcagacttttaataacaagcaattaaagcagattggccgtagccataatgaagaacaaatttatagcaccattgccaatttaaaaactgcaggctttcacaatatttccattgatttaatttatgccttgccaggtcaaaccttagatcaagtcaaggaaaatgttgctaaagctttggcacttgatattccccaccttagtctttatagccttattttggaacatcacactgtttttatgaacaaaatgcgacgtggtaaacttaacttaccaacggaagacttggaagcggaaatgtttgagtacattatttcagaaatggaagctaatggttttgagcattatgaaatttccaattttaccaaaccaggttttgaaagtcgccataacttgatgtattgggataatgtggagtattttggatgtggtgcaggggcttcaggttaccttaatggcattcgttatcagaatcgggtgcccatccagcattatcttaaagcggttgaagcagggaatgctagactaaatgaagaagtgctgcgcaaagaggaaatgatggaagaggaactctttttgggcttacgtaaaaagacaggagtctccatccagcggttccaagaaaaatttggtatgtcttttgaggagcgttatggaaatattgttagggagcttcaaaaccaaggactgcttgtcaaagatgacgcctttgtcagaatgactaaaaagggtcttttcttaggtgattctgttgctgagcggtttatattagat

SEQ ID NO: 4228 - protein, 408 aa, Streptococcus pyogenes
LSARKILFQAMKNQGKWFIHRNILSSKWYNKTMSKKPTSAYVHIPFCTQICYYCDFSKVFIQNQPVDAYLKALIQEFDSYGIRDLKTLYIGGGTPTAITAKQLEYLLNHLERNLNLDDLEEFTIEANPGDLTPEKIAVLQRSAVNRISLGVQTFNNKQLKQIGRSHNEEQIYSTIANLKTAGFHNISIDLIYALPGQTLDQVKENVAKALALDIPHLSLYSLILEHHTVFMNKMRRGKLNLPTEDLEAEMFEYIISEMEANGFEHYEISNFTKPGFESRHNLMYWDNVEYFGCGAGASGYLNGIRYQNRVPIQHYLKAVEAGNARLNEEVLRKEEMMEEELFLGLRKKTGVSIQRFQEKFGMSFEERYGNIVRELQNQGLLVKDDAFVRMTKKGLFLGDSVAERFILD

SEQ ID NO: 4229 - DNA, 378 bp, Streptococcus agalactiae
atgagattatggcatcaagatattattgagttattgcctaggcagcaacttttaggacagcatagagagtgttgtgcattgagagggaatgggtgggggagaaaacatgagactgttgattatgtttttcgatattcaccttataggttatttgcatatcatcaattagttatggaagaaatgatggagcgtgggtatcgtgtatctaaagaatggctaattgcagaatataggggaatgaagtgcccaagatatgatacacttaatcctgttgacttggagacacctatctatcccgagcacaatcaagactatctacaagaatgtctatggaatttaaaagcaaaaggaattgaccttcctataaataagataaaa

SEQ ID NO: 4230 - protein, 126 aa, Streptococcus agalactiae
MRLWHQDIIELLPRQQLLGQHRECCALRGNGWGRKHETVDYVFRYSPYRLFAYHQLVMEEMMERGYRVSKEWLIAEYRGMKCPRYDTLNPVDLETPIYPEHNQDYLQECLWNLKAKGIDLPINKIK

SEQ ID NO: 4231 - DNA, 369 bp, Streptococcus agalactiae
atgactaaagaagcagaattattatgggctaaacacaagtatttagtcttaagtaaatctcagaaaatttatttggatattagacaaactttgaaatcaccaaattgtaccgttttagacgttcagtcactcattgaccaagcagtgcttttagaagaatcaccatcacaagtgactaatgcttatatgcatatatggggctattttaaaaataaggcagagcgtcaagaaaaagaagaatttttaaccttgctggaaaaatacaggaaaacaggttatcaacgaagaaaactgttagcttttctaaaacagctattagctaaatacccaaattcttatttacaaaactcttctattttcgaagaagag

SEQ ID NO: 4232 - protein, 123 aa, Streptococcus agalactiae
MTKEAELLWAKHKYLVLSKSQKIYLDIRQTLKSPNCTVLDVQSLIDQAVLLEESPSQVTNAYMHIWGYFKNKAERQEKEEFLTLLEKYRKTGYQRRKLLAFLKQLLAKYPNSYLQNSSIFEEE

SEQ ID NO: 4233 - DNA, 384 bp, Streptococcus pyogenes
atgtctgatgctagtttgaaaacttaccaaaaacaatgggcttatcaaaagtattgggtcatggcacactcacagcagcattacaatgctttaagagaattgtttaaaggaaatcagtggtcagaagaaaaggtgttgacttttcattgtttgattgaagaagcgcaagccattcctcccacagtaaaaagcttacgaacggcatatcagcatgtttgggggtattttaaaaaggtagcgagtcaggaagaaaaagaccatttcaaagatttggatgctcagttggaaactaaatctgaggagatgctatgctttttacaagagatgactgctcattatcagccctcttatctgctatcttgccgtttgattaccaaaggtcct

SEQ ID NO: 4234 - protein, 128 aa, Streptococcus pyogenes
MSDASLKTYQKQWAYQKYWVMAHSQQHYNALRELFKGNQWSEEKVLTFHCLIEEAQAIPPTVKSLRTAYQHVWGYFKKVASQEEKDHFKDLDAQLETKSEEMLCFLQEMTAHYQPSYLLSCRLITKGP

SEQ ID NO: 4235 - DNA, 1350 bp, Streptococcus agalactiae
atgggaaaatattttggtacagatggtgttcgcggtgaagctaatgttgaactgacgccagaattggcttttaaattaggacgttttggaggatatgttctaagtcaacacgaaactgatcgtccgagagtttttgtagctcgtgatactcgtatttctggtgaaatgctggaatctgctttgattgctggtctactttcagtaggtattgaggtttataaacttggtgttttagccactcctggagtgtcttaccttgtccgtacagaaaaagctagtgcaggggttatgatttcagcaagccacaatccagcacttgataatggtattaagttctttggtagtgatggttttaaacttgatgatgatcgtgaattagaaattgaagctttacttgatgcgaaggaagacactttaccacgtccatcagcacaaggtttaggtactttagtagattatcctgaaggacttcggaaatatgagaagtttatggaatcaactggtattgatttagaaggtatgaaggttgcgttggatacagcaaatggagcagcaacagcctcagctcggaatatctttttagacttgaatgctgatataagtgttattggtgatcaaccagatggtttgaatatcaatgatggtgttggttcgacacatcctgagcaattacaaagtttagttagagaaaatggttccgacatcggtctagcttttgatggtgatagtgatcgtttgatcgctgttgatgaaaatggagagattgtagatggtgataaaattatgtttatcattgggaaatatctctctgataaagggcagcttgctcagaatacaatcgtaacaacggttatgtcaaatctcggctttcataaagcgctcgaccgtgaaggaattcataaagcgattaccgctgtaggagaccgctacgtggttgaagaaatgcgtaaatcaggatataatcttggcggagagcaatcaggccacgttattatcatggattacaatactacaggggatggacaattaacagccatccaattgactaaggtcatgaaagaaactggtaagaaattatcagagttagctagtgaagtgacgatttatcctcaaaaattagtaaatattcgtgttgaaaataacatgaaagataaagcgatggaagttcctgcaattgcggaaattattgctaaaatggaagaagagatggatggcaatggtcgtattctagtacgtcctagtggtactgagcctcttcttagagttatggcagaagcgccaacaaatgaagcggttgattattatgttgatactatcgcagatgtcgttcgtacagaaattggtttagat

SEQ ID NO: 4236 - protein, 450 aa, Streptococcus agalactiae
MGKYFGTDGVRGEANVELTPELAFKLGRFGGYVLSQHETDRPRVFVARDTRISGEMLESALIAGLLSVGIEVYKLGVLATPGVSYLVRTEKASAGVMISASHNPALDNGIKFFGSDGFKLDDDRELEIEALLDAKEDTLPRPSAQGLGTLVDYPEGLRKYEKFMESTGIDLEGMKVALDTANGAATASARNIFLDLNADISVIGDQPDGLNINDGVGSTHPEQLQSLVRENGSDIGLAFDGDSDRLIAVDENGEIVDGDKIMFIIGKYLSDKGQLAQNTIVTTVMSNLGFHKALDREGIHKAITAVGDRYVVEEMRKSGYNLGGEQSGHVIIMDYNTTGDGQLTAIQLTKVMKETGKKLSELASEVTIYPQKLVNIRVENNMKDKAMEVPAIAEIIAKMEEEMDGNGRILVRPSGTEPLLRVMAEAPTNEAVDYYVDTIADVVRTEIGLD

SEQ ID NO: 4237 - DNA, 1353 bp, Streptococcus pyogenes
atgggaaaatattttggaacagatggtgttcgtggcgaagcaaatgttgagctgacacctgagttagcttttaaactgggccgattcggtggttatgttttaagtcaacatgagaccgaaagacctaaagtttttgtggcgcgtgacacccgtatttcaggagaaatgttggagtcagccttgattgctggtctactatctgttggtattgaagtttataaacttggcgttttagcgacacctggtgtctcttatttagttagaacagaaaaagcaagtgcaggtgtgatgatttctgcaagtcataaccctgcgcttgacaatggcatcaaattctttgggaatgatgggtttaagttagctgatgaccaagaattggaaattgaagctctcttagatgctccggaggacacgcttcctcgcccgagtgcagaaggacttggaaccttggtagattatccagaaggacttcgtaaatatgaaaagttcttggtaacaactggtactgacttaagcggtatgacagttgccttagacactgctaatggagctgcttcagtgtcagcacgtgatgtctttttagatttaaatgcagaaattgctgtcattggtgaaaaaccaaatggtcttaatattaatgacggtgttggttcaacgcgtccagaacaacttcaagagttagttaaggaaacaggagcagatcttggtttagcctttgatggcgatagcgaccgtctgattgctgtggacgaaactggcgagattgttgacggtgatcgtattatgtttatcattggtaaatatttgtcagaaaaagggcttcttgctcacaataccattgtcacaacggtgatgtctaacctcggttttcataaagctttagataaacaaggtattaataaagcaattacagcagttggagaccgctatgtggttgaagaaatgcgtagctcaggatacaatctcggtggtgaacaatcaggccatgtcattatcatggactacaataccactggagatggtcagttgacagctatccaattagccaaggtgatgaaggaaactggaaaatcactttcggaattagctgctgaagtaaccatttaccctcaaaaactggtgaatattcgtgtggaaaacagcatgaaagaacgtgctatggaagttccagctattgcgaacatcattgcaaaaatggaggatgaaatggctggtaatggtcgtattctcgtgagaccaagtggtacagaacctcttcttcgtgtcatggcagaggcgccaacagatgccgaagttgattattatgtcgatactattgctgatgtcgtccgtacagaaatcggatgcgataac

SEQ ID NO: 4238 - protein, 451 aa, Streptococcus pyogenes
MGKYFGTDGVRGEANVELTPELAFKLGRFGGYVLSQHETERPKVFVARDTRISGEMLESALIAGLLSVGIEVYKLGVLATPGVSYLVRTEKASAGVMISASHNPALDNGIKFFGNDGFKLADDQELEIEALLDAPEDTLPRPSAEGLGTLVDYPEGLRKYEKFLVTTGTDLSGMTVALDTANGAASVSARDVFLDLNAEIAVIGEKPNGLNINDGVGSTRPEQLQELVKETGADLGLAFDGDSDRLIAVDETGEIVDGDRIMFIIGKYLSEKGLLAHNTIVTTVMSNLGFHKALDKQGINKAITAVGDRYVVEEMRSSGYNLGGEQSGHVIIMDYNTTGDGQLTAIQLAKVMKETGKSLSELAAEVTIYPQKLVNIRVENSMKERAMEVPAIANIIAKMEDEMAGNGRILVRPSGTEPLLRVMAEAPTDAEVDYYVDTIADVVRTEIGCDN

SEQ ID NO: 4239 - DNA, 957 bp, Streptococcus agalactiae
atgaaaaaattttttacaaataaattttggttaggcgttgtctcactctttctggctattttattatttttaacggcaactgcaacaagtatgaaccatcaagacaatagtaagattgcaggagcgtctgagacatatacacataccctaacagatgtgccaatagacatcaaatacgatagtgatgattactttattagtggatattcttatggggcagatgtctatatgtcatcggttaatcgtgttaagttagattctgaaataaatgaggatacacgaaaatttaaagtagtcgccgatttgacaaatatgaaaccagggactcacaaagtcccactaaaggtagtaaatttgccatctggtgtaaatgctacggtttctccaacaacaattacagtaactatgggtaaaaagaaaacaaaagagtttccggtttatggacatgttaatgataagcaaattaaagctggttatgcagtcgataagatgtcagttgatgtgtcaaaagttaaagttactagtgatgaatctattatagatcgtattgaccatgtcgctgccaatatccctgatgataaagttcttgatgatgattttaacaagacagttactttacaagctgtaacagcagatggtacagtattagcaagtattattcacccttctaaagcaactttatctgtcaaagtaaaaaaattgaccaagacagtaccgattaatttgataccagtaggacaattcagcgatagtatttcaaaaattaactacaagttgagtcaagaaaaagcagtaatttcaggaacaaaagaggctttagaagctatttctgttattaatgctgaggtagatatttcagacgtaactaaaaatacagaaaagaaaattaatctttctgcaaacaatgtttcagttgatcctgctcaagtaacagttcaattgacaactactaaaaaa

SEQ ID NO: 4240 - protein, 319 aa, Streptococcus agalactiae
MKKFFTNKFWLGVVSLFLAILLFLTATATSMNHQDNSKIAGASETYTHTLTDVPIDIKYDSDDYFISGYSYGADVYMSSVNRVKLDSEINEDTRKFKVVADLTNMKPGTHKVPLKVVNLPSGVNATVSPTTITVTMGKKKTKEFPVYGHVNDKQIKAGYAVDKMSVDVSKVKVTSDESIIDRIDHVAANIPDDKVLDDDFNKTVTLQAVTADGTVLASIIHPSKATLSVKVKKLTKTVPINLIPVGQFSDSISKINYKLSQEKAVISGTKEALEAISVINAEVDISDVTKNTEKKINLSANNVSVDPAQVTVQLTTTKK

SEQ ID NO: 4241 - DNA, 954 bp, Streptococcus pyogenes
atgaaacgatttttaaatagtcgtccttggttaggaatggtatcagtcttttttgcgattctcctttttttaactgcagcatcgagcaatcataataactctagctcgcaaatttatagtccgattgaaacctatacgcatagccttaaagatgtaccaattgatatgaagtatgatagtgacaaatattttatcagtgggtattcttatggtgcggaagtttatctaacctccactaatcgtatcaaattagattctgaagtgaacaatgatacacgtaattttaagattgtggcggatctaacacatagtcatccaggtacagtaagtgtcaacctaagagtagaaaaccttccttctggggtgacagctaccgtatctccagataaaatatcagtcacaattggcaaaaaagaatctaaggtatttcctgttagaggaagcgttgatgctaaacaaattgcaaatggttatgaaattagcaaaattgaaacgggggttaataaggttgaagtgaccagtgatgaatctaccattgctttaattgatcacgttgtggcaaagttacctgatgatcaagtgttagataggaattatagtagtcgagtgaccttacaagctgtctcagctgatggaactattttagcaagtgcaattgatcctgcaaaaacaaatttatcagttgctgtaaaaaaaataacgaaatcagtcccgattagagttgaggcagtggggatgatggatgatagcttatcagatattcaatacaaattgtcaaaacaaacagctgttatctcaggtagtcgagaggtcttagaagatattgatgaaattattgcagaagttaacatttctgatgtcactaaaaatactagtaagaccgtgagtttgtcttctagtcaggtgtcaattgagccgtcagtagtgaccgttcagttgacaaccaccaaaaaa

SEQ ID NO: 4242 - protein, 318 aa, Streptococcus pyogenes
MKRFLNSRPWLGMVSVFFAILLFLTAASSNHNNSSSQIYSPIETYTHSLKDVPIDMKYDSDKYFISGYSYGAEVYLTSTNRIKLDSEVNNDTRNFKIVADLTHSHPGTVSVNLRVENLPSGVTATVSPDKISVTIGKKESKVFPVRGSVDAKQIANGYEISKIETGVNKVEVTSDESTIALIDHVVAKLPDDQVLDRNYSSRVTLQAVSADGTILASAIDPAKTNLSVAVKKITKSVPIRVEAVGMMDDSLSDIQYKLSKQTAVISGSREVLEDIDEIIAEVNISDVTKNTSKTVSLSSSQVSIEPSVVTVQLTTTKK

SEQ ID NO: 4243 - DNA, 126 bp, Streptococcus agalactiae
atgaaaatattaattaacaattcactggaaatatctgcatctaatgggatacctgtagctatatactcttgcaaagtttgggtacgttcaattgaaatcaaggctcctattttacgcggactcata

SEQ ID NO: 4244 - protein, 42 aa, Streptococcus agalactiae
MKILINNSLEISASNGIPVAIYSCKVWVRSIEIKAPILRGLI

SEQ ID NO: 4245 - DNA, 849 bp, Streptococcus agalactiae
atggatattttttcagctattgattcaaagttttgggcgagcattatggaaaatccatggatgatccttattcatctcatggatattatcatagtagctgttctgatttataaatttatcaaagcgctagcaggcacaaaaattatgtccttaattcagggcgttattttgtttatcatcattagatttgtgtcagaatggatagggctaacaacgattacatttttgatgaatcagattgttacttatggtgtaattgcaggtgttgtcatctttgctccagagattagaacaggtctcgaaaaatttgggcgaacaccacaactatttacgcaacgttctcaattaagcagtgatgaaaagctagtagatgcccttgttaaggcagttgcttatatgagtccgcgtaaaataggagccttgatttcaattgaacgtacccaaactttgcaagagtatatagctacaggtatcccattagatgcagatatttccagtgaattgttaattaatattttcattcctaatacaccactgcatgatggtgctgttattgtaaaagataaaaaaattgctacagcatgctcgtacttacctctatcagaatcatcttcgatttcaaaagaatttggaacacgccacagagcagcgattggtctatcagagaattcagatgcactaacagttattgtttctgaagagactggtggtatttctgttgctttgaaaggtgaatttttacatgatctttctaaagatagctttgaagcaattctgagaactcagttgattcaaaatcaagaggaaaactcaaaattagcttggtataatcaactattgaggaggaag

SEQ ID NO: 4246 - protein, 283 aa, Streptococcus agalactiae
MDIFSAIDSKFWASIMENPWMILIHLMDIIIVAVLIYKFIKALAGTKIMSLIQGVILFIIIRFVSEWIGLTTITFLMNQIVTYGVIAGVVIFAPEIRTGLEKFGRTPQLFTQRSQLSSDEKLVDALVKAVAYMSPRKIGALISIERTQTLQEYIATGIPLDADISSELLINIFIPNTPLHDGAVIVKDKKIATACSYLPLSESSSISKEFGTRHRAAIGLSENSDALTVIVSEETGGISVALKGEFLHDLSKDSFEAILRTQLIQNQEENSKLAWYNQLLRRK

SEQ ID NO: 4247 - DNA, 849 bp, Streptococcus pyogenes
atgaataatttatctagtatcgatattaaatttttattaagcttatttgcggatccttggctgctggcagtgcatcttttagatattctaattgttgcctatttgatttatcgttttattaaagcattgactggaactaaaatcatgtctttagttcaaggggtcattttctttttggttcttcgttttattgcagagtggattggctttacgacaatcacatacttaatgaaccaagtcattacttatggtgtaattgcaggagtagtcatttttacccctgaaattcgggcaggactggagaaatttggtcgttctacgcaagtttttttacaaaaacagtacgtcagcagtgaatctgctttggtcgatgctttgattaaatctgtggcctatatgggtccacgcaagataggtgcattgattgctattgaacagactcaaaccttacaagaatatattgcgacaggaattccgctgaatgccgacatttcaagtcaactactcatcaatatttttattccgaatacgccgcttcatgatggagctgttatcgttggtcagaataagattgtggcagcctgtgcttacttgcctttgtcagaatcaaaggcaatttccaaagaatttgggacccgtcatagagcggctattggattatctgaaaactctgatgcactaactatcattgtttcagaagaaacaggagctatttcagtaactcgcaaaggccaatttttacacgatttaagcacagatgaatttgaaacggtacttaggacctacctgatgagtaattcaaatgttactttaccatggtataagaaaattctaggagggaaatctaaa

SEQ ID NO: 4248 - protein, 283 aa, Streptococcus agalactiae
MNNLSSIDIKFLLSLFADPWLLAVHLLDILIVAYLIYRFIKALTGTKIMSLVQGVIFFLVLRFIAEWIGFTTITYLMNQVITYGVIAGVVIFTPEIRAGLEKFGRSTQVFLQKQYVSSESALVDALIKSVAYMGPRKIGALIAIEQTQTLQEYIATGIPLNADISSQLLINIFIPNTPLHDGAVIVGQNKIVAACAYLPLSESKAISKEFGTRHRAAIGLSENSDALTIIVSEETGAISVTRKGQFLHDLSTDEFETVLRTYLMSNSNVTLPWYKKILGGKSK

SEQ ID NO: 4249 - DNA, 159 bp, Streptococcus agalactiae
ttgacgaccaaaaacggcacggcttttatcaaatccatccttaatttgacttggttctacaccaaaatattcagcaacagatactgccgccaaagcattgtaaatattataaaggccacccacgttgatattatattgttggccatcaataacgaaacc

SEQ ID NO: 4250 - protein, 53 aa, Streptococcus agalactiae
MTTKNGTAFIKSILNLTWFYTKIFSNRYCRQSIVNIIKATHVDIILLAINNET

SEQ ID NO: 4251 - DNA, 1341 bp, Streptococcus agalactiae
atgaaaataaatacagcactaggagtggctgccggtaagtctgctcattaccttttaagtaaaatgggacgtggctctacttatccgggtagtttagcactcaaattcgataaagatatactagatacaattgccaaagattatgaaattgtagttgtgactggtactaacggtaaaaccttaacaacagctttaacagttggtattttaaaggaagccttcggtcaggtggtaaccaacccaagtggagcaaatatgattacaggtattgtttcgaccttcctaacagctaagaaaagtaaatctggtaaaaaaatagctgtccttgaaatagacgaagcgagtttaccccgtattacacagtatataaagcctagtttgttcgtctttaccaatattttccgtgatcaaatggaccgttatggcgaaatctacacaacttatcaaatgattttagatggagctgctaacgctccgcaagctactatcttagctaacggtgacagtccactttttaattctaaaagcgtgactaaccctgtgcaattctatggatttaataccgacaaacatgagccacgattagcacactataatactgagggtattctctgtccaaagtgtcaagcaattttaacttatcgattgaacacatatgccaaccttggtgactacacttgtcctaattgtgattttgaacgtccaaaccttgattatgccttaacaaggctaacacatctgacaaatacttcatcaggtttcgttattgatggccaacaatataatatcaacgtgggtggcctttataatatttacaatgctttggcggcagtatctgttgctgaatattttggtgtagaaccaagtcaaattaaggatggatttgataaaagccgtgccgtttttggtcgtcaagaaacctttacaattggaaataaaaaatgtactttagttctgattaaaaatccggtaggagctagtcaagctcttgatatgattaaacttgctccatacccgttctctctctcagtactactgaatgccaattatgctgacggtattgatacttcttggatttgggacgctaattttgaaactattctcacgatgaatatcccagaaatatttgctggtggtgttcgccactctgaaattgctcgtcgcttacgtgtaactggttatgatgagaaacgcataaaacaagctgataaactgcaagatattatgacaatgattgagcagcaagagactgagcatgcttatattttagcaacatatacagctatgctggagtttcgtgaaattcttgctaaccacaacgctatcagaaaggagatgaat

SEQ ID NO: 4252 - protein, 447 aa, Streptococcus agalactiae
MKINTALGVAAGKSAHYLLSKMGRGSTYPGSLALKFDKDILDTIAKDYEIVVVTGTNGKTLTTALTVGILKEAFGQVVTNPSGANMITGIVSTFLTAKKSKSGKKIAVLEIDEASLPRITQYIKPSLFVFTNIFRDQMDRYGEIYTTYQMILDGAANAPQATILANGDSPLFNSKSVTNPVQFYGFNTDKHEPRLAHYNTEGILCPKCQAILTYRLNTYANLGDYTCPNCDFERPNLDYALTRLTHLTNTSSGFVIDGQQYNINVGGLYNIYNALAAVSVAEYFGVEPSQIKDGFDKSRAVFGRQETFTIGNKKCTLVLIKNPVGASQALDMIKLAPYPFSLSVLLNANYADGIDTSWIWDANFETILTMNIPEIFAGGVRHSEIARRLRVTGYDEKRIKQADKLQDIMTMIEQQETEHAYILATYTAMLEFREILANHNAIRKEMN

SEQ ID NO: 4253 - DNA, 1341 bp, Streptococcus pyogenes
atgaaaatgaagacattactcggcattattgctggcaaagctgctcaatccattttaacaaaactagggcgaggatctacttatcctggtcgattggctctagcttgtgataaagatattttaaaggatttgtctaaagactatgatattgtggtcgtcactggtactaatggtaaaacgttaacaactgctcttactgtcggtattttgaaagaggcatttggcgagataatcacaaatccaagtggtgccaatatgattactggaattacttctacttttttagctgctaaaaaagggaaatctgaaaggcaaattgctgttttagaaattgacgaggctagtcttcctagaattaccacttacttaaaacctagtctttttgtttatactaatatttttagggatcagatggaccgctacggagagatttacactacttatcagatgattgtagatggtgctcgaaatgctccaaaagcaactattctagccaatggagatagtcctattttctcttctaaggacatagttaatccagttcagtattatggttttgatactgctaagcatgctccgcagctagctcattacaacacagaagggattttatgtccaaaatgcgaacatattcttcagtatcgtctcaatacttatgcgaatctaggagactttgtttgcttaaactgtcagttccaaagaccaacgttagattatcaattaactgagctcaccgctattactcaccaaagttctgaatttgttattgatggacaaaactacaagataaatgttggtggtctttataatatttacaatgcgctcgctgccgtctctgttgctgaatttttcggtgtttctcccgagaaaatcaaggcgggctttaacaaaagtaaggcggtttttggaagacaagaaacttttactgttggtgataaatcatgcacccttatccttatcaagaatcctgttggagccagtcaggcactggaaatgattcaattggcagattatccatttagcttatcagttttattaaatgccaattacgctgatggcattgataccagctggatttgggatgctaattttgaactcattacccaaatgcccattacagaaattaatgctggcggcgtccgccactctgaaattgctagaagacttagagtcacaggatttgacgatactaagataaaacaagctgaaaagctcgagcaaatcatagaaaccattgaaaaacaagaagctaagcatgcctatattttagcaacctatacggcaatgttagaattccgtagcttacttgctgaccgccatgtcgttgaaaaggagatgatc

SEQ ID NO: 4254 - protein, 447 aa, Streptococcus agalactiae
MKMKTLLGIIAGKAAQSILTKLGRGSTYPGRLALACDKDILKDLSKDYDIVVVTGTNGKTLTTALTVGILKEAFGEIITNPSGANMITGITSTFLAAKKGKSERQIAVLEIDEASLPRITTYLKPSLFVYTNIFRDQMDRYGEIYTTYQMIVDGARNAPKATILANGDSPIFSSKDIVNPVQYYGFDTAKHAPQLAHYNTEGILCPKCEHILQYRLNTYANLGDFVCLNCQFQRPTLDYQLTELTAITHQSSEFVIDGQNYKINVGGLYNIYNALAAVSVAEFFGVSPEKIKAGFNKSKAVFGRQETFTVGDKSCTLILIKNPVGASQALEMIQLADYPFSLSVLLNANYADGIDTSWIWDANFELITQMPITEINAGGVRHSEIARRLRVTGFDDTKIKQAEKLEQIIETIEKQEAKHAYILATYTAMLEFRSLLADRHVVEKEMI

SEQ ID NO: 4255 - DNA, 783 bp, Streptococcus agalactiae
atgacttatacctcactaaaatctcctactaccaaagattataaatacactcttaatgtagctcatctttatggtaacctattaaatacttatggcgataacggaaatatcttaatgatgaaatatgtgggagaaaaactaggatgtcaaatgacatttgatatcgtttcattagaagatagatttgatcccaactattatcagatggcattttttggtggtggacaagactacgaacaagccattgttgcacgcgatcttcccagtaagaaagaagacattaacaaattcattcaaaataatggtgtagtacttgctatttgtggaggtttccaacttttaggacaatactatattcaagctaatggagaacgaatagagggcattggcgttatgggacactatacgctaaaccaaaataataatcgctatattggtgatatcaagattcacaacgatgaattcaatgaaacatattatggctttgagaatcatcaaggacgtacctttttatcagaagacgaaaaacctttaggaaccgtcatttatggaaatgggaataacaaagaagatggtactgaaggggttcattataagaatgtttttgggtcatactttcacggtccaatcctttctcgtaatgctaatctagcttaccgtcttgtggcaactgccctccgtaacaaatacggtaaagagattgtcctccctagttatgaagaaattttatctttagagattcctgaagaatacggagacgttaaatcaaaagcagattttgaa

SEQ ID NO: 4256 - protein, 261 aa, Streptococcus agalactiae
MTYTSLKSPTTKDYKYTLNVAHLYGNLLNTYGDNGNILMMKYVGEKLGCQMTFDIVSLEDRFDPNYYQMAFFGGGQDYEQAIVARDLPSKKEDINKFIQNNGVVLAICGGFQLLGQYYIQANGERIEGIGVMGHYTLNQNNNRYIGDIKIHNDEFNETYYGFENHQGRTFLSEDEKPLGTVIYGNGNNKEDGTEGVHYKNVFGSYFHGPILSRNANLAYRLVATALRNKYGKEIVLPSYEEILSLEIPEEYGDVKSKADFE

SEQ ID NO: 4257 - DNA, 789 bp, Streptococcus pyogenes
atgacatacacttcactaaaatctcccgaaaatcaagattacatctacgacctcactatcgcccatctctatggtaatcttatgaatacttatggtgataacggcaatattttaatgctcaagtatgtcgctgaaaaacttggagctagggttactgttgatattgtgtctatcaatgatacctttgaacaagacgattacgatattgttttctttggtggtggtcaagattatgaacaaagcattgttgccaaggatttgcctagcaaaaaagctgccttagcggattacattgctaataataaagtggtgcttgccatctgtggtggcttccaattactagggcaatactatgtccaagctaatggggttaaaattgatggacttggaattatgggacactacacccttaatcagcaccaaaatcgctttattggagatattaaaattcataatgacgaatttaacgaaacctattatggctttgaaaatcatcaaggacgtaccttcttatctggtgacgaaaagccacttggacgagtggtttatggcaacggtaataataaagaagaccaaactgaaggtgttcactataaaaacgtctatggtagttatttccacggtcctatcttatcacgcaatgttaatcttgcttaccgcttagtaacaacagctcttaaaaaaaagtatggatcagctatttcactacctagctatgatgatatactgaaacaagaaatcactgaagaatatgccgaccttaaaagcaaagcttcctttaataaagtt

SEQ ID NO: 4258 - protein, 263 aa, Streptococcus agalactiae
MTYTSLKSPENQDYIYDLTIAHLYGNLMNTYGDNGNILMLKYVAEKLGARVTVDIVSINDTFEQDDYDIVFFGGGQDYEQSIVAKDLPSKKAALADYIANNKVVLAICGGFQLLGQYYVQANGVKIDGLGIMGHYTLNQHQNRFIGDIKIHNDEFNETYYGFENHQGRTFLSGDEKPLGRVVYGNGNNKEDQTEGVHYKNVYGSYFHGPILSRNVNLAYRLVTTALKKKYGSAISLPSYDDILKQEITEEYADLKSKASFNKV

SEQ ID NO: 4259 - DNA, 987 bp, Streptococcus agalactiae
atgaaatatatcgttaacacgtctaatgatccggcttacaatgttgctttagaagcttacgcctttcaaaagttgacagatatcgatgaaatctttattctttggattaatgaaccggctatcattattggacgccatcaaaatacaattcaagaaattaacaaagagttcattgataaaaatggcatccatgttgtccgtcgtttgtcaggaggcggagcagtttatcatgacttgaataatttaaactacactattatttctaataatacacaagaaggtgcctttgatttccaaactttttcaaaaccagttattgatactcttgctaaattaggtgttaaagcagaatttactggtcgtaatgatttagaaatcaatggacaaaaatttgcaggaaatgctcaagcttattacaaaggtcgtatgatgcatcatggttgtcttttatttgatgttgatatgtcagtcttagggcaagcactcaaagtatctaaagacaaaattgaatctaaagggataaaatctgtacgcgcacgtgttacaaatattgttgaccatctttcagataaaattacagtacaagaatttagcgatgccattttagctcaaatgaaggaagaatatccagagatggatgaatatgttttgagtgatgccgagttatcagaaatccaagctatgcgcgataatcaatttgctacatgggattggacgtatggtaaagcacctgaatacaccattgaacgtggtgtccgctatccagctggaaaaattacgacttatgctaatgttgaaaattcaacgataaaatctgtcaaaatctttggtgacttctttggagtgaaacctgtggatgatattgaaaaaatgttggagggtgtccgctacgattacaaagatgttttagcagcgcttaaaacagttgatacaagtcaatacttctcacgtatgacacccgaagagattacaaaagctattgtagac

SEQ ID NO: 4260 - protein, 329 aa, Streptococcus agalactiae
MKYIVNTSNDPAYNVALEAYAFQKLTDIDEIFILWINEPAIIIGRHQNTIQEINKEFIDKNGIHVVRRLSGGGAVYHDLNNLNYTIISNNTQEGAFDFQTFSKPVIDTLAKLGVKAEFTGRNDLEINGQKFAGNAQAYYKGRMMHHGCLLFDVDMSVLGQALKVSKDKIESKGIKSVRARVTNIVDHLSDKITVQEFSDAILAQMKEEYPEMDEYVLSDAELSEIQAMRDNQFATWDWTYGKAPEYTIERGVRYPAGKITTYANVENSTIKSVKIFGDFFGVKPVDDIEKMLEGVRYDYKDVLAALKTVDTSQYFSRMTPEEITKAIVD

SEQ ID NO: 4261 - DNA, 987 bp, Streptococcus pyogenes
atgaaatacatcgttaacaaaagtcacaatcctgcctttaacatcgctttggaagcctatgcttttagagaactagtggaagaagacgaattgtttatcctttggatcaatgagccagctattattattggcaaacatcaaaataccattcaagaaatcaataaagaatacattgatgaacatggtattcatgttgtgcgacgtttatctggtggtggtgcggtttatcatgatttgaataacttgaactacactatcatttcaaataaaacagcggaaggcgcatttgatttcaaaaccttctcacaacctgtgattgcgactttagctgatttgggtgtaacagccaactttacaggccgtaatgatattgaaattgatggtaaaaaaatctgcggtaatgctcaagcttactacaaaggtcgcatgatgcaccatggttgccttttgtttgatgtggatatgaccgttcttggcgatgctcttaaggtaagtaaggacaagattgagtctaaaggagtgaagtctgttcgtgctcgcgtgaccaatattttaaatgaattaccagaaaaaattaccgttgaggaattttcagataaaatcttggccaagatgaaagaaacgtacccagacatgacagaatatgtcttgtcagaggatgagttggctaagattgaacaatctgccaaagagcaatttggtagctgggattggacctacggcaaagcgccagaatatacgattgaacgcaatgttcgttaccctgcaggtaaaatttcaacctttgcaaatgttgaaaattctatcattaaaaaccttaaaatctatggtgatttctttggaatcaaagatgtgcaagacattgagaacttattaattggttgtaaatatgagtaccgtgatgtttttgaacgtttaaaaacgattgatacgacccagtacttctcacgcatgaccgttgaagaagttgctaaagctattgtttct

SEQ ID NO: 4262 - protein, 329 aa, Streptococcus agalactiae
MKYIVNKSHNPAFNIALEAYAFRELVEEDELFILWINEPAIIIGKHQNTIQEINKEYIDEHGIHVVRRLSGGGAVYHDLNNLNYTIISNKTAEGAFDFKTFSQPVIATLADLGVTANFTGRNDIEIDGKKICGNAQAYYKGRMMHHGCLLFDVDMTVLGDALKVSKDKIESKGVKSVRARVTNILNELPEKITVEEFSDKILAKMKETYPDMTEYVLSEDELAKIEQSAKEQFGSWDWTYGKAPEYTIERNVRYPAGKISTFANVENSIIKNLKIYGDFFGIKDVQDIENLLIGCKYEYRDVFERLKTIDTTQYFSRMTVEEVAKAIVS

SEQ ID NO: 4263 - DNA, 1755 bp, Streptococcus agalactiae
atggcttttgatgtaattatgccaaaacttggggttgacatgcaagaaggcgaaatccttgagtggaaaaaaaatgaaggtgacaccgttaatgaaggtgatgtccttcttgaaatcatgtctgataaaaccaatatggaaatcgaagcagaagacactggtgtacttttaaaaattgtacatcaggcaggagatgttgttcccgtcactgaagtgattgcctatatcggagaagaaggtgaagaagtaggtacgtcatcaccttcagctgatgcaactatcacagctgaagatggtcaatcagtttctggacctgctgctccttcacaagagacagttgcagcagcaactcctaaagaagaacttgcagctgatgagtacgatatcgtagtcgtaggtggtgggcctgcaggttattacgcagcaatccgcggtgctcaacttggaggaaaaattgccattgttgagaaaactgaatttggcggtacgtgtttgaatgttggttgtatccctacaaaaacatatcttaaaaatgctgaaatcctagatggtttgaaagtagcagctggacgtggtatcaaccttgcttcaactaactatgcaattgatatggataagactgttgcctttaaaaattctgtagttaagacactgactggtggtgtacgtggtctcttgaaagcgaacaaagttgaaattttcaatggacttggacaagtaaaccctgataagtctgttgttattggcgataaagttatcaaaggtcgtaacgtcgtccttgcgactggttctaaggtatctcgtattaatattccaggtattgaatcaccattagtattaacatcagatgatattcttgatttacgtgaaattcctaagtcacttgctgttatgggtggtggtgtcgtaggtattgagcttggtcttgtatgggcttcatatggtgttgacgtaactgttattgaaatggctgatcgcatcattccagcaatggataaagaagtatcgctagaacttcaaaaaatccttgctaagaagggaatgaagattaaaacatcagttggtgtttctgaaattgttgaagccaataatcaattaacgcttaaattaaacaacggtgaagaagttgttgctgataaagctcttctttcaattggacgtgttccacaaatgaatggtcttgaaaatcttgagcctgaacttgagatggaacgtggacgtattaaagttaatgcttatcaagaaacttcaattccaggtatctatgcaccaggtgatgttaatggaactcgtatgttagctcatgctgcataccgtatgggtgaagtagctgctgaaaacgcactcggcggtaataagcgtaaagcacatctagatttcactccagcagctgtttatactcatcctgaagtagcaatggtggggatgacagaagagcaagcacgtgaacaatatggtgacatattagttggtaaaaatagctttacaggcaatggtcgtgctatcgcttcaaacgaagcacatggttttgtaaaagtaattgctgaacctaagtataaagagattcttggtgttcacattattggtccagctgcagcggaattgattaatgaagcttctacgattatggaaaatgagttgactgtctacgatgtagcacaatctatccatggtcacccaacattctctgaagttatgtacgaagctttcttagatgttctcggtgaagctattcacaaccctccaaaacgcaaa

SEQ ID NO: 4264 - protein, 585 aa, Streptococcus agalactiae
MAFDVIMPKLGVDMQEGEILEWKKNEGDTVNEGDVLLEIMSDKTNMEIEAEDTGVLLKIVHQAGDVVPVTEVIAYIGEEGEEVGTSSPSADATITAEDGQSVSGPAAPSQETVAAATPKEELAADEYDIVVVGGGPAGYYAAIRGAQLGGKIAIVEKTEFGGTCLNVGCIPTKTYLKNAEILDGLKVAAGRGINLASTNYAIDMDKTVAFKNSVVKTLTGGVRGLLKANKVEIFNGLGQVNPDKSVVIGDKVIKGRNVVLATGSKVSRINIPGIESPLVLTSDDILDLREIPKSLAVMGGGVVGIELGLVWASYGVDVTVIEMADRIIPAMDKEVSLELQKILAKKGMKIKTSVGVSEIVEANNQLTLKLNNGEEVVADKALLSIGRVPQMNGLENLEPELEMERGRIKVNAYQETSIPGIYAPGDVNGTRMLAHAAYRMGEVAAENALGGNKRKAHLDFTPAAVYTHPEVAMVGMTEEQAREQYGDILVGKNSFTGNGRAIASNEAHGFVKVIAEPKYKEILGVHIIGPAAAELINEASTIMENELTVYDVAQSIHGHPTFSEVMYEAFLDVLGEAIHNPPKRK

SEQ ID NO: 4265 - DNA, 1386 bp, Streptococcus agalactiae
atggctgtcgaaattattatgcctaaactcggggttgatatgcaagaaggcgaaatccttgagtggaaaaaacaggtaggtgatgttgttaatgaaggtgacgtcctacttgaaattatgtcagataaaacaaatatggagattgaagcagaagactcaggtgttttactaaaaatcacacatgggaatggagatgttgttcctgtaactgagacaattggttatattggtgctgaaggtgaagaagtaacagaagcatcttcttctgaaaatacatcagttgaagaaaacgcgacacaagtaacttcagaaccagaaaaagttgaagaaacatcagaaccaagtgtgccagcagctacaagtggtgaaaaagtacgtgccactcctgcagctcgtaaattagcaagagagatgtctattgaccttgcactagtatctggaacaggggcaaatggtcgcgttcacagagaagatgttgaaaacttcaagggtgctcaaccacgtattacaccattggcacgtcgaattgctgaagatcaaggagttgatatagcagaaatcactggcagtggtattcgtggtaaaattgttaaaaatgatgttttggctgctatgtcaccgcaagcagcagaggctcctgtagaaactaaagctacaccaacaacagaagaaaaacaattaccagaaggtgttgaagtcattaagatgtctgcaatgcgtaaggctatttctaaaggtatgactaactcttacctcactgctccaagctttacacttaactatgacattgatatgactgaaatgatggctcttcgcaagaaattaattgatccaatcatggctaaaacaggcttgaaagtcagctttactgatttgattggaatggccgttgttaagacattgatgaaaccagagcatcgatacctaaatgcttcattaattaacgatgcacaagaaattgagcttcataattttgttaatattggaatcgcagttggtcttgatgatggtttgattgttcctgttgttcacaatgctgatcaaatgtcactttctgactttgttatagcatctaaagatgttattaagaaaactcaagaaggtaaattaaaatcagctgaaatgtcaggttcaacattctcaattactaacttaggtatgtttggtactaagacgtttaacccaattatcaatcaaccgaactcagcaatccttggagtaggagctactattccgactccaacagtggttgatggtgaaattgtagctcgaccaattatggcaatgtgtttaacaattgaccaccgtattgttgatggaatgaatggtgctaagtttatggttgatcttaagaacttaatggaaaacccatttggtttacttatt

SEQ ID NO: 4266 - protein, 462 aa, Streptococcus agalactiae
MAVEIIMPKLGVDMQEGEILEWKKQVGDVVNEGDVLLEIMSDKTNMEIEAEDSGVLLKITHGNGDVVPVTETIGYIGAEGEEVTEASSSENTSVEENATQVTSEPEKVEETSEPSVPAATSGEKVRATPAARKLAREMSIDLALVSGTGANGRVHREDVENFKGAQPRITPLARRIAEDQGVDIAEITGSGIRGKIVKNDVLAAMSPQAAEAPVETKATPTTEEKQLPEGVEVIKMSAMRKAISKGMTNSYLTAPSFTLNYDIDMTEMMALRKKLIDPIMAKTGLKVSFTDLIGMAVVKTLMKPEHRYLNASLINDAQEIELHNFVNIGIAVGLDDGLIVPVVHNADQMSLSDFVIASKDVIKKTQEGKLKSAEMSGSTFSITNLGMFGTKTFNPIINQPNSAILGVGATIPTPTVVDGEIVARPIMAMCLTIDHRIVDGMNGAKFMVDLKNLMENPFGLLI

SEQ ID NO: 4267 - DNA, 1407 bp, Streptococcus pyogenes
atggcatttgaaattattatgccaaagctgggcgttgacatgcaagaaggcgagatcatcgagtggaaaaaacaagaaggtgataccgtcaatgaaggtgatatccttcttgaaatcatgtcagacaaaaccaatatggaacttgaggcagaagactcaggtgttcttcttaaaattacacgtcaagcaggtgatactgtacctgtaactgaagttatcggttacattggtgcagagggtgaatcagtagatactattgcttcaagtgaaaaaacaacagaaattccagttcctgcttcagcagacgctggaccagcagttgctccaaaagaaaatgtggcaagtccagctcctcaagtggcagcgacagctattccgcaaggaaatggcggaaaagttcgtgctactccagctgcacgtaaggcagcagcagaaatgggcattgaccttggccaagttccaggaacaggaccaaaaggacgtgtccataaagaagacgttgaaaactttaaaggtgctcaaccgaaagcttcaccacttgctcgtaaaattgcagcagacaaaggtattgatttggcaaccgtatcaggtactggctttaacggtaaggtcatgaaagaagacatcatggctattcttgaagcggctaaaccagctgaagcaaaagccccagcagctaaagaagaaaaagttgttgatcttccagaaggtgtggaacacaagccaatgtcagctatgcgtaaggcaatctctaaaggtatgacaaactcttaccttactgcccctacctttacgcttaactacgatattgacatgacagagatgattgcccttcgtaagaagttaattgacccaatcatggctaaaacaggccttaaagtcagctttacagacttgattggtatggcagtggttaaaaccttgatgaaacctgagcatgagtacatgaatgcttccctcatcaatgatgctaatgatattgaattgcaccgctttgtgaaccttggtattgccgtaggtcttgatgatggtcttatcgttcctgttatccatggggctaacaagatgtgcttgtcagatttcgtgcttgcttcaaaagatgtgattaaaaaagcgcaaactggtaagttgaaagcagctgaaatgtctggatcaaccttctctatcacaaacttgggaatgtttggtacgaagacatttaacccaattattaaccaaccaaactcagcaattcttggtgttggagcaactatcccaactccaacggttgtggatggtgagattgtttcccgtccaattatggcaatgtgcctaaccatcgaccaccgtttagttgatggtatgaacggtgcaaaattcatggttgatctcaagaaattgatggaaaatccatttgaattgttaatc

SEQ ID NO: 4268 - protein, 469 aa, Streptococcus pyogenes
MAFEIIMPKLGVDMQEGEIIEWKKQEGDTVNEGDILLEIMSDKTNMELEAEDSGVLLKITRQAGDTVPVTEVIGYIGAEGESVDTIASSEKTTEIPVPASADAGPAVAPKENVASPAPQVAATAIPQGNGGKVRATPAARKAAAEMGIDLGQVPGTGPKGRVHKEDVENFKGAQPKASPLARKIAADKGIDLATVSGTGFNGKVMKEDIMAILEAAKPAEAKAPAAKEEKVVDLPEGVEHKPMSAMRKAISKGMTNSYLTAPTFTLNYDIDMTEMIALRKKLIDPIMAKTGLKVSFTDLIGMAVVKTLMKPEHEYMNASLINDANDIELHRFVNLGIAVGLDDGLIVPVIHGANKMCLSDFVLASKDVIKKAQTGKLKAAEMSGSTFSITNLGMFGTKTFNPIINQPNSAILGVGATIPTPTVVDGEIVSRPIMAMCLTIDHRLVDGMNGAKFMVDLKKLMENPFELLI

SEQ ID NO: 4269 - DNA, 996 bp, Streptococcus agalactiae
atgagcgaaactaaagttatggctttgcgcgaagcgattaatgtcgctatgagcgaagaaatgcgcaaagatgaaaaagtatttttaatgggtgaagatgtaggtgtatatggaggagacttcggtacatctgttggtatgttagaagagtttggtgctaagcgcgttcgcgacacaccaatctcagaggctgcgattgcaggttcagctatcggtgctgcacaaacaggtttgcgtcctatcgttgatttgacattcatggattttgtaacaatcgcaatggatgctatcgttaaccaaggtgctaaaacgaattatatgtttggtggaggtctatcaactccagttactttccgtgtggcatcagggtcaggtattggttcggctgcacaacactcacaatcattagaagcttggttaacacacattccaggtctaaaagttgttgcacctggtactgttaatgagtcaaaagcacttttgaaatcttctattcttgacaataacccagttatcttcttagagccaaaagctctctatggtaagaaagaagaagttaatatggaccctgatttctatattccacttggtaaaggggatattaagcgtgaggggactgacttaacaattgtttcttatggccgtatgcttgagcgtgttatgcaagctgctgaagaagttgctgargaaggtattaacgttgaggttgttgatccacgtacacttattccgcttgataaagaattaattatcgattctgttaagaaaactggtaaattgatcttggttaacgatgcttataaaactggtggtttcactggtgaaattgcaactatggttgctgaaagtgaagcatttgattaccttgatcatcctatcgtgcgtcttgcaagtgaagatgttccagtaccgtattcacgtgtacttgaacaaggaatcttacctgatgtagcaaaaattaaagatgctatctataaagtagttaacaaaggtaaa

SEQ ID NO: 4270 - protein, 332 aa, Streptococcus agalactiae
MSETKVMALREAINVAMSEEMRKDEKVFLMGEDVGVYGGDFGTSVGMLEEFGAKRVRDTPISEAAIAGSAIGAAQTGLRPIVDLTFMDFVTIAMDAIVNQGAKTNYMFGGGLSTPVTFRVASGSGIGSAAQHSQSLEAWLTHIPGLKVVAPGTVNESKALLKSSILDNNPVIFLEPKALYGKKEEVNMDPDFYIPLGKGDIKREGTDLTIVSYGRMLERVMQAAEEVAEEGINVEVVDPRTLIPLDKELIIDSVKKTGKLILVNDAYKTGGFTGEIATMVAESEAFDYLDHPIVRLASEDVPVPYSRVLEQGILPDVAKIKDAIYKVVNKGK

SEQ ID NO: 4271 - DNA, 996 bp, Streptococcus pyogenes
atgtcagaaacaaaattaatggctttgcgtgaagcagtcaaccttgctatgactgaggaaatgcgcaaggacgaaaacattttccttatgggagaagacgtaggggtttacggaggagactttgggacttctgttggaatgattgaagaatttggccctaaacgtgttaaagataccccaatttcagaagctgctatctctggtgcggctattggtgcagctattacaggactacgtccaattgtcgacgttaccttcatggatttccttaccatcatgatggacgctatcgtgaataatggtgctaaaaataattacatgttcggtggaggccttattacccctgtaaccttccgtgtggcatcaggttctggtattggttccgctgcgcaacactcacaatctcttgaggcatggttgactcacattccaggaatcaaagttgttgctcctggtaatgccaacgatgctaaaggcttattaaaatcagctatccgtgataataacattgttcttttcatggaaccaaaagcgctttatggtaaaaaagaagaagttaaccaagatcctgacttctatatcccacttggcaaaggtgacatcaaacgtgaaggaactgatttgacaattgtgtcatacggtcgtatgttggagcgtgttcttcaagcggctgaagaagtagcagcggatggtattaacgttgaagttgttgacccacgtaccctcatcccacttgataaagagttgattattgaatctgttaagaaaacaggtaaattgatgcttgtcaacgatgcctacaagaccggtggattcattggggaaattgcaaccatgattaccgaaagtgaagcctttgattaccttgatcatccaatcgttcgtcttgcaagtgaagatgttccagtaccttatgctcgtgtacttgaacaagcaatcttaccagatgttgagaaaatcaaagctgctattgtgaaaatggcaaacaaaggcaac

SEQ ID NO: 4272 - protein, 332 aa, Streptococcus pyogenes
MSETKLMALREAVNLAMTEEMRKDENIFLMGEDVGVYGGDFGTSVGMIEEFGPKRVKDTPISEAAISGAAIGAAITGLRPIVDVTFMDFLTIMMDAIVNNGAKNNYMFGGGLITPVTFRVASGSGIGSAAQHSQSLEAWLTHIPGIKVVAPGNANDAKGLLKSAIRDNNIVLFMEPKALYGKKEEVNQDPDFYIPLGKGDIKREGTDLTIVSYGRMLERVLQAAEEVAADGINVEVVDPRTLIPLDKELIIESVKKTGKLMLVNDAYKTGGFIGEIATMITESEAFDYLDHPIVRLASEDVPVPYARVLEQAILPDVEKIKAAIVKMANKGN

SEQ ID NO: 4273 - DNA, 978 bp, Streptococcus agalactiae
ttggaggttagaatggtaactctatctaaagaacaacacttggatatgtttctaaaaatgcaacgtattcgtgatgttgatatgaaatttaacaaattggttcgtcgtggtttcgtccaagggatgactcacttctctgttggtgaagaagctgcttcagtaggtgctatccaagatttaacagattcagatatcattttctcaaaccaccgtggacacggacaaactattgcaaaaggtattgatattggtggaatgtttgctgaacttgctggtaaagcaacaggaacatcaaaaggtcgtggaggctcaatgcacttagcaaaccttgaaaaaggtaactatggaacaaacggtatcgtcggtggaggatatgcgcttgcagtaggtgctgcccttacacagcaatatgaaggaactgataacattgttatcgccttttcgggtgactcagcgactaacgagggctcattccatgagtcagttaacttagctgctgtttggaacttaccagttatcttctttatcatcaacaaccgttatggtatctcaacagacatcacatactcaactaaaattcctcacctttacatgcgtgctgatgcgtacggtattccagggcattatgttgaagatggtaatgaccttatggctgtttacgagaaaatgcatgaagttatcaattacgtgcgttcaggaaatggaccagctattgtagaggttgaatcataccgttggtttggtcattcaactgctgatgctggggtataccgtactaaagaagaagttgattcatggaaagctaaagatccagtaaaacgctaccgtgcatacttaattgaaaatgaaatcgctactgaagaagagcttgcagctattgaagcacaagtgattaaagaagttgaagaaggggttaaattcgctgaagaaagtccattccctgatatgtctgttgcatttgaagacgtttttgtggac

SEQ ID NO: 4274 - protein, 326 aa, Streptococcus agalactiae
MEVRMVTLSKEQHLDMFLKMQRIRDVDMKFNKLVRRGFVQGMTHFSVGEEAASVGAIQDLTDSDIIFSNHRGHGQTIAKGIDIGGMFAELAGKATGTSKGRGGSMHLANLEKGNYGTNGIVGGGYALAVGAALTQQYEGTDNIVIAFSGDSATNEGSFHESVNLAAVWNLPVIFFIINNRYGISTDITYSTKIPHLYMRADAYGIPGHYVEDGNDLMAVYEKMHEVINYVRSGNGPAIVEVESYRWFGHSTADAGVYRTKEEVDSWKAKDPVKRYRAYLIENEIATEEELAAIEAQVIKEVEEGVKFAEESPFPDMSVAFEDVFVD

SEQ ID NO: 4275 - DNA, 978 bp, Streptococcus pyogenes
atggaggccgaaatggtaacagtttctaaagaacaacatttagatatgttccttaaaatggaacgtattcgtgaatttgattcacgtattaataaactcgtccgtcgtggatttgtacaagggatgactcacttctcagttggtgaagaagcagccaatgttggagcggtggctcacttgtcttacgatgacattattttttcaaatcaccgtggacatggacaatcaatcgctaaagacatggaccttaataaaatgatggctgagcttgctggtaaagcaactggtgtgtctaaagggcgtggtggctcaatgcacttggctgattttgaaaaaggaaactatggtactaatggtatcgttggtggtggttacgctcttgcagttggtgctgccctcactcaacaatacaaaggaactaacaatatagctgttgctttctcaggtgatggcgctactaacgaaggatcattccacgagtctgttaatatggctgcaacatggaaacttcctgttattttcttcatcatcaacaaccgttatggaatttcaatgagcatcaataatgcaacaaatacaccacacttatacacacgtgcagaagcttacggagttcctggtttctactgtgaagatggcaatgacgtgatggctgtctatgaaacaatgggcaaagccgttgaacatgttcgtggtggaaatggtccagctattgttgaggtagaatcataccgttggtttggtcactcgactgcagatgctggtaaataccgtactaaagaagaagtggatgagtggaaagaaaaagatccaatgatcaaatatcgtacttatctgacaagcgaaggcattgccactgatgacgaattggatgctattcaagcacaagtcaaaaaagaagttgacgatgcttatgaatttgcacaaaacagtccagatccagaactttcagtagccttcgaagacgtttgggttgac

SEQ ID NO: 4276 - protein, 326 aa, Streptococcus pyogenes
MEAEMVTVSKEQHLDMFLKMERIREFDSRINKLVRRGFVQGMTHFSVGEEAANVGAVAHLSYDDIIFSNHRGHGQSIAKDMDLNKMMAELAGKATGVSKGRGGSMHLADFEKGNYGTNGIVGGGYALAVGAALTQQYKGTNNIAVAFSGDGATNEGSFHESVNMAATWKLPVIFFIINNRYGISMSINNATNTPHLYTRAEAYGVPGFYCEDGNDVMAVYETMGKAVEHVRGGNGPAIVEVESYRWFGHSTADAGKYRTKEEVDEWKEKDPMIKYRTYLTSEGIATDDELDAIQAQVKKEVDDAYEFAQNSPDPELSVAFEDVWVD

SEQ ID NO: 4277 - DNA, 1932 bp, Streptococcus agalactiae
ttgaaggtatgctataataaaactatgattatactacaaggaaacaaaattgagcgctcattttcaggtgatgtgctttttgataatattaatattcaagttgatcaacgtgatcgtattgctcttgttggacgtaatggtgctggcaaatcaacgcttcttaaaattttagttggtgaagaggctccgacaaaaggagaaataaataaaaagcgtgatttgagtttgtcctacttggcacaagatagtcgttttcaatctgaaaatacaattttccaagaaatgttacaagtttttgactcattaagagaagtagagaagcgcttacgtgaattggaattacaaatggggcaagtttcaggaagtgacctggaacaattgatgaaaacatacgatattttgtcagaagagtttcgtgaaaaaggtggctttacctatgaatcagatataaaggctattttaaatggttttaagtttaacagtgatatgtgggaaatgcctattagtgaattgtctggcgggcaaaatacacgattagcgcttgcaaaaatgctacttgaaaagccagaattacttgttttagatgaaccaacgaaccatttagacattgatacgattgcttggttagaaaattatcttgtaaattatcaaggagcccttattattgtcagccatgaccgctattttttagacaaggtagctacagtaacttatgatttaacgacacattctctagaccgctatgtaggcaattattcgaaatttatggatcttaaggcagagaaaatagcgactgaagaaaagaattttgaaaaacaacaaaaagaaattgctaagttagaagattttgtacaacgtaacattgttagggcttcaaccactaaacgagcacaagctcgtcgtaaacaattagaaaagatggaacgactcgacaaaccgaatgtagagcaaaaatcagctaatatgacttttcatgctgggaaagtctcagggaatgttgttttaacacttgagaatgcagctattggttatgaaggtgtttctttatcggagccaatcgatttggacgtgaagaaatttgatgctattgcaattgtaggtccaaatggtatcgggaaatcaactttaatcaaatcgcttgttgggcaaattccttttatcaaaggagaagcaaaattaggagcaaatgtcgaaactgggtattacgatcaaagtcaaagtaatttaacaaaaacgaatactgttttagatgagttatgggatgctttttcaacaacgccagaagttgaaattagaaaccgtttaggagcttttcttttttcaggtgatgatgttaaaaaatcagtttcaatgctatcaggtggtgaacgagcgcgtttgctattggcaaaattatctatggaaaataataattttctcatattagatgagccaacaaaccacttggatattgatagtaaagaagtcttagaaaatgcactcatcgaatttgatggcacattactttttgttagtcatgatcgctattttattaatcgtgtggcaactaaggttctcgaaatttctgataagggaagtactctctatctaggagattatgattattacctcactaagaaagccgaactagaggaattagcacgtttaaatgaagaagaagtgagtgcttcaaaaacagaaatcgacgttacatcagattatgagacacaaaaagcaaatcaaaaggaatttaggaaaattacccgtcgcgttgtagaaattgaggcgcgtttggaagttcttgaaaatgatgaaaacaatatcaatggtttaatgttagaaaccaatgacatcggaaaactctctgatttgcaaaaagagctggaatcaatccaagaagaacaattgctattaatggaagagtgggaaaatctaaatatgagactagatttg

SEQ ID NO: 4278 - protein, 644 aa, Streptococcus agalactiae
MKVCYNKTMIILQGNKIERSFSGDVLFDNINIQVDQRDRIALVGRNGAGKSTLLKILVGEEAPTKGEINKKRDLSLSYLAQDSRFQSENTIFQEMLQVFDSLREVEKRLRELELQMGQVSGSDLEQLMKTYDILSEEFREKGGFTYESDIKAILNGFKFNSDMWEMPISELSGGQNTRLALAKMLLEKPELLVLDEPTNHLDIDTIAWLENYLVNYQGALIIVSHDRYFLDKVATVTYDLTTHSLDRYVGNYSKFMDLKAEKIATEEKNFEKQQKEIAKLEDFVQRNIVRASTTKRAQARRKQLEKMERLDKPNVEQKSANMTFHAGKVSGNVVLTLENAAIGYEGVSLSEPIDLDVKKFDAIAIVGPNGIGKSTLIKSLVGQIPFIKGEAKLGANVETGYYDQSQSNLTKTNTVLDELWDAFSTTPEVEIRNRLGAFLFSGDDVKKSVSMLSGGERARLLLAKLSMENNNFLILDEPTNHLDIDSKEVLENALIEFDGTLLFVSHDRYFINRVATKVLEISDKGSTLYLGDYDYYLTKKAELEELARLNEEEVSASKTEIDVTSDYETQKANQKEFRKITRRVVEIEARLEVLENDENNINGLMLETNDIGKLSDLQKELESIQEEQLLLMEEWENLNMRLDL

SEQ ID NO: 4279 - DNA, 1905 bp, Streptococcus pyogenes
atgattattttacaaggaaacaagttagaacgctctttctcaggagatgttctttttcaaaacatatcactacaagttgatgaacgtgaccgcattgccttggttggtcctaatggagctggcaagtcgactttactaaaattattggttggggaagaaaccccaacgagcggagaagttaatactaaaaaagacctaaccttgtcttatctggctcaaaatagccgttttgaatcagatcaaacaatatatgaggaaatgctcaaggttttcgaagcattacgccaagatgaaaagcgcctgcgtcagatggaaatggatatggcaaccgtttcaggtcaagttttaacccgactgatgacagattatgatctgcttacagagcattttcgtcagcaaggcggctttacgtatgaatctgacatcaaagccattttaaatgggtttaagtttgatgagagcatgtggcagatgactatcgctgagctgtcagggggtcaaaatactcgtctggccttggctaaaatgcttttagaaaagccagaactattggtccttgatgagccaacaaaccacttagatattgaaaccattgcctggttagagaactacttggccaactatcaaggagctctaatcattgtgagtcacgaccgttattttctggacaaagtggcgaccgtgactttagatttgacgcctaacggcttagatcggtatagtggtaactattctcgttttatggccttaaaagctgaaaaactagtagccgaagaaaaacagttcgataaacaacaaaaagaaattgccaagctagaagattttgttcaaaaaaacattgtcagggcctctaccacaaaaagggctcaggctaggcgtaagcaattggaaaaaatagagcgtttggacaaacccacaggtgggcgtaaatctgctcatatgacatttcatgcagaaaaaccatcaggaaatgttgtgctaagagttgaggaagcagccatcggttatggagaccaagtcttgtccgaacctattaatgtagatatcaataagttggatgctattgccgttgtagggccaaatggtattggtaaatcaaccttgatcaagtcgattattggacaattgcctttgctcaaaggacaactcaagtatggtgccaatgtcgaaacaggttattatgaccaaacccaatcacatttgacgtctagcaacacagttttggaagaattatggcaggatttttcaactacgccagaagtcgatatcagaaaccgattaggggcttttctcttttctggagatgatgtcaaaaaatcggtggctatgctgtcaggtggagaaaaagcccgtctgcttcttgcgaagttatctatggaaaacaataattttcttgttctggacgagccgactaaccacctagacattgacagtaaagaagtgctagagaatgccctcattgactttgacggtaccttgctttttgtcagccacgaccgctatttcattaatcgtttggcaactaaggttttggaaattaccgaaaatggctcaaccctttacttaggtgactatgattattaccttgagaaaaaggcagagctagaagaattagcccgcctagcagcaggagagacagttgaggaaacaaaagaagcctctgccactgattatcagctacaaaaagctaatcaaaaagagcgtcgtcgcttgacccgccgatatgaggagattgaagcaagacttgaaaccattgaagagcgtattggtgctattcaagaagacatgcatgcctccaatgatacggcgcagttaatcgcttggcaaaaggaatgggaccaattggatcaagaacaagaagctcttatggaagaatgggaaaccatcgctgaacaaatagaatca

SEQ ID NO: 4280 - protein, 635 aa, Streptococcus pyogenes
MIILQGNKLERSFSGDVLFQNISLQVDERDRIALVGPNGAGKSTLLKLLVGEETPTSGEVNTKKDLTLSYLAQNSRFESDQTIYEEMLKVFEALRQDEKRLRQMEMDMATVSGQVLTRLMTDYDLLTEHFRQQGGFTYESDIKAILNGFKFDESMWQMTIAELSGGQNTRLALAKMLLEKPELLVLDEPTNHLDIETIAWLENYLANYQGALIIVSHDRYFLDKVATVTLDLTPNGLDRYSGNYSRFMALKAEKLVAEEKQFDKQQKEIAKLEDFVQKNIVRASTTKRAQARRKQLEKIERLDKPTGGRKSAHMTFHAEKPSGNVVLRVEEAAIGYGDQVLSEPINVDINKLDAIAVVGPNGIGKSTLIKSIIGQLPLLKGQLKYGANVETGYYDQTQSHLTSSNTVLEELWQDFSTTPEVDIRNRLGAFLFSGDDVKKSVAMLSGGEKARLLLAKLSMENNNFLVLDEPTNHLDIDSKEVLENALIDFDGTLLFVSHDRYFINRLATKVLEITENGSTLYLGDYDYYLEKKAELEELARLAAGETVEETKEASATDYQLQKANQKERRRLTRRYEEIEARLETIEERIGAIQEDMHASNDTAQLIAWQKEWDQLDQEQEALMEEWETIAEQIES

SEQ ID NO: 4281 - DNA, 1407 bp, Streptococcus agalactiae
atgttagtaatttccaagaaagagagagactttatgtctattacaaaagaatttgataccatcgcagctatttcaactcctctcggtgagggagctattggtattgtccgtatatctggtacagatgccttaaagatagcatcaaaaatttatcgtggaaaagatctatccgcgatccaatcccataccttaaactatggtcatattgtggacccagataaaaatgaaatcttggatgaagttatgttaggcgttatgcttgctccaaaaacattcacaagagaagatgttattgaaattaatacgcatggaggaattgcagttactaacgaaattcttcagttaattttacgacatggagcacgaatggctgaaccaggagaatttactaaacgtgcttttttaaatggtcgagttgacttgactcaggctgaagctgttatggatcttattagagctaaaacagataaagcaatggatattgccgttaagcaattagatggttctttaaagacactaatcaataacactcgacaagaaattttaaatactctagcccaagttgaagttaatatcgattaccctgaatatgatgacgttgaagagatgactacaacactgatgcgtgaaaaaacacaagagtttcaagcacttatggaaaatttacttcgaactgccagacgtggaaaaattcttcgagaaggactttcaacagcaatcattggtcgtccaaatgtcggtaaatccagcttactaaataacctcttacgtgaagaaaaggcgattgtgacagatattgaaggaacaactcgtgatgttattgaagaatacgtcaatattaaaggagttcctttaaaactagttgacactgctggtatccgtgatacagatgatatcgttgaaaaaattggtgttgaacgttcaaagaaggctttagaagaagccgaccttgtgttgttggttctcaatagttccgaaccactaacattacaagaccgctcccttctagaactaagtaaagaaagtaatcgtatcgtattactcaataaaacggatcttcctcaaaaaatagaagttaacgaattacctaaaaatgttattccaatttcggttttagaaaatgaaaacatcgataaaatcgaagaacgtattaacgatattttctttgacaacgctggtatggtagaacatgacgctacttatctatcaaatgctcgccatatctcactaattgaaaaagccgttgatagtttaaaagctgtcaatgagggcttggaattaggaatgcctgttgatctcttacaagtcgatatgactagaacttgggaaatacttggagaaatcactggggatgcagctccagatgaactaataactcagctcttcagccaattctgcttaggtaaa

SEQ ID NO: 4282 - protein, 469 aa, Streptococcus agalactiae
MLVISKKERDFMSITKEFDTIAAISTPLGEGAIGIVRISGTDALKIASKIYRGKDLSAIQSHTLNYGHIVDPDKNEILDEVMLGVMLAPKTFTREDVIEINTHGGIAVTNEILQLILRHGARMAEPGEFTKRAFLNGRVDLTQAEAVMDLIRAKTDKAMDIAVKQLDGSLKTLINNTRQEILNTLAQVEVNIDYPEYDDVEEMTTTLMREKTQEFQALMENLLRTARRGKILREGLSTAIIGRPNVGKSSLLNNLLREEKAIVTDIEGTTRDVIEEYVNIKGVPLKLVDTAGIRDTDDIVEKIGVERSKKALEEADLVLLVLNSSEPLTLQDRSLLELSKESNRIVLLNKTDLPQKIEVNELPKNVIPISVLENENIDKIEERINDIFFDNAGMVEHDATYLSNARHISLIEKAVDSLKAVNEGLELGMPVDLLQVDMTRTWEILGEITGDAAPDELITQLFSQFCLGK

SEQ ID NO: 4283 - DNA, 1374 bp, Streptococcus pyogenes
atgagtataactaaagaatttgatacaattaccgccatttcaacccctcttggtgaaggagctattggcattgttcgtttatcagggacagatgcgcttgccattgcacaatctgtttttaagggaaagaacttagagcaagtcgcctcacacaccattaactatggccatatcattaatcctaagacaggaactattatcgatgaagttatggtgtcagtcatgctagcccccaaaacctttacccgtgaaaatgtggttgaaatcaatacgcacggtggtattgctgtgacaaatgaaatcttgcaactattgattcgccaaggcgctagaatggcagagcctggcgaattcaccaaacgtgccttcttaaatgggcgagttgatttgactcaagctgaggctgtcatggacattattcgtgccaaaacagacaaggctatgacgattgcagtcaagcaactggatggctccctttcccagcttatcaatgacacccgtcaggaaattctcaacaccttagctcaagtcgaagtcaatattgactaccctgaatacgacgatgtggaagaaatgaccactgctctgctacgtgagaaaacacaagaattccaaagccttttggaaagtctccttcgaacagctaaacgcggtaaaattctgcgtgagggcttatcaacagctattattggtcgtccaaacgtcggtaagtcaagcttacttaataatttgttgcgagaagacaaggctattgtgactgatattgcaggaaccacccgagatgtcattgaagaatacgttaatatcaagggagttcctctaaaacttgtcgatacggccggtattcgtgagacagatgatctggtcgaacaaatcggagttgaacggtctaaaaaagctcttcaagaagctgaccttgttcttcttgtgctgaatgcttctgaaaaactgactgaccaagaccgggctttgttaaatctcagtcaggacagtaaccgtattatattgttgaataaaacggatttggaacagaagattgaattagagcaattaccagatgactacattcccatttccgttttaaccaaccagaacattaatctaatcgaagatcgtatcaaccagcttttctttgacaacgctggtttggtagagcaagatgccacttacctgtcaaatgcccgccacatttctttgattgaaaaggcagtccagagtttagaagctgtcaatgacggtttggcgcttggcatgccagttgatttactacaggttgatttaaccagaacttgggaaattctcggagaaatcacaggggatgctgctcctgatgaactcattacccaactctttagtcaattctgtcttggtaaa

SEQ ID NO: 4284 - protein, 458 aa, Streptococcus pyogenes
MSITKEFDTITAISTPLGEGAIGIVRLSGTDALAIAQSVFKGKNLEQVASHTINYGHIINPKTGTIIDEVMVSVMLAPKTFTRENVVEINTHGGIAVTNEILQLLIRQGARMAEPGEFTKRAFLNGRVDLTQAEAVMDIIRAKTDKAMTIAVKQLDGSLSQLINDTRQEILNTLAQVEVNIDYPEYDDVEEMTTALLREKTQEFQSLLESLLRTAKRGKILREGLSTAIIGRPNVGKSSLLNNLLREDKAIVTDIAGTTRDVIEEYVNIKGVPLKLVDTAGIRETDDLVEQIGVERSKKALQEADLVLLVLNASEKLTDQDRALLNLSQDSNRIILLNKTDLEQKIELEQLPDDYIPISVLTNQNINLIEDRINQLFFDNAGLVEQDATYLSNARHISLIEKAVQSLEAVNDGLALGMPVDLLQVDLTRTWEILGEITGDAAPDELITQLFSQFCLGK

SEQ ID NO: 4285 - DNA, 915 bp, Streptococcus agalactiae
atgatagtcgaacaaaaatttggaaatggttttacttggattaacattgaagcagagcaattgcgaacagaaacatcggaaattcaagcaaaatatttggatagtgagattattacatatgctctggatgattatgaacgagcctttatggaatgttctcatattaaaggaaaagaagtcttgacgattatttttaatactattgatctaaagcagaaagaaagttattatgagaccgttccgatgaccttttgcttatcacacgaccgtttgataacggtgacacggtctcgaaatagttatatgctagaactattgcaaaaatatctagaccgtaatccagatgtctctcctaaaaaatttttatttgcagctttaactttgattacaaaacaatattttaatgttgtatcgaaaattgatagagaaaaggatattctcaaccgtcaattgagagaacaaacaaccaataagcgcttattagccatgagtgacctagagacaggatccgtttatcttttgacagctgccaatcaaaatgcattggtattagagcaattagatgttcatcctagtcagcgatttaattctgaagtggaaaaagaacagttatcagatgctctcattgaagcgcatcagttagtcagtatgacacaattaaacagtcaggtactttcacaattatcatctacttttaataatgtcttaaataataacttgaacgaaaacttaacaggtttgaatatcatttcgattaatttagcgattattgcagcaattactggcttttttgggatgaatattccattacctcttacagaatcacggagttcatggttaattgttattgctacttcggtcttactttgggttattattgctcaaattttaaaacgagtttttaacttaagaaaa

SEQ ID NO: 4286 - protein, 305 aa, Streptococcus agalactiae
MIVEQKFGNGFTWINIEAEQLRTETSEIQAKYLDSEIITYALDDYERAFMECSHIKGKEVLTIIFNTIDLKQKESYYETVPMTFCLSHDRLITVTRSRNSYMLELLQKYLDRNPDVSPKKFLFAALTLITKQYFNVVSKIDREKDILNRQLREQTTNKRLLAMSDLETGSVYLLTAANQNALVLEQLDVHPSQRFNSEVEKEQLSDALIEAHQLVSMTQLNSQVLSQLSSTFNNVLNNNLNENLTGLNIISINLAIIAAITGFFGMNIPLPLTESRSSWLIVIATSVLLWVIIAQILKRVFNLRK

SEQ ID NO: 4287 - DNA, 243 bp, Streptococcus agalactiae
atgccgacaagttgctgggtgagaaactgttttaaatcatctgattctgcggatttcaaagactcgtttattttcttttctaaacgttctttgagctcacctgccgcttttactgtaaatgttgagataaacaaagagtcaatcggaacccctcttaaaagtttatctaaaatccgctcaaccattacaaaagtctttccagaaccagccgaagctgataccaggacattgttaccaaaagta

SEQ ID NO: 4288 - protein, 81 aa, Streptococcus agalactiae
MPTSCWVRNCFKSSDSADFKDSFIFFSKRSLSSPAAFTVNVEINKESIGTPLKSLSKIRSTITKVFPEPAEADTRTLLPKV

SEQ ID NO: 4289 - DNA, 3624 bp, Streptococcus agalactiae
atgatgacctttaagcctttcttaaatccagaagatattgctgttattcagacagaagaaaaaaattctgataaaaaacaaaagcgaacgcctgaacaaattgaagccatttatacttttggtaacaatgtcctggtatcagcttcggctggttctggaaagacttttgtaatggttgagcggattttagataaacttttaagaggggttccgattgactctttgtttatctcaacatttacagtaaaagcggcaggtgagctcaaagaacgtttagaaaagaaaataaacgagtctttgaaatccgcagaatcagatgatttaaaacagtttctcacccagcaacttgtcggcattcaaacagctgatattggtactatggatgcttttacgcaaaaaatagttaaccaatatggttatactttgggcatatcacctatatttaggattttacaagataaaaatgagcaagacgtcataaagaatgaggtctatgctgatttattttctgactacatgactgggaagaatgcagcttcattcataaaattagtcaaaaatttctcaggtaatcgtaaagatagcaaagcttttcgagaaatggtttataaagtttatgcttttagccagtccaccgataaccccaagcgctggatgcaaacagtttttctaaaaggtgcacaaacttacactgattttgaagctattccagatcaagaagtttcaagccttttaaatgtaatgcaaacaactgctaatcaattacgtgatttaacggatcaagaagattataagcaattaactgctaaaggggttccgacagcaaattacaaaaaacaccttaaaataattgaaaatttagtccattggtctcaagactttaatttgctgtatggaaaaaaaggattgactaatttggcacgtgatatcactaatgtgattccttcaggcaatgatgttacagttgctggcgttaaatatcctatctttaaacaattgcataatcgtatcgttggacttaagcacttagaagttatttttaagtatcaaggagaatctcttttcttgttagaattattgcaatcctttgttttagatttctcagaacaatatttacaggagaagattcaagaaaatgcttttgaattttctgatattgcccattttgcaattcaaatattggaagaaaatcatgatattaggcaactttatcaagataagtatcatgaagtaatggttgatgagtatcaggacaataaccatacccaagagagaatgttagaattattgtctaatggacataatcgtttcatggttggagacataaaacaatcaatttaccgttttcgtcaggctgatccacaaatttttaatgataaatacaaagcttaccaagacaatccaagtcaagggaaattaattattctgaaagagaattttcggagtcaatcagaggttttagacagtacaaatagtgtgtttacacatcttatggatgaagaagtaggagacattctttatgatgaaagtcaccaattaaaagctggtagtccaagacagcaagaaagacatccgaataataaaacacaagttttactattagatactgatgaagatgatatagatgacagtgatagtcaacaatatgatattagcccagctgaagcaaagttagtcgcaaaagaaattattcgattgcataaagaagagaatgttccctttcaagatatcaccctcttagtttcttcaaggacaaggaatgatggtatcttacaaacttttgaccgttatggtattcctttggtaactgacggtggggagcaaaattacttaaaatcagtcgaagtgatggtaatgcttgatactttgcggtcaattgataatcccttaaatgattatgctctagttgctcttttgagatctcccatgtttggctttaatgaagatgatttaacaagaattgctattcaggatgtcaaaatggctttttatcataaagtgaaattgtcttatcataaagaaggtcatcatagtgatttaattactccagaattatcttctaaaatagatcactttatgaaaacattccagacttggcgtgattttgctaaatggcattcgctttatgatttaatatggaaaatatataatgaccgtttttattatgattatgtaggagctctgcctaaagctgagcaacgtcaagccaatctatatgccttggcacttcgagcaaatcagtttgaaaaaacaggtttcaagggtttatcacgctttattcgaatgattgataaagttttagaaaatgaaaatgatttggcagatgttgaggtggcattaccgcaaaatgctgttaacctaatgactatacacaaatcaaaggggcttgagtttaagtatgtatttattttaaatattgataagaaattttcaatggtagacataacttcccctcttattttaagccgaaatcaaggaattggtattaaatatgttgctgatatgcgacatgaactcgaagaagagatactgcctgcagtaaaggttagcatggaaacacttccttaccaacttaataaaagagagttacgcttagctactttatcagagcaaatgcgtttactttacgtagctatgacacgtgcagagaaaaaattatatctggttggtaaggctagtcaaaccaaatgggctgatcattatgacttagtatctgaaaataatcatctcccattagctagtcgtgagacttttgtgacctttcaagattggttactggctgttcatgaaacctataagaaacaagagttgttttatgacatcaacttcgtatcattagaggaattaacagatcaccacatagggatggttaaccctagtctacctttcaatcccgataataaggtagagaatcgtcagtctgaagatatcgtgcgtgcgattagcgtgttagaatctgttgagcagattaatcaaacttataaagcggctattgagttaccgacagtgagaacaccaagtcaagtcaaaaaaatctatgagcctattctagatatagaaggtgttgatgtgatggaaactattactaaaacatcagtagattttaagttacctgatttttctacaagtaaaaagcaagacccagcagctttaggatctgctgtacatgaattaatgcaacgcatagagatgtcatctcatgtcaaaatggaagatattcaaaaagctttgacagaagtgaatgctgaaacaagtgtcaaagcggctattcagattgaaaaaatcaactattttttccaagaaacctcactcggtaagtatatacaagaagaagtagaacatctgcatcgagaggcaccttttgccatgttaaaagaagatccggagagtggtgagaaattcgttgtacgtggtattattgatgggtatctactattagaaaatcggataattctatttgattataagactgataaatttgtcaatcctctagaattaaaagaacgctatcagggacaaatggctttatatgcagaagctttaaaaaaatcttacgagatagaaaagatagacaaatacttaattcttttaggtggtaaacagctagaagtggtaaaaatggat

SEQ ID NO: 4290 - protein, 1208 aa, Streptococcus agalactiae
MMTFKPFLNPEDIAVIQTEEKNSDKKQKRTPEQIEAIYTFGNNVLVSASAGSGKTFVMVERILDKLLRGVPIDSLFISTFTVKAAGELKERLEKKINESLKSAESDDLKQFLTQQLVGIQTADIGTMDAFTQKIVNQYGYTLGISPIFRILQDKNEQDVIKNEVYADLFSDYMTGKNAASFIKLVKNFSGNRKDSKAFREMVYKVYAFSQSTDNPKRWMQTVFLKGAQTYTDFEAIPDQEVSSLLNVMQTTANQLRDLTDQEDYKQLTAKGVPTANYKKHLKIIENLVHWSQDFNLLYGKKGLTNLARDITNVIPSGNDVTVAGVKYPIFKQLHNRIVGLKHLEVIFKYQGESLFLLELLQSFVLDFSEQYLQEKIQENAFEFSDIAHFAIQILEENHDIRQLYQDKYHEVMVDEYQDNNHTQERMLELLSNGHNRFMVGDIKQSIYRFRQADPQIFNDKYKAYQDNPSQGKLIILKENFRSQSEVLDSTNSVFTHLMDEEVGDILYDESHQLKAGSPRQQERHPNNKTQVLLLDTDEDDIDDSDSQQYDISPAEAKLVAKEIIRLHKEENVPFQDITLLVSSRTRNDGILQTFDRYGIPLVTDGGEQNYLKSVEVMVMLDTLRSIDNPLNDYALVALLRSPMFGFNEDDLTRIAIQDVKMAFYHKVKLSYHKEGHHSDLITPELSSKIDHFMKTFQTWRDFAKWHSLYDLIWKIYNDRFYYDYVGALPKAEQRQANLYALALRANQFEKTGFKGLSRFIRMIDKVLENENDLADVEVALPQNAVNLMTIHKSKGLEFKYVFILNIDKKFSMVDITSPLILSRNQGIGIKYVADMRHELEEEILPAVKVSMETLPYQLNKRELRLATLSEQMRLLYVAMTRAEKKLYLVGKASQTKWADHYDLVSENNHLPLASRETFVTFQDWLLAVHETYKKQELFYDINFVSLEELTDHHIGMVNPSLPFNPDNKVENRQSEDIVRAISVLESVEQINQTYKAAIELPTVRTPSQVKKIYEPILDIEGVDVMETITKTSVDFKLPDFSTSKKQDPAALGSAVHELMQRIEMSSHVKMEDIQKALTEVNAETSVKAAIQIEKINYFFQETSLGKYIQEEVEHLHREAPFAMLKEDPESGEKFVVRGIIDGYLLLENRIILFDYKTDKFVNPLELKERYQGQMALYAEALKKSYEIEKIDKYLILLGGKQLEVVKMD

SEQ ID NO: 4291 - DNA, 3666 bp, Streptococcus pyogenes
gtgctttttaacattaatgagaaaggagagccacttgtgatttcttttgccccatttttaagccccgaagctattaaacatttgcaagaaaacgaaaggtgcagagatcagtctcaaaaacgcacagctcaacaaattgaagcaatttatactagtggccaaaatatacttgtatcagcttctgctggttcaggaaaaacctttgtaatggtcgaacgcatacttgataaaattttgagaggtgtttcaattgatcggctttttatctcaacctttactgttaaagcagctacagaactgcgtgagcggattgaaaacaaattatactcacaaattgctcaaactacagattttcaaatgaaagtttatttaacagaacaattgcaatctctttgtcaagctgatattggtactatggatgcttttgcacagaaagtagtaagtcgctatggttatagcattggcatttcatcccaatttcgtatcatgcaggataaagcagaacaagatgttttaaagcaagaggtgtttagcaaactctttaatgagtttatgaatcaaaaagaggcaccggtgtttagggctcttgtgaaaaatttttctggtaactgtaaagacacttcagcttttagagagttagtttatacttgttattcttttagccaatcgacagaaaacccaaaaatatggttgcaagaaaattttctaagcgctgctaaaacttaccaaagacttgaagatatcccggatcatgatattgaactcttacttttggcaatgcaagacactgcaaatcagctaagagatgtgactgatatggaagattatgggcagctgactaaggcaggtagccgatctgctaaatacactaaacacttaacgatcatagaaaagttgtctgattgggtgcgtgattttaaatgtttgtatggaaaagccggattggatcggttgatcagagatgtgacaggccttataccatctgggaatgatgttacagtctcgaaggtaaaataccctgtttttaagaccttgcatcaaaaattaaaacaatttaggcatttagaaacaattttaatgtatcagaaagactgtttttccttattggaacagttacaagattttgtgcttgcgttttcagaagcttatttagctgtcaaaatacaagaaagtgcttttgaattttcagatattgcacactttgcaatcaaaattttagaggaaaatacggatattcgccaatcctatcagcaacactatcatgaggtgatggttgatgaatatcaagataacaatcatatgcaagagcgactcctgaccttactatcgaacggtcataatcgctttatggtaggagatatcaaacaatcgatctatcgatttcggcaagccgatcctcagatttttaatcaaaagtttagagactatcaaaaaaaacctgagcaggggaaagtgattttactcaaagaaaactttcgtagccaatcagaggtgttaaatgtcagcaatgctgtttttagtcacttaatggacgaatcagtaggagacgtcttatacgatgagcaacatcagttaatagcaggtagtcatgctcaaacagtcccctatctagaccgtcgtgctcagttattgctatataatagcgataaagatgatggcaacgccccttcagatagtgagggtatttcatttagtgaggttacaattgttgccaaagaaattattaagcttcacaatgataagggtgtcccttttgaagacattacgttactcgtttcttcaagaacaagaaatgatatcatttctcatacattcaatcaatatggtattcctatagcaacagatggtgggcagcaaaactatcttaaatctgttgaagtgatggttatgttagatacattacgcaccattaataacccaagaaatgattatgcccttgtggctttactgcgctcaccgatgtttgcctttgatgaggatgatttagcaagaatagcacttcaaaaagacaatgagctagataaagattgcctatatgacaagatacaaagggctgtgattggaagaggtgctcatcctgaattgattcacgataccttgcttggcaagttaaatgtttttttaaagacgttgaaaagctggcgtcgatacgctaagctagggtcgttgtatgacttgatttggaaaatttttaatgatcgtttttattttgattttgtagctagtcaagcaaaagcagaacaagcacaagctaatctatacgcattagctctacgtgctaatcagtttgaaaaatcgggctataaagggctataccgttttattaaaatgattgataaggtacttgagacgcaaaatgacttagctgatgtggaagtggctactcctaaacaagctgttaatttaatgaccattcacaagtctaaaggtttacaatttccgtatgtatttatccttaattgtgacaagcgcttctcaatgacagatattcataaatcatttattctgaatcggcagcacggtatcggtatcaagtaccttgcagatatcaaaggtttacttggtgaaacaacactcaattctgttaaagtaagcatggaaaccttaccttatcaattgaacaaacaagagttgcgcttagcaactttatcagaagaaatgcgcttactgtatgttgctatgacacgagctgaaaaaaaagtttattttattggtaaagctagtaagagcaaaagtcaagaaatcacagatcctaaaaagttaggcaaacttttgccgctggctttacgagaacagttattgacattccaagattggctattagcaatagcagatatattttcaactgaagatctttattttgatgttcgctttattgaagatagtgatttgacacaagagtcagtcggacgacttcaaacaccacagttattaaatccagatgatcttaaagataatcgtcaatcagaaacaattgcacgggctttagatatgttagaagcagtgtctcaattgaatgccaattatgaagcagctattcatttgccaacagttcgaacgcctagccaacttaaggcaacttacgagcctttattagaacccattggtgtagatattatagagaaatcttctcgatcgctatctgattttactttgccacatttttcaaaaaaagcaaaagttgaagcaagtcatattggatcagctcttcatcagttgatgcaggtgctccctttgtcaaaaccgataaatcaacaaacgcttttagacgctttaagaggaattgatagtaacgaagaggtaaaaacagctcttgatctcaaaaaaatagagtcgttcttttgtgatacaagcctaggccaattttttcagacttaccaaaaacacttgtatcgagaagcgccatttgctattttaaaacttgaccctatcagtcaagaagagtatgtcctacgtggtattatagatgcctactttttgtttgatgatcatattgtattagtggactataaaacagataaatacaagcagcccattgagttaaaaaagcgttaccaacaacagttggagttatatgcagaagctctcactcaaacgtataaacttcctgtgactaagcgctatcttgttttaatgggaggtggaaagccagaaattgtcgaagtt

SEQ ID NO: 4292 - protein, 1222 aa, Streptococcus pyogenes
VLFNINEKGEPLVISFAPFLSPEAIKHLQENERCRDQSQKRTAQQIEAIYTSGQNILVSASAGSGKTFVMVERILDKILRGVSIDRLFISTFTVKAATELRERIENKLYSQIAQTTDFQMKVYLTEQLQSLCQADIGTMDAFAQKVVSRYGYSIGISSQFRIMQDKAEQDVLKQEVFSKLFNEFMNQKEAPVFRALVKNFSGNCKDTSAFRELVYTCYSFSQSTENPKIWLQENFLSAAKTYQRLEDIPDHDIELLLLAMQDTANQLRDVTDMEDYGQLTKAGSRSAKYTKHLTIIEKLSDWVRDFKCLYGKAGLDRLIRDVTGLIPSGNDVTVSKVKYPVFKTLHQKLKQFRHLETILMYQKDCFSLLEQLQDFVLAFSEAYLAVKIQESAFEFSDIAHFAIKILEENTDIRQSYQQHYHEVMVDEYQDNNHMQERLLTLLSNGHNRFMVGDIKQSIYRFRQADPQIFNQKFRDYQKKPEQGKVILLKENFRSQSEVLNVSNAVFSHLMDESVGDVLYDEQHQLIAGSHAQTVPYLDRRAQLLLYNSDKDDGNAPSDSEGISFSEVTIVAKEIIKLHNDKGVPFEDITLLVSSRTRNDIISHTFNQYGIPIATDGGQQNYLKSVEVMVMLDTLRTINNPRNDYALVALLRSPMFAFDEDDLARIALQKDNELDKDCLYDKIQRAVIGRGAHPELIHDTLLGKLNVFLKTLKSWRRYAKLGSLYDLIWKIFNDRFYFDFVASQAKAEQAQANLYALALRANQFEKSGYKGLYRFIKMIDKVLETQNDLADVEVATPKQAVNLMTIHKSKGLQFPYVFILNCDKRFSMTDIHKSFILNRQHGIGIKYLADIKGLLGETTLNSVKVSMETLPYQLNKQELRLATLSEEMRLLYVAMTRAEKKVYFIGKASKSKSQEITDPKKLGKLLPLALREQLLTFQDWLLAIADIFSTEDLYFDVRFIEDSDLTQESVGRLQTPQLLNPDDLKDNRQSETIARALDMLEAVSQLNANYEAAIHLPTVRTPSQLKATYEPLLEPIGVDIIEKSSRSLSDFTLPHFSKKAKVEASHIGSALHQLMQVLPLSKPINQQTLLDALRGIDSNEEVKTALDLKKIESFFCDTSLGQFFQTYQKHLYREAPFAILKLDPISQEEYVLRGIIDAYFLFDDHIVLVDYKTDKYKQPIELKKRYQQQLELYAEALTQTYKLPVTKRYLVLMGGGKPEIVEV

SEQ ID NO: 4293 - DNA, 3231 bp, Streptococcus agalactiae
atgaaattactttatactgatattaatcatgatatgacagaaatcttagtcaatcaggccgcgcatgctgctgaagctggatggcgtattttttatattgctccaaactctttatcttttgaaaaagagcgtgcagtattagagaaccttcctcaagaagcctcttttgctattacaattactcgctttgctcaattggcacgttattttactttaaaccagcctaatcaaaaagaaagtttaaacgatattggattagcaatgatcttttatcgtgctttagcaagttttgaagatggacaattaaaagtttttggacgattgaagcaagatgcttcctttatcagtcaattggtagacctatacaaagaattgcagacagcaaatctgagtattttagagttaaaatatttacattctcctgaaaaatttgaagatttattagctatttttctagtggtttcagatcttttaagagaaggagaatacgacaatcaatctaaaattgccttttttacagaacaagtaaggtcaggccagctagatgtggatttaaagaacactatccttatagtcgatggttttacccgtttctcagctgaagaagaagctttaattaaaagtctgagttcacgttgtcaagagattatcatcggagcttatgctagccaaaaagcgtataaggctaactttactaatggaaatatttattctgcaggggttgattttttaagatatctagcaacgacatttcaaacaaaaccagaatttatcttgtccaagtgggaaagtaaatctggttttgaaatgatttcgaaaaatatcgaaggtaaacatgattttacaaatagtagtcacattttagacgacactgctaaagattgtataacaatttgggagtgcattaatcaaaaagatgaagtggaacatgtggctagagctatacgtcagaaactttatcaaggatatcgctacaaagatattttagttttactaggagatgtagatagttataaactacaattaagtaagatttttgagcagtatgatattccttattatttcggtaaagctgaaacaatggctgcgcaccctttagttcattttatggattccttgtctcgaataaaacgttatcgatttagagctgaagatgttttaaatctttttaagacaggtatttatggagagattagccaagatgatttagattattttgaggcttatatctcatatgcagacattaaaggtcctaagaagttctttacagattttgttgtgggggctaaaaaatttgatttagggcgtcttaacactattcgtcagtccctccttactccactggaaagttttgtgaaaacgaaaaaacaagacggtataaaaacactcaaccaattcatgtttttccttactcaggtaggtttgagtgacaatttatcgcgattagttggtcaaatgtctgaaaatgaacaagaaaaacatcaagaagtttggaaaacatttacagatattttagagcagtttcaaacaatatttggtcaagaaaaattaaatttagacgaatttttatcgttattaaattcaggtatgatgcaagccgagtatcgtatggtccctgctactgttgatgtggttactgttaagtcttacgatttggtagaaccacatagtaatcaatttgtctatgccctaggcatgacacaatcacattttccaaagattgctcaaaacaaatctttaatatctgatattgaacgtcagcttataaatgatgccaatgacactgatggtcattttgacattatgacgcaagaaaatttgaagaaaaaccattttgctgccctctctctttttaatgctgctaaacaagaattagtgttgactataccacaattattgaatgagtctgaagatcagatgtcaccatatcttgtcgaactaagagatataggtgttccttttaatcataaaggacgccaatcgttaaaagaagaagctgataatattgggaattacaaagctttattatcgcgtgttgttgacttgtatcgctctgctattgacaaagagatgactaaagaagaacaaactttttggtcagttgctgttcgttatttgcgtcgtcaattaacttctaaagggattgagataccaataattacagatagtcttgatactgtgacagtttcatcagatgtgatgaccagacgcttcccagaagatgacccacttaaattatcctcatctgctttgacaactttttataataatcaatataagtattttttacaatatgtgttaggtttggaagaacaagactcaattcatccagatatgcggcaccatggaacgtaccttcatcgtgtttttgaaattctgatgaaaaaccaagggatagaatcttttgaagagaaactcaactctgcaattaataaaaccaatcaagaagatgttttcaaatccttgtattcagaagatgcagaaagtcgttattctttagaaattttagaagatatcgcgcgtgcaactgcaaccatattacgacaagatagtcagatgactgttgaaagtgaagaagaacgatttgaactaatgattgataatactataaaaattaacggtattattgaccgtatcgatcgtttatctgatggttctttgggtgtcgtggactataaatcaagcgctcaaaaattcgatatccaaaaattttataacggtctaagtccacaattagtcacctacattgatgctatcagtcgtgacaaggaagttgaacaaaaaccaccgatttttggagctatgtacttacatatgcaggaacctagacaagacttgtctaaaattaaaaatttagatgatttagtaacaaaaaatcatcaagctttaacttataaaggattattttcagaagccgaaaaagaattcttagcaaatgggaaataccatctcaaagattccctttattcagagactgaaattgctattttacaagcacataaccaatcgctttacaaaaaagcatctgagactattaagtcaggtaagtttttgatcaatccatatacagaagatgctaaaacagttgacggagatcagtttaagagtattacgggattcgaggcggataggcatatggcacgtgccagagcgctttataaattacctgctaaggaaaaacgtcaaggtttcttaacattaatgcagcaagaggaggaaaatgatgacctt

SEQ ID NO: 4294 - protein, 1077 aa, Streptococcus agalactiae
MKLLYTDINHDMTEILVNQAAHAAEAGWRIFYIAPNSLSFEKERAVLENLPQEASFAITITRFAQLARYFTLNQPNQKESLNDIGLAMIFYRALASFEDGQLKVFGRLKQDASFISQLVDLYKELQTANLSILELKYLHSPEKFEDLLAIFLVVSDLLREGEYDNQSKIAFFTEQVRSGQLDVDLKNTILIVDGFTRFSAEEEALIKSLSSRCQEIIIGAYASQKAYKANFTNGNIYSAGVDFLRYLATTFQTKPEFILSKWESKSGFEMISKNIEGKHDFTNSSHILDDTAKDCITIWECINQKDEVEHVARAIRQKLYQGYRYKDILVLLGDVDSYKLQLSKIFEQYDIPYYFGKAETMAAHPLVHFMDSLSRIKRYRFRAEDVLNLFKTGIYGEISQDDLDYFEAYISYADIKGPKKFFTDFVVGAKKFDLGRLNTIRQSLLTPLESFVKTKKQDGIKTLNQFMFFLTQVGLSDNLSRLVGQMSENEQEKHQEVWKTFTDILEQFQTIFGQEKLNLDEFLSLLNSGMMQAEYRMVPATVDVVTVKSYDLVEPHSNQFVYALGMTQSHFPKIAQNKSLISDIERQLINDANDTDGHFDIMTQENLKKNHFAALSLFNAAKQELVLTIPQLLNESEDQMSPYLVELRDIGVPFNHKGRQSLKEEADNIGNYKALLSRVVDLYRSAIDKEMTKEEQTFWSVAVRYLRRQLTSKGIEIPIITDSLDTVTVSSDVMTRRFPEDDPLKLSSSALTTFYNNQYKYFLQYVLGLEEQDSIHPDMRHHGTYLHRVFEILMKNQGIESFEEKLNSAINKTNQEDVFKSLYSEDAESRYSLEILEDIARATATILRQDSQMTVESEEERFELMIDNTIKINGIIDRIDRLSDGSLGVVDYKSSAQKFDIQKFYNGLSPQLVTYIDAISRDKEVEQKPPIFGAMYLHMQEPRQDLSKIKNLDDLVTKNHQALTYKGLFSEAEKEFLANGKYHLKDSLYSETEIAILQAHNQSLYKKASETIKSGKFLINPYTEDAKTVDGDQFKSITGFEADRHMARARALYKLPAKEKRQGFLTLMQQEEENDDL

SEQ ID NO: 4295 - DNA, 3213 bp, Streptococcus pyogenes
atgaaattaatttacacagagatgagttactcgatgacagagattttggtgaatgaagcacgaaaagctgctgaccaaggttatcgagtgttctatattgctccaaattctctttcatttgaaaaggaaagggaagtcttaaccttattgcctgaacgagggactttttcgataatagtcacccggttcgttcaaatgtcaaggtattttacagttgagagctctccttctaagcaacatctagatgacacgactttggctatgattttttatcgggccttgatgcaattaaaaccagaagatttgccgagttatggtcgtttgcaaaataattcggtttttattgaacaactagttgagttatataaagaattaaaaaacgcacaattaagcgtacatgatttaacagggttagaccatcctcaaaaacaagaagatcttattaaaattattgagcttgcagagacgatcatgattcagcaagattataatcaagatagtcctctacaatcttttgcaagagcaattaagttaggacttttaaataaccaactatcaaaaacagttgttgttattgatggtttttcacgtttttcagctgaagaggattatttattatcacttttaaataacaactgtcaagaggtcatcattggcagttatgtgagtcaaaaagcttatcaaaaatcttttattaagggaaatatctatgaggctagccttcattttttgcaagatttggctcaaaaataccatatcaagccggtatttgcgacctctaatcaagtgtttaaaccagccttttcacggctaacacaattatttgaagcaactcatgatttttcacaagtagactggcaactccaaaagagtgatcttgatcactttagcctttggcaatgtcatcatcaaaaagaggaaattgaacatgtagcaaaatccattcggcaaaagctatatgaaggttaccgttataaggatatcttagtgttgctaggagatatggatgcttatcaattacaaattgggcctatctttgataagtttgaaatcccctactatttaggaaaagcagagcctatggctgcccatccattagtccaatttatagaatcgctcgaacgaagtcagcgctataattggcgtcgtgaagacattttaaacatgttaaaatcaggactttttggttgttttgatgatagtgatattgatcgctttgaggaatatactcagtttgcagatattaaaggatttactaaattttcaaagccttttaccattaactcttctaggcagtatcctcttgactttttaaatgaaatgagacaagacatcgttttacctttgcaagaattgtttaagagtcaaaaacaacttggtgcttcacttgttgacaaattaatactttttttaaaaaagattagattagctgagaatatgcaaggtttagcacagtcccaattagaggtggaaaaaaacgaagaagtttggaaaaggtttacagatattttgacttcttttcatcatatcttcggccaagaaaaattacggctatcagattgccttgctttaattaaaacgggaatgaaatcagctcagtatcgtgttgttccagcgacattagatgttgtcactattaaatcttatgaccttgttcaaccacattcaaaacctttcgtttatgcaattggtctaactcaatcacattttcctaagcaaattcaccattcaggactactttctgatcaagagcgtgctagaattaatgaaataagaaattatcgtcattttgatattgctagtgccgaaaatagtaaaaaaaaccatcaaactgcgttatctctgtttaatgctgctactaaggagttagttcttagtgtttcaacggtaatcaacgagacattcgatgatctatctccttatcttaaagaattaataaactttgggttacctcttttggataaaggcaaaaactatctatcttatgataatagcgatattggtaactataaagctctcttgtcacaaattattgctattaaccgacaagatcttatagaaatgtcagatcaagataagatgttttggactgttgtcttacgttatctcaggaaacagttaagaaagcaacagctagagctacctacttcagattatcgtttatcaacaaagcctttgtctaaagaagttatcgaggtatgttttccaaagggaatccctttaaagctatctgcaactgctttaaccgttttttataataatcagtacaactattttttgaaatatgttttgaatttaaacaaaacagaatccattcatccagattccagaattcatggtcaatacttgcatcgtgtctttgagcggttaatgaaagatcacacgcaagaaccgtttgataataagttaaaacaagcaatctaccataccaatcaagaaagtttttttcagcaggtttaccaagataatgccgaggctgagtacagtttagctatactagaagatattgttagatcaacagcacctatcttgcaacttaaccaaaacatacaggtcattgatcaagaaaagaactttcagctggatatgggaaatgagatattagtccacgggatcattgatcgtattgaccagctgagcgacggtagcttgggcattgttgactataaatcaagcgcgaatcaatttgatattgggaccttttataatgggttgagtccacaactaatgacttacctcgcagccttaaaacagattgcaccgcacgatataaaccaattatttggggctatgtaccttcatttgcaagatcctaaattggatctagtaacatttaaacaaattgataacacattagtggagagtatctataaagcgttgacctataaaggtattttttcagaagtcgaaaaagagcatctatctactggtgcttaccaaaccaaaaatgctctttattccaatgacgaattggaaacacttttaaattataacaagtacctctatcttaaagctgctaaacacattaaaaagggacattttttgattaatccttatacaagcgatggtaagacagttcaaggagatcaattaaaagccattacccgttttgaagcagatcttgacatgggacaggcaaggcgactagtgactctccctgctaaggagaaaaaagagtgctttttaacattaatgagaaaggagagccacttg

SEQ ID NO: 4296 - protein, 1071 aa, Streptococcus pyogenes
MKLIYTEMSYSMTEILVNEARKAADQGYRVFYIAPNSLSFEKEREVLTLLPERGTFSIIVTRFVQMSRYFTVESSPSKQHLDDTTLAMIFYRALMQLKPEDLPSYGRLQNNSVFIEQLVELYKELKNAQLSVHDLTGLDHPQKQEDLIKIIELAETIMIQQDYNQDSPLQSFARAIKLGLLNNQLSKTVVVIDGFSRFSAEEDYLLSLLNNNCQEVIIGSYVSQKAYQKSFIKGNIYEASLHFLQDLAQKYHIKPVFATSNQVFKPAFSRLTQLFEATHDFSQVDWQLQKSDLDHFSLWQCHHQKEEIEHVAKSIRQKLYEGYRYKDILVLLGDMDAYQLQIGPIFDKFEIPYYLGKAEPMAAHPLVQFIESLERSQRYNWRREDILNMLKSGLFGCFDDSDIDRFEEYTQFADIKGFTKFSKPFTINSSRQYPLDFLNEMRQDIVLPLQELFKSQKQLGASLVDKLILFLKKIRLAENMQGLAQSQLEVEKNEEVWKRFTDILTSFHHIFGQEKLRLSDCLALIKTGMKSAQYRVVPATLDVVTIKSYDLVQPHSKPFVYAIGLTQSHFPKQIHHSGLLSDQERARINEIRNYRHFDIASAENSKKNHQTALSLFNAATKELVLSVSTVINETFDDLSPYLKELINFGLPLLDKGKNYLSYDNSDIGNYKALLSQIIAINRQDLIEMSDQDKMFWTVVLRYLRKQLRKQQLELPTSDYRLSTKPLSKEVIEVCFPKGIPLKLSATALTVFYNNQYNYFLKYVLNLNKTESIHPDSRIHGQYLHRVFERLMKDHTQEPFDNKLKQAIYHTNQESFFQQVYQDNAEAEYSLAILEDIVRSTAPILQLNQNIQVIDQEKNFQLDMGNEILVHGIIDRIDQLSDGSLGIVDYKSSANQFDIGTFYNGLSPQLMTYLAALKQIAPHDINQLFGAMYLHLQDPKLDLVTFKQIDNTLVESIYKALTYKGIFSEVEKEHLSTGAYQTKNALYSNDELETLLNYNKYLYLKAAKHIKKGHFLINPYTSDGKTVQGDQLKAITRFEADLDMGQARRLVTLPAKEKKECFLTLMRKESHL

SEQ ID NO: 4297 - DNA, 912 bp, Streptococcus agalactiae
ttggagatacttatgaaaatagatgacctaagaaaaagcgacaatgttgaagatcgtcgctccagtagcggaggttcattctctagcggaggaagtggattaccgattcttcaacttttattgctgcgagggagttggaaaaccaagcttgtggttttaatcatcttactgctacttggcggagggggactaaccagcatttttaatgactcatcctcaccttctagttaccaatctcagaatgtctcacgttctgttgataatagcgcaacgagagaacaaatcgatttcgttaataaagtccttggctcaactgaggatttctggtcacaagaattccaaacccaaggttttggaaattataaggaaccaaaacttgttctttacaccaattcaattcaaacaggttgtggtataggtgaatctgcttcaggaccattttattgttcagcagataaaaaaatctatcttgatatttctttttacaatgaattatcacataaatatggtgctactggtgattttgctatggcctacgtcatcgcccacgaagttggtcaccacattcaaacagagttaggcattatggataagtataatagaatgcgacacggacttactaagaaagaagcaaatgctttaaatgttcggctagaacttcaagcagattattatgcaggggtatgggctcactacatcaggggaaaaaatctcttagaacaaggagactttgaagaggccatgaatgctgcccacgccgtcggagacgatacccttcagaaagaaacctacggaaaattagtgcctgatagctttacccatggaacagctgaacaacgccaacgttggtttaacaaaggctttcaatatggtgacatccaacacggtgatactttctccgtagaacatcta

SEQ ID NO: 4298 - protein, 304 aa, Streptococcus agalactiae
MEILMKIDDLRKSDNVEDRRSSSGGSFSSGGSGLPILQLLLLRGSWKTKLVVLIILLLLGGGGLTSIFNDSSSPSSYQSQNVSRSVDNSATREQIDFVNKVLGSTEDFWSQEFQTQGFGNYKEPKLVLYTNSIQTGCGIGESASGPFYCSADKKIYLDISFYNELSHKYGATGDFAMAYVIAHEVGHHIQTELGIMDKYNRMRHGLTKKEANALNVRLELQADYYAGVWAHYIRGKNLLEQGDFEEAMNAAHAVGDDTLQKETYGKLVPDSFTHGTAEQRQRWFNKGFQYGDIQHGDTFSVEHL

SEQ ID NO: 4299 - DNA, 915 bp, Streptococcus pyogenes
atgaaaacggatgatttgagagaaagtcaacaggttgaagatagacgtggtcaatcgtctggttcttttgggggcggcggcctagggggcggtctcctgcttcaattactcttttcacgaggaggttggaaaaccaagctggttattcttctccttctcctagttatgggaggtggtggcctatctggtgttttaggaggcaagccttcttctaccaacaacaatgcctatcaatcaagccaagtaacgcgtacaaatggtgacaaggctagtcaagaacaggtttcttttgtcagtaaggtcttcgcctctaccgaggactattggactaagacatttcgtgagaaagggttaacttatcataaaccaacattagttctatatactggagcaactcaaaccgcttgtggcagggggcaagcctcttctggtcctttttattgcccaggcgatcaaaaagtgtatttagatatttctttttataatgaactatcaaccaagtacggcgcaaaaggtgattttgctatggcctatgtgattgctcatgaagttggccaccacatccaaaatgaattgggaattatggataattacgctagcgctagacaaggaaaatcaaaggctaaagccaatcagctcaacgtcaagttggaattacaagctgattactatgctggtgcctgggctaattatgttcaagggcaaggccttttggaaaaaggagatattgaggaagcaatggcagcagctcacgcagttggggatgatactctgcaagaagaaacctatggcagaaccgttcctgatagttttacacatggcacttctaagcaacgccaacgttggtttgaccgaggttaccaatatggcgactttgagcatggtgatacctttagcatcccgtatagtaagctt

SEQ ID NO: 4300 - protein, 305 aa, Streptococcus pyogenes
MKTDDLRESQQVEDRRGQSSGSFGGGGLGGGLLLQLLFSRGGWKTKLVILLLLLVMGGGGLSGVLGGKPSSTNNNAYQSSQVTRTNGDKASQEQVSFVSKVFASTEDYWTKTFREKGLTYHKPTLVLYTGATQTACGRGQASSGPFYCPGDQKVYLDISFYNELSTKYGAKGDFAMAYVIAHEVGHHIQNELGIMDNYASARQGKSKAKANQLNVKLELQADYYAGAWANYVQGQGLLEKGDIEEAMAAAHAVGDDTLQEETYGRTVPDSFTHGTSKQRQRWFDRGYQYGDFEHGDTFSIPYSKL

SEQ ID NO: 4301 - DNA, 2403 bp, Streptococcus agalactiae
atgttagtatcgtataaatggttaaaagagttagtggatgttgatgttacaacagcagaactagctgagaaaatgtcaaccactggtattgaggttgaaggtgtggagacaccagcggaaggtttatcaaaattagttgtaggtcatattgtttcgtgtgaagatgttccagatacccacttacatttgtgtcaagttgatacaggggatgatgaacttcgtcaagttgtctgtggtgctccaaatgtcaagactggtattaatgttatcgtagcggttcctggtgctcgtattgcagataactataagattaaaaaaggtaaaatccgtggtatggagtcacttggaatgatttgttcacttcaagagttgggcttatcggaaagtatcattccaaaagagttttctgatggtatccaaattttacctgagggagctatacctggtgatagtattttctcttatcttgacttagatgatgaaattattgaattatcaattacaccaaaccgtgcagatgctctttcaatgcgtggtgttgcccatgaggtagcagcaatttatgggaaaaaagttcattttgaagaaaaaaatctcattgaagaagcagaaagagcagctgataagatttctgttgtcattgaatcagataaagttttatcttactcggctcgtattgttaagaatgtaacagttgcaccaagtccacaatggcttcaaaataaactgatgaatgctggtatacgtccaattaataatgttgttgatgtgacaaactatgttcttttgacttatggtcaaccaatgcatgcttttgattttgataaatttgatgggacaactatagtagcacgtaatgctgagaatggggaaaagttaattactcttgatggtgaagagcgtgacttaatagctgatgacttggtcattgcggtaaatgatcaaccagttgctttggcaggcgttatgggaggacaatcaactgaaattggtagttcttctaagacagtggtccttgaagcggcagtatttaatggaacaagtatccgcaaaacaagtggaagactcaaccttcgttcagaatcatcttctcgctttgaaaaaggtatcaattatgatacagtttcagaggctatggattttgcggctgcaatgttacaagaattggcaggtggtcaagttctttctggtcaagttacagaaggagttcttccaactgagccggtagaggtatcaacgactcttggttacgttaatactcgtttgggaacagaacttacctatactgatattgaagaagtatttgaaaaactcggctttgctatttctggttcagaagtgaaatttactgtgttggtaccgcgtcgtagatgggatattgccattcaagctgacttagttgaagagattgcccgtatttatggttacgaaaaattaccaacaacattgccagaagccggagcgactgcaggagaattaacgagtatgcaacgcttacgtcgtagagtccgtacggttgctgaaggagcaggattatctgaaattatcacctatgctttaacaactccagaaaaagcagtgcagttctcaactcaagcaactaatataactgaacttatgtggccgatgactgttgatcgctcagcacttcgccaaaatgttgtttcaggaatgcttgatacaattgcttataacgttgctcgcaaaaacagtaaccttgcagtttatgagataggaaaagtttttgaacaaactggtaatccaaaagaagatttaccaactgaagtagagacgtttacttttgccttaacaggtctagtagaggaaaaagatttccaaacaaaatccaagccagttgatttcttctacgccaaaggtattgtagaggcgctctttattaaattaaaattagatgttacttttgtagcacaaaaaggtttagcaagtatgcacccaggtcgtacagcaactatcttattagatgggaaagagattggttttgttggtcaagtacacccacaaactgcaaaacaatatgatattcctgaaacttatgttgctgaaatcaatctatcaactattgaaagtcaaatgaaccaagcgttgatttttgaagatattacgaagtatccgtctgtatctcgcgatattgcattattacttgcagaatctgttagtcatcatgatattgtgtcagcaattgagacatcaggggtaaaacgtctaacagcgattaaactgtttgatgtctacgctggaaataatattgcagaagggtataaatcaatggcttatagcttaactttccaaaaccctaatgacaatctaacggacgaagaagtggctaaatatatggaaaaaatcactaaatcactcgttgagaaagttaatgcagaaataaga

SEQ ID NO: 4302 - protein, 801 aa, Streptococcus agalactiae
MLVSYKWLKELVDVDVTTAELAEKMSTTGIEVEGVETPAEGLSKLVVGHIVSCEDVPDTHLHLCQVDTGDDELRQVVCGAPNVKTGINVIVAVPGARIADNYKIKKGKIRGMESLGMICSLQELGLSESIIPKEFSDGIQILPEGAIPGDSIFSYLDLDDEIIELSITPNRADALSMRGVAHEVAAIYGKKVHFEEKNLIEEAERAADKISVVIESDKVLSYSARIVKNVTVAPSPQWLQNKLMNAGIRPINNVVDVTNYVLLTYGQPMHAFDFDKFDGTTIVARNAENGEKLITLDGEERDLIADDLVIAVNDQPVALAGVMGGQSTEIGSSSKTVVLEAAVFNGTSIRKTSGRLNLRSESSSRFEKGINYDTVSEAMDFAAAMLQELAGGQVLSGQVTEGVLPTEPVEVSTTLGYVNTRLGTELTYTDIEEVFEKLGFAISGSEVKFTVLVPRRRWDIAIQADLVEEIARIYGYEKLPTTLPEAGATAGELTSMQRLRRRVRTVAEGAGLSEIITYALTTPEKAVQFSTQATNITELMWPMTVDRSALRQNVVSGMLDTIAYNVARKNSNLAVYEIGKVFEQTGNPKEDLPTEVETFTFALTGLVEEKDFQTKSKPVDFFYAKGIVEALFIKLKLDVTFVAQKGLASMHPGRTATILLDGKEIGFVGQVHPQTAKQYDIPETYVAEINLSTIESQMNQALIFEDITKYPSVSRDIALLLAESVSHHDIVSAIETSGVKRLTAIKLFDVYAGNNIAEGYKSMAYSLTFQNPNDNLTDEEVAKYMEKITKSLVEKVNAEIR

SEQ ID NO: 4303 - DNA, 2418 bp, Streptococcus pyogenes
ttgggcactaaaattatgttagtatcttataaatggttaaaagaattagtagatatcgatgtgacaccagcagcacttgctgagaaaatgtcgacaacgggtatcgaggtagaaggaattgaagtccctgcagatggtttatcaaaactggttgtggggcatgtgctttcttgtgaagatgtgccagagacacatttgcatttgtgtcaggtagatacaggtgatgaaacgccacgtcaaattgtgtgtggcgcaccaaatgtgaaagcagggattaaggttatcgtggctgtgccaggtgctcgtattgcggataactataaaatcaaaaaaggcaaaatccgcggcatggaatctcttggcatgatttgttccttgcaagaacttggtttgtcagatagtattattccaaaagaattttcagatggtattcaaatcttgccagaggaggctgtgccaggtgatgctatttttaaatacctggacttggacgatcatatcattgaattgtccattacacctaaccgtgctgatgcgctttctatgcgaggtgtggcacatgaagtcgcagctatttatggcaagtcagtatcattcccccaaaaaaatctacaagaatctgataaggcaacttcagaagccattgaagtggccattgcctctgataacgttctaacttacgctagccgtgtcgttgaaaatgtcaaagttaagccaagtccacaatggttgcaaaaccttttaatgaatgctggtattcgtcctattaataatgtggttgatgtgaccaactatgtgctcttgtattttggtcaacctatgcatgcttttgattatgataaatttgaagaccataagattgtggcgcgtgcggctcgtcaaggagaaagtttggtcacacttgatggtgaaaaacgggatttgaccactgaggatcttgttattaccgtggctgacaaaccagttgctttagcaggtgttatgggtggtcaagccactgaaattgatgccaactctcagacggttgttcttgaagctgctgtttttgatggcaaatcgattcgtaaaaccagtggtcgtttaaaccttcgttcggaatcctcttcacgttttgaaaaaggggttaactatgcaactgttttagaagcacttgactttgcagcggctatgttacaagaattagcagaaggtcaagtcttatcaggccatgttcaagctggacaattgccaacagaacctgttgaagtctcaactagccttgactatgtgaatgttcgtttaggaacagaattaacttttgctgatattcaaaggatttttgaccaacttggatttggtctaacaggagatgaaacaagcttcacggtagctgttcctcggcgtcgttgggatgttagcatcccagctgacttggtggaagaaattgcgcgtatctatggttatgataagttgccaacaaccttaccagaggcagggggaacggctgcagaattaacgccaacacaggctcttcgtcgtaaagtccgtggcttagcggaaggattgggcttgactgaaatcatttcgtatgctttgacaacaccagagaaagctgttgagtttgcagtggcaccaagtcacctgacagaactcatgtggccgatgtctgtggagcgttcagcactacgtcaaaatatggtttcagggatgttagatacggttgcctataatgtggctcgtaaacaaagtaacttggctctttatgaaattggaaaaatctttgaacaagaagctaatccaaaagaagaccttcctaatgaagtgaaccattttgcttttgctatttgtggcttagtggcacaaaaagatttccaaacccaagctcaggcagtggatttttaccatgctaaaggtaacttggatactttatttgcaaaccttaacctcaaggttcaatatgtgccaaccaaagacctagcaaacatgcacccaggacggacagcgcttatcctattagatgagcaagtgattggatttgttggtcaagttcatccaggaacagcaaaggcttatagtattccagaaacctatgtggcagaattggatatggctgctttagaagcagcgttgccaagtgatcaaacttttgcggaaatcacaaaattccctgctatgacacgtgatgttgccttgttacttgaccgtgaggtgagtcatcaggccattgtaacagctattgaatcagcaggtgtaaaacgcttgactagcattaaactctttgacgtctatgaaggagcaaccattcaggctggcaaaaaatcaatggcttatagccttactttccaaaatccaaatgacaatttaacggatgaagaagttgccaaatacatggagaaaatcaccaaagcattgacagaacaagtcggtgctgaagtacgc

SEQ ID NO: 4304 - protein, 806 aa, Streptococcus pyogenes
LGTKIMLVSYKWLKELVDIDVTPAALAEKMSTTGIEVEGIEVPADGLSKLVVGHVLSCEDVPETHLHLCQVDTGDETPRQIVCGAPNVKAGIKVIVAVPGARIADNYKIKKGKIRGMESLGMICSLQELGLSDSIIPKEFSDGIQILPEEAVPGDAIFKYLDLDDHIIELSITPNRADALSMRGVAHEVAAIYGKSVSFPQKNLQESDKATSEAIEVAIASDNVLTYASRVVENVKVKPSPQWLQNLLMNAGIRPINNVVDVTNYVLLYFGQPMHAFDYDKFEDHKIVARAARQGESLVTLDGEKRDLTTEDLVITVADKPVALAGVMGGQATEIDANSQTVVLEAAVFDGKSIRKTSGRLNLRSESSSRFEKGVNYATVLEALDFAAAMLQELAEGQVLSGHVQAGQLPTEPVEVSTSLDYVNVRLGTELTFADIQRIFDQLGFGLTGDETSFTVAVPRRRWDVSIPADLVEEIARIYGYDKLPTTLPEAGGTAAELTPTQALRRKVRGLAEGLGLTEIISYALTTPEKAVEFAVAPSHLTELMWPMSVERSALRQNMVSGMLDTVAYNVARKQSNLALYEIGKIFEQEANPKEDLPNEVNHFAFAICGLVAQKDFQTQAQAVDFYHAKGNLDTLFANLNLKVQYVPTKDLANMHPGRTALILLDEQVIGFVGQVHPGTAKAYSIPETYVAELDMAALEAALPSDQTFAEITKFPAMTRDVALLLDREVSHQAIVTAIESAGVKRLTSIKLFDVYEGATIQAGKKSMAYSLTFQNPNDNLTDEEVAKYMEKITKALTEQVGAEVR

SEQ ID NO: 4305 - DNA, 558 bp, Streptococcus agalactiae
atgttaacgctattaccttactcaataggaggttttctaatgtctcaaattacttttaaaaaggttggccttgataatgtgaatattttacagaatattgctatagaaacctttcggcagacgttttctcatgataatagtgaggaacaacttcaagcatttttcaatgagtcttacactttaccagtattaaaatcggaaattacccatgctgaatctgatacttattttgtttatcttgatacagatttagtgggttatttaaaagtaaactggggaagtcagcaaactgaaaaagatcttgataaagcatttgaaattcaaaggatttatcttctagatgcctaccaagggcaaggtataggtaaggctactttcgaatttgctttggatttagcttataaatcaggcttagattgggcttggttaggtgtttgggagtttaatcataaagctcaggcattttacgctaaatacggatttgaaaaattttctgagcaccaattttcagtaggtgataaagtggatacggattggttattaagaaaaagtttacac

SEQ ID NO: 4306 - protein, 186 aa, Streptococcus agalactiae
MLTLLPYSIGGFLMSQITFKKVGLDNVNILQNIAIETFRQTFSHDNSEEQLQAFFNESYTLPVLKSEITHAESDTYFVYLDTDLVGYLKVNWGSQQTEKDLDKAFEIQRIYLLDAYQGQGIGKATFEFALDLAYKSGLDWAWLGVWEFNHKAQAFYAKYGFEKFSEHQFSVGDKVDTDWLLRKSLH

SEQ ID NO: 4307 - DNA, 1011 bp, Streptococcus agalactiae
ttgaaaatatcaactcaagaaaagcttaaagaaatgactgggaaccacactaaagaattacaagacttacgtgtacaagttttaggaaaaaaaggttctctaacagaattactaaaaggtctgaaagatttatctaatgatttacgaccagttgttggaaaacaagtcaatgaagtacgtgatattttaacaaaagcgtttgaggaacaagctaaagtagtggaagctgcgaagattcaagcacagttagagtctgagagtgtcgacgttaccttgcctggtcgtcaaatgacattaggtcaccgtcatgtcttaacacaaactagcgaagagattgaagatatctttttaggtatgggattccaagtggttgatggttttgaagttgagaaagactactataattttgaacgaatgaatttaccaaaagatcatccagcccgtgatatgcaagatactttttatattacagaagaaatcttgctacgtactcatacttcgcctgttcaagcacgaacaatggaccaacatgatttttctaaagggcctttaaaaatgatttctcctggacgtgttttccgtcgtgatactgatgatgctactcatagccatcaattccatcaaattgaaggcttagttgttggagaaaatatttcaatgggcgatctcaaaggaacacttcaactgatttctcaaaaaatgtttggagcagagcgtaaaatccgacttcgtccttcatatttcccattcacagaaccttcagttgaagttgatgtctcttgcttcaagtgcggaggtaagggatgtaatgtctgcaaacagacaggttggattgagatattgggtgctggtatggttcacccaagtgttttggaaatgtctggtattgattctgagaaatactccggttttgcctttggtttaggtcaagaacgtattgcaatgttacgctacggtatcaatgacattcgtggcttctatcaaggtgatgttcgcttcacagatcaattt

SEQ ID NO: 4308 - protein, 337 aa, Streptococcus agalactiae
MKISTQEKLKEMTGNHTKELQDLRVQVLGKKGSLTELLKGLKDLSNDLRPVVGKQVNEVRDILTKAFEEQAKVVEAAKIQAQLESESVDVTLPGRQMTLGHRHVLTQTSEEIEDIFLGMGFQVVDGFEVEKDYYNFERMNLPKDHPARDMQDTFYITEEILLRTHTSPVQARTMDQHDFSKGPLKMISPGRVFRRDTDDATHSHQFHQIEGLVVGENISMGDLKGTLQLISQKMFGAERKIRLRPSYFPFTEPSVEVDVSCFKCGGKGCNVCKQTGWIEILGAGMVHPSVLEMSGIDSEKYSGFAFGLGQERIAMLRYGINDIRGFYQGDVRFTDQF

SEQ ID NO: 4309 - DNA, 1119 bp, Streptococcus pyogenes
atggtaccgcgtgtcaacgctccgcttatcaagtggaggagtggcatgcttttttcatcgccaaaagaagggaaaactatggatttacaagcacaattagaggaattaaagacaaaaacattggagaccttacagtctttgacgggtaatcataccaaagaactgcaagatttgcgcgtggctgttcttgggaaaaagggatctttgacagaattactaaaggggctaaaagacttgtctaatgacttgcgtcctgtggttggtaaacaggtgaacgaagttcgtgacttattgacaaaagcctttgaagaacaggctaaaattgtagaggctgctaaaattcaggcccaacttgatgctgaaagcattgatgtgactttaccgggtcgtcaaatgactctggggcatcgtcatgtgttaacacaaaccagtgaagaaatcgaagatattttcttaggaatgggttttcagattgttgatggctttgaggtggaaaaagattattacaactttgagcgcatgaatttgccaaaggatcaccctgcccgtgacatgcaagatacgttttatatcacagaagaaatcttgttacgaactcacaccagtcctgtgcaggcccgtactcttgatcaacatgatttttcaaaagggcctttaaaaatggtttctccaggtcgtgttttccgtcgtgatactgatgacgctacccactcacatcaattccatcaaattgaaggtttggttgtgggcaaaaatatttccatgggagacctcaaagggacccttgaaatgatcatcaagaagatgttcggtgacgaacgtagcattcgtttgcgcccgtcatatttcccgttcacagaaccatctgttgaagtggatgtttcttgctttaaatgtggtgggaaaggctgtaatgtctgcaagaaaacaggatggattgaaattcttggtgctggtatggttcacccaagtgtcttggaaatgtcaggtgttgatgcaaaagagtattcaggctttgcctttggtttaggtcaagagcggattgccatgttgcgttatggcattaatgacattcgtggtttctatcaaggcgaccaacgtttctctgaacaatttaac

SEQ ID NO: 4310 - protein, 373 aa, Streptococcus pyogenes
MVPRVNAPLIKWRSGMLFSSPKEGKTMDLQAQLEELKTKTLETLQSLTGNHTKELQDLRVAVLGKKGSLTELLKGLKDLSNDLRPVVGKQVNEVRDLLTKAFEEQAKIVEAAKIQAQLDAESIDVTLPGRQMTLGHRHVLTQTSEEIEDIFLGMGFQIVDGFEVEKDYYNFERMNLPKDHPARDMQDTFYITEEILLRTHTSPVQARTLDQHDFSKGPLKMVSPGRVFRRDTDDATHSHQFHQIEGLVVGKNISMGDLKGTLEMIIKKMFGDERSIRLRPSYFPFTEPSVEVDVSCFKCGGKGCNVCKKTGWIEILGAGMVHPSVLEMSGVDAKEYSGFAFGLGQERIAMLRYGINDIRGFYQGDQRFSEQFN

SEQ ID NO: 4311 - DNA, 105 bp, Streptococcus agalactiae
gtggcacgcttttttttgttttcaaagctacttattttgacttggaggaaagatggatttacaaaaacaattagaagagttgaaaatatcaactcaagaaaagct

SEQ ID NO: 4312 - protein, 35 aa, Streptococcus agalactiae
MARFFLFSKLLILTWRKDGFTKTIRRVENINSRKA

SEQ ID NO: 4313 - DNA, 99 bp, Streptococcus agalactiae
ttgcagtcacggctgaactccctaagcagcttcccttggtttactagtctcacagacctctattcaattaaagactattttatcaaatttttcagtctt

SEQ ID NO: 4314 - protein, 33 aa, Streptococcus agalactiae
MQSRLNSLSSFPWFTSLTDLYSIKDYFIKFFSL

SEQ ID NO: 4315 - DNA, 813 bp, Streptococcus agalactiae
ttgcttttttcattactggcaatagggttaggtgaaagcaaatctttgcctaatgatcacattttaaaacaggtgacagatttaattattagtaatgaatctggcaaaaatacttcccttaaaaatgtatcaggaactcctagtagagagttatctgaatctgttttgactagcaatgttaaaaaacaattgggaacaaatatagcttggaaccagtcaggtgcttttatcattaatcaaaataaaacagatttgaatgctaaagtgtcaagtgcaccatatgctattaatgaaataaagaaggttaataaccaaattgttccgactaaagcaaatgccttattaacaaaagcaactcgtcaatatcgaaatcgagaagaaacagggaatggtagaacttattggaaaccagctggatggcatcagataaatggattaaaagggagctataaccacgctgtggacagaggccatttaattggttatgctttagtagggagtttaagaggatttgatgcctccacaagtaatcctaaaaatattgccacacaagcagcttgggcaaaccaagctaatagcaaccaatcaacagggcaaaattattatgaaactttagttcgtaaagcattggatcgtcataaaactgttaggtatcgtgtgactttaatttatgacagagataatcttttatcttcgggatcacatattgaggctaaatcttcagatggaagtttagaatttaacgtttttattcctaatgtacaatcgggattattatttgattatgcaacaggaaaagtgaagcagacaaag

SEQ ID NO: 4316 - protein, 271 aa, Streptococcus agalactiae
MLFSLLAIGLGESKSLPNDHILKQVTDLIISNESGKNTSLKNVSGTPSRELSESVLTSNVKKQLGTNIAWNQSGAFIINQNKTDLNAKVSSAPYAINEIKKVNNQIVPTKANALLTKATRQYRNREETGNGRTYWKPAGWHQINGLKGSYNHAVDRGHLIGYALVGSLRGFDASTSNPKNIATQAAWANQANSNQSTGQNYYETLVRKALDRHKTVRYRVTLIYDRDNLLSSGSHIEAKSSDGSLEFNVFIPNVQSGLLFDYATGKVKQTK

SEQ ID NO: 4317 - DNA, 108 bp, Streptococcus agalactiae
ttgccagtaatgaaaaaagcaaagttacaatcgaagctgttatttgtttttgtttttttgtcattgtattattctactgctaaaattaactctcaaaggaaaccacta

SEQ ID NO: 4318 - protein, 36 aa, Streptococcus agalactiae
MPVMKKAKLQSKLLFVFVFLSLYYSTAKINSQRKPL

SEQ ID NO: 4319 - DNA, 1281 bp, Streptococcus agalactiae
atggagattcaaatggataaaattattgtggaaggtgggcaaacgcagcttcaaggtcaagttgttattgaaggagctaaaaatgcagttttacctcttttagcagccacaattttaccaagccaagggaaaacattgttgaccaatgttcctatcttgtctgatgtatttacaatgaacaatgttgttcgtggtttagatattcaagttgactttaattgcgataaaaaagaaatcttagtggatgcctcaggtgatattttagatgttgcaccttatgaatttgttagtcaaatgagagcttctattgttgttttgggacctattttagctagaaatggccatgctaaggtttcaatgccaggcggttgtacaattggtagccgaccaattgaccttcatcttaaaggtttagaagctatgggagctacgattacacaaaatggtggtgatattactgcccaagctgaaaagcttaagggagctaatatatacatggattttccctcagtcggtgccactcaaaacttaatgatggctgctacacttgcttcaggcacaacaacgatagagaatgctgcacgtgaaccagaaattgtagaccttgcgcagttactaaataaaatgggagctaaagtaaagggtgctggtacggaaacattaacgatcattggtgttgatgctttacatggtacagaacatgatgttgtccaagatcgtattgaagctggaacctttatggtggcagctgctatgacttctggaaatgttctagtaaaggatgctatttgggaacataaccgtcctttaatctctaaattgatggagatgggtgttgaagtgtcagaggaagaagatggtattcgtgtaaaagctgatactaaaaaattgaagccagtgactgtgaaaacactccctcatccaggatttcctactgatatgcaagctcaatttacagctctaatggcagtagttaatggcgaatcaactatgattgagacagtttttgaaaatcgttttcaacatttggaagaaatgcgtcgcatgggattacaaacggaaattttacgagatactgcaatgattcatggtgggagagctttacaaggtgcaccggtcatgtctactgacttacgagctagtgcagctttaatcttggcaggaatggttgcgcaagggcaaacagtagttggccaattaacccatttagaccgtggttattatcaattccatgaaaaattagcggctcttggtgctaatattaaacgtgtaagtgaggcg

SEQ ID NO: 4320 - protein, 427 aa, Streptococcus agalactiae
MEIQMDKIIVEGGQTQLQGQVVIEGAKNAVLPLLAATILPSQGKTLLTNVPILSDVFTMNNVVRGLDIQVDFNCDKKEILVDASGDILDVAPYEFVSQMRASIVVLGPILARNGHAKVSMPGGCTIGSRPIDLHLKGLEAMGATITQNGGDITAQAEKLKGANIYMDFPSVGATQNLMMAATLASGTTTIENAAREPEIVDLAQLLNKMGAKVKGAGTETLTIIGVDALHGTEHDVVQDRIEAGTFMVAAAMTSGNVLVKDAIWEHNRPLISKLMEMGVEVSEEEDGIRVKADTKKLKPVTVKTLPHPGFPTDMQAQFTALMAVVNGESTMIETVFENRFQHLEEMRRMGLQTEILRDTAMIHGGRALQGAPVMSTDLRASAALILAGMVAQGQTVVGQLTHLDRGYYQFHEKLAALGANIKRVSEA

SEQ ID NO: 4321 - DNA, 1269 bp, Streptococcus pyogenes
gtggataaaataatcattgaaggtggtcaaacacgcttagaaggagaagttgttattgagggtgctaaaaacgcagttcttcctttactggcagcatctattttaccttcaaaaggaaaaacaattcttagaaacgttcctattctatctgatgtttttaccatgaataacgtggtacgtggtttagatattcgtgttgattttaatgaagcagctaacgaaatcacagttgatgcctcaggacacattttagatgaagccccttacgagtacgtgagccaaatgcgtgcctctattgttgttttaggaccaattttggcacgtaatggccacgcaaaagtatcaatgcctggaggctgtacgattggcagtaggcctattaatttgcacttaaaaggattagaggctatgggggcaacgattactcaaaaaggtggagatattaccgctcaagcagatcgactgcaaggtgccatgatttatatggacttcccatctgtaggagctacccaaaacttgatgatggctgccactttagctgatggtgtgaccactattgaaaatgctgctcgtgagcctgaaattgttgatttagctcaatttttgaataaaatgggagctagaattcgtggtgctggaacagagacgttaacgataacaggtgtcacgcatttacgaggcgtagaacatgatgttgttcaagatcgtatagaagccggtacatttatggttgcagcggcgatgacttcaggcaatgttttgattagagatgctgtttgggaacataatcgtccattgatttcaaaattaatggaaatgggtgtttctgtaacagaagaagaatacggtattcgcgttcaagcaaacacgccaaagctcaaacctgtaacggttaaaaccttgcctcatccaggttttccaacagacatgcaagctcaatttacagctttaatggcagtggtcaatggagagtctactatggttgaaactgtctttgaaaatcgatttcaacatctggaagaaatgcgacgcatgggcttacaatctgaaatccttagggaaactgccatgattcatggtggaagacaactgcaaggtgctcctgtgatgtcaacagatttacgtgccagtgctgcccttatcttgacagggattgttgctcaaggagttacaatagttaataatttggttcatttagatcgtggctactatcaatttcatgaaaaattagcaaagcttggagctactattagtcgtagcagtgaggtc

SEQ ID NO: 4322 - protein, 423 aa, Streptococcus pyogenes
VDKIIIEGGQTRLEGEVVIEGAKNAVLPLLAASILPSKGKTILRNVPILSDVFTMNNVVRGLDIRVDFNEAANEITVDASGHILDEAPYEYVSQMRASIVVLGPILARNGHAKVSMPGGCTIGSRPINLHLKGLEAMGATITQKGGDITAQADRLQGAMIYMDFPSVGATQNLMMAATLADGVTTIENAAREPEIVDLAQFLNKMGARIRGAGTETLTITGVTHLRGVEHDVVQDRIEAGTFMVAAAMTSGNVLIRDAVWEHNRPLISKLMEMGVSVTEEEYGIRVQANTPKLKPVTVKTLPHPGFPTDMQAQFTALMAVVNGESTMVETVFENRFQHLEEMRRMGLQSEILRETAMIHGGRQLQGAPVMSTDLRASAALILTGIVAQGVTIVNNLVHLDRGYYQFHEKLAKLGATISRSSEV

SEQ ID NO: 4323 - DNA, 411 bp, Streptococcus agalactiae
atggcacaattgactgttcaagtagtaacaccagatggtattagatatgaccatcacgctagtctcattactgttagaacgccagatggtgaaatgggaattttaccaggtcacataaatttgattgctccccttaatgttcatcagatgaagattaatcgttctcatcaagaaggtgtagactgggtagctgttaatggtggtataattgaagttaatgaggatcaggtgacaattgttgcggattcagcagaacgagcacgtgatatagaccttaaccgtgcagaacgggctaaggaacgcgctgagcgtgcattagaaaaagctcaaacaactcagaatattgatgagatgcgtagagctgaggttgctcttcgtcgcgcaattaaccgtattagcgtcggtaaaaag

SEQ ID NO: 4324 - protein, 137 aa, Streptococcus agalactiae
MAQLTVQVVTPDGIRYDHHASLITVRTPDGEMGILPGHINLIAPLNVHQMKINRSHQEGVDWVAVNGGIIEVNEDQVTIVADSAERARDIDLNRAERAKERAERALEKAQTTQNIDEMRRAEVALRRAINRISVGKK

SEQ ID NO: 4325 - DNA, 414 bp, Streptococcus pyogenes
atgacacaaatgactgttcaagtggtaacgccagatggaatcaaatatgatcaccatgctaaatttatttcggtaacaacaccagatggggaaatggggattttacctaatcacatcaatttgattgcacctttgcaagttcatgaaatgaaaattcgccgaggtggtgaagatgaaaaagtggactggattgcaatcaatggtggtattattgaaatcaaggataatgtggttaccattgtcgctgattctgcagaacgtgaccgtgatatcgatgtcagccgagcagagcgagcaaaactaagagcagaacgtgaaattgcacaggctgaaacaacccataatattgatgaggttcgtcgtgccaaggttgccttgcgccgcgctttgaatcgtatcaacgttagtaaaaaa

SEQ ID NO: 4326 - protein, 138 aa, Streptococcus pyogenes
MTQMTVQVVTPDGIKYDHHAKFISVTTPDGEMGILPNHINLIAPLQVHEMKIRRGGEDEKVDWIAINGGIIEIKDNVVTIVADSAERDRDIDVSRAERAKLRAEREIAQAETTHNIDEVRRAKVALRRALNRINVSKK

SEQ ID NO: 4327 - DNA, 1404 bp, Streptococcus agalactiae
atgagctcaggcaaaattgctcaggtagttggacctgtcgttgacgttgtatttgcaagtggcgacaaacttcctgagattaataatgcattgattgtctataaaaatggcgataagtcacaaaaagtagtacttgaagttgctcttgaacttggtgacggcctcgttcgtacaatcgctatggaatcaactgatgggcttacacgtggtttggaagtattagatactggtcgcgcaattagtgtgccggttggtaaggatactttgggtcgtgtcttcaacgttcttggagatgctattgaccttgaagagccttttgcagaagatgcagaacgtcaaccaatccataaaaaagcaccatcgtttgatgaattatcaacatcatcagaaatcttagaaactggtattaaagttattgacttattagcaccttacttaaaaggtggtaaagttggacttttcggtggtgcaggtgttggtaaaaccgttcttattcaagaattaatccacaacatcgcccaagaacatggtggtatttcagtatttactggtgtaggagaacgtactcgtgaagggaatgacctttattgggaaatgaaagaatctggcgttattgaaaaaacggctatggtctttggtcaaatgaatgaaccaccaggagcacgtatgcgtgtggcacttactggtcttacaatagctgagtacttccgtgatgtagaaggacaagatgtgcttctcttcattgataatatcttccgtttcacacaagctgggtcagaagtgtcagcgcttttaggtcgtatgccttcagccgttggttatcaaccaacacttgctacagaaatgggacaattacaagagcgtatcacttcaactaaaaaaggttctgttacatcaatccaagctatttatgtgccagcagatgactatactgaccctgcgccagctacagcctttgctcacttagattcaacaactaaccttgaacgtaaattgacacaaatggggatttatccagccgttgacccattagcttcaagttctcgtgcactcacaccagaaatcgttggagatgagcactatgaagttgcaacagaagtacagcgtgttcttcaacgttaccgtgagttacaagatatcattgcgattttaggtatggatgaattatcagatgaggaaaaaacgttagttggacgtgcacgtcgtatccaattcttcctttctcaaaacttcaatgttgcagaaacatttactggtcaaccaggttcatatgttccggttgaagaaactgttcgcggattcaaagaaatcctagatggtaaacatgatcaaattccagaagatgccttccgtatggttggtggtattgaggatgttatcgcaaaagcagaaaaaatgaactat

SEQ ID NO: 4328 - protein, 468 aa, Streptococcus agalactiae
MSSGKIAQVVGPVVDVVFASGDKLPEINNALIVYKNGDKSQKVVLEVALELGDGLVRTIAMESTDGLTRGLEVLDTGRAISVPVGKDTLGRVFNVLGDAIDLEEPFAEDAERQPIHKKAPSFDELSTSSEILETGIKVIDLLAPYLKGGKVGLFGGAGVGKTVLIQELIHNIAQEHGGISVFTGVGERTREGNDLYWEMKESGVIEKTAMVFGQMNEPPGARMRVALTGLTIAEYFRDVEGQDVLLFIDNIFRFTQAGSEVSALLGRMPSAVGYQPTLATEMGQLQERITSTKKGSVTSIQAIYVPADDYTDPAPATAFAHLDSTTNLERKLTQMGIYPAVDPLASSSRALTPEIVGDEHYEVATEVQRVLQRYRELQDIIAILGMDELSDEEKTLVGRARRIQFFLSQNFNVAETFTGQPGSYVPVEETVRGFKEILDGKHDQIPEDAFRMVGGIEDVIAKAEKMNY

SEQ ID NO: 4329 - DNA, 1404 bp, Streptococcus pyogenes
atgagctcaggcaaaattgctcaggttgttggtccagtagtagacgttatgtttgctagcggggacaaacttccagagattaataatgcattgattgtttataaagatagtgataaaaagcaaaaaatcgtccttgaagttgctctggaacttggtgacggtatggtgcgaacaatcgctatggaatcaactgatgggcttacacgtgggttagaagttcttgacactggtcgtgcgattagcgtaccagtaggtaaagaaactttgggacgcgtctttaatgtacttggagaaaccattgacttggaagaaccatttgcagaagacgttgaccgtcagccgatccataaaaaagcaccatcgtttgatgaattatcaacatcatcagaaattcttgaaactggtatcaaggtaattgaccttcttgccccttaccttaaaggtggtaaagttggacttttcggtggtgccggagttggtaagactgtccttatccaagaattaatccacaatatcgcccaagaacacggaggtatttcagtatttaccggtgttggtgagcgaacacgtgaaggaaatgacctttactgggaaatgaaagaatcaggcgttattgagaaaactgccatggtttttggtcaaatgaatgagccgcctggggcacgtatgcgtgtagcccttactggtttaaccattgctgagtatttccgtgatgtagaaggccaagatgttttgctctttattgataatatcttccgtttcactcaggcaggttcagaagtatcagccctcttaggccgtatgccttctgctgttggttaccaaccgacccttgctactgaaatgggacaattgcaagaacgtattacgtcaactcaaaaaggatctgttacttctatccaagcgatttatgtgccagccgatgactatactgacccagcgccagcaactgcatttgctcacttggattcaacaactaaccttgagcgtaaattgactcaaatgggtatttaccctgcggttgacccattggcttcaagttcacgggccttatcacctgaaattgttggtgaagagcactatgctgtggcaacagaggttcaacgtgtacttcagcgctaccgtgaattacaagacatcatcgctattttggggatggatgaattatcagatgaagaaaaaacattggttggacgtgcgcgtcgtatccagttcttcttatcacaaaactttaatgttgctgaacaatttacaggtcttcctggttcttacgtgccagttgctgatacagttcgcggctttaaagaaattcttgaaggaaaatacgatgaacttccagaagatgccttccgttcagttggtccaatcgaggatgtgattaaaaaagccgaaaaaatgggcttt

SEQ ID NO: 4330 - protein, 468 aa, Streptococcus pyogenes
MSSGKIAQVVGPVVDVMFASGDKLPEINNALIVYKDSDKKQKIVLEVALELGDGMVRTIAMESTDGLTRGLEVLDTGRAISVPVGKETLGRVFNVLGETIDLEEPFAEDVDRQPIHKKAPSFDELSTSSEILETGIKVIDLLAPYLKGGKVGLFGGAGVGKTVLIQELIHNIAQEHGGISVFTGVGERTREGNDLYWEMKESGVIEKTAMVFGQMNEPPGARMRVALTGLTIAEYFRDVEGQDVLLFIDNIFRFTQAGSEVSALLGRMPSAVGYQPTLATEMGQLQERITSTQKGSVTSIQAIYVPADDYTDPAPATAFAHLDSTTNLERKLTQMGIYPAVDPLASSSRALSPEIVGEEHYAVATEVQRVLQRYRELQDIIAILGMDELSDEEKTLVGRARRIQFFLSQNFNVAEQFTGLPGSYVPVADTVRGFKEILEGKYDELPEDAFRSVGPIEDVIKKAEKMGF

SEQ ID NO: 4331 - DNA, 879 bp, Streptococcus agalactiae
atggcaggctctcttagtgaaattaaagacaagattctctctacagaaaaaacaagtaagattactagtgcgatgcagatggtctcatctgctaagttggttaaatctgaacaagctgctagagattttcaagtgtatgcctctaaaattcgtcaaattactactaacctcttaaagtcagacttagtatctggatcagataaccctatgttatcttcacgtccggtgaagaaaacaggttatattgttattacttctgataagggtttagttggtggttacaattcaaaaatcttaaaagcgatgatggacactataactgactatcatactgagaatgatgattatgccatcatttcaattggtagtgttggttctgattttttcaaagcacgtggaatgaatgtttctttcgaattacgtggtttagaggaccaaccaagttttgatcaagttggtaaaattattgctcaagcagttgaaatgtacaaaaatgagttgttcgatgaattatatgtttgctacaatcaccatgttaacagtttaactagccaagtcagaatgcaacaaatgcttcctatcaaagaattggatgcagaagaggcttctgaggatagagtgattactggttttgaacttgagccaaaccgtgaagttatattggagcaattattgcctcaatatactgagagtttgatttatggagctattattgatgctaaaacagcagagcatgcggctggtatgacagctatgcagactgcaactgataatgctaaaaatgttatcaatgatttaactattcaatataaccgcgctcgtcaagcagctatcacacaggaaattacagaaattgttgcaggtgctaatgcacttgaa

SEQ ID NO: 4332 - protein, 293 aa, Streptococcus agalactiae
MAGSLSEIKDKILSTEKTSKITSAMQMVSSAKLVKSEQAARDFQVYASKIRQITTNLLKSDLVSGSDNPMLSSRPVKKTGYIVITSDKGLVGGYNSKILKAMMDTITDYHTENDDYAIISIGSVGSDFFKARGMNVSFELRGLEDQPSFDQVGKIIAQAVEMYKNELFDELYVCYNHHVNSLTSQVRMQQMLPIKELDAEEASEDRVITGFELEPNREVILEQLLPQYTESLIYGAIIDAKTAEHAAGMTAMQTATDNAKNVINDLTIQYNRARQAAITQEITEIVAGANALE

SEQ ID NO: 4333 - DNA, 873 bp, Streptococcus pyogenes
atggcaggctctctaagtgaaattaaagctaaaattatttcaactgagaaaacaagtaaaatcactagtgccatgcgtatggtttcttctgcaaaacttgttaaatctgagcaagcagctcgtgattttcaaatttacgcctcaaaaattcgccagattactacagatttattgaaatcagaattaaccataggatctgataatccgatgttggtgtctcgtcctgtcaaaaaaacaggctatattgtcatcacgtctgataaaggacttgttggaggttacaattcaaaaatcttgaaatctgttatggatatgattacagagtaccatgctgatggtgactatgaaatcatttctattggtagtgttggttcagacttcttcaaagcaagagggatgaatgtggcttttgaacttcgtggacttgcggatcaaccaagttttgaacaagtgagacaaatcatttcacaatccgttgacatgtttgtcaatgagatttttgatgagttatatgtctgttacaatcaccatgtgaatagcttaaccagccaagtccgtgttcaacagatgttgccaatttctgacttggttgctgatgaagcagcagaagaaggtgttactgggtttgaattggaacctaatcgtcatgatattttagatcaattgttacctcaattcacagaaagtttaatttatggggctatcattgatgctaaaacggctgaacatgcagcaggtatgactgccatgcagacagcaactgataacgctaagaatgtcattaacgatttgaccatccaatataaccgagctcgtcaagcagcaattacacaagaaattactgaaattgttgcaggagcaaatgcactagaa

SEQ ID NO: 4334 - protein, 291 aa, Streptococcus pyogenes
MAGSLSEIKAKIISTEKTSKITSAMRMVSSAKLVKSEQAARDFQIYASKIRQITTDLLKSELTIGSDNPMLVSRPVKKTGYIVITSDKGLVGGYNSKILKSVMDMITEYHADGDYEIISIGSVGSDFFKARGMNVAFELRGLADQPSFEQVRQIISQSVDMFVNEIFDELYVCYNHHVNSLTSQVRVQQMLPISDLVADEAAEEGVTGFELEPNRHDILDQLLPQFTESLIYGAIIDAKTAEHAAGMTAMQTATDNAKNVINDLTIQYNRARQAAITQEITEIVAGANALE

SEQ ID NO: 4335 - DNA, 90 bp, Streptococcus agalactiae
atgaattcctcagccattgctactcctgcatatggagcaatgaaaagtaatggagatggttgtgatgctgaagctgtcacaacgattgta

SEQ ID NO: 4336 - protein, 30 aa, Streptococcus agalactiae
MNSSAIATPAYGAMKSNGDGCDAEAVTTIV

SEQ ID NO: 4337 - DNA, 1503 bp, Streptococcus agalactiae
ttggcaattaatgcacaagaaattagcgctttaattaaaaagcaaattgaagacttccagccaaattttgacgtcacagaaactggtattgttacatatatcggtgatggtattgctcgtgctcgtgggctagataatgctatgagtggagaacttcttgaattttcaaatggtgcgtacggtatggctcaaaaccttgagtctaatgacgtgggtatcattattttgggtgatttctcagaaattcgtgaaggtgatgtggtaaaacgtactggtaaaattatggaagtaccagtaggggaagctatgattggacgtgtcgtcaatccgcttggtcaaccagttgatggactaggtgaaattgagacgacagcaacacgcccagttgaaacaccagcacctggtgttatgcaacgtaaatcagtttttgagcctcttcaaacaggtctcaaagcgattgatgctttggttcctatcggacgtggtcaacgcgaattgattatcggtgaccgccaaactggtaagacgtctgtagcgattgatgcaatcttgaatcaaaaaggtcaagatatgatctgtatctatgtggctatcggtcaaaaagagtctacagtacgtacacaagttgaaactttgcgtaaatacggtgcccttgattatacaatcgttgtgacagcttcagcatcacaaccatctccattacttttcattgctccatatgcaggagtagcaatggctgaggaattcatgtataacgggaaacacgttttgattgtttatgatgatttatcaaaacaagccgtagcttatcgtgaactttcgcttcttcttcgccgtcctccaggtcgcgaagcttacccaggggatgttttctaccttcatagtcgtcttttggaacgttcagctaaagtatcagatgctttaggtggaggttcgattacagcgcttccgttcattgaaacacaagcaggtgatatctcagcatatattgctacaaacgttatttcaattactgacggccaaattttcttgcaagaaaatctctttaactcaggtattcgtccagcgattgatgcaggttcatcagtatctcgtgttggtggtgcagcgcaaattaaagcgatgaagagagttgcaggtacgcttcgtctagatcttgcttcttatcgcgaacttgaggcattcactcaatttggttcagaccttgatgcagcaacacaagcaaaactaaatcgtggtcgtcgcacagtggaagtgttaaaacaaccattacacaaaccattaccagttgagaaacaagttgtgattttatatgctctaacacatggattccttgatgatgtacctgtaaatgatattttagcttttgaagaagctttgtatgattactttgatgctcattatgataatctcttcgaaacaatccgcacaacaaaagatttaccagaagaagcagaattagatgctgctattcaagcatttaaagatcaatcacaatttaaa

SEQ ID NO: 4338 - protein, 501 aa, Streptococcus agalactiae
MAINAQEISALIKKQIEDFQPNFDVTETGIVTYIGDGIARARGLDNAMSGELLEFSNGAYGMAQNLESNDVGIIILGDFSEIREGDVVKRTGKIMEVPVGEAMIGRVVNPLGQPVDGLGEIETTATRPVETPAPGVMQRKSVFEPLQTGLKAIDALVPIGRGQRELIIGDRQTGKTSVAIDAILNQKGQDMICIYVAIGQKESTVRTQVETLRKYGALDYTIVVTASASQPSPLLFIAPYAGVAMAEEFMYNGKHVLIVYDDLSKQAVAYRELSLLLRRPPGREAYPGDVFYLHSRLLERSAKVSDALGGGSITALPFIETQAGDISAYIATNVISITDGQIFLQENLFNSGIRPAIDAGSSVSRVGGAAQIKAMKRVAGTLRLDLASYRELEAFTQFGSDLDAATQAKLNRGRRTVEVLKQPLHKPLPVEKQVVILYALTHGFLDDVPVNDILAFEEALYDYFDAHYDNLFETIRTTKDLPEEAELDAAIQAFKDQSQFK

SEQ ID NO: 4339 - DNA, 1506 bp, Streptococcus pyogenes
ttggcaattaatgcacaagaaattagcgctttaattaaaaagcaaattgagaacttccagccaaatttcgatgtcacagaaactgggatcgttacctatattggtgacggtattgcacgtgcccgtggattagataatgccatgagtggtgaacttcttgaatttgaaaatggtgcctacgggatggctcaaaaccttgagtcaaatgatgtgggtattattattcttggtgatttttcagcaatccgtgaaggagatgtggttaagcgcaccggtaaaatcatggaagtaccagttggtgaagctctcattggacgtgtggtaaacccacttggacaaccagttgatggcttgggagatattgaaacaactggctttagaccagtagaaacgccagctcctggtgttatgcagcgtaaatccgtttctgaacccttacaaactggattaaaagcaattgatgctttggttccaattggtcgtgggcaacgtgagttgattatcggagaccgtcaaacaggaaaaacatccgtagctattgatgcgattttgaaccaaaaaggtcaagacatgatttgtatctatgtggctattggtcaaaaagaatcaaccgttcgtacacaagttgaaacccttcgccgttacggtgccttggattatactattgttgtgacagcgtcagcctcacaaccatcaccattgctctttatcgctccttatgcgggtgttgccatggctgaagaatttatgtaccaaggcaagcatgtcttgattgtctatgatgatttatcaaaacaagcggtggcttatcgtgaattgtctctcttgcttcgtcgtccaccaggtcgtgaggcttacccaggggatgttttctacttgcatagccgtcttttggaacgctctgcaaaagtttctgatgacttaggtggaggttctatcacagctctaccatttatcgaaacacaggccggagatatctctgcatatattgcgactaacgttatttcgattacagacggacaaatcttcttgcaagagaacctctttaattcaggaattcgtccagcgattgatgcaggatcatctgtctcacgtgtaggtggttccgctcaaattaaagcgatgaaaaaggttgctggtactcttcgtttggatttggcttcctatcgtgaattagaagcctttacccaatttggttcggaccttgatgctgcaacacaagcaaaacttaatcgtggtcgccgtacggttgaaatcttgaagcaaccattgcataaaccgttacctgttgaaaagcaagtcgttattctttatgcccttactcatggtttcttagatgatgttcctgtagatgatattttggcttttgaagaagctctttacgactactttgacgttcattacaatgatttatttgaaactatccgtaccacaaaagaccttcctgaagaagctgcccttgatgccgctattaaagcgtttaaagaacactcaaactttaagtca

SEQ ID NO: 4340 - protein, 502 aa, Streptococcus pyogenes
LAINAQEISALIKKQIENFQPNFDVTETGIVTYIGDGIARARGLDNAMSGELLEFENGAYGMAQNLESNDVGIIILGDFSAIREGDVVKRTGKIMEVPVGEALIGRVVNPLGQPVDGLGDIETTGFRPVETPAPGVMQRKSVSEPLQTGLKAIDALVPIGRGQRELIIGDRQTGKTSVAIDAILNQKGQDMICIYVAIGQKESTVRTQVETLRRYGALDYTIVVTASASQPSPLLFIAPYAGVAMAEEFMYQGKHVLIVYDDLSKQAVAYRELSLLLRRPPGREAYPGDVFYLHSRLLERSAKVSDDLGGGSITALPFIETQAGDISAYIATNVISITDGQIFLQENLFNSGIRPAIDAGSSVSRVGGSAQIKAMKKVAGTLRLDLASYRELEAFTQFGSDLDAATQAKLNRGRRTVEILKQPLHKPLPVEKQVVILYALTHGFLDDVPVDDILAFEEALYDYFDVHYNDLFETIRTTKDLPEEAALDAAIKAFKEHSNFKS

SEQ ID NO: 4341 - DNA, 534 bp, Streptococcus agalactiae
atgaataaaaagacgcaggctctaattgagcaatattcaaaaagccttgttgaagttgccattgaacataaaattgttgaaaaaatccaacaagaagtagcagctttaattgatatttttgaaacaagcgagcttgagggtgtcctgtcaagtcttgccgtttcacatgatgaaaaacaacattttgtgaagacattgcaaacatcatgttcaacttatcttgttaatttccttgaggttattgtacaaaatgaacgtgaagcacttctatatcctattttgaaatcagttgatcaggaacttatcaaagtgaatggtcaatatccaattcaaattacaactgcagttgctttgtctccagaacaaaaagaacgtctttttgatattgctaaaactaaattagctttaccaaatggacagttagttgagcacattgacccatctattgttggtggatttgttgtcaatgcaaacaataaagtaattgatgcaagtgttcgtaatcaattacatcaatttaaaatgaaattaaaa

SEQ ID NO: 4342 - protein, 178 aa, Streptococcus agalactiae
MNKKTQALIEQYSKSLVEVAIEHKIVEKIQQEVAALIDIFETSELEGVLSSLAVSHDEKQHFVKTLQTSCSTYLVNFLEVIVQNEREALLYPILKSVDQELIKVNGQYPIQITTAVALSPEQKERLFDIAKTKLALPNGQLVEHIDPSIVGGFVVNANNKVIDASVRNQLHQFKMKLK

SEQ ID NO: 4343 - DNA, 534 bp, Streptococcus pyogenes
atgaccaaaaaagaacaggctcttatcgagcaatatgcaaaaagccttgttgaggtggcgagtgaacatcattctcttgatgccttacaagctgatgtgcttgcgattttagagacgtttgtaacaactaatcttgatcaaagtctatcaagtcaagctgttccgcatgctgaaaaaataaaattgctaaccttattaaagggaaataattctgtttatatgaataatttcttgaatctcattttacaaaacgaacgtgaagcttatttgtatcaaatgcttcaggctgttttaaatgaaattgcaatagtttcaaatcagtatgatgtgactgttacctcatcactacctttgactgaggagcaaaaaagccgtgttcgagcagttgttgcaaagaaatttgctgtaacagcgggtcgtttaattgaaaaagtagatccttcgcttattggaggatttattatcagcgtcaataataaagtaattgataccagtattcgtcgtcaattgcaagcatttaaaatgaatttaaaa

SEQ ID NO: 4344 - protein, 178 aa, Streptococcus pyogenes
MTKKEQALIEQYAKSLVEVASEHHSLDALQADVLAILETFVTTNLDQSLSSQAVPHAEKIKLLTLLKGNNSVYMNNFLNLILQNEREAYLYQMLQAVLNEIAIVSNQYDVTVTSSLPLTEEQKSRVRAVVAKKFAVTAGRLIEKVDPSLIGGFIISVNNKVIDTSIRRQLQAFKMNLK

SEQ ID NO: 4345 - DNA, 495 bp, Streptococcus agalactiae
atgtcaatacttattaatagtacaacgattggtgatatcattatcgtatctggctctgtgcttctcttatttatcttaattaagacttttgcatggaaacaaatcacaggtatttttgaagcccgtgaacaaaagatagctaatgatattgatactgctgaacaggcacgtcaacaagctgaagcttttgcaactaagcgcgaggaagaactatctaacgctaaaactgaagctaatcaaatcattgataacgctaaagagacaggtcttgcaaaaggtgatcaaattatttcagaagcaaaaactgaagctgatcgattaaaagaaaaagcacatcaagatattgcccaaaataaggcagaagcactagcagatgttaagggtgaagtagcagatttaacagttttattagctgaaaaaattatggtatcaaatcttgataaagaagctcagagtaatctcattgatagctatattaaaaagctaggagatgcc

SEQ ID NO: 4346 - protein, 165 aa, Streptococcus agalactiae
MSILINSTTIGDIIIVSGSVLLLFILIKTFAWKQITGIFEAREQKIANDIDTAEQARQQAEAFATKREEELSNAKTEANQIIDNAKETGLAKGDQIISEAKTEADRLKEKAHQDIAQNKAEALADVKGEVADLTVLLAEKIMVSNLDKEAQSNLIDSYIKKLGDA

SEQ ID NO: 4347 - DNA, 492 bp, Streptococcus pyogenes
atgtcaatcacatttggtgaactcgttgggaattttattctagtaacaggttctgtaatcgtcttgttactcttgatcaaaaaattcgcttggggtgcgattgaatcgattttacagacacgctcacaacaaatctctcgagatattgatcaggctgagcaatcacgtctaagtgctcaacagttagaggcaaaaagtcaagctaacctagatgctagtcgtttacaagcaagtaaaatcattagtgatgccaaagaaattggtcaattacaaggtgataaattggtggcagaagctactgatgaagcaaaacgcttgaaagaaaaagcgttgacagatattgaacaaagcaaatcagacgctatttcagcagtcaaaacagaaatgtctgatttaacggttcttttagcggaaaaaattatgggagccaatcttgataagacggcgcaaagccagcttattgacagttatcttgatgacttaggagaagct

SEQ ID NO: 4348 - protein, 164 aa, Streptococcus pyogenes
MSITFGELVGNFILVTGSVIVLLLLIKKFAWGAIESILQTRSQQISRDIDQAEQSRLSAQQLEAKSQANLDASRLQASKIISDAKEIGQLQGDKLVAEATDEAKRLKEKALTDIEQSKSDAISAVKTEMSDLTVLLAEKIMGANLDKTAQSQLIDSYLDDLGEA

SEQ ID NO: 4349 - DNA, 714 bp, Streptococcus agalactiae
ttggaatctacaagtaatccaaccgtatcttttttaggcattgattttgatttaaccatcctagctatgtctctcttgacaattactattatctttatcttagtcttctgggctagtcgtaagatgacaataaaaccaaaaggtaagcagaatgtcttagaatatgtctatgagcttgttaataatacaatctcacaaaatttaggacactatactaaaaattatagtttattgatgtttattttattcagttttgtcttcattgctaacaacttaggattgatgacatcattgaaaacacatgagcataatttttggacatctccgaccgctaattttggtgtagatattacattatcattattagtagcatttatttgtcatattgaaggtattcgcaaaaaaggaattggtggttatctcaaaggtttcttatcaccaacaccagcaatgcttccgatgaatttattggaagaagttactaatgttgcttcattagcattgcgtctttttggtaatatcttttctggtgaagttgtcactggattacttttacaacttgcagttttatcaccatttacaggtccactagcttttgcattgaatatcgtttggacagcattctcaatgtttattggtttcatccaagcgtatgtgttcattatcttgagctcaagttatattggacacaaagttcatggtgacgaagaagaa

SEQ ID NO: 4350 - protein, 238 aa, Streptococcus agalactiae
MESTSNPTVSFLGIDFDLTILAMSLLTITIIFILVFWASRKMTIKPKGKQNVLEYVYELVNNTISQNLGHYTKNYSLLMFILFSFVFIANNLGLMTSLKTHEHNFWTSPTANFGVDITLSLLVAFICHIEGIRKKGIGGYLKGFLSPTPAMLPMNLLEEVTNVASLALRLFGNIFSGEVVTGLLLQLAVLSPFTGPLAFALNIVWTAFSMFIGFIQAYVFIILSSSYIGHKVHGDEEE

SEQ ID NO: 4351 - DNA, 714 bp, Streptococcus pyogenes
atggaagaagctaaaatacctatgctgaagcttggtccaataacctttaatttgaccctacttgctgtttgtattgtcacaattgcgattgtctttgcctttgttttttgggcaagtcgccaaatgaaattgaaaccagaagggaagcaaactgctttagaatatttaatcagttttgtggatggtattggagaagagcacttagatcataatctacaaaaatcttattcgctgttactctttaccatttttctctttgtggctgtcgctaataatttagggttatttactaagttagagacagttaatggctataacctatggacctcgccaacagccaatctggcttttgaccttgctctatctctttttattaccttaatggtacacattgaaggggttagacggcgtggcttggttgcccatttgaaacgtttggctacaccgtggccaatgactccgatgaatttattagaagagttcacaaatttcttatcacttgccattaggttattcggtaatatctttgccggggaagttgttacaggtttgattgttcaactggccaattatcgagtttattggtggccgattgctttcctagtcaatatggcgtggacagccttttcagtctttatttcctgcatacaggctttcgttttcacaaaactgacagcgacctatctaggaaagaaagtcaatgaatcagaagaa

SEQ ID NO: 4352 - protein, 238 aa, Streptococcus pyogenes
MEEAKIPMLKLGPITFNLTLLAVCIVTIAIVFAFVFWASRQMKLKPEGKQTALEYLISFVDGIGEEHLDHNLQKSYSLLLFTIFLFVAVANNLGLFTKLETVNGYNLWTSPTANLAFDLALSLFITLMVHIEGVRRRGLVAHLKRLATPWPMTPMNLLEEFTNFLSLAIRLFGNIFAGEVVTGLIVQLANYRVYWWPIAFLVNMAWTAFSVFISCIQAFVFTKLTATYLGKKVNESEE

SEQ ID NO: 4353 - DNA, 198 bp, Streptococcus agalactiae
atgaatttagctattttagcacttggtttcgccgtgatgggtgtttcaatcggtgaaggaattttggttgcaaatattgccaaatcagcggctcgtcagcctgaaatgtttagcaaactgcaaacattgatgtttacaggtgtggccttcattgaaggtaccttcttcgttctatttgcgtttacattcttagtaaga

SEQ ID NO: 4354 - protein, 66 aa, Streptococcus agalactiae
MNLAILALGFAVMGVSIGEGILVANIAKSAARQPEMFSKLQTLMFTGVAFIEGTFFVLFAFTFLVR

SEQ ID NO: 4355 - DNA, 195 bp, Streptococcus pyogenes
atgaatcctattttcgcattggctttggcctgttttggtgtttctcttgctgaaggtttcttgatggcaaatcttttcaaagcagcttctcgccaaccagaaatcattggtcaattacgttcattaatgatcttgggtgttgcctttatcgaaggtactttcttcgttacccttgttatggccttcattcttaaa

SEQ ID NO: 4356 - protein, 65 aa, Streptococcus pyogenes
MNPIFALALACFGVSLAEGFLMANLFKAASRQPEIIGQLRSLMILGVAFIEGTFFVTLVMAFILK

SEQ ID NO: 4357 - DNA, 147 bp, Streptococcus agalactiae
ttggcaatatttgcaaccaaaattccttcaccgattgaaacacccatcacggcgaaaccaagtgctaaaatagctaaattcataatagaattctcctttaaaaaatatttactccgttattttattcctatttcttgtgcatgtcaa

SEQ ID NO: 4358 - protein, 49 aa, Streptococcus agalactiae
MAIFATKIPSPIETPITAKPSAKIAKFIIEFSFKKYLLRYFIPISCACQ

SEQ ID NO: 4359 - DNA, 1428 bp, Streptococcus agalactiae
atgaaaataatgtttgttgcggcagagggtgctccctttgctaaaacaggtggtttgggagatgtgattggcgcactcccaaaatcacttagtaaaaaaggtcatgatgtcgctgttgtcatgccatattatgatatggtagaccaaaaatttggagaccaaatagaaaacctcatgtatttctatacagatgttggctggcgtcatcaatatgtaggagttaagagactttctcaagataatgttacgttctactttattgataatcaatattatttttatagaggtcatgtctatggtgattgggatgatggggagcgttttgcttatttccaattagctgctttagagttgatggagaaaatcgattttattcccgatgtcttacacgtccatgattatcatacagcaatgattcctttcttattgaaagagaagtaccactggattcaggcctataataatataagagcagtttttactattcacaatattgaatttcaagggcagtttggtccagaaatgttaggagatttatttggagttggcgctgagagatatgaagatggaactcttagatggaataattgtcttaattggatgaaagcagcaattctttactcagatagagtgacaacggtatcaccaagctacgcaaatgaaataaaaactccagaatttggtaaaggtttagatcaaattatgcgtatggaagcaggcaaattatctggaattgtaaatggtattgatagcgatttgttaaatccagaaacagatgcttttttgccatatcatttttcaaaaagcaacttagagggcaaaattaaaaataagttggctttacaggaaaatttgggcttacctcaagataaaaatgtaccattaattggtattgtttcacgacttaccgatcaaaaaggatttgatattattgcttctgaattggacaatatgcttcaacaagatattcaaatggttattttaggaacaggctatcaccattttgaagaaacgttctcttattttgctagtcgttaccctgaaaaactatctgctaatattacttttgacttaagattagcgcaacagatttatgcggcttcagatatcttcatgatgccaagtgcttttgaaccttgtggtctctcgcagatgatggctatgagatatggtagcttgcccttggtacatgaagttggaggattaaaagatactgtggtagccttcaatcaatttgatggtagtggtacaggtttttcatttaatcatttttcaggctattggttaatgcaaactctaaaactagcattagaagtttataatgattatcctgaagcgtggaaaaagttacaatggcaagctatgtcaaaagatttttcatgggatacagcatgtgttgcttacgaacaactgtatcagcaactacaa

SEQ ID NO: 4360 - protein, 476 aa, Streptococcus agalactiae
MKIMFVAAEGAPFAKTGGLGDVIGALPKSLSKKGHDVAVVMPYYDMVDQKFGDQIENLMYFYTDVGWRHQYVGVKRLSQDNVTFYFIDNQYYFYRGHVYGDWDDGERFAYFQLAALELMEKIDFIPDVLHVHDYHTAMIPFLLKEKYHWIQAYNNIRAVFTIHNIEFQGQFGPEMLGDLFGVGAERYEDGTLRWNNCLNWMKAAILYSDRVTTVSPSYANEIKTPEFGKGLDQIMRMEAGKLSGIVNGIDSDLLNPETDAFLPYHFSKSNLEGKIKNKLALQENLGLPQDKNVPLIGIVSRLTDQKGFDIIASELDNMLQQDIQMVILGTGYHHFEETFSYFASRYPEKLSANITFDLRLAQQIYAASDIFMMPSAFEPCGLSQMMAMRYGSLPLVHEVGGLKDTVVAFNQFDGSGTGFSFNHFSGYWLMQTLKLALEVYNDYPEAWKKLQWQAMSKDFSWDTACVAYEQLYQQLQ

SEQ ID NO: 4361 - DNA, 672 bp, Streptococcus agalactiae
atgccgagatcagctattgcagaggctaatcaagtcttgaccattgatgaatctgatcatgtagtgagtctaggtaaagctgtagataatgacgataaccaaaaaatgtctgctgagatttatgttatcgatacaccttggttaatcgaaaaaatggaagaggaagctcaaaataatgaaccacgtaaactccgcttcttacttcgtgatttaattgttgaaagtaatgctttggcttttgaatacactggttatttgtcaaacatttcttctattaaatcctattatgatgctaacatggacatgttaacaccaaataaattttattcgctcttcttttcaaaccaaaaagtttatactaaggtgaaaaatgaggaagctacttattttgataaacaatcaaatgtctctaattcgcaactagcctctggaagtattattaaaggttatttagaccattctatcgtttctagaaattgtctccttgaaaaagggactcgagtagtcaatagtattatctttccaaaagtaaaaatcggagaaggggcaaccattgaaaatactattattgacaaatgcgttaaggttgcatccggagttacattgaaaggtagtttagataaaccgttagtgattcctaaattttcagagattaatgaggatattatacaa

SEQ ID NO: 4362 - protein, 224 aa, Streptococcus agalactiae
MPRSAIAEANQVLTIDESDHVVSLGKAVDNDDNQKMSAEIYVIDTPWLIEKMEEEAQNNEPRKLRFLLRDLIVESNALAFEYTGYLSNISSIKSYYDANMDMLTPNKFYSLFFSNQKVYTKVKNEEATYFDKQSNVSNSQLASGSIIKGYLDHSIVSRNCLLEKGTRVVNSIIFPKVKIGEGATIENTIIDKCVKVASGVTLKGSLDKPLVIPKFSEINEDIIQ

SEQ ID NO: 4363 - DNA, 1155 bp, Streptococcus agalactiae
ttgaaaggaaagaataatatgaaaaatgaaatgttagcactcattctcgccggaggacaaggcactcgactcggaaaattgactcagagcattgcgaaacctgctgttcaatttggaggtcgttaccgtattattgactttgcgctttcaaattgtgcgaattcaggtattaataatgttggagttattactcagtatcaaccgctggaactcaatactcatattggaaacggatctagctggggactagatggtatcgattcgggagtaactgtattacagccatattctgcaacagaaggtaatcgctggtttcaaggtaccagccacgctatctatcaaaatattgactacattgatcgtattaatccagaatatgtactcattctctctggggaccacatctataaaatgaactatgatgacatgctacagacgcataaagataatttagcaagcctaacagtcgctgttttagatgttcctttaaaagaagcaagccgttttggaattatgaatactgattcaaacgaccgtattgtcgaatttgaagaaaaacctgaacatcctaagtcaacaaaggcttcaatgggaatatacatttttgactggaagagattacggacagttttaattgatggtgaaaagaacggcatagacatgtcagactttggtaaaaatgttataccagcataccttgaatcgggtgaacgtgtttatacctataattttgatgggtattggaaagatgttggtactattgaatccctttgggaagctaatatggaatatattggagaagataacaaattacatagtcgtgatcgttcatggaaaatctattctaaaaatttgattgcaccacctaatttcatgacagaagatgcaaatgttaaagattctttagttgtagatggatgctttgttgcaggaaatgttgagcactccattttatcaactaatgtccaggtaaaaccaaatgctattattaaagactcctttgttatgagtggcgcgactatcggtgaaggtgcaaagataaatcgagctattatcggtgaggatgctgttattggtgatggtgttgtgattgatggaagtaaagaagtagaagttattggttataaagaagtagcgggggttccaaatgaagat

SEQ ID NO: 4364 - protein, 385 aa, Streptococcus agalactiae
MKGKNNMKNEMLALILAGGQGTRLGKLTQSIAKPAVQFGGRYRIIDFALSNCANSGINNVGVITQYQPLELNTHIGNGSSWGLDGIDSGVTVLQPYSATEGNRWFQGTSHAIYQNIDYIDRINPEYVLILSGDHIYKMNYDDMLQTHKDNLASLTVAVLDVPLKEASRFGIMNTDSNDRIVEFEEKPEHPKSTKASMGIYIFDWKRLRTVLIDGEKNGIDMSDFGKNVIPAYLESGERVYTYNFDGYWKDVGTIESLWEANMEYIGEDNKLHSRDRSWKIYSKNLIAPPNFMTEDANVKDSLVVDGCFVAGNVEHSILSTNVQVKPNAIIKDSFVMSGATIGEGAKINRAIIGEDAVIGDGVVIDGSKEVEVIGYKEVAGVPNED

SEQ ID NO: 4365 - DNA, 1866 bp, Streptococcus agalactiae
atgtccaataaagatgagttatatacttttggaataggtgaaaattttcatctccagaattatttaggcgtacatagcgaaaatggaagcttttgtttcagagtttgggctcctaatgctgaaaatgttcaagttattggagattttacagattggcgaaatcgacctctccaaatgaacaaaaatcaagcaggagtttgggaagctaacagtttggatgcgcgcgaaggtgatttatataaatatttggttactcgtaaaggtggtcaagtagttgagaaaatcgatcctatggcagtttatatggaaagacgtcctggaactgcaagtgttattaaagttcttagaaataaaaagtgggaagatggtctttggatgggaaggcgcaaacgtctgggttttcagaagcgtccaattaatatttacgaagttcatgctggttcatggaaaaaagatgattttggacatcctatgactttttctcagttaaaagattacttaatcccctaccttgttgagatgaattatactcatgttgaatttatgcccttaatggcacatccgcttgatatgagttggggatatcaattaatggggtattttgcttttgaacatacctatggtactccagaagaatttcaagactttgtagaagcatgtcataaaaataatataggagttcttgtagattgggttccaggacactttattcagaatgacgatgctttagcctatttcgatggaactgctacttatgagtatcaaaatcatgatcgtgcgcataactatcgatggggagctctgaactttgatttaggaaaaaatcaagtacaatcctttttgatttcgagtgccttgttctggattgaacattatcatattgatggtattcgtgttgatgcggttagtaatatgttatatctcgattatgatgaaggaccatgggaagctaaccaatttggggataatcgtaatttggaaggatatcactttttaaggaaacttaacaaagtaattaaagagcgtcatcctaatgttatgatgattgctgaagagtcaacagcttctaccccaataactaaagacttagagtctggaggattgggttttgactttaaatggaatatgggctggatgaatgatatcctgcgtttttatgaagaagatcctctctataggcaatatgattttaatttagtgacttttagttttatgtatatattcaatgagaactttgtactagctttttcacatgatgaagtagtacatggtaaaaagagtatgatgcataaaatgtggggtgaccgttataatcaatttgctggtttacgtaatttatatgcatatcaaatgtgtcatcctgggaaaaaacttctctttatgggaagtgagtttggtcaatttttagaatggaaatataatgatcaactagaatgggaaaacttaaatgatgatatgaaccaaaagatgcaacgctatactaaacaattgaatcaattttataaagatcataagtgcctatggcgtattgatgattcctttgacgggctagaaattattgatgcggataataaatctgaaactgttttatcttttatacgaaaagatgataaaggcgatttgttactttgtgtctttaatatgactcctgtagaacgccctaactttactattggtgttccgcaagcgggtatttatgaagaagttttaaatactgaaatggaagagtttggaggtgtttggaaaaaccacaatcctgtaacgaaaacacaagtggctacatggaaagattatgatcatactttaagttttacattaccagcccttggggcaagtgtttggagaataaaacgtcggcttcgtaaa

SEQ ID NO: 4366 - protein, 622 aa, Streptococcus agalactiae
MSNKDELYTFGIGENFHLQNYLGVHSENGSFCFRVWAPNAENVQVIGDFTDWRNRPLQMNKNQAGVWEANSLDAREGDLYKYLVTRKGGQVVEKIDPMAVYMERRPGTASVIKVLRNKKWEDGLWMGRRKRLGFQKRPINIYEVHAGSWKKDDFGHPMTFSQLKDYLIPYLVEMNYTHVEFMPLMAHPLDMSWGYQLMGYFAFEHTYGTPEEFQDFVEACHKNNIGVLVDWVPGHFIQNDDALAYFDGTATYEYQNHDRAHNYRWGALNFDLGKNQVQSFLISSALFWIEHYHIDGIRVDAVSNMLYLDYDEGPWEANQFGDNRNLEGYHFLRKLNKVIKERHPNVMMIAEESTASTPITKDLESGGLGFDFKWNMGWMNDILRFYEEDPLYRQYDFNLVTFSFMYIFNENFVLAFSHDEVVHGKKSMMHKMWGDRYNQFAGLRNLYAYQMCHPGKKLLFMGSEFGQFLEWKYNDQLEWENLNDDMNQKMQRYTKQLNQFYKDHKCLWRIDDSFDGLEIIDADNKSETVLSFIRKDDKGDLLLCVFNMTPVERPNFTIGVPQAGIYEEVLNTEMEEFGGVWKNHNPVTKTQVATWKDYDHTLSFTLPALGASVWRIKRRLRK

SEQ ID NO: 4367 - DNA, 2298 bp, Streptococcus agalactiae
atggataatactgtcattgtacattaccatagccgaaagaaaaattactttaatttaagtttatggcagtggcgcgatggctcagagggtcaagatgctcatttttcacggtttgacagtttcggtgctgttgcgatactaaaatatcccttgccatattttttaagccattattatgtgattgttaaggataaaaattggcatcataaaacaatagattatcgcattgattgtactcaaggtggtgcacgtaaagaagtttggattgtagatggggatgacaatctgtattattctcgtcaagcagcagttagtagccatcattatagtagacgccaacctcatgcctacgacatggcaatcaatagtagagcgtttgacaaaaaatggggatttgatggttggttaggttttgaatattcagaaactaaaacggcttttagattatgggcccctactgcggaacgtgtagaactgattttatatcattcgacagatgaaacagcaagtgtatcaaaagttctttctatgaaaagagggacagccgtcaattataaaaatcataaagaaaatacccatggagtctggtttactgaacttgaaggaaactataattaccaagcatatacttatcgagtctactatagacgacgtacctttaaaattacgagagacccttattccattgcaacgactgcaaatggtaaaaggtctattgttattgctccagaagcattaactccggaagggtttaaaataagtcatggaaaagaagctaagtggcggctcgaaaaccccaatcaagcagtcatttacgaaatgcatgtgcgtgatttttcgatatctgagacttcaggagttaagacagattatcacggaaaatttaagggattgcatcaaaaaggtacggttaatcagcatggtgataaaacgacctttgattatgtacaagacctaggagttaactatatccaacttcaaccaattttcgatcatcatcagacatttgatgatgatggtcactatgcttataattggggatatgatcctgaaaactacaatgttccagaagcaagcttctctagtaatccacatgaacctgcaacgcgtattttagaattaaaatctgctatccaagcgtaccatgatgcaggcattggtgttattatggatgttgtctataatcatactttttcatcaactgattctgcatttcaactaacggttccagattattattatcgaatgaatcacaatggaacatttcaaaatgggtcaggctgtggtaatgaaacagctagtgaaaaagaaatgtgtcgtaagtatattcttgattcagttttgtattgggtgaaagaatataatattgatggttttcgatttgatttgatgggactacatgatgtagaaacgatgaacattataagaaatgagctaaataaaatcgaccctcgtattttggtttatggagaaggatgggacatgggagctggtctcacgcctcaaaataaagctaaaaaagataatgcttatcagatgcctggaattggctttttcaatgatgatgtaagagacgctgtcaaaggtgcggaaatttacggagaatttaaaaaaggcttagtttctggaaacagtacagaagatattgttgcaaaaggcattttaggaagtgatgagttagtatcatacattgatcctagtcaagttttaaattatgttgaagcacatgacaactacaacttaaatgatttgctatgggaattacatcctaatgacaacgagaaacaacatatttaccgagttgaagtagctagtgctatgaatctattgatgcaagggatggctttcatgcaattaggtcaggagtttcttcgaacaaagtgttatcctacaggtgataaaggtcaacttactcaagcagataaagaaagggctatgaattcttacaatgccccagaccaagttaatcaggtcaactgggataatgttacctttcataagagtactattaattttattaggaaaataattactttgaagacaaactctccttacttttcttattctagctttgaagagattcgcaaacatgtttttgtagagtctgctcaataccattcaggtttcataagttttacagtcgaagaacataagaaaataaaaataattttcaatattaaaggaaaacgcttgcagaattctttcataggtgatataataatatcaaatcatgaagaaggaaaagcgatagattcattagatgatgagctttctgtaatgatccttgatatcacaaaa

SEQ ID NO: 4368 - protein, 766 aa, Streptococcus agalactiae
MDNTVIVHYHSRKKNYFNLSLWQWRDGSEGQDAHFSRFDSFGAVAILKYPLPYFLSHYYVIVKDKNWHHKTIDYRIDCTQGGARKEVWIVDGDDNLYYSRQAAVSSHHYSRRQPHAYDMAINSRAFDKKWGFDGWLGFEYSETKTAFRLWAPTAERVELILYHSTDETASVSKVLSMKRGTAVNYKNHKENTHGVWFTELEGNYNYQAYTYRVYYRRRTFKITRDPYSIATTANGKRSIVIAPEALTPEGFKISHGKEAKWRLENPNQAVIYEMHVRDFSISETSGVKTDYHGKFKGLHQKGTVNQHGDKTTFDYVQDLGVNYIQLQPIFDHHQTFDDDGHYAYNWGYDPENYNVPEASFSSNPHEPATRILELKSAIQAYHDAGIGVIMDVVYNHTFSSTDSAFQLTVPDYYYRMNHNGTFQNGSGCGNETASEKEMCRKYILDSVLYWVKEYNIDGFRFDLMGLHDVETMNIIRNELNKIDPRILVYGEGWDMGAGLTPQNKAKKDNAYQMPGIGFFNDDVRDAVKGAEIYGEFKKGLVSGNSTEDIVAKGILGSDELVSYIDPSQVLNYVEAHDNYNLNDLLWELHPNDNEKQHIYRVEVASAMNLLMQGMAFMQLGQEFLRTKCYPTGDKGQLTQADKERAMNSYNAPDQVNQVNWDNVTFHKSTINFIRKIITLKTNSPYFSYSSFEEIRKHVFVESAQYHSGFISFTVEEHKKIKIIFNIKGKRLQNSFIGDIIISNHEEGKAIDSLDDELSVMILDITK

SEQ ID NO: 4369 - DNA, 1017 bp, Streptococcus agalactiae
atgaagaaacaaaaaaaagcgcgtttaatttataacccaacttctggtcaagaaattatgaaaaaaaatgtagcggaagttcttgatatacttgaaggatttgggtatgaaacatcagcctttcaaacaacaccaactaaaaattctgccagagatgaagctactagagctgctcaagctggttttgatttgattgttgcagcaggtggagatggtactattaatgaagttgttaatggtattgcacctttgaaacgtcgtcctaagatggcaattattccaactggaacaactaatgattttgctcgtgccttaaaaataccgcgaggtaatcctattgaagcaactaaattaattggtaaaaatcaaatcgttaagatggacattggtcaagctcaagaggacaattattttattaatattgcagctgcaggtagtttgacagagttaacttatagtgtaccaagtcaattgaaaacaacgtttggctatcttgcttatctagcaaagggtgttgaattattacctcgagttcgaaaagtaccagtcaaaattactcacgataagggtgaatttatcggtgatgcttcaatgatttttgttgccatcacaaattctgtaggagggtttgaacaaattgcacctgatgccaaattggatgatgggaaatttacccttattttagtaaaaactgcaaatcttattgagattatgcatctcattcgtttggtgctagcaggtggaaaacatattaatgataaacgagtagagtatattaaaacgtcttatctaactatcgaacccctatcagacgagcgtatgatgattaacttagatggagaatatggaggagatgctcccattactctagcaaaccttaaaaatcatattaggttctttgctaatactgatgaaatttcagatgatgctttagttttagataaagatgaactagcgatagaagctattgcacagaagtttgctaatgaggtagatgatttagaaggattaggagat

SEQ ID NO: 4370 - protein, 339 aa, Streptococcus agalactiae
MKKQKKARLIYNPTSGQEIMKKNVAEVLDILEGFGYETSAFQTTPTKNSARDEATRAAQAGFDLIVAAGGDGTINEVVNGIAPLKRRPKMAIIPTGTTNDFARALKIPRGNPIEATKLIGKNQIVKMDIGQAQEDNYFINIAAAGSLTELTYSVPSQLKTTFGYLAYLAKGVELLPRVRKVPVKITHDKGEFIGDASMIFVAITNSVGGFEQIAPDAKLDDGKFTLILVKTANLIEIMHLIRLVLAGGKHINDKRVEYIKTSYLTIEPLSDERMMINLDGEYGGDAPITLANLKNHIRFFANTDEISDDALVLDKDELAIEAIAQKFANEVDDLEGLGD

SEQ ID NO: 4371 - DNA, 1020 bp, Streptococcus pyogenes
atgaaaaaacaattgagagcacgtctcatttataatccaacgtcaggacaagaacttatgagaaaaagtgttcctgaagttttagacatattagaagggttcgggtatgaaacatctgcctttcaaacaacagcccaaaagaactctgctctaaatgaagcaagaagagcggcaaaggcaggttttgacttattgattgctgctggaggtgatggcactattaacgaagtggtcaatggaattgctcccttgaaaaagcgccctaaaatggccattattccaacaggtaccactaatgattttgctagagcattaaaagtaccaagaggaaatccgagccaagcagcaaaacttatcggaaaaaatcagactatccagatggatattggtagagctaagaaagatacttatttcatcaatattgctgcagcaggaagtttgacggaattaacttacagtgtaccaagtcagttaaaaacgatgtttggatacttggcttatcttgctaaaggagtagaactgctcccaagagttagcaatgtgcctgttaaaattacgcatgacaaaggcgtctttgaaggtcaagtttctatgatttttgcagctattaccaattctgttgggggatttgaaatgattgctcctgatgcaaaactagatgacggtatgtttacgctcattttaataaagacagcaaatctttttgaaattgtacatcttttgcgtttgattttggatggtggtaagcatattacagatcgccgtgtcgaatacattaagaccagtaaaatagtcattgaaccccaatgtggtaagcgaatgatgattaatttagatggcgagtacggaggagatgctccaattacattagagaacctaaaaaatcatatcactttttttgcagatactgatttgatttctgatgacgctttagtcttagatcaggacgaattggaaattgaggaaatcgtaaagaaatttgctcatgaagtagaagacttaggacaagaattagaagaa

SEQ ID NO: 4372 - protein, 340 aa, Streptococcus pyogenes
MKKQLRARLIYNPTSGQELMRKSVPEVLDILEGFGYETSAFQTTAQKNSALNEARRAAKAGFDLLIAAGGDGTINEVVNGIAPLKKRPKMAIIPTGTTNDFARALKVPRGNPSQAAKLIGKNQTIQMDIGRAKKDTYFINIAAAGSLTELTYSVPSQLKTMFGYLAYLAKGVELLPRVSNVPVKITHDKGVFEGQVSMIFAAITNSVGGFEMIAPDAKLDDGMFTLILIKTANLFEIVHLLRLILDGGKHITDRRVEYIKTSKIVIEPQCGKRMMINLDGEYGGDAPITLENLKNHITFFADTDLISDDALVLDQDELEIEEIVKKFAHEVEDLGQELEE

SEQ ID NO: 4373 - DNA, 1956 bp, Streptococcus agalactiae
atggaaaatcgtatgaatgaattagtatctttgttgaatcagtacgcaaaagagtattatacacaagataatcccacagtttctgacagtcaatatgaccagttatatcgagagttagtagaattagaaaagcaacatccagaaaacattttgccaaatagtcccacacatcgagtgggtggtttagttttagaaggctttgaaaaataccaacatgaatatcctttgtattcattgcaggatgctttctcaaaagaagaattgatagcctttgataaacgtgttaaagcagagtttccaactgctgcttatatggcagagctgaaaattgatggtctatctgtctcgttgacttatgtaaatggtgttttacaggttggggcaacacgtggtgatggcaatattggagaaaatattactgaaaatttaaagcgtgttcatgatattcctctacatttagaccaaagtttagatattactgttcgcggagagtgctaccttcccaaagaatcttttgaagctattaacatagaaaaacgagcaaatggtgagcaggaatttgctaatcctaggaatgcagcagcaggaaccttgcgccaattaaacacaggaattgttgcgaaacgtaaattagcaacttttctttatcaagaagctagccctacgcaaaaagaaacacaagatgatgttttaaaagagctagaaagctatggcttttcagtcaatcatcatcgtttaattagctcgtctatggagaaaatttgggattttatccaaactatagaaaaagatagagtttccctcccttatgatatcgatggtattgttattaaggttaatagcatagcaatgcaagaagagctgggcttcactgtaaaggcacctcgttgggcgattgcatataaatttcctgctgaagaaaaggaagcagaaatattatctgttgattggacagttgggcgaacaggagtcgtaacaccaacagctaacctaactccagttcaactagcagggacaaccgttagtagggccactctgcataatgtagattatattgccgaaaaagatatccgtattggagatactgttgttgtatacaaagcaggggatatcatccctgcagtcttaaatgtcgttatgagtaagcgaaaccagcaagaagtcatgcttattcctaaactatgtccttcttgtggtagtgaattagttcattttgaaggtgaggtggctttacgttgtattaatccgctgtgccccaaccaaatcaaagaacgtttagctcattttgctagccgagatgctatgaatattacaggttttggtccatccttagtcgaaaaattatttgatgctcatttaatagcagatgttgcagatatttatcgtttaagtatagagaatttattaactttagatggtattaaagagaaatctgcaactaagatttatcatgcaatccaatcttcaaaagaaaattctgctgaaaaacttctttttggcctaggtattcgtcatgtgggaagcaaggcgagccgccttttattggaggaatttggtaatttgaggcaactaagtcaagcaagtcaagaaagtattgcctcaattgatggactaggaggggttattgccaaatcacttcataccttctttgaaaaagaagaggtagataaactactagaggaattaacttcctataacgttaattttaattatctaggaaaacgagttagtacagatgcacaactttcaggtttaacagtcgttttaaccggtaagcttgaaaaaatgactcgtaatgaagcaaaagagaaattacaaaaccttggtgctaaggtgacaggtagcgtttctaaaaagactgatttaattgttgcaggaagcgatgcaggaagtaaactaaccaaggctcaagatttagggattacaatacaagatgaagactggttactcaacctt

SEQ ID NO: 4374 - protein, 652 aa, Streptococcus agalactiae
MENRMNELVSLLNQYAKEYYTQDNPTVSDSQYDQLYRELVELEKQHPENILPNSPTHRVGGLVLEGFEKYQHEYPLYSLQDAFSKEELIAFDKRVKAEFPTAAYMAELKIDGLSVSLTYVNGVLQVGATRGDGNIGENITENLKRVHDIPLHLDQSLDITVRGECYLPKESFEAINIEKRANGEQEFANPRNAAAGTLRQLNTGIVAKRKLATFLYQEASPTQKETQDDVLKELESYGFSVNHHRLISSSMEKIWDFIQTIEKDRVSLPYDIDGIVIKVNSIAMQEELGFTVKAPRWAIAYKFPAEEKEAEILSVDWTVGRTGVVTPTANLTPVQLAGTTVSRATLHNVDYIAEKDIRIGDTVVVYKAGDIIPAVLNVVMSKRNQQEVMLIPKLCPSCGSELVHFEGEVALRCINPLCPNQIKERLAHFASRDAMNITGFGPSLVEKLFDAHLIADVADIYRLSIENLLTLDGIKEKSATKIYHAIQSSKENSAEKLLFGLGIRHVGSKASRLLLEEFGNLRQLSQASQESIASIDGLGGVIAKSLHTFFEKEEVDKLLEELTSYNVNFNYLGKRVSTDAQLSGLTVVLTGKLEKMTRNEAKEKLQNLGAKVTGSVSKKTDLIVAGSDAGSKLTKAQDLGITIQDEDWLLNL

SEQ ID NO: 4375 - DNA, 1956 bp, Streptococcus pyogenes
atgaaaaaacgcataaaagaattaacagatcttcttaaccgttaccgttatgactattatactaaagatgccccatcagtttctgacagtgactatgataagctttatcgtgaactggtgactttagagcagtcatatcccgagtatgtcttgcaagatagcccaacgcagcaggttggagggactattttaaaggggtttgaaaaatatcgacatcagtatccgctttttagtttgcaggatgctttttcacgtgaggagctggatgcttttgataagcgcgtcaaggccgaatttccgaatgccacctatctagcagagttaaaaattgatggtttatctatttccttgagttatgagaatggcttcttacaggttggagcaacacggggtgatggcaatatcggtgaaaatatcacagaaaatatcaaaaaaataaaggatattccttaccaattgagtgagcctttaaccatcaccgttcgaggagaggcttacatgtctcgtcagtcctttaaagcgatcaatgaagcacgccaagaaaatggggagactgaatttgctaatcctagaaatgctgccgctgggacactaaggcagctagatacgtcagtggttgctaagcgtcaactagccacttttttgtatcaagaagctagtccgacagctagaaatcaacaaaatgaggtcttagcagaattagcagatctaggtttttcagtaaatccgtattatcaactcacatcgtctatggatgagatttgggattttatcaaaactattgaggcaaaaagagatcaattagcttatgacatagatggcgttgttattaaagttaatagcctagccatgcaagaagagctagggtttacggttaaagctccacgctgggccattgcttacaaatttccagcagaagaaaaagaggcagaaatcctttcggttgactggacagtgggacgaacaggcgtggtcacacctacagcgaatctaactcctgtgcaactagcggggacaaccgtgagtcgtgcaaccctacataatgtggattatattgccgaaaaagatatccgtattggcgatacagtgattgtatataaggcaggggacattattcctgctgtcttaaatgtcgttatgagtaagcggaaccagcaagaagtcatgcttattcctaaactatgcccatcttgtggtagtgaattagttcattttgaagatgaggttgctttgcgttgtattaatccgttgtgtcctagtttgattcagcgaagtttggagcattttgcaagtcgtgatgccatgaacattactgggctgggaccagctattgtggaaaaactatttttagcggggtttgttcatgatgttgctgatatttaccagttgaccaaagaagatttcatgcaattagatggcatcaaagaaaagtcagctgataaattgctcgctgcgattgaggcttctaaatcaaattcagctgaaaaactgttatttggtctaggaattcgtcatattggctctaaggttagtcgcttaattttagaggtatacggagatatttctgctcttttaaccgctaaagaagaggaaatcgcaaggatagatggtcttggctcaacgattgctcaatcacttactcaatactttgaacaaaaaacggctgcgattttagtagacgagttaaagacagcaggtgtcaacatgcattactcaggtcaaaaagttaatagtgacgcagcgctttttggtctaactgttgttttaactggcaaattaaatcagctgaaccgaaatgaggccaaagataaattagaggcattaggtgccaaagttactggaagtgtatctaagaaaacagatttagttattgcaggtagtgacgctggttctaagctagaaaaagcaaagagcttaggaattcggattgaagatgaagattggctacgccagctt

SEQ ID NO: 4376 - protein, 652 aa, Streptococcus pyogenes
MKKRIKELTDLLNRYRYDYYTKDAPSVSDSDYDKLYRELVTLEQSYPEYVLQDSPTQQVGGTILKGFEKYRHQYPLFSLQDAFSREELDAFDKRVKAEFPNATYLAELKIDGLSISLSYENGFLQVGATRGDGNIGENITENIKKIKDIPYQLSEPLTITVRGEAYMSRQSFKAINEARQENGETEFANPRNAAAGTLRQLDTSVVAKRQLATFLYQEASPTARNQQNEVLAELADLGFSVNPYYQLTSSMDEIWDFIKTIEAKRDQLAYDIDGVVIKVNSLAMQEELGFTVKAPRWAIAYKFPAEEKEAEILSVDWTVGRTGVVTPTANLTPVQLAGTTVSRATLHNVDYIAEKDIRIGDTVIVYKAGDIIPAVLNVVMSKRNQQEVMLIPKLCPSCGSELVHFEDEVALRCINPLCPSLIQRSLEHFASRDAMNITGLGPAIVEKLFLAGFVHDVADIYQLTKEDFMQLDGIKEKSADKLLAAIEASKSNSAEKLLFGLGIRHIGSKVSRLILEVYGDISALLTAKEEEIARIDGLGSTIAQSLTQYFEQKTAAILVDELKTAGVNMHYSGQKVNSDAALFGLTVVLTGKLNQLNRNEAKDKLEALGAKVTGSVSKKTDLVIAGSDAGSKLEKAKSLGIRIEDEDWLRQL

SEQ ID NO: 4377 - DNA, 507 bp, Streptococcus agalactiae
atgaacacatttacaactcgcgattacgctcacatggctattgtaacagctatctatatcgttttaaccataacgccaccttttaatgctattgcttatggtgcttatcaattccgtgtttcagaaatgctaaatttcttggccttttaccaccgaaaatacctttttgcggtaacgttaggatgtatgatttctaatctttatagttttggaatgattgatgtctttgtaggtggtggttcaaccttactttttgtttatcttggaaccattttattcaagcaatatcaaaaagattatctatttaatggccttattaacaaagcattctttttcttttctttcttctttgctgcttcaatgattacggtagcagttgaattgaaaattgtagcaggattacctttattattaacatggttaacgacagctgttggtgaattggcttcacttttggttggagcagtccttgtggataagttgagtagacacgtcgattttacaaaa

SEQ ID NO: 4378 - protein, 169 aa, Streptococcus agalactiae
MNTFTTRDYAHMAIVTAIYIVLTITPPFNAIAYGAYQFRVSEMLNFLAFYHRKYLFAVTLGCMISNLYSFGMIDVFVGGGSTLLFVYLGTILFKQYQKDYLFNGLINKAFFFFSFFFAASMITVAVELKIVAGLPLLLTWLTTAVGELASLLVGAVLVDKLSRHVDFTK

SEQ ID NO: 4379 - DNA, 498 bp, Streptococcus pyogenes
atgacaaaattgactgtacacgactatgttcacattgggctagtagctgccttgtatgttgtcttaactattaccccgcctttaaatgcgatttcttatgggatgtatcaatttagaatatctgaaatgatgaatttcttagctttttatcatcgcaagtatattattgcggtgactcttggatgtatgattgctaacttttatagtttcggactgattgatgtctttgtaggcggcggttcaactcttatttttgtgaccttaggtgttattttgtttagtaagtatcaaaaagattatctttttaatggtatttttaataaagcttttgtttacttttctttcttttttgcaacttccatgtttaatgtagcaatcgaactttacttctttggagcaccatttttattaacatggtttacaactgcgttaggagaattagtatctctgctcataggatcacttattattgataagttgtctcaaagaatttccttt

SEQ ID NO: 4380 - protein, 166 aa, Streptococcus pyogenes
MTKLTVHDYVHIGLVAALYVVLTITPPLNAISYGMYQFRISEMMNFLAFYHRKYIIAVTLGCMIANFYSFGLIDVFVGGGSTLIFVTLGVILFSKYQKDYLFNGIFNKAFVYFSFFFATSMFNVAIELYFFGAPFLLTWFTTALGELVSLLIGSLIIDKLSQRISF

SEQ ID NO: 4381 - DNA, 918 bp, Streptococcus agalactiae
atgaaattaaaaaaattctttgaggatttgctggctaaactagaatatagacccattcaagtttttatgcgtcattttcaaagtgcagagatggacttatcagccatagcagttgcttattatctattagtgacagcttttccattactagttattgctgctaatatttttccttattttcatattaatgtgtcggatttattgtcacttatgcaaaaaaatcttccgaaaaatatttatgaacctgcctcacgcttagcagtagatgctttttcgaaaccgtctaccggcattttgggattcgcgtcattaacagctttttggacaatgtctaaaagtttgacctctcttcaaaaagccattaataaagcatacggtgttgaccaacacagagactttgtgattagtcgtttagtgggtgtggggactgggctgatcatcctatttttactgacttttgttttaattttttcaaccttttcaaaaccagttttacagataattgtaaacatgtatgatttgggagatactctaacggcgtggcttttaaatcttgcacaaccagttacatttttgactatatttttaggtattggaattttatactttattttacctaacgcacgaattagaaaagtacgttatgtcattccagggacattattttcaacgtttgttattggtttttttagtaatttaattagccaatacgtcttaaatagggttgagaaaatggtagatattaaaacgtttggttcggtcgttatctttatcttaatgctatggtttattttcttagcccacattatgattttaggtgcaatactgaatgccagcgttcaagaaattgcgacaggaaaaattgaatcaaggcgtggagatattatgtctcttatccaaaaatccaaagaagaaaaa

SEQ ID NO: 4382 - protein, 306 aa, Streptococcus agalactiae
MKLKKFFEDLLAKLEYRPIQVFMRHFQSAEMDLSAIAVAYYLLVTAFPLLVIAANIFPYFHINVSDLLSLMQKNLPKNIYEPASRLAVDAFSKPSTGILGFASLTAFWTMSKSLTSLQKAINKAYGVDQHRDFVISRLVGVGTGLIILFLLTFVLIFSTFSKPVLQIIVNMYDLGDTLTAWLLNLAQPVTFLTIFLGIGILYFILPNARIRKVRYVIPGTLFSTFVIGFFSNLISQYVLNRVEKMVDIKTFGSVVIFILMLWFIFLAHIMILGAILNASVQEIATGKIESRRGDIMSLIQKSKEEK

SEQ ID NO: 4383 - DNA, 963 bp, Streptococcus pyogenes
atggcagaaaaaaaatggtttgataaggtactgtccaagtggcagtatgaacccattcaagtctttatgaggcatttacaaagtgcagaaatggatttatctgccattgcggttgcgtattaccttatcttaacggcctttccattaattgttattgcagccaatatttttccttacctcaatattgatattgctgatttgttacgtttaatgaagcaaaatttgcctaaagatatttttagaccggcttctgcaattgtagaaaatattttctctaaaccgtctggaagtgttttgggagtagcgactttgacaggattatggacaatgtctcgaagtttgacatcgctacaaaaagctattaataaagcctatggcgcttctcagcatcgagatttctttatcggacacttggttggtttgttgaccagtttaattattttatttttattagcctttgccttaatcttttcaatattttctaaagctgctattcaagtgctggataagcattaccatttgagtgataatatcacaacgattttcttgctcctcattcaacctattacagttttgattatttttgttggcttgatgctactatattttttattacccaatgttaagattaaaaaaattcgctacattttaccaggaaccctatttacatcttttgtgatgacatttttgagtaatctggttggcaattacgttgtgtataatgttgagcggatggtagatattaaaatgtttggttcagttatgatttttatcatcatgctatggtttattttcttagcaagaatcctgattttaggagctatatttaatgcgacctatcaagaaatgtccttggggaaattagaaggtcgtagtggtgatatgatcgctatccttaaaaaaacacttgggaatgattcagatctatctccttcacagtctatcgaagatagtcacactgat

SEQ ID NO: 4384 - protein, 321 aa, Streptococcus pyogenes
MAEKKWFDKVLSKWQYEPIQVFMRHLQSAEMDLSAIAVAYYLILTAFPLIVIAANIFPYLNIDIADLLRLMKQNLPKDIFRPASAIVENIFSKPSGSVLGVATLTGLWTMSRSLTSLQKAINKAYGASQHRDFFIGHLVGLLTSLIILFLLAFALIFSIFSKAAIQVLDKHYHLSDNITTIFLLLIQPITVLIIFVGLMLLYFLLPNVKIKKIRYILPGTLFTSFVMTFLSNLVGNYVVYNVERMVDIKMFGSVMIFIIMLWFIFLARILILGAIFNATYQEMSLGKLEGRSGDMIAILKKTLGNDSDLSPSQSIEDSHTD

SEQ ID NO: 4385 - DNA, 96 bp, Streptococcus agalactiae
ttgtcaaagtttaacgatgaaacgtcaacaattgatttatctaaaggttcgcttaaaaccatatctacttttaaaaggtcaccttgttttagggta

SEQ ID NO: 4386 - protein, 32 aa, Streptococcus agalactiae
MSKFNDETSTIDLSKGSLKTISTFKRSPCFRV

SEQ ID NO: 4387 - DNA, 858 bp, Streptococcus agalactiae
atgattacattaaagtcagcacgcgaaattgaagcaatggatagagcaggtgattttttagccagcatccacattggacttcgtgatattatcaaaccaggagttgatatgtgggaagttgaagaatacgttcgtagacgttgtaaagaagaaaacgtattgccattgcaaatcggggttgatggtgcagttatggattacccatatgctacttgttgtgggcttaatgatgaagtggctcatgcctttcctcgtcattataccctaaaacaaggtgaccttttaaaagtagatatggttttaagcgaacctttagataaatcaattgttgacgtttcatcgttaaactttgacaacgtggctcaaatgaaaaagtacacggaaacatatagtggtggtttggcagactcgtgttgggcttatgctgtaggtgaagtttcacaagaggtgaaagacttaatgtctgtgacaagagaagcaatgtatattgggattgaaaaagcagttatcggaaaccgcattggtgatattggagctgctattcaggattatgcagagagtcgtggttatggagttgttcgtgatttggttggtcacggtgttggtccaacaatgcatgaagagcctatggtgcctaactatggtacagcaggtcgaggtctccgtcttcgtgaggggatggttttaaccatcgaaccaatgattaatactggtacttgggaaattgatacagacatgaaaactggttgggcacataaaaccttagatggtggtctttcttgtcaatatgaacatcaatttgttatcactaaagatggtcctgttattttaacgagtcaaggagaagaaagaacttac

SEQ ID NO: 4388 - protein, 286 aa, Streptococcus agalactiae
MITLKSAREIEAMDRAGDFLASIHIGLRDIIKPGVDMWEVEEYVRRRCKEENVLPLQIGVDGAVMDYPYATCCGLNDEVAHAFPRHYTLKQGDLLKVDMVLSEPLDKSIVDVSSLNFDNVAQMKKYTETYSGGLADSCWAYAVGEVSQEVKDLMSVTREAMYIGIEKAVIGNRIGDIGAAIQDYAESRGYGVVRDLVGHGVGPTMHEEPMVPNYGTAGRGLRLREGMVLTIEPMINTGTWEIDTDMKTGWAHKTLDGGLSCQYEHQFVITKDGPVILTSQGEERTY

SEQ ID NO: 4389 - DNA, 858 bp, Streptococcus pyogenes
atgataacattaaaatcagcccgtgaaatagaagcgatggatagagcaggagacttcttagcaggtatccatattggcttaagggatattattaagcctggtgtggatatgtgggaagtggaagcatatgttcgtcgccgttgtaaagaagacaacgttcttcctttgcaaataggggttgatggtcacatgatggactatccttatgcgacctgttgtggtctaaatgacgaagtagcacatgcctttccccgtcattacattctgaaagaaggggatttgcttaaagttgacatggtactcagtgagcctttggataaatcaattgttgatgtagcagctttagattttgataacgtacctgagatgaagaaatggacaggatcttataccggtggtttagctgactcttgttgggcttatgctgttggaacaccgtctgacgaaataaagcaattaatggatgtcaccaaagaagccatgtaccgtggtattgaaaaagcagtaattggcaatcgtattggtgatattggcgcagctgttcaagaatacgctgaaagcttcggttatggtgtcgtgcgtgatcttgttggtcacggtgttggtcctacaatgcatgaagagccaatggtaccaaactatggaacagcaggtcgtggacttcgtctaaaagaaggcatggtcttgactgttgagccaatgattaatacaggaacttgggaaattgataccgacatcaagacaggttgggctcataaaaccctagatggtggtttatcttgccaatacgaacaccaatttgtgattactaaagatggtcccgttattttaacaagtcaaggagaagaaagaacttac

SEQ ID NO: 4390 - protein, 286 aa, Streptococcus pyogenes
MITLKSAREIEAMDRAGDFLAGIHIGLRDIIKPGVDMWEVEAYVRRRCKEDNVLPLQIGVDGHMMDYPYATCCGLNDEVAHAFPRHYILKEGDLLKVDMVLSEPLDKSIVDVAALDFDNVPEMKKWTGSYTGGLADSCWAYAVGTPSDEIKQLMDVTKEAMYRGIEKAVIGNRIGDIGAAVQEYAESFGYGVVRDLVGHGVGPTMHEEPMVPNYGTAGRGLRLKEGMVLTVEPMINTGTWEIDTDIKTGWAHKTLDGGLSCQYEHQFVITKDGPVILTSQGEERTY

SEQ ID NO: 4391 - DNA, 1293 bp, Streptococcus agalactiae
gtgattatcgttatgagtaaacatcaagaaattttggagtacctagaaaatttagctgttggtaagagggttagtgtacgcagtatttcaaatcatttaaaggtgagtgatggcactgcataccgcgctataaaagaggcagaaaataggggtattgttgagactagaccgcgtagtgggacagtacgtgttgctcaaaaagcaaaggttaatattgaaaaactgacttatgctgaaattgcaaggattagtgactcacaagttgttgcaggaatagagggactcagcaaggagtttagtaaattttctataggtgcaatgactcacagaaatattgaaaaatatttggtgcaaggagggttattgattgttggcgaccgtgatgagatacaacatttagccttacaacatcaaaacgctatcttagttacaggtggctttaatgtttccccatctgtttgtcgtttagcagataaacttcaaattcccgtaatggtaacacactatgatacattcacagtatcaacgatgattaatcacactttgtcaaatgccaaaattcgtactgatttaaagaccgttgaacaagtctatcagtcgcaaatggattacggtttcttagcgcaggatgataccgtaaaagaatttaatcttcttgttaaacaaactaaaaatgttcgttttccaatagtcaaccaagctaatgttgtcgttggtgttgttagtgttcaagatattcttggaaaagataaagaagtaaaattggcaacagtcatgtcaaaaaatatcattgttgctaaacctcgaatgagtctagctaatatcagtcaaaaaatgatttttgaagatttgaatatgatgccagtagtatcggatgactttgaattattaggcgttattacaagacgacaagctgtagaaaatttatcgatgtcgcaagggacggatttatacacctatagtgatcaaatcttgtctaatttacaaattgaagatggtcacttttcgtttttagtagaacccgctatgattgaccatacaggtagcttaacacaaggagttttgacggagttcttaaaagaaatttgtattcgtgtcttaactcgtaagcatcaacgcagtattgttgttaaacaaatgacactttatttcttgcaacctgttcaaattgatgaaataataatggtaacgccaacaattatttcagaaaaacggcgcgaagctacactcgatttagaattaaaattagaaaataaaattattgctaaagctatgatagcggtaaaaattaat

SEQ ID NO: 4392 - protein, 431 aa, Streptococcus agalactiae
MIIVMSKHQEILEYLENLAVGKRVSVRSISNHLKVSDGTAYRAIKEAENRGIVETRPRSGTVRVAQKAKVNIEKLTYAEIARISDSQVVAGIEGLSKEFSKFSIGAMTHRNIEKYLVQGGLLIVGDRDEIQHLALQHQNAILVTGGFNVSPSVCRLADKLQIPVMVTHYDTFTVSTMINHTLSNAKIRTDLKTVEQVYQSQMDYGFLAQDDTVKEFNLLVKQTKNVRFPIVNQANVVVGVVSVQDILGKDKEVKLATVMSKNIIVAKPRMSLANISQKMIFEDLNMMPVVSDDFELLGVITRRQAVENLSMSQGTDLYTYSDQILSNLQIEDGHFSFLVEPAMIDHTGSLTQGVLTEFLKEICIRVLTRKHQRSIVVKQMTLYFLQPVQIDEIIMVTPTIISEKRREATLDLELKLENKIIAKAMIAVKIN

SEQ ID NO: 4393 - DNA, 1293 bp, Streptococcus pyogenes
gtgataatcattatgagcaaacatcaagatattttagattatttagaaaaacttgctattggtaaaaaagtgagtgttagaagcatttcaaaccacttaaaagtaagcgatggaacagcctaccgtgctattaaagaggcagaaaatcgaggtattgtcgaaaccaaaccaagaagtggaactgttcgtattgaaaaaaaaggacgggttcgtattgaccgtctgacctattccgaaattgctcggatcagtgattcggaagtgctagcgggacatgctggtttaggacatgaatttagtaggttttcaattggtgctatgactcaacaaaatattcgtcgttacttggtcaaaggagggttattaatagttggggatcgtgaaacgattcaactcttagctcttgaaaaccataatgccattttggtgacgggcggatttccagtatccaaacgtgttattgaaatggcaaataaccaacgaatcccagttatggtaactcattatgatacctttactgtggcaacaatgattaatcacgcgctatctaatattcgtattaaaacagatctcaaaacagttgaacaggtaatgatacctattacagattatggttacctttgcgaagacagctctgttgaagaattcaatacattaataaaaaaaacacgacaagtcaggtttcctgtattagattataaaagaaaagtgattggtgtagttagtatgcgtgatgtggtggatcagttgccaacaactaagcttaccaaggtcatgtctaaaaatccaataacggctagaccaaatactagtcttgctaatattagccagaaaatgatctttgaagatttaaacatgttacctgtcactgacgaagaaaacaatttacttggtatgattactcgtagacaagcaatggaaaatttgccaaatcaccaaccaaataacccctatacttatagtgagcaaatactttctaaccttgaagaaacggttgattattatcaagtagtagttgagccaacaatgattgatagtgctggtaacatgtcaaacggtgttatttcagagttcttaaaggaaattagtatcagagccctcacgaaaaagcaccaaaaaaatatcattatcgaacaaatgatggtatactttttacatgctattcaaattgaggatgaattaaaaatatatcctaaaatcattactgaaaatagacgaagcagcaccattgatattgaaatttttgtggatgatcaagtgattgctaaagctattattacaacgaaaataaat

SEQ ID NO: 4394 - protein, 431 aa, Streptococcus pyogenes
VIIIMSKHQDILDYLEKLAIGKKVSVRSISNHLKVSDGTAYRAIKEAENRGIVETKPRSGTVRIEKKGRVRIDRLTYSEIARISDSEVLAGHAGLGHEFSRFSIGAMTQQNIRRYLVKGGLLIVGDRETIQLLALENHNAILVTGGFPVSKRVIEMANNQRIPVMVTHYDTFTVATMINHALSNIRIKTDLKTVEQVMIPITDYGYLCEDSSVEEFNTLIKKTRQVRFPVLDYKRKVIGVVSMRDVVDQLPTTKLTKVMSKNPITARPNTSLANISQKMIFEDLNMLPVTDEENNLLGMITRRQAMENLPNHQPNNPYTYSEQILSNLEETVDYYQVVVEPTMIDSAGNMSNGVISEFLKEISIRALTKKHQKNIIIEQMMVYFLHAIQIEDELKIYPKIITENRRSSTIDIEIFVDDQVIAKAIITTKIN

SEQ ID NO: 4395 - DNA, 570 bp, Streptococcus agalactiae
ttgtggtataatattatcatggatatatggacaaatttaggacggtttgcattcattgaaacagaacatgttaacctacgtcctgttgcctacactgatagggaagctttttggcgaatagcttcaaaaaggacaaatttacaatttatttttcctgttcaaaccagtaagaaggaaagtgattttcttttagttcattcttttatgaaagagccattgggagtttgggcgattgaagataaagttagtcataaaatgtttggagttatccgttttgaaaacattgatttatctaaaaagacagctgaaattggctattttttgaaagaaagttcttggggtcaaggcattatgactgaatgtctaaagacactttctttttttgcttttcgagagtttgggatggacaaattgatcatagtaacacataaagagaatattgctagtcagaaggttgctttgaaggcgcatttcaaacaatctaggagttttaaaggaagcgaccgttacacacgccgtataagagactatattgagtttcaattaactaggggtgattatcgttatgag

SEQ ID NO: 4396 - protein, 190 aa, Streptococcus agalactiae
MWYNIIMDIWTNLGRFAFIETEHVNLRPVAYTDREAFWRIASKRTNLQFIFPVQTSKKESDFLLVHSFMKEPLGVWAIEDKVSHKMFGVIRFENIDLSKKTAEIGYFLKESSWGQGIMTECLKTLSFFAFREFGMDKLIIVTHKENIASQKVALKAHFKQSRSFKGSDRYTRRIRDYIEFQLTRGDYRYE

SEQ ID NO: 4397 - DNA, 1257 bp, Streptococcus agalactiae
atgcgtaaaattattattaacggtggcaagcaactgacgggagaagttgctgtatcgggtgccaaaaatagtgtagttgccttgattcctgccactattcttgctgatgatgttgtggtcttagatggagttccggctatttctgatgttgacagtttagttgacattatggaaactatgggagctaagattaagcgttatggtgagacgcttgaaattgatccatgtggcgttaaagatattccaatgccttatggcaaaatcaatagtcttcgtgcatcctattatttctatggaagcttattggggcgttatggtcaagcaacattaggtttacctggtggttgtgatttaggcccccgtccgattgatttacatttaaaagcttttgaagcgatgggagctagtgtttcttatgaaggtgattcaatgcgtctagcaacaaacggaaagcctttgcaaggagcaaatatttatatggatactgtcagtgttggtgcgacaattaacactataatcgcagcagctaaggcaaatggccgtacggttattgaaaatgctgcacgtgaaccagaaattattgacgtggctactcttttaaataatatgggagctcatattcgtggtgctgggactgatgttattacaattgaaggtgtgaaatcgctccatggcacgcgtcatcaagtaattccagatcgtattgaagcaggaacttatattgctatggcagcagctatcggacgaggaataaaagtgaccaatgtgttatatgaacaccttgagagtttcattgctaagttagatgagatgggagttcgaatgacagttgaagaggattcaatttttgtcgaagaacaagaaaggttaaaagctgtatccataaaaacctcaccttacccaggatttgctacagatttacaacaacctctaactcctttattactaacagcagaaggaaacgggagtttattagatactatctatgagaaacgtgttaatcatgttcccgaattagcacgtatgggagctaatatttctaccctagggggcaaaatagtttatagtggtcctaatcaattatctggtgcacctgtaaaagcgacagatttgcgtgcaggcgctgctttagttatcgctggcttaatggcagagggacgaactgaaattacgaatatcgagtttattttacgtggatattctaatatcatcgagaaactaacatcattgggtgcggatatccaattggttgaggaa

SEQ ID NO: 4398 - protein, 419 aa, Streptococcus agalactiae
MRKIIINGGKQLTGEVAVSGAKNSVVALIPATILADDVVVLDGVPAISDVDSLVDIMETMGAKIKRYGETLEIDPCGVKDIPMPYGKINSLRASYYFYGSLLGRYGQATLGLPGGCDLGPRPIDLHLKAFEAMGASVSYEGDSMRLATNGKPLQGANIYMDTVSVGATINTIIAAAKANGRTVIENAAREPEIIDVATLLNNMGAHIRGAGTDVITIEGVKSLHGTRHQVIPDRIEAGTYIAMAAAIGRGIKVTNVLYEHLESFIAKLDEMGVRMTVEEDSIFVEEQERLKAVSIKTSPYPGFATDLQQPLTPLLLTAEGNGSLLDTIYEKRVNHVPELARMGANISTLGGKIVYSGPNQLSGAPVKATDLRAGAALVIAGLMAEGRTEITNIEFILRGYSNIIEKLTSLGADIQLVEE

SEQ ID NO: 4399 - DNA, 1257 bp, Streptococcus pyogenes
atgcgtaaaattattattaatggcggaaaagccttatctggagaagtggcagtttcaggggcaaaaaacagtgttgttgcgcttattccagcaatcatcttagccgatgatattgtgattcttgatggtgtacctgctattagtgatgtagatagtctgattgaaatcatggagcttatgggagcaacagtaaactatcatggtgatactttagaaattgaccctagaggggtgcaagacatcccgatgccttacggaaagattaatagtcttcgagcttcctattatttctacggtagtcttttaggtcgttttggacaagcagttgttggcttacctggtggttgcgatttaggaccaagaccaattgacttgcatttgaaggccttcgaggctatgggagttgaagtgtcttatgagggtgaaaatatgaatttatcgacaaatggtcaaaaaattcatggcgctcatatctatatggacaccgttagtgtcggtgctacaattaatactatggttgcggcaacaaaagctcaaggtaaaacggttattgaaaacgctgcacgtgagccagagattattgatgtggctactcttttgaataacatgggtgcgcatattcgtggagcaggtacagatattattacgatacaaggtgttcagaaattgcatggtactagacaccaagttattcctgatcgtattgaagcagggacttatatcgctttggcggcagctattggaaaaggtgttaagatcactaatgttctttatgagcatttagagagtttcattgctaagttagaagaaatgggtgtccgtatgacggtagaagaggatgctatctttgttgaaaagcaagaatccctcaaggctattacaattaaaacctctccttaccctggttttgccactgatttgcaacagccattaacgcccttgttgttaaaagcagatggtcgtggaacgattattgacactatatatgaaaagcgcattaaccatgtgccagagttgatgcgcatgggagcagatatctcagttattggtggtcaaattgtttatcaagggccgtctcgcctgacaggagctcaggtcaaagccactgatttacgtgccggagcggctctagtgactgctggtctaatagctgaaggcaagacagaaattactaatattgaatttatcttacgtggctatgctagtatcattgcaaaattaacagcactaggggcagatattcaattaatcgaagac

SEQ ID NO: 4400 - protein, 419 aa, Streptococcus pyogenes
MRKIIINGGKALSGEVAVSGAKNSVVALIPAIILADDIVILDGVPAISDVDSLIEIMELMGATVNYHGDTLEIDPRGVQDIPMPYGKINSLRASYYFYGSLLGRFGQAVVGLPGGCDLGPRPIDLHLKAFEAMGVEVSYEGENMNLSTNGQKIHGAHIYMDTVSVGATINTMVAATKAQGKTVIENAAREPEIIDVATLLNNMGAHIRGAGTDIITIQGVQKLHGTRHQVIPDRIEAGTYIALAAAIGKGVKITNVLYEHLESFIAKLEEMGVRMTVEEDAIFVEKQESLKAITIKTSPYPGFATDLQQPLTPLLLKADGRGTIIDTIYEKRINHVPELMRMGADISVIGGQIVYQGPSRLTGAQVKATDLRAGAALVTAGLIAEGKTEITNIEFILRGYASIIAKLTALGADIQLIED

SEQ ID NO: 4401 - DNA, 669 bp, Streptococcus agalactiae
atgaaagatacattgaaattatattttgtttgtggaactgtggattgctctaggaagaatatattgactgttgttgaagaagccttacaagcaggtataactctatttcaatttagagaaaaaggttttacagcattacaaggtaaggaaaaaattgctatggctaagcaactccaaatactttgtaagcaatatcaagttccttttattattgatgatgacattgacttagttgagttaattgatgctgatggtcttcatattggacaaaatgatttacctgttgatgaggcacggagacgtttaccagataaaatcatcggtttatctgtgagtacaatggatgaatatcagaaatcacaattatctgttgttgattacatcggaattggtccttttaatccgacacaatcaaaagcagatgctaagcctgctgttggcaataggacaacaaaggcagttagagaaattaatcaagatattccaatcgttgcaataggcggaatcactagtgattttgttcatgatattatagaatcaggtgcagatgggattgctgttatatcggctatttcaaaagcaaatcatattgtagatgcaaccagacaattgcgttatgaagttgaaaaagctctggttaataggcaaaaacacagtgatgtaatcaaa

SEQ ID NO: 4402 - protein, 223 aa, Streptococcus agalactiae
MKDTLKLYFVCGTVDCSRKNILTVVEEALQAGITLFQFREKGFTALQGKEKIAMAKQLQILCKQYQVPFIIDDDIDLVELIDADGLHIGQNDLPVDEARRRLPDKIIGLSVSTMDEYQKSQLSVVDYIGIGPFNPTQSKADAKPAVGNRTTKAVREINQDIPIVAIGGITSDFVHDIIESGADGIAVISAISKANHIVDATRQLRYEVEKALVNRQKHSDVIK

SEQ ID NO: 4403 - DNA, 813 bp, Streptococcus agalactiae
ttggaaacggtcctgtcaatcatactagctatcaaggagactaaaatgtatttagaacaattaaaagaggtaaatcctttaaccatttgtatcactaataatgtggtcaaaaactttacagccaatggtttattagctttaggagcttctccggctatgagcgagtgcatagaggacttagaagacttgttaaaagttgcagatgcattattaattaatataggaacactaacaaaagaaagttggcaactttaccaagaagcaatcaaaatagcaaataaaaaccaagttccagttgtattagatcctgtagcggcaggagcaagtcgttttcgattagaagtgtcacttgatttattgaagaattattctattagtttacttacaggaaatggtagtgaaatcgctgctttgattggtgaaaaacaagcgtctaaaggggcagatggcggaaaagtggctgatttagaatcaattgctgtaaaagccaatcaagtttttgatgtgccagtggttgtcacaggagaaactgatgctatcgctgttagaggagaagttcgcttattacaaaatggtagtcctttaatgccacttgttacaggaactggatgtctattaggggcagtattggctgcttttattggtagttctgacagaagcgatgatcttgcttgtctgacagaggccatgactgtttataatgttgctggagaaattgcagagaaggtggcaaaaggtaagggggtgggaagtttccaagttgcatttttagatgccctttcccagatgaaatcagaaatgattatggacaaa

SEQ ID NO: 4404 - protein, 271 aa, Streptococcus agalactiae
METVLSIILAIKETKMYLEQLKEVNPLTICITNNVVKNFTANGLLALGASPAMSECIEDLEDLLKVADALLINIGTLTKESWQLYQEAIKIANKNQVPVVLDPVAAGASRFRLEVSLDLLKNYSISLLTGNGSEIAALIGEKQASKGADGGKVADLESIAVKANQVFDVPVVVTGETDAIAVRGEVRLLQNGSPLMPLVTGTGCLLGAVLAAFIGSSDRSDDLACLTEAMTVYNVAGEIAEKVAKGKGVGSFQVAFLDALSQMKSEMIMDK

SEQ ID NO: 4405 - DNA, 795 bp, Streptococcus agalactiae
atgacttatttagcaccagttttaactattgcaggaactgatcctagcggtggagcagggattatggcggatttaaagacatttcaagctcgtcggacttacgggatggctgttgtgactagtgttgttgctcagaacacttgtggggttagaggcgttcagcatatagaaacagctatcattgatcaacaactagcttgtgtctatgatgatattaagccaaaggcggttaaaacaggaatgttagcggagagggaaacaattagtttagtcgcttcatatttaaaaaaatatccgcaaccttatgtattagatcctgttatggtggcaactagcggacatcgtttaattgattcagatgccgtagaagcattaaaagaagacttattgccattagcaactattatcacaccaaatttaccagaagctgaggttttagtgggatatgacttatcagatgaagtaagtattattaaagcaggttacgatattcaaaaacaatattctgttagaaatgttcttataaagggaggacatctagatggcttggctaaagattatttatttttggaaaaagaagggttgataactcttagtaatcaacgtatcaatactattcatactcatgggactgggtgtacatttgcagcagtcgttgcagcggagttagctaaagggcaatcaattctaaacgcggtaagtaccgctaaatcatttattacttcagctatcgaaacagcgcctgagttgggccttggaaacggtcctgtcaatcatactagctatcaaggagac

SEQ ID NO: 4406 - protein, 265 aa, Streptococcus agalactiae
MTYLAPVLTIAGTDPSGGAGIMADLKTFQARRTYGMAVVTSVVAQNTCGVRGVQHIETAIIDQQLACVYDDIKPKAVKTGMLAERETISLVASYLKKYPQPYVLDPVMVATSGHRLIDSDAVEALKEDLLPLATIITPNLPEAEVLVGYDLSDEVSIIKAGYDIQKQYSVRNVLIKGGHLDGLAKDYLFLEKEGLITLSNQRINTIHTHGTGCTFAAVVAAELAKGQSILNAVSTAKSFITSAIETAPELGLGNGPVNHTSYQGD

SEQ ID NO: 4407 - DNA, 762 bp, Streptococcus pyogenes
atgaaaactgattatatcgtgactatatctgggaacgatattttaagtggaggtggtctctatgctgatttagcgacttacataaggtatgacctacaggcctttgtagcggtaacttgtttaactactagatctgaagagggctttagtctatttccggtagctaaagaaattttccgtgatcagttgaatagctttacgaacgctccaatttctgctattaaaattggtttgttacctaatgcggaaatgtgtgaaatagttttggattttataaaggggcatctgggaatcccagtggttttagatcctgttctagcatgtaaagaaatagatgatgttaaaatagttcctctaagacaggagattttacaattattgccttatgtgactgttgttactccaaatttggtagaggctcagctattatctcaaaaagagattgtttctttaaaagatatgcaagaagctgctaaatatttttatcaacttggggcaaaacaggtggttatcaagggtggtaatcgatttagtcagaaaaaagctattgatcttttttatgatggtaaagagattgttaccttggaatgtcctgtacttgagaaaaataatattggcgcaggctgtacttttgcatctagtatcgctagtcagttagtaaagaaaaaaacgccactagaagctgtgaaaaactcaaaagagttagtctaccaagctattttacaatctgatagatacggagtaaaacaaagttatgcaaaa

SEQ ID NO: 4408 - protein, 254 aa, Streptococcus pyogenes
MKTDYIVTISGNDILSGGGLYADLATYIRYDLQAFVAVTCLTTRSEEGFSLFPVAKEIFRDQLNSFTNAPISAIKIGLLPNAEMCEIVLDFIKGHLGIPVVLDPVLACKEIDDVKIVPLRQEILQLLPYVTVVTPNLVEAQLLSQKEIVSLKDMQEAAKYFYQLGAKQVVIKGGNRFSQKKAIDLFYDGKEIVTLECPVLEKNNIGAGCTFASSIASQLVKKKTPLEAVKNSKELVYQAILQSDRYGVKQSYAK

SEQ ID NO: 4409 - DNA, 678 bp, Streptococcus agalactiae
atgttaaaagataagatgattgctaaaggagcaaaatatatccaatccatctatcaagatccatttattcaaggaattataaaagggcgtttagaccatgacgtaatctgccattatttacaggcagataatatctaccttgggaaatttgctgatatttatgccctgtgcttggcaaaatctgataatttacgagataaacaatttttccttgaacaaattgactttacattaaatcgggagttagcagatggtgaaggcccacatcaagccttggccgcttatactaatcgatcttatcaggatattatcgaaaagggtgtatggtacccgtcagcagatcattacattaaacatatgtattttcatttttacgaaaatggtattgctggtgctttagctgcaatgagcccatgtccatggatttaccatcaattggctaaaaaaataattgaggagaaccagtttttgaatggtaacccttttaataattggataactttttatgctaacgatacagttgaagagttaatggaaaactattttcgtatgatggattattatgcgcagaatttgtcaaaagagaagcaagctgatttggtagatgcttttgtgaaatcttgtcagcatgagagacgtttttttcaaatggcaataaatcaagaaaaatgggaggat

SEQ ID NO: 4410 - protein, 226 aa, Streptococcus agalactiae
MLKDKMIAKGAKYIQSIYQDPFIQGIIKGRLDHDVICHYLQADNIYLGKFADIYALCLAKSDNLRDKQFFLEQIDFTLNRELADGEGPHQALAAYTNRSYQDIIEKGVWYPSADHYIKHMYFHFYENGIAGALAAMSPCPWIYHQLAKKIIEENQFLNGNPFNNWITFYANDTVEELMENYFRMMDYYAQNLSKEKQADLVDAFVKSCQHERRFFQMAINQEKWED

SEQ ID NO: 4411 - DNA, 699 bp, Streptococcus agalactiae
gtgttttgcaacacgtttcttggaggtgtcatcttgttcaatttgaaaaactatcatccagctattaccttcctatgtttattaataccaaccttttcgtttagtttcacattgaggttaagaacgtctttgttatttctaattatagtagtaacactgcaatgcttcgtaaaggtttctttaaaaacttgggcgaaggtcaatctgatatcatttgtgatgggactctctttatttctagggacgtatttttggggaaaattaccccatcaattcgtcttagctagtctagtggcctgtcgtccgcttatttttatgaacgtgggtttgttatttcatgcatcacattctaattatgattttatagaatctctttatcaaactttcaaagtgcctagtcattttgcatatggtatttttgcggtctttaatcttctaccattaattaaattacaataccaacgtaatcgactcgcattccgactgaagaatcaggtaacttgggcattatcgcctagactaatattgtcagttttattaaagacgatatattgggtagaacagttagagttagcaatgctttctaaaggttttgaagtgggtaaagagcgaacacatgcttcaacttatcccgttcgttttcgagattatagtttacttggtatgagtattttattgtctataggaatgatttttaaa

SEQ ID NO: 4412 - protein, 233 aa, Streptococcus agalactiae
MFCNTFLGGVILFNLKNYHPAITFLCLLIPTFSFSFTLRLRTSLLFLIIVVTLQCFVKVSLKTWAKVNLISFVMGLSLFLGTYFWGKLPHQFVLASLVACRPLIFMNVGLLFHASHSNYDFIESLYQTFKVPSHFAYGIFAVFNLLPLIKLQYQRNRLAFRLKNQVTWALSPRLILSVLLKTIYWVEQLELAMLSKGFEVGKERTHASTYPVRFRDYSLLGMSILLSIGMIFK

SEQ ID NO: 4413 - DNA, 1284 bp, Streptococcus agalactiae
atgctatctgttgaaaaattagcttgcacccatggcgatagtcattatttatttgatgaagtgacttttagtcttaacccaggagaacgaattttaatcagtggctattcagggtgtggtaagagtacattggctcttttactatcagggttaaaagaaagtgggaaaggtcaagttttattaaacggctcattaatagaaccaagcgatgtggggtttctttttcaaaatcctgatttgcaattttgtatggatactgtggcgcatgagttgtattttattttagaaaatttacaaatagaaccggagcaaatgcaagatagaagtgagtttgtattggcacaagttggtttaaaaggatttcagaatcggttgatttatactttatctcaaggtgaaaaacagcgattagcattggcgaccatttttttaaaatctcctaaacttattattttagatgaagcttttgcgaatttggatcaagagagtgccagtcaactattacaattagttcttaattatcaagcaaacaatcaatcaatgctgattgtaatcgatcatttgattacttattatcaagatataatggatcactatttttggttggaaaaacggttgacaagggtcaattttgattatatgctcaatcgtttgaatgtcttcgaattagaaaagaaaagtcataatacaggtgacaaactgttatcaattaaagatttccaagttaaactttcaaaaaacaaattcatctcttaccttgattttgatttagcaagtggggagaggttgtgcttagatggaccaagtggcgtggggaagtctagtttgtttatgggattgttagggctttataggactaaagggaaaaaacaatttactcatagaaagcaaattcctataagctttttatttcaaaatcccttagaccaatttattttttcaacagtttatgacgaaatttttcaggtttgcaaggatagtaacaaagcgagggatattttggaaaccataaatctttgggataagaaacagttttcaccatttcaactaagtcaaggccaacagaggcgattagccattggcagtattttagctagtgatagtaaacttctattattagatgaaccaacttatggacaagatgcctatcacgctaatatgattacaactcttcttttgagttattgtcacaaaaatcattgtggggttatttttactagccatgatcctcacttaaaagagtgttttgcaacacgtttcttggaggtgtcatcttgttcaatt

SEQ ID NO: 4414 - protein, 428 aa, Streptococcus agalactiae
MLSVEKLACTHGDSHYLFDEVTFSLNPGERILISGYSGCGKSTLALLLSGLKESGKGQVLLNGSLIEPSDVGFLFQNPDLQFCMDTVAHELYFILENLQIEPEQMQDRSEFVLAQVGLKGFQNRLIYTLSQGEKQRLALATIFLKSPKLIILDEAFANLDQESASQLLQLVLNYQANNQSMLIVIDHLITYYQDIMDHYFWLEKRLTRVNFDYMLNRLNVFELEKKSHNTGDKLLSIKDFQVKLSKNKFISYLDFDLASGERLCLDGPSGVGKSSLFMGLLGLYRTKGKKQFTHRKQIPISFLFQNPLDQFIFSTVYDEIFQVCKDSNKARDILETINLWDKKQFSPFQLSQGQQRRLAIGSILASDSKLLLLDEPTYGQDAYHANMITTLLLSYCHKNHCGVIFTSHDPHLKECFATRFLEVSSCSI

SEQ ID NO: 4415 - DNA, 1452 bp, Streptococcus pyogenes
atggaaagattggggggtgcagatttggattactgttatcataatcatcacgatactgcaatgatttcagcagaacaacttgtttttacctatcatgatcaaaaaaatccagcttgtcagatatcgacttgtcaaattgcctctggacaattcattgttttgtgtggaccttctggttcaggtaaatctacctttttaaaacttcttaatggcataattcctgattattatgctggaaaatatgaaggtagactagatgtggctgattgccaagcaggcagagacagtgttgaaacattttctagatctgtggcctctgtttttcaaaatccagccagtcagtttttctatcgcgaagtccaacacgaactagtctttccttgtgaaaatcaaggtttagatgcaaaggttatcatgaagcgtctttggactttagcagaagattttgcttttgcagagctccttaacaaggatatgtttggattgtcaggagggcaaaaacaaagagttgctattgcaacggccattatgcaaggtactaatattatgctttttgatgagccaactgctaacttagatagtgcaggcatagctgctgttaaagcctatcttacccaattaaaagcagcaggaaaaaccattattgtagccgagcatcgcttacattacttgatggatttggcagataactttttctactttaaaaatggtagattaacagataagttaacaacacaaaatttgctagccttgacagatgaacaacggcaagatatgggactacgtcgcttagacttgtctgacctaaaacctgtgttagctggtaagattgagagtcaacattatcgcccagatgatagcctgtgtattgagcatctaacagttagagcgggaagcaaaatacttagatgtattgaacagcttagttttgctgtaggaagtatttctggcattacaggatcaaacgggcttggaaaatcgcaattagtttattatatagctggtatcttagacgataaaaaagcaactattaagtttcaaggcatacctttatctgccaagcaacgtttatcaaagactagtattgtcttgcaagaagtttctttgcaactatttgcagaatcggtttcaaaggaagtcaacttgggccatgaacgacatccacggacgacagaagtaatagagcggttatctttaacgactcttttagaacgtcatccagctagtttgtcaggaggtgagcaacaaagagtgatgattgccgctagtcttttggctgataaagatatcttaatttttgatgagccaagtagcggacttgatttgttacaaatgaaggctttagctaatcttctcatgcagctgaagacccaacataaggttgtcatcctcatttcacatgatgaagaacttctaagtagtgtctgcgataccatttatcaaatgctacct

SEQ ID NO: 4416 - protein, 484 aa, Streptococcus pyogenes
MERLGGADLDYCYHNHHDTAMISAEQLVFTYHDQKNPACQISTCQIASGQFIVLCGPSGSGKSTFLKLLNGIIPDYYAGKYEGRLDVADCQAGRDSVETFSRSVASVFQNPASQFFYREVQHELVFPCENQGLDAKVIMKRLWTLAEDFAFAELLNKDMFGLSGGQKQRVAIATAIMQGTNIMLFDEPTANLDSAGIAAVKAYLTQLKAAGKTIIVAEHRLHYLMDLADNFFYFKNGRLTDKLTTQNLLALTDEQRQDMGLRRLDLSDLKPVLAGKIESQHYRPDDSLCIEHLTVRAGSKILRCIEQLSFAVGSISGITGSNGLGKSQLVYYIAGILDDKKATIKFQGIPLSAKQRLSKTSIVLQEVSLQLFAESVSKEVNLGHERHPRTTEVIERLSLTTLLERHPASLSGGEQQRVMIAASLLADKDILIFDEPSSGLDLLQMKALANLLMQLKTQHKVVILISHDEELLSSVCDTIYQMLP

SEQ ID NO: 4417 - DNA, 552 bp, Streptococcus agalactiae
atgaaattgagtttaaaagatgtattattgattgctctattagcggttgttctgggcgttgtttactttggagcaggctatatttcaaatgcttttgtaccttttgtaggccctatagcgcatgaagttatttatggtatttggtttgtggcaggtccaatggctctttatatattgaggaaaccaggaaccgctattgtagcagaattgttagctgctttgatagaggttttaattggatcaatttatggaccaagtgtactcgttattggtacccttcaaggtttagggtcagaattaggctttacactatttaggtatcataattacaagttgccagcttttatattgtctgctattttgacatcaatttttagttttgcatggagtttttatgccaatggacttagtgcgttttcattttcatataacattctgatgcttatagtaagaactgtttcatctattattttcttcttattaacaaagaatatatgcgaccaattgcatagaagtggtgtactgaatgcttatgggattcatgaaaggaag

SEQ ID NO: 4418 - protein, 184 aa, Streptococcus agalactiae
MKLSLKDVLLIALLAVVLGVVYFGAGYISNAFVPFVGPIAHEVIYGIWFVAGPMALYILRKPGTAIVAELLAALIEVLIGSIYGPSVLVIGTLQGLGSELGFTLFRYHNYKLPAFILSAILTSIFSFAWSFYANGLSAFSFSYNILMLIVRTVSSIIFFLLTKNICDQLHRSGVLNAYGIHERK

SEQ ID NO: 4419 - DNA, 639 bp, Streptococcus agalactiae
ttgcagatggagttttttgttgtcaaaattttttgtaggttgttgccccttatctgtcatagagaaggagttatgatgactaatcataaaacaaaaaaattaacggttttagcaattatgattgctttagatgtttttttaacgcccatttttagaatagaaggcatggcctttatgtctagtgtggttaatattatcgctggagttataatgggaccaatctatgcattagttatggcacttgtaacggcttttattcgtattttaactcaagcaggagtagcatctgttgcacctttagctattctaggagctggtccaggagctttcttagcgggttggttttatcggttttatgcgaaagactggatgtcttgggtgggtgagtttataggaacagggataattggagcacttttatcagctccaattatggtctggttttggacttggacagcggatggaaatcacgaagtgttagctaaagcatctgcagctcaatccatttttctttttatgccaaggtttataggggcgactataattggcggtgttattgctttgttgctacttcagggattaaagcgggttcctgtatttatgacaatacaagcattatttaaaggagaaaaagtaaaa

SEQ ID NO: 4420 - protein, 213 aa, Streptococcus agalactiae
MQMEFFVVKIFCRLLPLICHREGVMMTNHKTKKLTVLAIMIALDVFLTPIFRIEGMAFMSSVVNIIAGVIMGPIYALVMALVTAFIRILTQAGVASVAPLAILGAGPGAFLAGWFYRFYAKDWMSWVGEFIGTGIIGALLSAPIMVWFWTWTADGNHEVLAKASAAQSIFLFMPRFIGATIIGGVIALLLLQGLKRVPVFMTIQALFKGEKVK

SEQ ID NO: 4421 - DNA, 543 bp, Streptococcus agalactiae
atgaaaaaaataacaactttaatcttagctagtagcttattactagttgcaacgacatcggttaaagctgatgataactttgaaatgccaacgcgttatgttaaaatgagtgaaaaatcaaaagcattttatcaaagactacaagaaaaacaacgtaaggcacatactactgtgaagacttttaataattcagaaataaggcatcaactacctcttaaacaagaaaaggctagaaatgatatctacaatttaggcattcttatttctcaggagtctaaagggttcatccaacgtattgataatgcctattctttggaaaatgtctcagatattgttaatgaagctcaggctttgtataaacgtaactatgatttatttgaaaaaatcaaatctacacgtgataaggttcaagtcttacttgcatcgcatcaagataatacagacttaaaaaacttttatgctgagttggacgatatgtatgaacatgtttatctcaatgaaagtagagtggaggcgataaacagaaatatccaaaaatataat

SEQ ID NO: 4422 - protein, 181 aa, Streptococcus agalactiae
MKKITTLILASSLLLVATTSVKADDNFEMPTRYVKMSEKSKAFYQRLQEKQRKAHTTVKTFNNSEIRHQLPLKQEKARNDIYNLGILISQESKGFIQRIDNAYSLENVSDIVNEAQALYKRNYDLFEKIKSTRDKVQVLLASHQDNTDLKNFYAELDDMYEHVYLNESRVEAINRNIQKYN

SEQ ID NO: 4423 - DNA, 2283 bp, Streptococcus agalactiae
atgaaaaagaaaagagagatggaaatgaaaaaacaatttttaaaatcagcagcgattctatcgctagcagtaacagcagtatctacaagtcagccggtaggggcgatagtgggaaaagatgaaacgaaattaagacagcaacttgggtatattgattcaaaaaaatctggaaagaaaattgatgagagatggggtgaaaaaatttataactatctaagttatgagctcattgaagcaaacgaatggattaaccgaagtgagtttcaggaacctgagtatagaactattttatcagaatttaaagataaaatagatagtattgaatactacttaattaacttaagtaatattgctaaagaagatgcgcatcaaagaaatattcttcaatcattagataaatatgaaaaaagtggaatatataatttagaccaaggtgtttataattatatatatcaagaaattagttcagcgaagcacaagttttcggatggggtagataaaatttatcgtttagatagtactttatttcctttctctgtatggtatgataaacatttagataataatgataactacaaggataataaagattttaaagagtacattgctttattaaatgaaattacacgaaaagcaaggttaggatatcaaattgtaaataaccataaagatggggagcataaagatgaagcagaaatactggatattttaatcagagatataacttttgtttcaaaagatgctcctggatataaatatattccaaataaaagaattgcagcgaaaataattgaagatttagatggaattatcaatgacttttttaagaatacaggaaaagataagccttctcttgaaaagttaaaggacacagaattccataaaaaatatcttaattcaactgaaccgtatagtattgaaactaacttaccttcaaattataaagaattgaaggaaaagcaaataaaaaaattggaatatggatacaaaaagtcttctaaaatttatacgtctgctcattatgcactatatagtgaagaaattgatgctgcaaaagaattgcttcaaaaagtgaagattgcaaaagataattataatgaaattaagtccatgaatctaagcccttcaatttttaatcagtatttacaacttcttcaaatagttataagttcagagataaatctaaaaaaggcactcgataacactgtggatttacccatagaaaataattttaatacattggacattcaatataataaattagacactgctattaagtcacttcgaaaatttgtaactaagtataaacaagaagtaagaaaagctactaagagttattctaaaaaagaattagtaaatgcagagttaacaaaagtaatttctaatgacaatattttattagacatgcaagcaattagttccaattatgggtctactaaaaagtttgtttattcagtcaaaagattaccttacgtcccgcaagtaattatgacaacaacgtctaatgtacttatgcctcaaaagcaagttgaaaaagtgaagctactcaccccatttacaatttctaataaagaagtattgaatcatgactcactagtagaaaatgatgctcaaaaacaaaaagtagaacaggaaaaaactaaatcgctagctcctcaaaaaggggctgtaaaagaacaaactgagcaaaaagtatctggaaatactcaagagatagaaaagaaatctgaaactgtggcaactccacaacaaagttcagttgcgcaaacttctgtccaacagccggctccggttcaatcagttgttcaagaatccaaagcttctcaagaggagattaatgcagcacacgatgctatttcggcgtataaatcaacagtcaatattgctaatacagccggtgtaacaactgcggaaatgaccacgctcattaatactcaaacttctaatctttctgatgttgagaaagctttaggaaataataaggttaataatggtgcagtcaatgtattgagagaagatacagctcgtcttgagaatatgatttggaatcgtgcttaccaagctattgaagaattcaacgtcgctcgtaatacttataataaccaaatcaagacagaaacagttccagttgataatgatattgaagctattttagcaggttctcaagctaaaattagccatttggacaatcgtatcggagcgcgccacatggatcaagcttttgtagctagtttattagaagttactgagatgagtaaatcaatctcatcgcgtataaaagag

SEQ ID NO: 4424 - protein, 761 aa, Streptococcus agalactiae
MKKKREMEMKKQFLKSAAILSLAVTAVSTSQPVGAIVGKDETKLRQQLGYIDSKKSGKKIDERWGEKIYNYLSYELIEANEWINRSEFQEPEYRTILSEFKDKIDSIEYYLINLSNIAKEDAHQRNILQSLDKYEKSGIYNLDQGVYNYIYQEISSAKHKFSDGVDKIYRLDSTLFPFSVWYDKHLDNNDNYKDNKDFKEYIALLNEITRKARLGYQIVNNHKDGEHKDEAEILDILIRDITFVSKDAPGYKYIPNKRIAAKIIEDLDGIINDFFKNTGKDKPSLEKLKDTEFHKKYLNSTEPYSIETNLPSNYKELKEKQIKKLEYGYKKSSKIYTSAHYALYSEEIDAAKELLQKVKIAKDNYNEIKSMNLSPSIFNQYLQLLQIVISSEINLKKALDNTVDLPIENNFNTLDIQYNKLDTAIKSLRKFVTKYKQEVRKATKSYSKKELVNAELTKVISNDNILLDMQAISSNYGSTKKFVYSVKRLPYVPQVIMTTTSNVLMPQKQVEKVKLLTPFTISNKEVLNHDSLVENDAQKQKVEQEKTKSLAPQKGAVKEQTEQKVSGNTQEIEKKSETVATPQQSSVAQTSVQQPAPVQSVVQESKASQEEINAAHDAISAYKSTVNIANTAGVTTAEMTTLINTQTSNLSDVEKALGNNKVNNGAVNVLREDTARLENMIWNRAYQAIEEFNVARNTYNNQIKTETVPVDNDIEAILAGSQAKISHLDNRIGARHMDQAFVASLLEVTEMSKSISSRIKE

SEQ ID NO: 4425 - DNA, 1194 bp, Streptococcus agalactiae
atgtcagaacgtaaacttttcacgtctgagtcagtatctgagggacatcctgataagattgctgaccaaatttccgatgcgattttagatgcaattttagagcaagatccagatgcccacgtagcagccgaaacagctgtttatacagggtcggttcatgtatttggcgaaatatcaacgacagcctatgttgatattaaccgagttgtccgtaacacaatcgctgaaattggctatgataaagctgaatatggcttctcagctgaatctgttggagtgcatccgtcactcgttgaacagtcgccagacattgcacagggagtcaatgaagctcttgaggtacgtggttctcttgaacaagatcctttagatttaattggtgcaggtgaccaaggtttgatgtttgggtttgctgttgatgaaacacctgagttaatgccattgccaatttctttagctcatcagttagttaagaaattgacagatctacgtaagtctggggaactcacttatcttcgaccagatgcaaaatctcaagtaacggttgaatatgatgaaaatgatcaaccaattcgtgtggatgcagtagttatttcgacacagcatgatcctaatgtaactaatgaccaactccataaggacgtgattgagaaagttatcaatgaagttattccaagccattatttagatgaccaaacaaaattctttatcaatcctacagggcgctttgttattggaggccctcaaggagattcaggactaacaggtcgtaagattattgtagatacttatggtggttattctcgtcatggtggtggtgcattttcaggtaaagatgctactaaagtagatcgttcagcatcttatgcagctcgttatattgcaaaaaatattgttgcagctgatttagctaaaaaagtagaagtacaacttgcttatgcaattggtgttgcccagcctgtctctgtgcgtgtagatacatttggaacaggtgttatagcagaagcagacctagaggcagctgtacgtcaaatatttgatttgcgaccagcaggcattattaatatgttggacctcaaacgacctatttatcgacaaacagcagcctatgggcatatgggacgtactgatatcgatttgccatgggagcgagttgataaagtccaggccttaaaggattttattgctagcaaa

SEQ ID NO: 4426 - protein, 398 aa, Streptococcus agalactiae
MSERKLFTSESVSEGHPDKIADQISDAILDAILEQDPDAHVAAETAVYTGSVHVFGEISTTAYVDINRVVRNTIAEIGYDKAEYGFSAESVGVHPSLVEQSPDIAQGVNEALEVRGSLEQDPLDLIGAGDQGLMFGFAVDETPELMPLPISLAHQLVKKLTDLRKSGELTYLRPDAKSQVTVEYDENDQPIRVDAVVISTQHDPNVTNDQLHKDVIEKVINEVIPSHYLDDQTKFFINPTGRFVIGGPQGDSGLTGRKIIVDTYGGYSRHGGGAFSGKDATKVDRSASYAARYIAKNIVAADLAKKVEVQLAYAIGVAQPVSVRVDTFGTGVIAEADLEAAVRQIFDLRPAGIINMLDLKRPIYRQTAAYGHMGRTDIDLPWERVDKVQALKDFIASK

SEQ ID NO: 4427 - DNA, 1194 bp, Streptococcus pyogenes
atgtcagaacgtaaacttttcacgtctgagtccgtatctgaagggcatccagataagattgcagaccaaatttcagatgctattttagatgccattttagcagaagatccagaagcccatgtggctgcagaaacttgtgtttacacaggttctgttcatgtttttggagaaatctcaacaacagcatacattgatattaaccgtgtggtccgcgacaccattgcagaaattggttatacagaagcagaatatggcttttcagcagaatcagtgggagtacatccatcacttgtagaacaatctggagatatcgctcagggggttaatgaagctttcgaaagcagagaaggtgatactgatgaccttagccatattggagcgggtgaccaagggctcatgtttggttttgccatcaatgaaacaccagaattgatgcctttaccaatttccttatctcaccaattagtgcgtcgcttggcggaattacgtaagtcaggtgagattagttatctacgtccagatgctaaatctcaagtgacagttgagtacgatgaacacgataaacctgttcgtgtggatacagtcgttatttctactcagcatgatccagaagctactaatgaccaaattcgtcaggatgtgattgaaaaagtgatcaaggctgtaattccagcagattatttagatgatgacacaaagttcttcattaatccaacaggacgttttgttattggaggtccgcaaggagactctggattgaccggacgtaagattattgtggatacctatggaggctattcacgtcatggtggcggtgctttttcaggaaaagatgcgacaaaagtggaccgttcggcttcttacgctgctcgctatattgctaaaaaccttgtggcagcaggccttgtgaccaaagctgaagtccaactagcttatgcgattggggtggctcagcctgtgtctgttcgcgtggatacatttggaacctcaacggttcctgaagctgttttagaagctgctgttcgtcaagtctttgatttacggccagcaggcattattcaaatgcttgatttaaaacgcccgatttacaaacaaacagctgcctatggtcacatggggagaacagatattgatttgccatgggagcgtttaaataaggttgatgctttagtagaagctgtaaaaacagtatta

SEQ ID NO: 4428 - protein, 398 aa, Streptococcus pyogenes
MSERKLFTSESVSEGHPDKIADQISDAILDAILAEDPEAHVAAETCVYTGSVHVFGEISTTAYIDINRVVRDTIAEIGYTEAEYGFSAESVGVHPSLVEQSGDIAQGVNEAFESREGDTDDLSHIGAGDQGLMFGFAINETPELMPLPISLSHQLVRRLAELRKSGEISYLRPDAKSQVTVEYDEHDKPVRVDTVVISTQHDPEATNDQIRQDVIEKVIKAVIPADYLDDDTKFFINPTGRFVIGGPQGDSGLTGRKIIVDTYGGYSRHGGGAFSGKDATKVDRSASYAARYIAKNLVAAGLVTKAEVQLAYAIGVAQPVSVRVDTFGTSTVPEAVLEAAVRQVFDLRPAGIIQMLDLKRPIYKQTAAYGHMGRTDIDLPWERLNKVDALVEAVKTVL

SEQ ID NO: 4429 - DNA, 933 bp, Streptococcus agalactiae
atgaaaacctacgaaaaaatttatcaaatactatcaaaaaataacaactttattagcggagaaactatggcaaatcaacttaatatttcccgcacagctatttggaaaggtataaaaacgttagaagaattaggcctagagattgagtctgtcactaacaagggctaccgattggtatcaggtgacatattattaccagaacaactcgaacaagaaattggtattaaggttagtcttaataataatagtgcttcaacccaactagatgctaaaatggggatagaaagtaaattaaagactccacacctttttttagctcctaatcaaaaaaaagctaaaggacgttttgatagacctttctttacatcaaatcaaggcggcatctatatgtctcttttattacaacctaatgtaccgattgaagatataaaaccttatactgtcatggtagcctctagtgctgtaaaagctatctcacggttaacaggaattactcctgaaattaagtgggtcaatgatatttatttagataataaaaaaatagctggtattttaaccgaggctatcgcttctgttgagagtgggttggtaacgaatgttattataggattaggtatcaatttctatatcaaagagttccctagggcgttaactaagcgcgcaggtagtctctttacagagcaaccgaccataactagaaatcaattgattacagaaatctggaatctctttttcaatattccactagaggatcacttaaaggtatatagagaaaaatccctagtcttagatagaaccgttagctttatggatggtcaaacaatgtattctgggaaagctattgatattacagataaaggatatttagtggttgagttagatgatggtcagttgaaaacacttcgcagtggcgaaatcagtctttcttcttgg

SEQ ID NO: 4430 - protein, 311 aa, Streptococcus agalactiae
MKTYEKIYQILSKNNNFISGETMANQLNISRTAIWKGIKTLEELGLEIESVTNKGYRLVSGDILLPEQLEQEIGIKVSLNNNSASTQLDAKMGIESKLKTPHLFLAPNQKKAKGRFDRPFFTSNQGGIYMSLLLQPNVPIEDIKPYTVMVASSAVKAISRLTGITPEIKWVNDIYLDNKKIAGILTEAIASVESGLVTNVIIGLGINFYIKEFPRALTKRAGSLFTEQPTITRNQLITEIWNLFFNIPLEDHLKVYREKSLVLDRTVSFMDGQTMYSGKAIDITDKGYLVVELDDGQLKTLRSGEISLSSW

SEQ ID NO: 4431 - DNA, 939 bp, Streptococcus pyogenes
atgaaaacatcagaaaaaatttatcaattactgtcacaaaccgatgacttcgtcagtggggaatatctagcagatcaactcagtatctctcgtacatccgtttggaaatccatcaaaagtctcgaaaatcaggggattcaaattgattctttaaaacacaagggctaccgcatggtacaaggtgatattttattacccaaaaccattagccaagggcttgggatgccagtcacctatacccctcacagccaatctacccaattagatgccaaacaaggaatcgaagctcataacagcgctccaaggctttacctagctcctagccaagaagctgccaaaggacgcctcgatcggcaatttttttcagctagcaccggtggtatttacatgtccatgtacctaaaacccaatgtcccttatgctgatatgcctccttatacgatgatggttgcttccagtattgtcaaagctatctcgcgattaacaggcattgatacagaaatcaaatgggtaaacgacatctatctaggtaaccataaagttgcagggattctgacagaagccattacttctgttgaaactggtttaatcaccgatgtcattattggggttggtctcaacttttttgtcaccgacttcccagaagcgattgctcaaaaggcaggttctctctttaccgaaaaaccgactatcacgcgcaatgaccttatcattgacatctggaaattattcttatctattcctgtcaaggaccatgtcaaagtttacaaagaaaaatcacttgttcttaataaacaagtgacctttatagaaaatagtcaagaaaaacgtgctattgcgattgatctcacagatcaaggacacctcattgtacagtttgaaaatggtgaccttcaaaccttgcgaagcggtgaaatcagtctttcttcttgggagaat

SEQ ID NO: 4432 - protein, 313 aa, Streptococcus pyogenes
MKTSEKIYQLLSQTDDFVSGEYLADQLSISRTSVWKSIKSLENQGIQIDSLKHKGYRMVQGDILLPKTISQGLGMPVTYTPHSQSTQLDAKQGIEAHNSAPRLYLAPSQEAAKGRLDRQFFSASTGGIYMSMYLKPNVPYADMPPYTMMVASSIVKAISRLTGIDTEIKWVNDIYLGNHKVAGILTEAITSVETGLITDVIIGVGLNFFVTDFPEAIAQKAGSLFTEKPTITRNDLIIDIWKLFLSIPVKDHVKVYKEKSLVLNKQVTFIENSQEKRAIAIDLTDQGHLIVQFENGDLQTLRSGEISLSSWEN

SEQ ID NO: 4433 - DNA, 189 bp, Streptococcus agalactiae
ttgaaacttatttttttaatcaatccgttatggatggctcctggatttttgctattttttggggagttttattacttcgagatcttcaaaaggtgtatgcgatttcaaaattcacaaaagagcttatcaaatctaccaagaagaaagactgatttcgccactgcgaagtgttttcaactgaccatcatc

SEQ ID NO: 4434 - protein, 63 aa, Streptococcus agalactiae
MKLIFLINPLWMAPGFLLFFGEFYYFEIFKRCMRFQNSQKSLSNLPRRKTDFATAKCFQLTII

SEQ ID NO: 4435 - DNA, 192 bp, Streptococcus agalactiae
atgacaaaacgacaatttatttttatggcgcttttatgctcttttgaaacttatttttttaatcaatccgttatggatggctcctggatttttgctattttttggggagttttattacttcgagatcttcaaaaggtgtatgcgatttcaaaattcacaaaagagcttatcaaatctaccaagaagaaagac

SEQ ID NO: 4436 - protein, 64 aa, Streptococcus agalactiae
MTKRQFIFMALLCSFETYFFNQSVMDGSWIFAIFWGVLLLRDLQKVYAISKFTKELIKSTKKKD

SEQ ID NO: 4437 - DNA, 306 bp, Streptococcus pyogenes
ttgacgactaaaactgaaatacataagggtaaggttttgcccttacccacgttttatctcgttacttttcttcatagtacagtatttttttgttataataaagctatgactattcgacaatttctttttatggcctttgtatgtgcctttgaaacctatttttttaatgacctgttactctctggaaattatctcttcgccttattttggggcttgttgctctttagggatttaagaagagtgcataccattaaccaactgactaaaaccattttaaaaacggctaattctcccaagaagaaagac

SEQ ID NO: 4438 - protein, 102 aa, Streptococcus pyogenes
LTTKTEIHKGKVLPLPTFYLVTFLHSTVFFCYNKAMTIRQFLFMAFVCAFETYFFNDLLLSGNYLFALFWGLLLFRDLRRVHTINQLTKTILKTANSPKKKD

SEQ ID NO: 4439 - DNA, 1662 bp, Streptococcus agalactiae
atgtatcaggccctttatcggaaatatcgtagccaaacatttgatgaaatggttggacaaagtgttatttcaactactttaaagcaagctgtgtccagcaaaaaaattagccatgcttaccttttttcaggacctaggggaactggaaaaacaagtgctgctaaaatatttgcaaaagcgatgaattgcccaaatcaaattaatggcgaaccttgtaatcattgtgatatttgtcgagatattacaaatggtagtttagaggatgtcattgaaattgatgctgcgtcaaataatggtgtcgatgaaattcgtgatatcagggacaaatcaacttatgctccaagtagggcaacctataaagtttatattattgatgaggttcatatgttgtctacaggtgccttcaatgcactattgaaaacacttgaagagccaacagaaaatgttgtttttatattagcaacaacagaactccataaaatccctgcaacaatcttatctcgtgtccagcgctttgaatttaaagcgattaaattattagctattcgagatcatttagcacagattttagataaagaagctatttcatatgatttggatgctctgacactagtcgctagacgagccgaaggtggtatgcgtgatgctttatcaattctcgatcaagccttgagtttagcgaaagataaccacatttctttagatgtagcagaagaaattacagggagcatttccttatctgctatagatgattatgtatcgaatatattggctcacgatacaactgaagcactcgctaaacttgaagtaatctttgatagtggcaaaagtatgagtcgttttgcaacagatttattgatgtacttaagagatttacttgttgttcaagcaggtggtgaagatagtcattcaagtgatacttttatagccaatcttaatgttaaacaagatattttatttgaaatgattgataaagtgacatctgttcttcctgagataaaaaatggtagccatcctaaagtttatgcagagatgatgaccatccaattgtctgaaatggtagaaaaaaattcgtcaaacatacccgcagatgtgacagcagaattagatagtcttcgtcgagagttaaaatcgttaaaaaacgaaatgagccaactctctcgagcagatcaaagttcatcaactcaaaaagtaaaggttaataataagacattcacatttaaagttgaccgtacaaagattttgaccattatggaagaaacggttgtagatagtcaacgttcacgtgaatacttagaagctttaaagagcgcttggaacgagatattagataatattacggctcaagatagagccttattaatgggatctgaacctgtcttagctaatagcgagaatgctattttggcatttgatgcggcctttaatgctgaacaagctatgaaacgtaccgatctcaatgatatatttggtaatattatgagtaaagcagcaggtttttcacctaatattttagctgtacctagaaatgattttaatcaaattcggagcgattttgcaaagaaaatgaaagctcaaaagacggaaacagaacctgaagttaatcatcaaattccagaagacttttcttatctagcagaacgaatagcaatcgttgaagat

SEQ ID NO: 4440 - protein, 554 aa, Streptococcus agalactiae
MYQALYRKYRSQTFDEMVGQSVISTTLKQAVSSKKISHAYLFSGPRGTGKTSAAKIFAKAMNCPNQINGEPCNHCDICRDITNGSLEDVIEIDAASNNGVDEIRDIRDKSTYAPSRATYKVYIIDEVHMLSTGAFNALLKTLEEPTENVVFILATTELHKIPATILSRVQRFEFKAIKLLAIRDHLAQILDKEAISYDLDALTLVARRAEGGMRDALSILDQALSLAKDNHISLDVAEEITGSISLSAIDDYVSNILAHDTTEALAKLEVIFDSGKSMSRFATDLLMYLRDLLVVQAGGEDSHSSDTFIANLNVKQDILFEMIDKVTSVLPEIKNGSHPKVYAEMMTIQLSEMVEKNSSNIPADVTAELDSLRRELKSLKNEMSQLSRADQSSSTQKVKVNNKTFTFKVDRTKILTIMEETVVDSQRSREYLEALKSAWNEILDNITAQDRALLMGSEPVLANSENAILAFDAAFNAEQAMKRTDLNDIFGNIMSKAAGFSPNILAVPRNDFNQIRSDFAKKMKAQKTETEPEVNHQIPEDFSYLAERIAIVED

SEQ ID NO: 4441 - DNA, 1668 bp, Streptococcus pyogenes
atgtatcaagctctttatcggaaataccggagccaaacgtttgacgaaatggtgggacaatcggttatttccacaactttaaagcaggcagttgaatctggcaagattagccatgcttatcttttttcaggtcctagagggactgggaaaacaagtgcggcaaagatttttgcaaaggccatgaattgtcctaaccaagtcgatggtgaaccctgtaatcaatgcgatatttgccgagatatcacgaatggaagcttggaagatgtgattgaaattgatgctgcctcgaataatggtgttgatgaaattcgtgacattcgagacaaatcaacctatgcgccaagtcgtgcgacttacaaggtttatattattgatgaggttcacatgttatcaacaggggcttttaatgcgcttttgaaaactttggaagaaccgacagaaaatgttgtctttatcttggcaacaacggaattgcataaaattccagccactattttatctcgtgtgcaacgctttgaattcaaagctattaagcaaaaagctattcgagagcatttagcctgggttttggacaaagaaggtattgcctatgaggtggatgctttaaatctcattgcaaggcgagcagaaggaggcatgcgtgatgctttatctattttagatcaggctttgagcttgtcaccagataatcaggtcgccattgcaattgccgaagaaattacaggttctatttccatacttgctctgggtgactatgttcgatatgtctcccaagaacaggctacgcaagctctggcagccttagagaccatttatgatagtgggaagagcatgagccgctttgcgacagatttattgacctatctgcgtgatttattggtggttaaagctggcggcgacaatcaacgtcagtcagctgtttttgataccaatttgtctctctcgatagatcgtatattccaaatgataacagttgttactagtcatctccctgaaatcaaaaagggaacccatcctcggatttatgccgaaatgatgactatccaattagctcagaaagagcagattttgtcccaagtaaacttgtcaggagagttaatctcagagattgaaacgctcaaaaatgagttggcacaacttaaacaacaattgtcgcagctccaatcgcgtcctgattcactggcaagatctgataaaacgaaacctaaaaccacaagctacagggttgatcgggttaccattttgaaaatcatggaagaaacggttcgaaatagccaacaatctcgacaatatctagatgctctaaaaaatgcttggaatgaaattctagataacatttctgcccaagacagagccttattgatgggctctgagcctgtcttagcaaatagtgagaatgcgattttggctttcgaggctgcctttaatgcagaacaagtcatgagccgaaataatcttaatgatatgtttggtaacattatgagtaaagctgctggtttttctcccaatattctggcagtaccaaggacagattttcagcatattcgtaaggaatttgctcagcaaatgaaatcgcaaaaagacagtgttcaagaagaacaagaagtagcgcttgatattccagaagggtttgattttttgctcgataaaataaatactattgacgac

SEQ ID NO: 4442 - protein, 556 aa, Streptococcus pyogenes
MYQALYRKYRSQTFDEMVGQSVISTTLKQAVESGKISHAYLFSGPRGTGKTSAAKIFAKAMNCPNQVDGEPCNQCDICRDITNGSLEDVIEIDAASNNGVDEIRDIRDKSTYAPSRATYKVYIIDEVHMLSTGAFNALLKTLEEPTENVVFILATTELHKIPATILSRVQRFEFKAIKQKAIREHLAWVLDKEGIAYEVDALNLIARRAEGGMRDALSILDQALSLSPDNQVAIAIAEEITGSISILALGDYVRYVSQEQATQALAALETIYDSGKSMSRFATDLLTYLRDLLVVKAGGDNQRQSAVFDTNLSLSIDRIFQMITVVTSHLPEIKKGTHPRIYAEMMTIQLAQKEQILSQVNLSGELISEIETLKNELAQLKQQLSQLQSRPDSLARSDKTKPKTTSYRVDRVTILKIMEETVRNSQQSRQYLDALKNAWNEILDNISAQDRALLMGSEPVLANSENAILAFEAAFNAEQVMSRNNLNDMFGNIMSKAAGFSPNILAVPRTDFQHIRKEFAQQMKSQKDSVQEEQEVALDIPEGFDFLLDKINTIDD

SEQ ID NO: 4443 - DNA, 495 bp, Streptococcus agalactiae
atgaacaagtctaagaaaatcgaaaattatcaattattattactacaagcgcaagctctattctcagatgaaacaaatgctcttgccaacttatcaaatgcttcagctatgctaaatgctatgcttccaaattctgtatttacaggcttttatttatttgatggagaagagttaattcttggccctttccagggtggtgtatcatgtgtgcatattactttaggaaaaggtgtttgtggtgaatctgcacaaactgctaagacgctgatcgttgatgatgttacaaagcatgctaactatatctcctgtgattcaaaagctatgagtgaaatcgtagtacctatgtttaaaaatggcaaacttctaggagttctagatttagattcttctttagtagcagattatgatgagattgatcaagaatacttagaaaaatttgtaggtattctagtagaacatacgatttggaatttggatatgtttggagttgaaaag

SEQ ID NO: 4444 - protein, 165 aa, Streptococcus agalactiae
MNKSKKIENYQLLLLQAQALFSDETNALANLSNASAMLNAMLPNSVFTGFYLFDGEELILGPFQGGVSCVHITLGKGVCGESAQTAKTLIVDDVTKHANYISCDSKAMSEIVVPMFKNGKLLGVLDLDSSLVADYDEIDQEYLEKFVGILVEHTIWNLDMFGVEK

SEQ ID NO: 4445 - DNA, 495 bp, Streptococcus pyogenes
atgaataagtctaaaaaaattgagcaataccaactaatgatagcgcaggcaaaagagctgtttgcgaatgaatcaaatgctttggctaatttgtcaaatgccagcgccctgttaaacatgacactacccaattctgtttttacgggattttacctttttgatgggcaggaattaattcttggcccttttcaaggtagggtttcttgcgtccatatcaagcttggtaaaggtgtttgtggcgaatcagctcagtctcgtcgaaccattattataaatgatgtgaagcagcatgccaactatatttcctgtgatgcggcagccatgagtgaaattgttgtgcctatggtgaaagaaggccatttgattggggtgctggacttggattctagtcttgtagctgattatgatgaggttgatcaagaatacttagaggcctttgtggatctatttcttgaaaagaccacgtttacctttaacatgtttggagttaaaaac

SEQ ID NO: 4446 - protein, 165 aa, Streptococcus pyogenes
MNKSKKIEQYQLMIAQAKELFANESNALANLSNASALLNMTLPNSVFTGFYLFDGQELILGPFQGRVSCVHIKLGKGVCGESAQSRRTIIINDVKQHANYISCDAAAMSEIVVPMVKEGHLIGVLDLDSSLVADYDEVDQEYLEAFVDLFLEKTTFTFNMFGVKN

SEQ ID NO: 4447 - DNA, 627 bp, Streptococcus agalactiae
atgcgtaaaaaacctattattattggtgttacaggtggatctggtggtggtaaaaccagtgtttctcgggcgattttatcaaatttcccagatcaaaaaattaccatgattgaacatgattcttactataaagatcaaagtcatttaacttttgaagaacgtgtaaaaaccaattatgatcatccccttgcttttgataccaatttgatgattgagcaattgaacgaattgattgagggacgtccggtcgatattccggtttatgattacacaaaacatacccgtagtgatagaactatccgccaagaaccccaggatgtcattattgttgagggaattttggtattagaagatcagcgtttgcgtgatttaatggatatcaaattatttgttgatacagatgatgatattcgtattattcgtcgtattaagcgtgatatggaagagcgcgatagaagtttagatagtattattgaacagtatacagaagttgtaaaacctatgtatcatcaatttatcgaaccaacaaagcgttatgcggatattgtaattccagaaggagtaagtaatattgtcgctattgatttaatcaataccaaagtggctagcatcttaaatgaagcaaaa

SEQ ID NO: 4448 - protein, 209 aa, Streptococcus agalactiae
MRKKPIIIGVTGGSGGGKTSVSRAILSNFPDQKITMIEHDSYYKDQSHLTFEERVKTNYDHPLAFDTNLMIEQLNELIEGRPVDIPVYDYTKHTRSDRTIRQEPQDVIIVEGILVLEDQRLRDLMDIKLFVDTDDDIRIIRRIKRDMEERDRSLDSIIEQYTEVVKPMYHQFIEPTKRYADIVIPEGVSNIVAIDLINTKVASILNEAK

SEQ ID NO: 4449 - DNA, 636 bp, Streptococcus pyogenes
ttggagtttaaaatgcttaaaaaaccgattattattggtgtaactggtggttcaggtggcggtaaaacaagtgtgtcacgcgctattttggacagttttccaaatgctcgtattgcaatgattcaacacgattcttactataaagatcagtctcacatgagttttgaagaaagggtcaagaccaattatgaccatcctctagcttttgatacagattttatgattcagcaactaaaagaattattagctggtagacctgtagatattcctatctatgattacaaaaagcatacccgcagtaatacgacctttcgtcaggatcctcaggatgttattattgttgaaggtattcttgtcctagaagatgagcgtttgcgagatttgatggatatcaagctctttgtagacacagatgacgatattcgtattattcgtcgtattaagcgtgacatgatggaacgtggcagaagcttagaaagtattattgatcagtacacaagcgtggtaaagcctatgtatcatcagtttattgagccaagtaaacgctatgctgatattgttattccagagggagttagtaatgtcgttgctattgatgttattaatagtaaaattgcgagtattcttggagaagta

SEQ ID NO: 4450 - protein, 212 aa, Streptococcus pyogenes
LEFKMLKKPIIIGVTGGSGGGKTSVSRAILDSFPNARIAMIQHDSYYKDQSHMSFEERVKTNYDHPLAFDTDFMIQQLKELLAGRPVDIPIYDYKKHTRSNTTFRQDPQDVIIVEGILVLEDERLRDLMDIKLFVDTDDDIRIIRRIKRDMMERGRSLESIIDQYTSVVKPMYHQFIEPSKRYADIVIPEGVSNVVAIDVINSKIASILGEV

SEQ ID NO: 4451 - DNA, 1080 bp, Streptococcus agalactiae
atgataacaaaatttccagaccaatggcaggataaattaacccagcgtcaatttgatgatctaacagatattcaaaataaactttttcaacctattactgatggtgataatatccttggaattagccctacaggtactggtaaaactctagcataccttttcccaacgcttcttaagttgcaacctaaaaagagccaacaactcttaattttagctccaaattcagaattagctggacaaatcttcgacgttacaaaagaatgggctgaaccattaggactgaccgcacaactattcctttcaggttctagtcaaaaacgccaaattgagcgactaaaaaaaggaccagaaattcttataggaactgctggacgcgtatttgaacttgtgaaactaaaaaaaataaaaatgatgaacattaatactatcgtccttgatgaattcgatgaattactcggcgactcacaatatcattttgtggacaatattattaatcgcgttcctcgtgatcagcaaatgatttacattagtgccaccaacaaactggacaatagtaaacttgccgataacactataacaatcgatctatctaatcaaaaacttgatactataaaacattattatattacagttgataaaagagagcgtactgacctacttcgtaaattttcaaatattcctgattttagaggtcttgtcttttttaacagcttatcagacttaggtgcatgtgaagaacgtttacaatttaatagggcctcggcagtttctttagcaagcgatattaatattaaattccgtaaagttatcttagagaaatttaaaaaccatgatatttcattactcctaggaactgatttggtagctcgtggcattgatatcgacaacctagaatatgtgattaattttgatatcgcacgcgacaaagaaacatatacacatcgttctggacgaactggtcgtatggggaaagagggatgtgttattacatttgtaacacataaagaagagctcaaacaacttaaaaaatacgccaccgttacagaacttgtacttcacaatcaaaaattacatttaaaa

SEQ ID NO: 4452 - protein, 360 aa, Streptococcus agalactiae
MITKFPDQWQDKLTQRQFDDLTDIQNKLFQPITDGDNILGISPTGTGKTLAYLFPTLLKLQPKKSQQLLILAPNSELAGQIFDVTKEWAEPLGLTAQLFLSGSSQKRQIERLKKGPEILIGTAGRVFELVKLKKIKMMNINTIVLDEFDELLGDSQYHFVDNIINRVPRDQQMIYISATNKLDNSKLADNTITIDLSNQKLDTIKHYYITVDKRERTDLLRKFSNIPDFRGLVFFNSLSDLGACEERLQFNRASAVSLASDINIKFRKVILEKFKNHDISLLLGTDLVARGIDIDNLEYVINFDIARDKETYTHRSGRTGRMGKEGCVITFVTHKEELKQLKKYATVTELVLHNQKLHLK

SEQ ID NO: 4453 - DNA, 1116 bp, Streptococcus pyogenes
atgaatatagaaacaatagtaaaaggaagacgcatgatcactaaatttccccctcaatggcaagaaaaacttgaccaagttgcatttacccatttaacgccaatccaagaacaggcctttcaacctattgttgatggtaaaaatttccttggtattagccctactgggacgggcaagaccttagcttatgtctttcctaatctattggcactgacgcctaaaaagtcccaacaactactcattttagcccctaataccgaattagctggccaaatttttgaagtcacaaaggattgggcacagccactaggcttaacggcacaactctttatttctggaaccagtcaaaaacgtcaaatcgaacgcctcaaaaaaggtcctgaaatcctgattggaacccctggacgcatttttgagctgattaaattgaaaaaaatcaagatgatgtctgtcaacaccattgttttagatgaatatgacgaactattaggtgattcccaatatgattttgttcaaaaaattagccactatgttcctcgagatcatcaaatggtatacatgagtgctactaataaggtggatcaaacttccttagctccaaatacattctgcatcgatctttcagagcaaaccaacgatgctattcagcatttttacctcatggttgacaagcgcgaacgtacagatttattacgaaaatttactaatattcctcattttagagctttggtctttttcaacagtttatctgatttgggtgctacggaagaacgtctccaatataatggagctgctgcggtttccttagcgagtgacattaatgtcaaattccgtaaaaccattctcgaaaaattcaaatcccaccaactctccttattgttagctacggatcttgttgctcggggcattgatattgataatcttgactatgtcattcattttgatgttgctcgtgataaggaaaattacactcacagagctggacgaaccggccgtatgggaaaatctggtatcgttattacctttgttagccaccctgaagacctcaaaaaattgaaaaaatttgctaaagtctctgaaatctccctcaaaaatcaacaacttcatttcatcaac

SEQ ID NO: 4454 - protein, 372 aa, Streptococcus pyogenes
MNIETIVKGRRMITKFPPQWQEKLDQVAFTHLTPIQEQAFQPIVDGKNFLGISPTGTGKTLAYVFPNLLALTPKKSQQLLILAPNTELAGQIFEVTKDWAQPLGLTAQLFISGTSQKRQIERLKKGPEILIGTPGRIFELIKLKKIKMMSVNTIVLDEYDELLGDSQYDFVQKISHYVPRDHQMVYMSATNKVDQTSLAPNTFCIDLSEQTNDAIQHFYLMVDKRERTDLLRKFTNIPHFRALVFFNSLSDLGATEERLQYNGAAAVSLASDINVKFRKTILEKFKSHQLSLLLATDLVARGIDIDNLDYVIHFDVARDKENYTHRAGRTGRMGKSGIVITFVSHPEDLKKLKKFAKVSEISLKNQQLHFIN

SEQ ID NO: 4455 - DNA, 96 bp, Streptococcus agalactiae
gtgaattatattcaacgccttaataaaaaaagaaacaagttacttgtttctttttttattttaaatgtaatttttgattgtgaagtacaagttctg

SEQ ID NO: 4456 - protein, 32 aa, Streptococcus agalactiae
MNYIQRLNKKRNKLLVSFFILNVIFDCEVQVL

SEQ ID NO: 4457 - DNA, 1251 bp, Streptococcus agalactiae
atgaagaaattaattataggtatttttagtctaattattatagcgattcttgcttggcaaggtttttcgtttttgaaacataaagaaataaaacttcaacaagctgttgttgaaaaagaaattcgcatagccgagaaaacggtagaagtggtgaaaagacagaaaactgaacgtgttctttttcttgaacctaaaggatatgacaaaagtctaagcgctgatattttaaagtggaatcaaaaaagctttgagcataaaaaattttatgacaatcaatacattattctacgtcctcaattagcagattctaactttgcaaatgttaaaaaattatccatttatcaaatcttatatcaaaaagaaaaaggaagtatgtttcaaaaatcaagtcgccttttgagaacctacttacttgatcaaaataagaaaccttttgaattagatgagcttttagctcataatatatctggatttaaggctattttagaaaatatagctccaggaactcaactaaaggaacatgatagcaataaagaatttttaaaaactggaagagtaacagatgggctagatgttaaagatggtaagttaattattaatgatttaaaattaccacttgataaattatataatgtgatcgatgagtcatatttaaaatcaagtgatctagatttagtttctaatttaaaagctaaagcaccacgtgttgcacttacctttgatgatggaccaaatgaaaaaacgactcctaaagccttagaaatccttaaaagatataatgctaaagcgactttctttgtaatgggacaaagtgctgtagggcacacagatattttacaaaggatgcatgctgaaggtcatgagattggtaatcatacatgggatcatcctaatttaaccaaactaccagcggagaaaatcaaggaagagattcataagactaatgatctgattatgaaagcaacaggacaaaaaccggtgtacttacgtcccccttacggagcaacaaatgctactgtaaaaacagtgacaggattgaaagaaatgttgtggtcagttgatacagaagactggaaaaatcataatacacaagcaatgatgaccaatatcaaaaaacaattacgtcctggaggagtgattttgatgcatgatattcaccagacaaccatagatgctctgcctacaattatggattatctgacaacccagggctattattttgttactgtaggtgaattatattcaacgcct

SEQ ID NO: 4458 - protein, 417 aa, Streptococcus agalactiae
MKKLIIGIFSLIIIAILAWQGFSFLKHKEIKLQQAVVEKEIRIAEKTVEVVKRQKTERVLFLEPKGYDKSLSADILKWNQKSFEHKKFYDNQYIILRPQLADSNFANVKKLSIYQILYQKEKGSMFQKSSRLLRTYLLDQNKKPFELDELLAHNISGFKAILENIAPGTQLKEHDSNKEFLKTGRVTDGLDVKDGKLIINDLKLPLDKLYNVIDESYLKSSDLDLVSNLKAKAPRVALTFDDGPNEKTTPKALEILKRYNAKATFFVMGQSAVGHTDILQRMHAEGHEIGNHTWDHPNLTKLPAEKIKEEIHKTNDLIMKATGQKPVYLRPPYGATNATVKTVTGLKEMLWSVDTEDWKNHNTQAMMTNIKKQLRPGGVILMHDIHQTTIDALPTIMDYLTTQGYYFVTVGELYSTP

SEQ ID NO: 4459 - DNA, 1272 bp, Streptococcus pyogenes
ttgaaaaaattaaatgttattcttgttggtttattaagcattctgatgttgagtttagctattgtgtttattaatcgttggaaactaaacgaagatagtcagcgtatagttttggctgaaaagaaaaaaaacacgtcagatttagtgatcaaagctgtaaaacatattaaaaaagatcaaaaagactattattatttttccccgataaaacaagcagatgatttttttgtagataatttacctgtttcattatacaaaaaaaagaattcagataaagaattgattttagtaaggcctaaactgcaatcttctcacctaagatcagttaacactttgactatttctaaaatagtttatcagaaaaaattttttcatttggctaaaaaatcagaaaaagttataagtacatatcacgttacagacgacttgaaaccgtttcaggtaaaggatctagtatcaggacatttagaaagaatacaagaagaagttgaaaaaaaatatccagatgctggttttaatagcgataagtataatggcttaaaagaatctaattctttattaagcgatggctttgaggtaaaatcgggaaaccttatttttgataaaaagctaacgatacctttgacgacattatttgatgttattaatccagattttttagcaaatagcgatagagctgcgtatgataattataggacctacaaagaacagcatcccaaaaaactagttgcattaacgtttgatgatggtccagatccgacgacgactcctcaagttttagatattttggcaaaataccaggctaagggaactttctttatgataggttcaaaggttgtgaataatgaaaaccttactaaacgtgttagcgacgctggccatgaaattgctaatcatacttgggatcatcctaatctgactaatctttcagtcagcgagattcaacatcaagttaatatgacgaaccaggctattgaaaaagcttgtggcaagaaacctcgctatttacgccctccatacggagctacaaatgcaactgttcagcaatcctcaggattaacacaaatgctttggacggttgatacaagagattgggaaaatcatagcactgatggcattatgactaatgtcaaaaaccaattgcaaccgggaggagttgttttaatgcatgatattcatcaaacaactatcaatgctttgccgacagttatggaatatctaaaagcagaaggatacgaatgtgtgactgtatcagaactctatgcgcatcag

SEQ ID NO: 4460 - protein, 424 aa, Streptococcus pyogenes
LKKLNVILVGLLSILMLSLAIVFINRWKLNEDSQRIVLAEKKKNTSDLVIKAVKHIKKDQKDYYYFSPIKQADDFFVDNLPVSLYKKKNSDKELILVRPKLQSSHLRSVNTLTISKIVYQKKFFHLAKKSEKVISTYHVTDDLKPFQVKDLVSGHLERIQEEVEKKYPDAGFNSDKYNGLKESNSLLSDGFEVKSGNLIFDKKLTIPLTTLFDVINPDFLANSDRAAYDNYRTYKEQHPKKLVALTFDDGPDPTTTPQVLDILAKYQAKGTFFMIGSKVVNNENLTKRVSDAGHEIANHTWDHPNLTNLSVSEIQHQVNMTNQAIEKACGKKPRYLRPPYGATNATVQQSSGLTQMLWTVDTRDWENHSTDGIMTNVKNQLQPGGVVLMHDIHQTTINALPTVMEYLKAEGYECVTVSELYAHQ

SEQ ID NO: 4461 - DNA, 1425 bp, Streptococcus agalactiae
ttgacaaaagaatatcaaaattatgtcaatggcgaatggaaatcatctgttaatcagattgagattttgtcaccaattgatgattcttcattgggattcgtgccagcgatgactcgagaagaagttgatcatgctatgaaagcgggtcgtgaggctttaccagcctgggctgctttgacagtatatgaacgtgcacaataccttcataaagccgcagacattattgaacgtgataaagaagaaattgctactgttttagcaaaagaaatttctaaagcttacaatgcttcagtaactgaggttgtaaggacagctgatcttattcgttatgcagcagaagaaggaattcgtttatcaacttcagctgacgaaggtggaaaaatggatgcttcaacaggtcataagttggctgttattcgtcgtcaaccagtaggtatcgttttagcaatcgcaccttataattaccctgttaacctctcaggatcaaaaattgcgccagctctaattggtggaaacgttgtgatgtttaaaccaccaacacaaggttcagtctcaggacttgttttagcaaaagcttttgcagaagcaggtcttccagcaggtgtctttaatactattacaggacgcggttctgagattggagattacattgttgagcatgaagaagttaattttattaactttacaggatcaacgccagttggaaaacgtattggtaagttagcaggaatgcgtccaattatgcttgagttgggtggtaaggatgcaggtgtcgtcttagctgatgctgaccttgacaacgctgctaaacaaatcgttgcaggtgcttatgattactccggacaacgctgtacggcaattaagcgtgtacttgtcgttgaagaagttgcagatgaattggcagaaaaaatatctgaaaatgtagcaaaattatcagtaggtgatccatttgataatgcaacggtgacaccggttattgatgataattcagccgactttattgaaagcttagtagtagatgcacgtcaaaaaggtgcgaaagaattgaatgaatttaaacgtgatggtcgtctattaactccaggattgtttgatcatgttactttagatatgaaactagcttgggaagagccttttggaccaattctcccaattattcgtgtcaaggatgcagaagaagctgttgctattgccaacaaatctgattttggattacaatcatcagtctttacacgtgatttccaaaaagcatttgatatagcaaataaacttgaagttggtacagttcacattaacaataagactggacgtggtcctgataatttcccattcttaggactcaaaggatctggtgcaggtgttcaaggtatcagatattcaattgaagcaatgacaaatgtaaaatcgatagtttttgatatgaaa

SEQ ID NO: 4462 - protein, 475 aa, Streptococcus agalactiae
MTKEYQNYVNGEWKSSVNQIEILSPIDDSSLGFVPAMTREEVDHAMKAGREALPAWAALTVYERAQYLHKAADIIERDKEEIATVLAKEISKAYNASVTEVVRTADLIRYAAEEGIRLSTSADEGGKMDASTGHKLAVIRRQPVGIVLAIAPYNYPVNLSGSKIAPALIGGNVVMFKPPTQGSVSGLVLAKAFAEAGLPAGVFNTITGRGSEIGDYIVEHEEVNFINFTGSTPVGKRIGKLAGMRPIMLELGGKDAGVVLADADLDNAAKQIVAGAYDYSGQRCTAIKRVLVVEEVADELAEKISENVAKLSVGDPFDNATVTPVIDDNSADFIESLVVDARQKGAKELNEFKRDGRLLTPGLFDHVTLDMKLAWEEPFGPILPIIRVKDAEEAVAIANKSDFGLQSSVFTRDFQKAFDIANKLEVGTVHINNKTGRGPDNFPFLGLKGSGAGVQGIRYSIEAMTNVKSIVFDMK

SEQ ID NO: 4463 - DNA, 1425 bp, Streptococcus pyogenes
ttggcaaaacaatataaaaatttagtgaacggtgaatggaaactatcagaaaacgagattaccatttacgcaccagcaacaggtgaagagttaggatcagttccagcgatgacgcaggcagaggtagatgctgtttacgcttcagctaaaaaggctctatcagattggcgcgctttgtcttatgtggaacgtgcagcttaccttcataaagcggctgatattttagtacgtgatgctgaaaagatcggcgcgattctttcaaaagaagtagccaaaggtcacaaggcagctgtcagtgaagttattcgtaccgctgaaatcattaattatgcagcagaagaagggcttcgtatggaaggtgaagttcttgaaggtggtagcttcgaagctgcaagtaagaagaagattgctattgttcgtcgtgaaccagttggtttagttcttgccatctcaccttttaattatcccgttaacttggcaggttctaaaattgctccagctcttattgcaggaaatgttgttgctcttaaaccaccaacacaaggctctatttctggtttgttactagcagaagcttttgcagaagctggtattccagcaggtgtctttaataccattacagggcgaggttctgttatcggtgattatatcgttgagcacgaagcggttagctttatcaactttacaggttctactccaattggggaaggaatcggtaaattagcgggtatgcgaccaattatgcttgagcttggcggtaaggattctgctatcgttttggaagatgcagatcttgctttagcagcgaaaaatattgtagccggtgcttttggttactcaggccaacgttgtacagcggttaaacgtgttcttgtgatggacaaggtggcggatcaattggcggctgagattaaaacacttgttgaaaaactaagtgtcggaatgcctgaagacgatgctgatattacaccattaattgatacatcagctgctgattttgttgaagggttgattaaagatgcaactgataagggagctactgctttgacagcctttaatcgtgaaggcaatcttatttcacccgttctctttgatcatgtgacaactgacatgcgtttggcatgggaagagccgttcggcccagtattaccaattattcgtgtaaccactgtagaagaagccatcaagatttctaatgagtctgaatatggtttgcaagcttctatttttacaactaatttcccaaaagcttttggcattgctgagcaattagaagttggaactgttcaccttaacaataaaacacaacgtggaacagataatttcccattcttaggcgctaaaaaatcaggtgcaggggtacaaggagttaaatattctatcgaagctatgacaactgttaaatctgttgtatttgatatccag

SEQ ID NO: 4464 - protein, 475 aa, Streptococcus pyogenes
LAKQYKNLVNGEWKLSENEITIYAPATGEELGSVPAMTQAEVDAVYASAKKALSDWRALSYVERAAYLHKAADILVRDAEKIGAILSKEVAKGHKAAVSEVIRTAEIINYAAEEGLRMEGEVLEGGSFEAASKKKIAIVRREPVGLVLAISPFNYPVNLAGSKIAPALIAGNVVALKPPTQGSISGLLLAEAFAEAGIPAGVFNTITGRGSVIGDYIVEHEAVSFINFTGSTPIGEGIGKLAGMRPIMLELGGKDSAIVLEDADLALAAKNIVAGAFGYSGQRCTAVKRVLVMDKVADQLAAEIKTLVEKLSVGMPEDDADITPLIDTSAADFVEGLIKDATDKGATALTAFNREGNLISPVLFDHVTTDMRLAWEEPFGPVLPIIRVTTVEEAIKISNESEYGLQASIFTTNFPKAFGIAEQLEVGTVHLNNKTQRGTDNFPFLGAKKSGAGVQGVKYSIEAMTTVKSVVFDIQ

SEQ ID NO: 4465 - DNA, 1731 bp, Streptococcus agalactiae
atgacagaaatgcttaaaggaatcgcagcctctgatggtgttgcagttgctaaagcatatctacttgtccaaccggatttgtcatttgagactgtaacagtcgaagatacaaacgcagaagaagctcgccttgatgttgcactccaagcttcacaagacgagctttctgttatccgtgagaaggcagtagaaagcttaggcgaagaagccgcagctgtatttgatgctcatttaatggttctttctgacccagaaatgattaatcaaattaaagagactattcgtgcaaaacaagtaaatgcagaaacaggtcttaaagaagtgactgatatgttcatcactatctttgaaggtatggaagataacccatacatgcaagaacgtgcagcagatatccgtgatgttgccaaacgtgtcttagcacatcttttgggtgttaaattaccaaacccagcaactatcaatgaagaatcaatcgttattgcacacgatttgacaccttctgatacagctcaattaaataaacaatttgttaaagcttttgtaacaaatattggagggcgtacaagtcactcagctattatggcacgtacactcgaaatcgcagctgttcttggtacaaatgatattactgaacgtgttcaagatggtcagttgattgctgttaatggtattactggtgaagttatcattgaaccaactgaagctcaaatttcagccttcaaggcagcaggtgaagcttatgccaaacaaaaagctgaatgggcacttcttaaggatgcacaaacagttactgctgatggtaaacattttgaattagctgctaatatcggtacacctaaagatgttgagggtgttaacgaaaatggagcagaagcagttggtctttaccgtacagagttcttatatatggattcacaagatttcccaacagaagatgagcaatatgaagcatataaagcagttcttgagggtatgaatggtaaaccagttgttgttcgtacaatggatatcggtggagataaagagcttccttactttgatcttccaaaagagatgaacccattcttaggattccgtgcattgcgtatttcaatttctgaaactggtgatgcaatgttccgcacacaaatccgagcacttcttcgtgcttcagttcatggacagctacgcatcatgttcccaatggttgctttgcttaaagaattccgtgctgctaaagctatatttgaagaagagaaagcgaacttgttagctgacggtgtagcagtagctgaaggcattgaagttggtattatgattgaaatcccagcggcagctatgcttgcagaccaatttgcaaaagaagttgatttcttctcaattggtactaatgatcttatccaatacacaatggctgcggaccgtatgaatgagcaagtttcatacctctatcaaccatacaatccatcaatccttcgtttgattaacaacgttatcaaagctgctcatgctgaaggtaaatgggcaggtatgtgtggtgagatggccggtgatcaaactgcggttccacttcttgttggtatgggattggatgaattctcaatgtcagcaacctcagtacttcgtacacgtagcttaatgaaaaaattggacacagctaaaatggaagaatacgctaatcgtgctctttcagagtgttcaactatggaagaagttatcgaacttcaaaaagaatacgttgactttgac

SEQ ID NO: 4466 - protein, 577 aa, Streptococcus agalactiae
MTEMLKGIAASDGVAVAKAYLLVQPDLSFETVTVEDTNAEEARLDVALQASQDELSVIREKAVESLGEEAAAVFDAHLMVLSDPEMINQIKETIRAKQVNAETGLKEVTDMFITIFEGMEDNPYMQERAADIRDVAKRVLAHLLGVKLPNPATINEESIVIAHDLTPSDTAQLNKQFVKAFVTNIGGRTSHSAIMARTLEIAAVLGTNDITERVQDGQLIAVNGITGEVIIEPTEAQISAFKAAGEAYAKQKAEWALLKDAQTVTADGKHFELAANIGTPKDVEGVNENGAEAVGLYRTEFLYMDSQDFPTEDEQYEAYKAVLEGMNGKPVVVRTMDIGGDKELPYFDLPKEMNPFLGFRALRISISETGDAMFRTQIRALLRASVHGQLRIMFPMVALLKEFRAAKAIFEEEKANLLADGVAVAEGIEVGIMIEIPAAAMLADQFAKEVDFFSIGTNDLIQYTMAADRMNEQVSYLYQPYNPSILRLINNVIKAAHAEGKWAGMCGEMAGDQTAVPLLVGMGLDEFSMSATSVLRTRSLMKKLDTAKMEEYANRALSECSTMEEVIELQKEYVDFD

SEQ ID NO: 4467 - DNA, 1731 bp, Streptococcus pyogenes
atgacagaaatgcttaaaggaattgcagcctcagacggcgttgctgttgctaaagcatatctactagttcagccggatttgtcatttgagactgttacagtcgcagatacaaatgcagaagaagctcgccttgatgttgcactccaagctgcacaagacgagctttctgttatccgtgaaaatgcagtagaaagcttaggtgaagaagcagcagccgtttttgatgcccatttgatggttcttgctgatccagaaatgatcagccaggttaaagaaacgattcgcgcaaaacaaacgaatgcagaaacaggtcttaaagaagtgactgacatgttcatcaccatctttgaaggcatggaagataacccatacatgcaagaacgtgcagcggacatccgcgacgttgcaaaacgtgtgttggctcaccttttaggtgtaaaacttccaaatccagctacaatcaatgaagaatcaatcgttatcgcacacgatttgacaccttcagatactgctcaacttaacaaacaatttgtaaaagcatttgttacaaatatcggtggtcgtacaagtcactcagctatcatggcacgtacacttgagatcgctgcggtacttggaacaaatgatattacaaaacgtgttaaagatggtgatgtgattgccgttaatggtatcactggtgaagtgattatcgatccaagcgaagatcaagtacttgcttttaaagaagctggtgcggcttatgccaaacaaaaagcagagtggtctctccttaaagatgcgcacactgaaacagctgatggcaaacactttgaattggctgctaatatcggtacgcctaaagacgttgaaggtgttaatgacaatggtgctgaagctgttggcctttaccgtactgagttcttgtacatggattctcaagacttcccaactgaagacgaacaatacgaagcttacaaggcagtgcttgaaggcatgaatggcaaacctgttgtggttcgtacgatggatattggtggcgacaaggaacttccttactttgaccttccaaaagaaatgaatccattccttggtttccgtgctcttcgtatttccatctctgaaactggggatgccatgttccgcacacaaatgcgtgcgcttcttcgtgcctctgttcacggacaacttcgtattatgttcccaatggttgcgcttcttaaagaattccgtgctgcaaaagcagtctttgacgaagaaaaagcaaacttgcttgcagaaggcgttgcggttgctgatgacatccaagttggtatcatgattgagattcctgcagctgctatgcttgcagaccaatttgctaaggaagttgatttcttctcaattggaacaaacgaccttatccaatacactatggcagcagaccgtatgaacgaacaagtatcatacctttaccaaccatacaacccatcaatattacgtttgatcaacaatgtgatcaaagcagcgcacgctgaaggtaaatgggcaggtatgtgtggtgagatggcaggtgaccaacaagctgttccacttcttgtcggaatgggcttggatgagttttctatgtcagcaacttcagtacttcgtacgcgtagtttaatgaagaaacttgactctgctaagatggaagaatatgcaaatcgtgcgcttacagaatgttcaacagcagaagaagttcttgaactttctaaagaatacgtttctgaagat

SEQ ID NO: 4468 - protein, 577 aa, Streptococcus pyogenes
MTEMLKGIAASDGVAVAKAYLLVQPDLSFETVTVADTNAEEARLDVALQAAQDELSVIRENAVESLGEEAAAVFDAHLMVLADPEMISQVKETIRAKQTNAETGLKEVTDMFITIFEGMEDNPYMQERAADIRDVAKRVLAHLLGVKLPNPATINEESIVIAHDLTPSDTAQLNKQFVKAFVTNIGGRTSHSAIMARTLEIAAVLGTNDITKRVKDGDVIAVNGITGEVIIDPSEDQVLAFKEAGAAYAKQKAEWSLLKDAHTETADGKHFELAANIGTPKDVEGVNDNGAEAVGLYRTEFLYMDSQDFPTEDEQYEAYKAVLEGMNGKPVVVRTMDIGGDKELPYFDLPKEMNPFLGFRALRISISETGDAMFRTQMRALLRASVHGQLRIMFPMVALLKEFRAAKAVFDEEKANLLAEGVAVADDIQVGIMIEIPAAAMLADQFAKEVDFFSIGTNDLIQYTMAADRMNEQVSYLYQPYNPSILRLINNVIKAAHAEGKWAGMCGEMAGDQQAVPLLVGMGLDEFSMSATSVLRTRSLMKKLDSAKMEEYANRALTECSTAEEVLELSKEYVSED

SEQ ID NO: 4469 - DNA, 261 bp, Streptococcus agalactiae
atggcttcaaaagatttccacattgttgcagaaacaggtattcacgcacgtccagctactttgcttgtccaaacagctagcaaatttgcttcagacatcacgcttgattacaaaggtaaagcagtaaaccttaaatcaatcatgggtgttatgagtcttggtgttggtcaaggtgctgatgttactatttcagcagaaggtgcagatgcagatgatgcaattgcagctatcgaagaaacaatgacaaaagaaggattggca

SEQ ID NO: 4470 - protein, 87 aa, Streptococcus agalactiae
MASKDFHIVAETGIHARPATLLVQTASKFASDITLDYKGKAVNLKSIMGVMSLGVGQGADVTISAEGADADDAIAAIEETMTKEGLA

SEQ ID NO: 4471 - DNA, 261 bp, Streptococcus pyogenes
atggcttcaaaagactttcacattgttgcagaaacaggtattcatgcgcgtccagcgactttgcttgttcaaacagctagcaaatttgcttcagacatcactcttgactacaaaggtaaagcagtaaatctaaaatcaatcatgggtgttatgagtcttggtgttggtcaaggtgcagatgttactatctcagctgaaggtgcagatgctgaagatgccattgcagcaattgaagaaacaatgactaaagagggattggca

SEQ ID NO: 4472 - protein, 87 aa, Streptococcus pyogenes
MASKDFHIVAETGIHARPATLLVQTASKFASDITLDYKGKAVNLKSIMGVMSLGVGQGADVTISAEGADAEDAIAAIEETMTKEGLA

SEQ ID NO: 4473 - DNA, 222 bp, Streptococcus agalactiae
atggcagctattactgttttttcgaaaaacaactgtatgcaatgtaaaatgactaagaaatttcttgaccagcacggcgctgattttgaagaaattaatattgatgaaaaaccagaaaaaattgaatatgtgaaaaatctcggcttttctgcggctccagtgattgaagctggtaatgttgttttttcaggtttccaaccaagcaaactaaaagaacttgtt

SEQ ID NO: 4474 - protein, 74 aa, Streptococcus agalactiae
MAAITVFSKNNCMQCKMTKKFLDQHGADFEEINIDEKPEKIEYVKNLGFSAAPVIEAGNVVFSGFQPSKLKELV

SEQ ID NO: 4475 - DNA, 249 bp, Streptococcus pyogenes
atggaaccattactaattttagaaggacaagacatgattacagtatattccaaaaataattgcatgcagtgcaaaatgactaagaaatttttagaacaacacggagtcaacttccaggaaattaatatcgatgaacatcctgaaaaagtggattatgtgaaaagtcttggcttcacatctgctcctgttatcgaagcagataacctcgtattttctggcttccaacctgcaaagttaaaagaattgatt

SEQ ID NO: 4476 - protein, 83 aa, Streptococcus pyogenes
MEPLLILEGQDMITVYSKNNCMQCKMTKKFLEQHGVNFQEINIDEHPEKVDYVKSLGFTSAPVIEADNLVFSGFQPAKLKELI

SEQ ID NO: 4477 - DNA, 2157 bp, Streptococcus agalactiae
atgagtttaaaaaatattggcgatgtatcttactttcgcctaaataatgaaattaaccgtcctgttaatggacaaatcccactccataaagataaagaagccttaactgcttttttcaaagaaaacgtacagcctaattcaaaagcttttgactcaatcactgataaaattgcttacctccttaagtatgattatcttgaagaagctttcctcaataaatatcgtcctgaatttattgaagaattatctaccaaactcttcgataaaaagtttcgttttaaatccttcatggcagcctataagttttatcagcagtatgcattaaaaacaaatgatggagaatactatttagaaagtattgaagatcgcgttctctttaacgctctttattttgcagacggtgatgaagaactagcaactgacttagctctagaaatgatttcacaacgctatcaacctgcaacaccaagttttttaaatgctggtcgaagtcgtcgcggagaattagtctcatgtttcttaatccaagtaactgatgatatgaatgctattggtcgttcgattaattcagctcttcaattatctcgtattggtggtggggttggaatatcacttagtaaccttcgtgaggctggagctcctatcaaaggttttgctggtgctgcttctggagtcgttccagtcatgaaattatttgaagacagtttttcttactccaaccaacttggacaacgccaaggtgctggagttgtttaccttgacgttttccatccagatattatttcattcttatcaactaaaaaagaaaatgctgatgaaaaagtacgtgttaaaacattgtcattagggattactgtacccgataaattctatgaactagcacgtaacaatcaagaaatgtacttgtttagtccttatagtatcgaacgtgaatatggtgttcctttcagctatattgatattaccgaaaaatacgatgaattagtcgctaaccctaatatcactaaaacaaaaatcaatgctcgtgatttagaaacagagatttctaaacttcaacaagaatcaggttatccttacatcatcaatattgacactgctaatcgtactaaccctgttgatggaaaaattatcatgtcaaatctttgctctgagattttgcaagtacaaaaaccaagtcttatcaatgatgctcaagaataccttgaaatgggaactgatatttcttgtaaccttggctcaactaatgttttaaatatgatgacatctcctgattttggaaaatcaattaaaacaatgactcgtgctttaactttcgttactgactcatcaaatattgaagctgttccaactattaaaaacggaaatgctcaagcacatacatttggacttggagcaatgggactccactcctatttggcaaaaaatcatatcgaatatggtagtccagaatcaattgaatttactgatatttatttcatgctaatgaactactggaccttagtagaatcaaacaatattgcccgcgaacgtcaaacaacatttgtaggttttgaaaaatcaaaatacgctgacggtacatactttgataaatatgtatctggaaaatttgttccacaatctgacaaagtaaaatccctatttgctaatcattttatccccgaagctaaagattgggaaaaccttagatacgcagttatgaaagacggactatatcatcaaaatcggcttgcagttgctccgaatggttctatttcgtatatcaacgattgttcagcatctatccaccctattacacaacgtattgaagagcgtcaagagaaaaaaatcgggaaaatttattatccagctaatggcttagctacagatactatcccttattacacttctgcctatgatatggatatgcgtaaagtaatagacgtctatgccgcagcaactgagcacgtagaccaaggtctctcaatgacactctttttacgaagcgaattaccaaaggagttgtacgagtggaaaacagaaagtaagcagactactcgcgacctttcaatcctacgcaactatgctttcaacaaaggtgtgaaatcaatctactatatccgtacttttacagatgatggtagcgaagtcggagctaatcaatgcgaaagttgtgtcatc

SEQ ID NO: 4478 - protein, 719 aa, Streptococcus agalactiae
MSLKNIGDVSYFRLNNEINRPVNGQIPLHKDKEALTAFFKENVQPNSKAFDSITDKIAYLLKYDYLEEAFLNKYRPEFIEELSTKLFDKKFRFKSFMAAYKFYQQYALKTNDGEYYLESIEDRVLFNALYFADGDEELATDLALEMISQRYQPATPSFLNAGRSRRGELVSCFLIQVTDDMNAIGRSINSALQLSRIGGGVGISLSNLREAGAPIKGFAGAASGVVPVMKLFEDSFSYSNQLGQRQGAGVVYLDVFHPDIISFLSTKKENADEKVRVKTLSLGITVPDKFYELARNNQEMYLFSPYSIEREYGVPFSYIDITEKYDELVANPNITKTKINARDLETEISKLQQESGYPYIINIDTANRTNPVDGKIIMSNLCSEILQVQKPSLINDAQEYLEMGTDISCNLGSTNVLNMMTSPDFGKSIKTMTRALTFVTDSSNIEAVPTIKNGNAQAHTFGLGAMGLHSYLAKNHIEYGSPESIEFTDIYFMLMNYWTLVESNNIARERQTTFVGFEKSKYADGTYFDKYVSGKFVPQSDKVKSLFANHFIPEAKDWENLRYAVMKDGLYHQNRLAVAPNGSISYINDCSASIHPITQRIEERQEKKIGKIYYPANGLATDTIPYYTSAYDMDMRKVIDVYAAATEHVDQGLSMTLFLRSELPKELYEWKTESKQTTRDLSILRNYAFNKGVKSIYYIRTFTDDGSEVGANQCESCVI

SEQ ID NO: 4479 - DNA, 2157 bp, Streptococcus pyogenes
atgagtctcaaagatcttggcgatatttcatattttcgcctaaataatgaaattaaccgtcctgttaatggtaaaattccacttcataaagacaaagaagctttaaaagctttttccgctgaaaatgtgctgccaaacaccatgtcttttacttccattacggaaaaaattgagtatttaatctcaaatgattacattgaatcagcttttattcagaaataccgccctgaatttattactgaattagatagcataatcaaatcagaaaattttcgctttaaatcatttatggcagcctacaagttctaccagcaatacgccttaaaaacaaatgatggagagcattatttagaaaaccttgaagaccgtgtcttgtttaatgctttgtattttgcagatggtcaagaagacttagcaaaagatttagccgttgaaatgattaaccaacgttaccaaccggctactccttcctttttaaatgctggtcgaagccgtcgtggtgaattggtctcttgtttcttgattcaagtaactgatgacatgaactctatcggacgttctatcaactctgctttgcaattatcccgtattggtggaggagttgggattaccttgtctaacctccgtgaagctggcgcaccaatcaaaggctatgctggtgcagcctcaggagttgttcctgttatgaaattatttgaagatagtttttcttattcaaatcaacttgggcaacgtcaaggagctggtgttgtttacctaaatgtttttcatcctgatatcattgctttcttatctactaaaaaagaaaatgccgatgaaaaggtgcgtgttaaaaccttgtcactagggattaccgttcctgataaattctacgaattagctcgtaaaaacgaggacatgtatctctttagtccttacaatgttgaaaaagaatatggcattccctttaactatctcgacattaccaatatgtacgatgagttagtggcgaaccctaaaattactaagactaaaattaaagctcgtgatcttgaaacagagatttcaaaattacaacaagaatctggttacccttatatcatcaatattgatacagctaataaagctaatcctatcgatggaaaaatcatcatgagcaacttgtgttctgaaattttacaagttcaaacacctagccttatcaatgatgcgcaagagtttgtagaaatgggaactgatatttcatgtaacttaggttccactaatatcctgaacatgatgacctcaccagactttggccgttctattaagaccatgacacgtgccctaacttttgttactgattcatcaagcattgaagctgttccaaccattaaacatggcaatagccaagctcatacttttggccttggagctatgggactacattcttaccttgctcaacatcatattgaatatggcagtccagaatccatcgagtttactgatatttactttatgctcctgaattattggaccttggtcgaatccaataacatcgctcgtgagcgccaaactacctttgttggctttgagaactctaagtacgctaatggtagttactttgataaatacgttacaggacactttgttccaaaatctgatttggtgaaagatctgttcaaagaccattttattccgcaagcttcagattgggaggctcttcgcgacgccgttcaaaaagatggtctttatcatcaaaaccgactagcagttgctccaaatggctctatttcttatatcaatgactgctctgcttctattcacccaatcacacaacgcatcgaagagcgtcaagaaaagaaaattggtaaaatctactatcctgcaaatggtttgtctacggataccattccttactatacatctgcttacgatatggacatgcgcaaagttattgatgtctatgccgctgcgaccgaacatgtggaccaaggcttgtcattaactctattccttcgtagtgagttgcctatggagctttatgagtggaaaacacaaagcaaacaaaccactcgtgatttatccatcttacgaaactacgctttcaataaaggcattaaatctatctactatatccgtacctttacggatgatggggaagaagtgggcgcaaaccaatgtgaatcttgtgtcatt

SEQ ID NO: 4480 - protein, 719 aa, Streptococcus pyogenes
MSLKDLGDISYFRLNNEINRPVNGKIPLHKDKEALKAFSAENVLPNTMSFTSITEKIEYLISNDYIESAFIQKYRPEFITELDSIIKSENFRFKSFMAAYKFYQQYALKTNDGEHYLENLEDRVLFNALYFADGQEDLAKDLAVEMINQRYQPATPSFLNAGRSRRGELVSCFLIQVTDDMNSIGRSINSALQLSRIGGGVGITLSNLREAGAPIKGYAGAASGVVPVMKLFEDSFSYSNQLGQRQGAGVVYLNVFHPDIIAFLSTKKENADEKVRVKTLSLGITVPDKFYELARKNEDMYLFSPYNVEKEYGIPFNYLDITNMYDELVANPKITKTKIKARDLETEISKLQQESGYPYIINIDTANKANPIDGKIIMSNLCSEILQVQTPSLINDAQEFVEMGTDISCNLGSTNILNMMTSPDFGRSIKTMTRALTFVTDSSSIEAVPTIKHGNSQAHTFGLGAMGLHSYLAQHHIEYGSPESIEFTDIYFMLLNYWTLVESNNIARERQTTFVGFENSKYANGSYFDKYVTGHFVPKSDLVKDLFKDHFIPQASDWEALRDAVQKDGLYHQNRLAVAPNGSISYINDCSASIHPITQRIEERQEKKIGKIYYPANGLSTDTIPYYTSAYDMDMRKVIDVYAAATEHVDQGLSLTLFLRSELPMELYEWKTQSKQTTRDLSILRNYAFNKGIKSIYYIRTFTDDGEEVGANQCESCVI

SEQ ID NO: 4481 - DNA, 969 bp, Streptococcus agalactiae
ttggagaaaaccatgacaacttactacgaagctataaactggaacgaaattgaagatgttattgataaatcaacttgggaaaaactaaccgaacaattttggctcgatacacgtatccctttatcaaatgacttagacgattggcgcaaactttctgctcaagaaaaagatcttgttggcaaggtttttggaggcttaaccctacttgataccatgcaatcagaaactggtgttgaagctattcgtgccgatgttcgcacgcctcacgaagaagctgtcttaaacaatattcaattcatggaatctgttcacgctaaatcttattcttcaattttctcaactttaaatactaaatcagaaattgaagaaattttcgagtggactaataataatgagttccttcaagaaaaagcacgtattatcaatgacatttatgctaatggaaatgcccttcaaaaaaaggtggcttccacctacctcgaaactttccttttttattctggctttttcacacctctttactatttgggaaataataagttagcaaatgttgctgaaatcattaaattaattattcgtgatgaatctgtacatggtacttatatcggttacaaattccagcttggttttaacgaattaccagaagatgagcaagagaattttcgtgattggatgtatgacctcctttatcagctgtatgaaaacgaagaaaaatacaccaagacactttatgatggcgtaggatggactgaagaagttatgacctttttacgctacaatgctaataaagctcttatgaatttaggacaagatcctttattcccagatacagcaaatgatgtcaacccaattgttatgaatggtatttcaacaggaacatcaaaccatgacttcttctctcaagtaggtaatggttacctacttggtagcgttgaagctatgcatgatgatgactataactatggatta

SEQ ID NO: 4482 - protein, 323 aa, Streptococcus agalactiae
MEKTMTTYYEAINWNEIEDVIDKSTWEKLTEQFWLDTRIPLSNDLDDWRKLSAQEKDLVGKVFGGLTLLDTMQSETGVEAIRADVRTPHEEAVLNNIQFMESVHAKSYSSIFSTLNTKSEIEEIFEWTNNNEFLQEKARIINDIYANGNALQKKVASTYLETFLFYSGFFTPLYYLGNNKLANVAEIIKLIIRDESVHGTYIGYKFQLGFNELPEDEQENFRDWMYDLLYQLYENEEKYTKTLYDGVGWTEEVMTFLRYNANKALMNLGQDPLFPDTANDVNPIVMNGISTGTSNHDFFSQVGNGYLLGSVEAMHDDDYNYGL

SEQ ID NO: 4483 - DNA, 957 bp, Streptococcus pyogenes
atgactacatattatgaagcaattaactggaatgaaatcgaagacgtcattgacaagtcaacttgggaaaagttgaccgaacaattttggcttgatacccgtatccctttatcaaatgacttagacgattggcgcaaactttctcttcaagaaaaagatcttgttggcaaggtttttggaggattaaccctacttgataccatgcaatcagaaactggtgtcgaagctattcgtgctgatgttcgcactcctcacgaagaagctgtcttaaacaatattcaattcatggaatctgttcacgctaaatcttattcgtctatcttttcaaccttaaacaccaaaaaagaaattgaagagatctttgagtggactaataataatgagtttcttcaagaaaaagcacgtattatcaatgacatttacgctaatggagatgccttacaaaagaaagttgcctcaacatatctcgaaactttccttttttattctggctttttcacccctctttactatttgggaaataataagctagcaaatgttgctgaaatcattaaactaattattcgtgatgaatctgtacatggtacttatatcggttacaaattccagcttggttttaacgaactaccagaagatgagcaagagaattttcgtgattggatgtatgacctcctttatcagctgtatgaaaatgaagaaaaatacaccaaaacgctttatgatggcgtagggtggactgaggaagttatgacctttttacgctacaatgctaacaaagctcttatgaatttaggacaagatcctttattcccagatactgcaaacgatgttaacccaattgttatgaatggtatttcaacaggaacatcaaaccatgactttttctcacaggtagggaatggctatcttcttggttctgtagaagctatgtctgatgacgattataattatggactc

SEQ ID NO: 4484 - protein, 319 aa, Streptococcus pyogenes
MTTYYEAINWNEIEDVIDKSTWEKLTEQFWLDTRIPLSNDLDDWRKLSLQEKDLVGKVFGGLTLLDTMQSETGVEAIRADVRTPHEEAVLNNIQFMESVHAKSYSSIFSTLNTKKEIEEIFEWTNNNEFLQEKARIINDIYANGDALQKKVASTYLETFLFYSGFFTPLYYLGNNKLANVAEIIKLIIRDESVHGTYIGYKFQLGFNELPEDEQENFRDWMYDLLYQLYENEEKYTKTLYDGVGWTEEVMTFLRYNANKALMNLGQDPLFPDTANDVNPIVMNGISTGTSNHDFFSQVGNGYLLGSVEAMSDDDYNYGL

SEQ ID NO: 4485 - DNA, 264 bp, Streptococcus agalactiae
ttggaaagaacaaagtgcaataagccccaaattaagccagcaaatagaccgtattttgtaccacgacgtaatgcaaaaagtatcagaggaattgctccaaaagagggagtgaaccatgacgcaaaatcaggaatcattgataaagccatagcaagcgctgcaaaaatagcagtttcaataagacaggtagtgttgttattttttgacataaaaaatctcctttttttatacagcaaaggagattcttttgtcatttgtcatgtt

SEQ ID NO: 4486 - protein, 88 aa, Streptococcus agalactiae
MERTKCNKPQIKPANRPYFVPRRNAKSIRGIAPKEGVNHDAKSGIIDKAIASAAKIAVSIRQVVLLFFDIKNLLFLYSKGDSFVICHV

SEQ ID NO: 4487 - DNA, 606 bp, Streptococcus agalactiae
atgacaaaagaatctcctttgctgtataaaaaaaggagattttttatgtcaaaaaataacaacactacctgtcttattgaaactgctatttttgcagcgcttgctatggctttatcaatgattcctgattttgcgtcatggttcactccctcttttggagcaattcctctgatactttttgcattacgtcgtggtacaaaatacggtctatttgctggcttaatttggggcttattgcactttgttctttccaaagtatattaccttagtttatcccaagtttttatagaatacatcttagcatttataagtatgggacttgcaggcgtattttctgctaaatttaaagatgcacttagcagcagctctaaaactaaagctttatcattagcattatctggagcaatattagcaacacttgttcgttatgtttggcattatatcgctggtgttattttttgggctagttatgcaccaaaaggtatgtctgctacattatactcattaagcgtcaatggtactgctggtttgttaactctattttttgtagtcattagtattattattttagttatcagctaccctagcttctttttacctaagaaa

SEQ ID NO: 4488 - protein, 202 aa, Streptococcus agalactiae
MTKESPLLYKKRRFFMSKNNNTTCLIETAIFAALAMALSMIPDFASWFTPSFGAIPLILFALRRGTKYGLFAGLIWGLLHFVLSKVYYLSLSQVFIEYILAFISMGLAGVFSAKFKDALSSSSKTKALSLALSGAILATLVRYVWHYIAGVIFWASYAPKGMSATLYSLSVNGTAGLLTLFFVVISIIILVISYPSFFLPKK

SEQ ID NO: 4489 - DNA, 561 bp, Streptococcus pyogenes
atgtcaccaaacaccaatgtcaaataccttatcgaagctgctatttttgctgcattggcgatgaccctttcatttattccagattttgctggctggtttagtccttcttatggtgctattgcactggttattttctctttgcgccgtgggttaaagtacggcatgttggcgggtctcatttgggggctacttcactttgtacttggaaaagtttactatctcagcatgtcccaagtctttattgaatatatcttagcctttacctctatgggattagccggtagtttctctgatagtttgattaaaactttaagaagacaacaaaccttttttgccgtttttcttgcaataatggctagtttactagccgttacagtacgttacttgtggcacttccttgcaggaatcattttctggggcagttacgcccctaaaggcatgtccgctgtctggtattcttttagcgttaatggtacagctggtgtcctaacttttttaataacatgtttagcgttaatgattgctttaccaattcatcctcaattatttgatcccaaagac

SEQ ID NO: 4490 - protein, 187 aa, Streptococcus pyogenes
MSPNTNVKYLIEAAIFAALAMTLSFIPDFAGWFSPSYGAIALVIFSLRRGLKYGMLAGLIWGLLHFVLGKVYYLSMSQVFIEYILAFTSMGLAGSFSDSLIKTLRRQQTFFAVFLAIMASLLAVTVRYLWHFLAGIIFWGSYAPKGMSAVWYSFSVNGTAGVLTFLITCLALMIALPIHPQLFDPKD

SEQ ID NO: 4491 - DNA, 759 bp, Streptococcus agalactiae
atgatgaaaaattttataaaacaaagtgatactacatttgttcgaattatcaaaagtcttttaattggtggttttataggggccatacttggttccgtaggagctctttttatcatatttggtcaagataagtacttatctgaaattaatattgttcaatatttcctatgggttagtcgtattgttgtaattataacagctctctttagtctcatctacctctatcagattcaaaaatatcagaaagtttttttcaatgttgatgaaagtcaatctgaagaaatttatcgccagattaatttaagacattcttatgggatgacttttgtgtcaatttcaatagtactcagtatagttaatactttatttaactataaactaaatatttttgatgattcagttactttagttattccaatatatgatttatcactgctatttgttttattgggtttacatatatattttttaaaggtatatcggaatatccgaggtataaaaatgacagtcgctccaactttaaaagagttgaaaaacaatgtcttacaattggacgaagcagagttggaatcaaattataagatgtgttttgatattgtcatgaatttaagtggttttattttccctacgatctattttgtattattctttatctcatttgtttttcaaaaagtggagattgtagcaattattataacaacatctattcatatctacattctcattaagtctttaaaagcagcacgtcatttttataga

SEQ ID NO: 4492 - protein, 253 aa, Streptococcus agalactiae
MMKNFIKQSDTTFVRIIKSLLIGGFIGAILGSVGALFIIFGQDKYLSEINIVQYFLWVSRIVVIITALFSLIYLYQIQKYQKVFFNVDESQSEEIYRQINLRHSYGMTFVSISIVLSIVNTLFNYKLNIFDDSVTLVIPIYDLSLLFVLLGLHIYFLKVYRNIRGIKMTVAPTLKELKNNVLQLDEAELESNYKMCFDIVMNLSGFIFPTIYFVLFFISFVFQKVEIVAIIITTSIHIYILIKSLKAARHFYR

SEQ ID NO: 4493 - DNA, 759 bp, Streptococcus pyogenes
atgaaaaagaagaagaatagttttttacgcttgttaaaaatgtcattgctatcaagtttggcgggagggattataggtggcatggttggagcctttttaggttaccatggagggagattagatcatctcacgttcctaaaagatgatgtgattaacctgattatcttattaaatcgtctagtagttgtcacagacctcacactttcttttgtttttttaacgcaactgaaaaaagagacagctgtttataacacaattgaagaggatgatatttctgaaaatggttaccgtcagctgaataaaaagcatgcttataccatgttattgattgccgtagcttctattttatccatgtgcaatgtgctacttggtctgaccttaactaatgattcacagcatgccatgctggccattccgcttctggatatccttttattattaatggtcattccttttcaagctttagccatgaaacgttacaatgccattcggggaaccgatgttccttattttccaaatttgaaagaattaaaacataatatcatggctctagatgaggcagagttacaagcctatcataagacatcgtttgaaagtgtgttgtcattaaatggagtcatcatcccttccttgtatgtgattttattttttgtctatctattcactggtcaagtggagttaacagccatcttagttttggtgttaattcagctctatttactcgttaagagtgcaacaatgaccagacaattttaccgt

SEQ ID NO: 4494 - protein, 253 aa, Streptococcus pyogenes
MKKKKNSFLRLLKMSLLSSLAGGIIGGMVGAFLGYHGGRLDHLTFLKDDVINLIILLNRLVVVTDLTLSFVFLTQLKKETAVYNTIEEDDISENGYRQLNKKHAYTMLLIAVASILSMCNVLLGLTLTNDSQHAMLAIPLLDILLLLMVIPFQALAMKRYNAIRGTDVPYFPNLKELKHNIMALDEAELQAYHKTSFESVLSLNGVIIPSLYVILFFVYLFTGQVELTAILVLVLIQLYLLVKSATMTRQFYR

SEQ ID NO: 4495 - DNA, 291 bp, Streptococcus agalactiae
atggtcatgacgtatattggtgtacctaaagagcaaaaggcactcagtcgtaggggtaaacaattagaaaaaataaatcagggaggaaaaacacttatgtcacaaatgattcaagatttagtaggaagcacatgtatgatttatttagaggatggttctcaaactcatccttatgagattttaaaggtagatgaggattgggtacagattcgtcgcaacttgaaacgaagtaaagaggaggtgcgtattgtccgtattcatgatatcaaggaattgcgtccagtcaataaa

SEQ ID NO: 4496 - protein, 97 aa, Streptococcus agalactiae
MVMTYIGVPKEQKALSRRGKQLEKINQGGKTLMSQMIQDLVGSTCMIYLEDGSQTHPYEILKVDEDWVQIRRNLKRSKEEVRIVRIHDIKELRPVNK

SEQ ID NO: 4497 - DNA, 816 bp, Streptococcus agalactiae
atgaatctattattttctattgatgatatgtacgtagatcattttaaagtgatgctttattcgcttgtccgacaaaccaagaatcgtaagttagagatatatgtcttacaaaaaacattactcaaacgtcatacagaacttattcaatatactcaaaatttagaagttggctatcatccaataattgtaggtaccgaagtatttgctcaggcacctacaactgatcgctatccagatacaatatattatcgacttttggctcataaatttttacctgagaccttagataggatactttatttagatgcagatatgctttgcttaaatgatttctcaagtttatatgatatggagttaggtgatcaactatatgcagcggcaagtcataatactgatggtaagtttctagattatgtcaataaattacggttaaaaaatgtagagctagaatcctcttatttcaatacaggggtactcttgatgaacttgcctgctatacgaaaagttgttcatcaacaaactatcttagattacataatgcaaaaccgtggtcgtctaatcttaccagatcaggatatcttaaatggcttatacgctaatttggttaaaccaatacctgatgaaatttataattatgatgctaggtatagtcttatttatcaattaaaaagtcgcaatgaatgggatttagagtgggttattaaccatactgtttttttacattttgcaggacgagataaaccatggaaaaaagattatagaggacgttactcgggcctttataagtttatggctaaagaggctttaactaaaaat

SEQ ID NO: 4498 - protein, 272 aa, Streptococcus agalactiae
MNLLFSIDDMYVDHFKVMLYSLVRQTKNRKLEIYVLQKTLLKRHTELIQYTQNLEVGYHPIIVGTEVFAQAPTTDRYPDTIYYRLLAHKFLPETLDRILYLDADMLCLNDFSSLYDMELGDQLYAAASHNTDGKFLDYVNKLRLKNVELESSYFNTGVLLMNLPAIRKVVHQQTILDYIMQNRGRLILPDQDILNGLYANLVKPIPDEIYNYDARYSLIYQLKSRNEWDLEWVINHTVFLHFAGRDKPWKKDYRGRYSGLYKFMAKEALTKN

SEQ ID NO: 4499 - DNA, 105 bp, Streptococcus agalactiae
atgctaccaacaacggccattgctccaatacaaacggtacaagttgaggtgacgaatgcctccacaaatttaatatcgttaccacttcctgttttttgcttaaga

SEQ ID NO: 4500 - protein, 35 aa, Streptococcus agalactiae
MLPTTAIAPIQTVQVEVTNASTNLISLPLPVFCLR

SEQ ID NO: 4501 - DNA, 714 bp, Streptococcus agalactiae
atggttggtttaggaacagttatcaatgttattcttattatagttggaggctttgtaggtttatttttgaaaaattttttgaaagaatcacttcaaaagagccttatgcaagccatgggagttgcagttttatttatttcgatatcaggtgttttggagaaaatgatgttagtcgaaaagtcacatctcatctctaatcatacaaatatgatgattattactcttgctctaggtacggtacttggagagttgctatcactagattcgtatattgataaatttgggaactatcttaagcaaaaaacaggaagtggtaacgatattaaatttgtggaggcattcgtcacctcaacttgtaccgtttgtattggagcaatggccgttgttggtagcattcaagatggtatagcagcagatcattcgattttatttgctaagggaatgttagacatgattattattgcaattatgacagtgtctttagggaaaggagctctattttctgcacttcctgtcgctttactacaaggtagccttacgattgttgcttttttcatggggagtctacttaatccatcatctttagattaccttaacttagtaggaaatatgcttatattctgtgtcggtgttaatttactctttaacctaaatattaaagttatcaatatgttgccagcaattattttagctatattatggggaagttttata

SEQ ID NO: 4502 - protein, 238 aa, Streptococcus agalactiae
MVGLGTVINVILIIVGGFVGLFLKNFLKESLQKSLMQAMGVAVLFISISGVLEKMMLVEKSHLISNHTNMMIITLALGTVLGELLSLDSYIDKFGNYLKQKTGSGNDIKFVEAFVTSTCTVCIGAMAVVGSIQDGIAADHSILFAKGMLDMIIIAIMTVSLGKGALFSALPVALLQGSLTIVAFFMGSLLNPSSLDYLNLVGNMLIFCVGVNLLFNLNIKVINMLPAIILAILWGSFI

SEQ ID NO: 4503 - DNA, 2616 bp, Streptococcus agalactiae
atgaaagaattatcgtctgcacaaatccgccaaatgtggttggatttctggaaatccaaaggacattccgttgagccttcagctaacttggttcctgttaatgacccaacgcttctttggatcaactcaggtgttgcaaccttgaaaaaatattttgatggttcagtgattccagaaaatccacgtattaccaatgcacaaaaatcaattcgtactaatgatattgaaaatgttggtaaaacagcacgtcaccatactatgtttgaaatgcttggtaacttctcaattggagactatttccgtgatgaagctattgagtggggatttgaactcttgacaagtcctgaatggtttgacttccctaaagacaagctctacatgacttattacccagatgacaaggattcatataaccgttggattgcttgtggcgttgaaccaagtcacttggtgccaatcgaggataacttctgggaaatcggtgctggtccttcaggtccagatactgagattttcttcgaccgtggtgaagattttgatccagaaaatattggacttcgtcttttggctgaagatatcgaaaacgatcgttacatcgaaatctggaacattgttctctcacaattcaatgctgacccagccgtaccacgttcagaatacaaagaattgccaaacaaaaacattgatacgggtgcgggtcttgaacgtcttgcagctgttatgcaaggggcaaaaacaaactttgaaactgaccttttcatgcctatcatccgtgaagtagagaaattgtcaggtaaaacttacgatccagatggcgacaacatgagcttcaaggttatcgctgatcacatccgtgcgctttcatttgccatcggtgatggtgcgcttcctggaaatgaaggtcgtggttatgttcttcgtcgtcttctccgtcgtgcggttatgcacggtcgccgtcttggcatcaacgaaactttcctttacaaattggttccgactgttggacaaatcatggaaagctactatccagaagtgcttgaaaaacgtgattttattgagaaaatcgttaaacgtgaggaagaaacatttgctcgtactatcgatgctggtagcggtcacttagattcattgcttgcgcagcttaaggctgaaggtaaagacacacttgaaggtaaagatatcttcaaactttatgatacttatggattcccagttgaattgacagaggaattggcagaagatgcaggctataagattgaccacgaaggctttaagtcagccatgaaagaacaacaagaccgtgcgcgtgcagctgttgttaagggtggttcgatggggatgcaaaatgaaaccctagctggtattgttgaagaatcacgattcgaatacgacacatatagtcttgaatcaagtctttcagtcatcatcgctgacaatgaacgtactgaagcagtttcagaaggtcaagctcttcttgtctttgctcaaacaccattctatgctgaaatgggtggacaggttgctgaccacggtgtcatcaaaaatgataagggtgacacagttgctgaggttgttgatgttcaaaaagcaccaaatggtcaacctctacacactgtaaacgttttggcatcactttcagttggaacaaactacacacttgaaatcaacaaagagcgtcgtttggctgttgagaaaaaccacacagcaactcacttgctccatgcagctcttcacaatgttatcggtgaacacgcaactcaggctggttcattgaacgaagaagaattcttgcgctttgattttactcactttgaagcagtaagcaatgaggaacttcgtcacattgaacaagaagttaatgagcaaatttggaacgatcttacgatcacaacgactgaaactgacgttgaaaccgcaaaagagatgggagcaatggcactttttggtgagaaatatggtaaagtggttcgtgtggttcaaattggtaattattctgttgaactttgcggtggaactcacttaaataattcttcagaaatcggtctcttcaagattgtcaaagaagaaggtattggttcaggtactcgtcgtattattgcagttactggtagacaagcttttgaagcttatcgtaaccaagaggatgcactaaaagagatcgctgctactgtaaaagctccgcaattgaaagatgcagcagctaaagtacaagctcttagcgactcacttcgtgatcttcaaaaagaaaatgtagagcttaaagaaaaagcagcagctgcagcagctggtgatgtctttaaagatattcaagaagctaagggcgtgcgcttcattgctagtcaagttgatgttgcagacgcaggtgcacttcgtacatttgctgataactggaaacaaaaagactactctgatgtgcttgttctcgtagcagctattggtgagaaggttaatgtccttgttgcaagcaaaactaaagatgtccacgctggtaacatgatcaaaggattggcaccaattgtagcaggtcgtggtggtggtaaaccagacatggctatggcaggtggtagcgatgcaagtaaaattgcagagttgctagcagcagttgcagaaaattta

SEQ ID NO: 4504 - protein, 872 aa, Streptococcus agalactiae
MKELSSAQIRQMWLDFWKSKGHSVEPSANLVPVNDPTLLWINSGVATLKKYFDGSVIPENPRITNAQKSIRTNDIENVGKTARHHTMFEMLGNFSIGDYFRDEAIEWGFELLTSPEWFDFPKDKLYMTYYPDDKDSYNRWIACGVEPSHLVPIEDNFWEIGAGPSGPDTEIFFDRGEDFDPENIGLRLLAEDIENDRYIEIWNIVLSQFNADPAVPRSEYKELPNKNIDTGAGLERLAAVMQGAKTNFETDLFMPIIREVEKLSGKTYDPDGDNMSFKVIADHIRALSFAIGDGALPGNEGRGYVLRRLLRRAVMHGRRLGINETFLYKLVPTVGQIMESYYPEVLEKRDFIEKIVKREEETFARTIDAGSGHLDSLLAQLKAEGKDTLEGKDIFKLYDTYGFPVELTEELAEDAGYKIDHEGFKSAMKEQQDRARAAVVKGGSMGMQNETLAGIVEESRFEYDTYSLESSLSVIIADNERTEAVSEGQALLVFAQTPFYAEMGGQVADHGVIKNDKGDTVAEVVDVQKAPNGQPLHTVNVLASLSVGTNYTLEINKERRLAVEKNHTATHLLHAALHNVIGEHATQAGSLNEEEFLRFDFTHFEAVSNEELRHIEQEVNEQIWNDLTITTTETDVETAKEMGAMALFGEKYGKVVRVVQIGNYSVELCGGTHLNNSSEIGLFKIVKEEGIGSGTRRIIAVTGRQAFEAYRNQEDALKEIAATVKAPQLKDAAAKVQALSDSLRDLQKENVELKEKAAAAAAGDVFKDIQEAKGVRFIASQVDVADAGALRTFADNWKQKDYSDVLVLVAAIGEKVNVLVASKTKDVHAGNMIKGLAPIVAGRGGGKPDMAMAGGSDASKIAELLAAVAENL

SEQ ID NO: 4505 - DNA, 2616 bp, Streptococcus pyogenes
atgaaagaattatcgtctgcacaaatccgccaaatgtggttggatttctggaaatctaaaggacattgcgttgagccttcagctaacttggttcctgtgaacgacccaacgcttctttggatcaactcaggtgttgcaaccttgaaaaaatattttgatggttcagtgattccagaaaatccacgtattaccaatgcacaaaaatcaattcgtactaatgatattgaaaatgttggtaaaacagcacgtcaccatactatgtttgaaatgcttggtaacttctcaattggagactatttccgtgatgaagctattgagtggggatttgaactcttgacaagtccagactggtttgatttccctaaagacaagctctacatgacttattacccagatgacaaggattcgtataaccgttggattgcttgtggcgttgaaccaagtcacttggtgccgatcgaggataacttctgggaaatcggtgctggtccttcaggtccagatacggagattttcttcgaccgtggtgaagatttcgatccagaaaatatcggacttcgcctcttggctgaagatatcgaaaacgatcgttacatcgaaatctggaacatcgttctctcacaattcaatgctgacccagccgtaccacgttcagaatacaaagaattaccaaacaaaaacattgatacaggtgctggtcttgaacgtcttgcagctgttatgcaaggggcaaaaacaaactttgaaactgacctcttcatgccaatcatccgtgaagtagagaagttgtcaggtaaaacttacgatccagatggcgacaacatgagtttcaaggttatcgctgaccacatccgtgcgctttcatttgctatcggtgatggtgcgcttcctggaaatgaaggtcgtggttacgttcttcgtcgtcttctccgtcgtgcggttatgcacggtcgccgtcttggcatcaacgaaactttcctttacaaattggttccgactgttggacaaatcatggaaagctactacccagaagtgcttgaaaaacgtgattttatcgagaaaatcgttaaacgtgaggaagaaacatttgctcgtactatcgatgcaggtagcggtcacttagattcattgcttgcgcagcttaaggctgaaggtaaggatactcttgaaggtaaagatatcttcaaactttatgatacttatggattcccggttgaattgacagaggaattggcagaagatgcaggctacaagattgaccacgaaggctttaagtcagccatgaaagaacaacaagaccgtgcgcgtgcagctgttgttaagggtggttcaatggggatgcaaaatgaaaccctagctggtattgttgaagaatcacgattcgaatacgacacatatagtcttgaatcaagtctttcagtcatcatcgctgataatgaacgtaccgaagctgtttcagaaggtcaagcccttcttgtctttgctcaaacaccattctatgctgaaatgggtggacaggttgctgacacaggtagaatcaaaaatgataagggtgacacagttgctgaggttgttgatgttcaaaaagcaccaaatggtcaacctctacacactgtaaacgttttagcatcactttcagttggaacaaactacacacttgaaatcaacaaagagcgtcgtttggctgttgagaaaaaccacacagctactcacttgctccatgcagctcttcacaatgttatcggtgaacacgcaactcaggctggttcattgaacgaagaagaattcttgcgctttgattttactcactttgaagcagtaagcaatgaggaacttcgtcacattgaacaagaagttaatgagcaaatttggaacgctcttacaatcacaacgactgaaactgacgttgaaaccgcaaaagagatgggagcaatggcgctttttggtgagaaatatggtaaagtggttcgtgtggttcaaattggtaattattctgttgaactttgtggtggaactcacttaaataattcttcagaaatcggtctcttcaagattgtcaaagaagaaggtattggttcaggcactcgtcgtattattgcagttactggtagacaagcttttgaagcttatcgtaaccaagaggatgccctaaaagagatcgctgctactgtaaaagctccgcaattgaaagatgcagcagctaaagtacaagctcttagcgactcgcttcgtgatcttcaaaaagaaaatgcagaacttaaagaaaaagcagcagctgcagcagctggtgatgtctttaaagatgttcaagaagctaagggcgtgcgcttcattgctagtcaagttgatgttgcagatgcaggggcacttcgtacatttgctgataactggaaacaaaaagactactctgatgtgcttgttctcgtagcagctattggtgagaaggttaatgtccttgttgcaagcaaaaccaaagatgtccacgctggtaacatgatcaaagaattggcaccaattgtagcaggtcgtggtggaggtaaaccagacatggctatggcaggtggtagcgatgcaagtaaaattgcagagctgctagcagcagttgctgaaatagtg

SEQ ID NO: 4506 - protein, 872 aa, Streptococcus pyogenes
MKELSSAQIRQMWLDFWKSKGHCVEPSANLVPVNDPTLLWINSGVATLKKYFDGSVIPENPRITNAQKSIRTNDIENVGKTARHHTMFEMLGNFSIGDYFRDEAIEWGFELLTSPDWFDFPKDKLYMTYYPDDKDSYNRWIACGVEPSHLVPIEDNFWEIGAGPSGPDTEIFFDRGEDFDPENIGLRLLAEDIENDRYIEIWNIVLSQFNADPAVPRSEYKELPNKNIDTGAGLERLAAVMQGAKTNFETDLFMPIIREVEKLSGKTYDPDGDNMSFKVIADHIRALSFAIGDGALPGNEGRGYVLRRLLRRAVMHGRRLGINETFLYKLVPTVGQIMESYYPEVLEKRDFIEKIVKREEETFARTIDAGSGHLDSLLAQLKAEGKDTLEGKDIFKLYDTYGFPVELTEELAEDAGYKIDHEGFKSAMKEQQDRARAAVVKGGSMGMQNETLAGIVEESRFEYDTYSLESSLSVIIADNERTEAVSEGQALLVFAQTPFYAEMGGQVADTGRIKNDKGDTVAEVVDVQKAPNGQPLHTVNVLASLSVGTNYTLEINKERRLAVEKNHTATHLLHAALHNVIGEHATQAGSLNEEEFLRFDFTHFEAVSNEELRHIEQEVNEQIWNALTITTTETDVETAKEMGAMALFGEKYGKVVRVVQIGNYSVELCGGTHLNNSSEIGLFKIVKEEGIGSGTRRIIAVTGRQAFEAYRNQEDALKEIAATVKAPQLKDAAAKVQALSDSLRDLQKENAELKEKAAAAAAGDVFKDVQEAKGVRFIASQVDVADAGALRTFADNWKQKDYSDVLVLVAAIGEKVNVLVASKTKDVHAGNMIKELAPIVAGRGGGKPDMAMAGGSDASKIAELLAAVAEIV

SEQ ID NO: 4507 - DNA, 516 bp, Streptococcus agalactiae
ttgctatttgtcaactttcgaggaggaagagatatggctacttttcaaattaaagaaaaaatgttttctctaggcggtaaatttactattacagacctgactgggcttccctgttatcacgttgaaggaagtttgttccctctacctaagacttttaaagtctttgacgaagaggaacatctcattagtcagattgagaagaaggttttaagttttttaccaaagtttaatgtgacattagccaatgggaatcatttcacgattaagaaagatttctcatttttgaaacctcattacaccattgaagaccttgatatggaagttaagggaaatttttgggatatggatttccaactcttaaaagacaatcaagttatagcaaacatatctcaacagtggtttcgtatgacttcaacttatcaggtagaagtttacagtgaaacttacaacgatttgacaatttcgcttgtcatagcgatcgactatgtcaaagagttagaaaaaaatgcatcaaac

SEQ ID NO: 4508 - protein, 172 aa, Streptococcus agalactiae
MLFVNFRGGRDMATFQIKEKMFSLGGKFTITDLTGLPCYHVEGSLFPLPKTFKVFDEEEHLISQIEKKVLSFLPKFNVTLANGNHFTIKKDFSFLKPHYTIEDLDMEVKGNFWDMDFQLLKDNQVIANISQQWFRMTSTYQVEVYSETYNDLTISLVIAIDYVKELEKNASN

SEQ ID NO: 4509 - DNA, 402 bp, Streptococcus agalactiae
atgaaatacacttatttagcattgtttgaagtggataaagaaaacggtggctataacatttctttccctgattttcatggagcatttagtgaagctgatagcttgaacgaggccatttttaacgctcgtgaagtccttgaaatctatacaattatgtttgaagacgagggcaaagagtttcctaaagcatcatcattcaaggctcttgcaagcaatttagcaagtgacgaagatgtgattcaggctatttcagttgatactgagcttgtccgtgagcgtgaacgctctaagattgtcaacaagactgtcacactgccaagctggcttgtggaagttggaaaagaaaacaaggtcaactttagccagctgttgcaaaaagcaatccgtgaggaattgcaagta

SEQ ID NO: 4510 - protein, 134 aa, Streptococcus agalactiae
MKYTYLALFEVDKENGGYNISFPDFHGAFSEADSLNEAIFNAREVLEIYTIMFEDEGKEFPKASSFKALASNLASDEDVIQAISVDTELVRERERSKIVNKTVTLPSWLVEVGKENKVNFSQLLQKAIREELQV

SEQ ID NO: 4511 - DNA, 1530 bp, Streptococcus agalactiae
atggtcttagataaagaaatcaaggctcaattagcgcaatatttagatttgctagaatctgatattgtattacaagctgatttaggagataacgataattctcaaaaagtaaaggattttctagatgaaattgtcgctatgtctgatcgcatcagccttgaatcaacacatttaaaacgtcaacctagttttggaattgcaaaaaaagggcatgaaagtcgcgttattttttcaggcttgccaatggggcatgaattcacatctttcattttagctttgttgcaagtctctggtcgcgcaccaaaagttgatgaagatattatcaaacgaattaaggggattgagaaaactatcaatctagaaacttatgtttcattaacttgccataattgtccagatgtcgttcaagcctttaatataatggctgttttgaatccgaatatcactcatactatgattgaaggaggcatgtatcaagacgaagtcaaatcaaaaggtatcatgtctgttcctactgtttataaggaccaagaagaatttacttctggccgtgctacaattgaacagcttttagaacaactagatggacctcttgatgctgaagcatttgctgacaaaggtgtctatgatgttctagttattggtggtggtcctgcaggtaacagtgctgcaatttatgccgcccgtaaagggttaaaaacaggtattttagcagaaacttttggtggacaagttatcgaaacagttggtattgagaacatgattggtacactgtacacagaaggccctaaattaatggctcaaattgaagagcataccaaatcttacgatattgatattatcaagagtcaattagcaactggcattgagaaaaaagaattagttgaggtaacactggctaacggagctattttacaagctaaaactgctatcctagctctgggtgctaagtggcgaaatatcaacgttcctggcgaggaagaattccgcaataaaggtgttacttactgtccacattgtgatggccctcttttcgaaggaaaagatgttgctgttataggtggtggtaattcaggtatggaagctgctttagatctagccggtgtcactaaacatgttacagtcctagaattcttacctgagctcaaagcagaccaagtactgcaagaacgagcagctaaaactgacaatttaactattcttaagaatgttgctactaaagatatcgttggtgaagatcatgtcactggtttaaactataccgatcgtgatacaaacgaagaaaaacacattgatttagaaggtgtttttgtacaaattggtcttgtaccaagtacatcttggctcaaggatagcggcattgaactcaatgaacgtcaagaaattgtcgttgataaatttggctcaacaaatatccctggtatttttgctgcaggtgactgtacagatgctgcctacaagcaaatcattatttccatggggtctggtgccacagctgccattggcgcatttgattatttaatcagacaa

SEQ ID NO: 4512 - protein, 510 aa, Streptococcus agalactiae
MVLDKEIKAQLAQYLDLLESDIVLQADLGDNDNSQKVKDFLDEIVAMSDRISLESTHLKRQPSFGIAKKGHESRVIFSGLPMGHEFTSFILALLQVSGRAPKVDEDIIKRIKGIEKTINLETYVSLTCHNCPDVVQAFNIMAVLNPNITHTMIEGGMYQDEVKSKGIMSVPTVYKDQEEFTSGRATIEQLLEQLDGPLDAEAFADKGVYDVLVIGGGPAGNSAAIYAARKGLKTGILAETFGGQVIETVGIENMIGTLYTEGPKLMAQIEEHTKSYDIDIIKSQLATGIEKKELVEVTLANGAILQAKTAILALGAKWRNINVPGEEEFRNKGVTYCPHCDGPLFEGKDVAVIGGGNSGMEAALDLAGVTKHVTVLEFLPELKADQVLQERAAKTDNLTILKNVATKDIVGEDHVTGLNYTDRDTNEEKHIDLEGVFVQIGLVPSTSWLKDSGIELNERQEIVVDKFGSTNIPGIFAAGDCTDAAYKQIIISMGSGATAAIGAFDYLIRQ

SEQ ID NO: 4513 - DNA, 1530 bp, Streptococcus pyogenes
atggcattaagtcctgatattaaagaacaacttgcccaatacctcaccctgttagaagctgatcttgttttgcaagtttcccttggtgacaatgagcagtctcaaaaagtcaaagactttgtggaagaaatagctgctatgtctgagcgtatttctattgaaaacatcactttagaccgacaaccaagctttaaggttgcgaaaaaaggtcacggtagtggggttgtctttgctggtcttcctttaggccacgaattgacgtcctttattcttgctctcttgcaagtatctggacgtgctccaaaagtggatcaagatgttattgatcgcatcaaggccattgaccgtccgttgcattttgaaacttatgtcagcttaacctgccataactgcccagatgttgttcaagctttaaacattatgtccgtcttgaacgacaagatttcacacactatggtagaaggcggcatgttccaagatgaagtgaaagcaaaaggcattatgtctgtccctactgtctttttagacggggaagaattcacttctggtcgcgctaccattgagcaactcttagaacaaatcgctggcccactttctgaggaagcctttgctgataaaggcctctatgatgtccttgttattggtggtggccctgcgggcaatagcgctgctatctatgcagctcgtaaaggactaaaaacaggtttacttgctgaaacctttggtggtcaggtcatggaaacggtcggcatcgaaaacatgattggtaccctttacactgaaggaccaaaattaatggccgaagtggaggcccatactaagtcttatgatgttgatattatcaaagcacaactagctacttctattgagaaaaaagaaaacatcgaggttactctagctaatggtgcggttctacaagccaaaactgctatcttagctcttggggccaaatggcgtaacattaatgttcctggtgaagatgaattccgtaataaaggggtgacttactgccctcactgtgacggtcctctctttgaaggcaaagatgttgctgttatcggtggtgggaactctggattagaagcggcccttgacttggctggtcttgctaaacacgtttacgttttagaattcttgcctgaacttaaagctgacaaagtgcttcaagaccgcgcagctaagactaacaatatgaccatcatcaaaaatgttgctactaaggacattgttggagaggaccatgttacaggtcttaactacactgagcgtgatagcggtgaagacaaacaccttgaccttgaaggggtctttgttcaaattggtcttgttccaaacacagcttggctcaaagatagtggtgtcaacctaaccgaccgcggagaaatcattgtggataaacatgggtcaaccaatattcctggtatctttgctgctggggactgtactgattcagcttataaacaaatcattatttccatggggtctggtgctactgctgccatcggtgcctttgactacttgattcgtcaa

SEQ ID NO: 4514 - protein, 510 aa, Streptococcus pyogenes
MALSPDIKEQLAQYLTLLEADLVLQVSLGDNEQSQKVKDFVEEIAAMSERISIENITLDRQPSFKVAKKGHGSGVVFAGLPLGHELTSFILALLQVSGRAPKVDQDVIDRIKAIDRPLHFETYVSLTCHNCPDVVQALNIMSVLNDKISHTMVEGGMFQDEVKAKGIMSVPTVFLDGEEFTSGRATIEQLLEQIAGPLSEEAFADKGLYDVLVIGGGPAGNSAAIYAARKGLKTGLLAETFGGQVMETVGIENMIGTLYTEGPKLMAEVEAHTKSYDVDIIKAQLATSIEKKENIEVTLANGAVLQAKTAILALGAKWRNINVPGEDEFRNKGVTYCPHCDGPLFEGKDVAVIGGGNSGLEAALDLAGLAKHVYVLEFLPELKADKVLQDRAAKTNNMTIIKNVATKDIVGEDHVTGLNYTERDSGEDKHLDLEGVFVQIGLVPNTAWLKDSGVNLTDRGEIIVDKHGSTNIPGIFAAGDCTDSAYKQIIISMGSGATAAIGAFDYLIRQ

SEQ ID NO: 4515 - DNA, 558 bp, Streptococcus agalactiae
atgtcattagtcggaaaagaaattattgaattttcagctcaagcttatcacgatggaaaattcatcactgttacaaatgaagacgttaaaggaaaatgggcagttttttgtttctacccagcagacttttcatttgtttgcccaactgaacttggtgaccttcaagagcaatacgaaacacttaaatctcttgatgtagaagtttattctgtctctactgatactcattttgttcataaagcatggcatgatgactcagatgtcgttggtactatcacatatcctatgattggtgacccttcacaccttatttcacaaggttttgatgtccttggacaagatggtctagcacaacgtggtacatttatcattgatccagacggtgtcatccaaatgatggaaattaatgctgatggcatcggacgtgatgcaagtactctcattgataaagtccgtgctgctcaatacatccgccaacatacaggtgaagtttgtccagctaaatggaaagaaggagctgaaactttaactcctagtttagaccttgtaggtaaaatt

SEQ ID NO: 4516 - protein, 186 aa, Streptococcus agalactiae
MSLVGKEIIEFSAQAYHDGKFITVTNEDVKGKWAVFCFYPADFSFVCPTELGDLQEQYETLKSLDVEVYSVSTDTHFVHKAWHDDSDVVGTITYPMIGDPSHLISQGFDVLGQDGLAQRGTFIIDPDGVIQMMEINADGIGRDASTLIDKVRAAQYIRQHTGEVCPAKWKEGAETLTPSLDLVGKI

SEQ ID NO: 4517 - DNA, 558 bp, Streptococcus pyogenes
atgtctctaattggaaaagaaattgctgaattttcagctcaagcttatcacgatggaaaattcatcactgttacaaatgaagacgttaaaggaaaatgggcagttttttgtttctacccagcagacttttcatttgtttgcccaactgaactcggtgaccttcaagagcaatacgaaacactgaaatctcttggtgtagaagtttattctgtctctactgatactcattttgttcataaagcttggcatgatgattcagatgtggttggcactatcacataccctatgattggtgacccttcacaccttatttcacaagcctttgaagtgcttggcgaagacggacttgctcaacgtggaacatttatcgttgatccagatggtattatccaaatgatggaaattaatgctgatggtattggacgtgacgctagcaccttgattgataaaattcacgctgcccaatacgtccgtaaacatccaggtgaagtttgtccagctaaatggaaagaaggcgctgaaactttgacaccaagtcttgatttagttggtaaaatt

SEQ ID NO: 4518 - protein, 186 aa, Streptococcus pyogenes
MSLIGKEIAEFSAQAYHDGKFITVTNEDVKGKWAVFCFYPADFSFVCPTELGDLQEQYETLKSLGVEVYSVSTDTHFVHKAWHDDSDVVGTITYPMIGDPSHLISQAFEVLGEDGLAQRGTFIVDPDGIIQMMEINADGIGRDASTLIDKIHAAQYVRKHPGEVCPAKWKEGAETLTPSLDLVGKI

SEQ ID NO: 4519 - DNA, 768 bp, Streptococcus agalactiae
atggcagtaatttcaatgaaacaacttcttgaggctggtgttcactttggtcaccaaactcgtcgctggaaccctaagatggctaagtacatcttcacagaacgtaatggtatccacgttatcgaccttcaacaaactgtaaaattagctgaccaagcttacgaatttgttcgtgatgctgcagcaaacgatgcagttatcttgtttgttggtactaagaaacaagcagctgaagctgttgctgaagaagctaaacgtgctggtcaatacttcattaaccaccgttggttaggtggaactcttactaactggggaactatccaaaaacgtattgctcgtttgaaagaaatcaaacgtatggaagaagaaggaacttttgaacttcttcctaagaaagaagttgcattgttaaacaaacaacgtgcacgtcttgaaaaattcttgggtggtatcgaagatatgccacgcatcccagatgtaatgtatgttgttgacccacataaagagcaaatcgctgttaaagaagctaaaaaacttggtattccagttgtagctatggttgacactaacgctgatccagatgatatcgatgttatcatcccagcaaacgatgacgctattcgcgccgttaaattaattacttctaaattagctgatgcagttattgaaggtcgtcaaggtgaagatgctgacgttgacttcgctcaagaagcacaagcagattcaattgaagaaatcgttgaagtagttgaaggatcaaacaacgac

SEQ ID NO: 4520 - protein, 256 aa, Streptococcus agalactiae
MAVISMKQLLEAGVHFGHQTRRWNPKMAKYIFTERNGIHVIDLQQTVKLADQAYEFVRDAAANDAVILFVGTKKQAAEAVAEEAKRAGQYFINHRWLGGTLTNWGTIQKRIARLKEIKRMEEEGTFELLPKKEVALLNKQRARLEKFLGGIEDMPRIPDVMYVVDPHKEQIAVKEAKKLGIPVVAMVDTNADPDDIDVIIPANDDAIRAVKLITSKLADAVIEGRQGEDADVDFAQEAQADSIEEIVEVVEGSNND

SEQ ID NO: 4521 - DNA, 765 bp, Streptococcus pyogenes
atggcagtaatttcaatgaaacaacttcttgaggctggtgttcactttggtcaccaaactcgtcgctggaaccctaagatggctaaatacatcttcacagagcgtaacggtatccacgttatcgatcttcaacaaactgtaaaattagctgaccaagcttacgaatttgttcgtgatgctgcagcaaacgatgctgtcatcttgttcgttggtactaaaaaacaagctgctgaagcagttgctgacgaagcaacgcgtgcaggccaatacttcatcaaccaccgttggttgggtggaacgcttaccaactggggaactatccaaaaacgtatcgctcgtttgaaagaaatcaaacgtatggaagaagaaggaacctttgacgttcttcctaagaaagaagttgcacttcttaacaaacaacgcgctcgtcttgaaaaattcttgggcggtatcgaagatatgcctcgtatcccagacgtaatgtacgttgttgacccacataaagaacaaatcgctgttaaagaagctaaaaaacttggtatcccagtcgtagcgatggttgatacaaacgctgatccagatgatatcgatatcatcattccagctaacgatgacgctatccgcgccgttaaattaatcactgctaaattagctgacgctattatcgaaggccgtcaaggtgaagatgcagacgttgcttttgaagctgacactcaagcagattcaatcgaagaaatcgttgaagttgtcgaaggcgacaacgct

SEQ ID NO: 4522 - protein, 255 aa, Streptococcus pyogenes
MAVISMKQLLEAGVHFGHQTRRWNPKMAKYIFTERNGIHVIDLQQTVKLADQAYEFVRDAAANDAVILFVGTKKQAAEAVADEATRAGQYFINHRWLGGTLTNWGTIQKRIARLKEIKRMEEEGTFDVLPKKEVALLNKQRARLEKFLGGIEDMPRIPDVMYVVDPHKEQIAVKEAKKLGIPVVAMVDTNADPDDIDIIIPANDDAIRAVKLITAKLADAIIEGRQGEDADVAFEADTQADSIEEIVEVVEGDNA

SEQ ID NO: 4523 - DNA, 1038 bp, Streptococcus agalactiae
atggcagaaatcacagctaaacttgtaaaagaattgcgtgaaaaatcaggtgcaggcgttatggacgctaaaaaagcattagtagaaactgatggtgaccttgataaagcgattgaattacttcgcgaaaaaggtatggctaaagcagctaaaaaagcagaccgtgttgctgctgaaggtttaacaggtgtttatgttgatggtaacgttgcagcagttattgaagttaacgctgagactgactttgttgctaaaaacgaccaatttgtaacattagttaatgaaactgctaaagttattgcagaaggacgtccttcaaacaatgaagaagcacttgctttaacaatgccttcaggtgaaactttagaacaagcatttgtaactgcaactgctacaattggtgaaaaaatttcattccgtcgcttcgctttagttgaaaagactgatgagcaacattttggtgcataccaacataatggtggacgtatcggagtaattactgttgttgaaggtggcgacgatgcacttgctaaacaagtatcaatgcacgttgcagctatgaagccaactgttctttcatatactgaacttgatgcacaatttgttcatgatgaattagcacagttgaaccacaaaattgagcaagacaacgagagtcgtgctatggttaacaaaccagctcttccattccttaaatatggatcaaaagctcaattgactgatgaagttattgcccaagcagaagaagacatcaaagcagaattagctgcagaaggtaaaccagaaaaaatctgggataaaatcgttccaggtaaaatggatcgtttcatgcttgacaacactaaagttgaccaagagtacacactccttgctcaagtttacatcatggatgatagcaaaacagttgaagcttatcttgagtcagtaaatgctaaagcagttgctttcgtacgttttgaagttggagaaggtattgagaaagcttctaacgactttgaagcagaagttgcagctacaatggcagcagcacttgaaaaa

SEQ ID NO: 4524 - protein, 346 aa, Streptococcus agalactiae
MAEITAKLVKELREKSGAGVMDAKKALVETDGDLDKAIELLREKGMAKAAKKADRVAAEGLTGVYVDGNVAAVIEVNAETDFVAKNDQFVTLVNETAKVIAEGRPSNNEEALALTMPSGETLEQAFVTATATIGEKISFRRFALVEKTDEQHFGAYQHNGGRIGVITVVEGGDDALAKQVSMHVAAMKPTVLSYTELDAQFVHDELAQLNHKIEQDNESRAMVNKPALPFLKYGSKAQLTDEVIAQAEEDIKAELAAEGKPEKIWDKIVPGKMDRFMLDNTKVDQEYTLLAQVYIMDDSKTVEAYLESVNAKAVAFVRFEVGEGIEKASNDFEAEVAATMAAALEK

SEQ ID NO: 4525 - DNA, 1134 bp, Streptococcus pyogenes
ttgtctttaacaatcgaaaaccaaacggggcagaaagcaaaccgctctgtctcgttttttgaaaccaaaacaaatatcatttggaggatactacacatggcagaaattacagctaagcttgtaaaagaattacgtgaaaaatctggtgctggcgttatggacgctaaaaaagcacttgttgaaacagatggtgacatggacaaagccgttgaacttcttcgtgaaaaaggaatggctaaagcagctaaaaaagctgaccgtgttgccgctgaaggtttaacaggcgtttacgttcatggtaacgttgctgctgttgttgaagttaacgctgaaacagactttgttgctaaaaatgctcaattcgttgaattggtaaacgcaactgctaaagttatcgctgaaggcaaaccagctaacaacgatgaagcacttgcacttgttatgccttcaggtgaaactcttgctgaagcttacgttaatgcaactgctaccatcggagaaaaaatctcattccgtcgttttgctttgattgaaaaagcagatgagcaacacttcggtgcttaccaacataatggtggccgtatcggggttatctcagttgtcgaaggcggcgacgatgctcttgctaaacaagtatcaatgcatatcgctgcaatgaaaccaactgttctttcatacactgagcttgatgcacaattcatcaaagatgaacttgctcaattgaaccacgctatcgaacttgacaacgaatctcgtgcaatggttgataaaccagctcttccattcttgaaatacggttcaaaagctcaattatcagacgatgtgattactgctgctgaagcagacatcaaagctgaacttgctgctgaaggcaaaccagaaaagatctgggacaaaatcatcccaggtaaaatggaccgcttcatgcttgacaacactaaagttgaccaagcttacactcttcttgcacaagtttacatcatggacgacagcaaaactgttgaagcttaccttgactcagtaaacgctaaagcgattgcttttgcacgttttgaagttggtgaaggtatcgagaaaaaagctaacgactttgaatcagaagttgcagctactatggctgctgcccttaacaac

SEQ ID NO: 4526 - protein, 378 aa, Streptococcus pyogenes
LSLTIENQTGQKANRSVSFFETKTNIIWRILHMAEITAKLVKELREKSGAGVMDAKKALVETDGDMDKAVELLREKGMAKAAKKADRVAAEGLTGVYVHGNVAAVVEVNAETDFVAKNAQFVELVNATAKVIAEGKPANNDEALALVMPSGETLAEAYVNATATIGEKISFRRFALIEKADEQHFGAYQHNGGRIGVISVVEGGDDALAKQVSMHIAAMKPTVLSYTELDAQFIKDELAQLNHAIELDNESRAMVDKPALPFLKYGSKAQLSDDVITAAEADIKAELAAEGKPEKIWDKIIPGKMDRFMLDNTKVDQAYTLLAQVYIMDDSKTVEAYLDSVNAKAIAFARFEVGEGIEKKANDFESEVAATMAAALNN

SEQ ID NO: 4527 - DNA, 207 bp, Streptococcus agalactiae
ttgaagccgataatggataatgttcccatgatgcatccagctagtataacacctagcataacagcaataacactatgtttaaattcccaatctaggaggctagctgcaagcgtgccagtccaggctcctgttccgggtaagggaatgcctacaaacaatagcaaggcaataaacaatcctttttctccagctactttttcaagtttt

SEQ ID NO: 4528 - protein, 69 aa, Streptococcus agalactiae
MKPIMDNVPMMHPASITPSITAITLCLNSQSRRLAASVPVQAPVPGKGMPTNNSKAINNPFSPATFSSF

SEQ ID NO: 4529 - DNA, 459 bp, Streptococcus agalactiae
atgaattacattattacatttttgatttcaatgattcccttagtggaactacgaggagctgtgccatttgcaatcgctaatggaatacctttgtgggaagcgctagctatcggtgttgttggaaacatgctacctgtacctatcatcttcttctttgctcgcaaagttctagaatggggagcagataaaccttatactggtaagtttttcacatggtgccttaaaaaaggacatagcggtggtcaaaaacttgaaaaagtagctggagaaaaaggattgtttattgccttgctattgtttgtaggcattcccttacccggaacaggagcctggactggcacgcttgcagctagcctcctagattgggaatttaaacatagtgttattgctgttatgctaggtgttatactagctggatgcatcatgggaacattatccattatcggcttcaacctattc

SEQ ID NO: 4530 - protein, 153 aa, Streptococcus agalactiae
MNYIITFLISMIPLVELRGAVPFAIANGIPLWEALAIGVVGNMLPVPIIFFFARKVLEWGADKPYTGKFFTWCLKKGHSGGQKLEKVAGEKGLFIALLLFVGIPLPGTGAWTGTLAASLLDWEFKHSVIAVMLGVILAGCIMGTLSIIGFNLF

SEQ ID NO: 4531 - DNA, 462 bp, Streptococcus agalactiae
gtggccataaaaaatacttccgataatattgaagaatatataaaatcattattagaacaatcaggaattgctgaaataaagcgttccaatttagctgatacttttcaagttgttcctagtcagattaattatgtcattaagacacggtttactgaaagccgtggttatgtggttgagagtaaacgaggtggtggaggttacatccgcattgctaaggttcatttttctgatcaacaccaattatttggaaatatgttatcaacgattggcgagcgtatcagtgaacaagtttttgatgatttgattcaattattattcgatgaagagataattacagaacgtgaaggaaatttgattctggcgacatcaggtgatgacgtcttaggagagcaagcctctgttattagagctcgtatgctccgtaaattattacaacgattagatagaaaaggattccattta

SEQ ID NO: 4532 - protein, 154 aa, Streptococcus agalactiae
MAIKNTSDNIEEYIKSLLEQSGIAEIKRSNLADTFQVVPSQINYVIKTRFTESRGYVVESKRGGGGYIRIAKVHFSDQHQLFGNMLSTIGERISEQVFDDLIQLLFDEEIITEREGNLILATSGDDVLGEQASVIRARMLRKLLQRLDRKGFHL

SEQ ID NO: 4533 - DNA, 459 bp, Streptococcus pyogenes
atgccaaccaaaaatacttcagacagcattgaagagtatattaaagaattattagctaagtcaggaatagcagaaattaagcggtccatgctagcagattcgtttcaagttgtcccaagtcagatcaactatgtcattaaaacccgttttacggagagtcgaggctatgaagtagagagtaaacgaggtggtggaggctatattcgtattgccaaggttcatttttcagacaaacaccatctgattggcaatttaatggcaactattgaagactgtatcagtgagcaagttttcacggactcgatacaattgctttttgacgaacacttattgacagagcgtgagggaaatatcattttggctgtggcgtctgatgatgttttaggaactgatggttcaactattcgtgcacgaatgctctatcgcttattgcaacgaattgacagaaagggaagcaat

SEQ ID NO: 4534 - protein, 153 aa, Streptococcus pyogenes
MPTKNTSDSIEEYIKELLAKSGIAEIKRSMLADSFQVVPSQINYVIKTRFTESRGYEVESKRGGGGYIRIAKVHFSDKHHLIGNLMATIEDCISEQVFTDSIQLLFDEHLLTEREGNIILAVASDDVLGTDGSTIRARMLYRLLQRIDRKGSN

SEQ ID NO: 4535 - DNA, 2445 bp, Streptococcus agalactiae
atgagtcattattccataaaattacaagaagtattcagattggcgcaatttcaagcagcacgctatgaaagtcactatttagaaagctggcatcttcttttagcaatggttttagttcatgattcagtagctggtttgacatttgctgaatatgagtctgaagttgcaattgaagagtacgaagcagcaacaattttagctttaggtagagcaccgaaagaagagattaccaattatcaatttttagagcaatcaccagctttgaaaaagatcttaaagttagcagaaaatattagtatcgtagtaggagctgaagatgtgggtactgaacatgtcttgcttgctatgttggttaataaagatttattagccacacgtatcttagagttagttggctttagaggtcaagacgatggtgaatcagttcgtatggttgatttacgtaaggctctagaacgtcatgccggttttacaaaagatgatatcaaagcaatttatgaattacgtaatcctaaaaaagcaaagtcgggtgcttctttttctgatatgatgaaaccaccgagtactgctggtgatttagctgatttcacacgtgatttatcacagatggcggttgatggggaaattgaacctgttattgggcgtgataaagaaatttcacgtatggtccaagtcttaagtcgtaaaacaaagaataatcctgtcttagttggagatgcgggtgtcggtaaaacagctttggcgtacggtctagcacaacgtattgctaatggaaatattccttatgagcttagagatatgcgtgttctagagttagatatgatgagcgttgttgctggaactcgttttcgtggtgattttgaggaacgtatgaatcaaatcattgcagatattgaagaagacggtcatattattcttttcattgatgaactgcatactattatgggttctggctctggtattgatagcacacttgatgctgctaatattttaaaaccagctttggcccgaggcactttacgcactgttggagcaacaactcaagaggaatatcaaaagcatattgaaaaagatgctgctttatctcgtcgctttgcaaaagttttagtagaagaaccaaatcttgaagacgcatatgaaattctacttggattgaagccagcgtatgaagcctttcataatgttactatttcagatgaagcagttatgactgctgtaaaagtggctcatcgttatttgacaagtaagaatttaccagactcagctatagacttacttgatgaagcttctgccactgtgcaaatgatgattaagaaaaatgctccttcgcttttaacagaagttgaccaagctattttagatgatgatatgaaatctgcttctaaagctctaaaagcaagttataagggtaaaaagcgtaagcctattgccgtaacagaagatcatattatggcaactctcagtcgtctatctggtattcctgttgaaaaattgacacaagctgatagtaaaaaatacctcaatttagaaaaagaattgcataaacgtgttatcggtcaagatgatgcagttactgccattagtcgtgctatccgtcgcaatcaatctggcattcgtactggtaagcgtcctattggttcctttatgttcttgggaccaactggtgttggtaagacagagttagcaaaagccttggcagaagtgttgtttgatgatgaatcagccctaattcgttttgatatgtcggaatatatggaaaaattcgcagcttctcacctgaatggggcacctccaggttatgttggttatgatgaaggaggagagttgactgaaaaagtacgcaataaaccatattcagttttactttttgatgaagttgaaaaagctcatccagatatttttaatgtattattacaagtgcttgatgatggcgttttaacagatagtcgaggacgaaaagttgatttttcaaatactataatcattatgacttctaatttaggagcaactgcattacgtgacgataaaacagttggttttggagctaaggatatcagccatgattatactgctatgcaaaaacgtattatggaggagcttaaaaaagcttatcgaccagagtttatcaatcgtattgatgagaaagttgtattccatagtctcagtcaagataatatgcgtgaagttgtgaaaattatggttaaacctttaattttagcgcttaaagataaaggtatggatctgaaattccagccttcagccttgaaacacttggcagaggatggctatgatatagaaatgggtgctcgtccactgcgtagaactattcaaacgcaagtagaggatcatttatcagaactactattggcaaatcaagtgaaagaggggcaagtaattaagattggcgtatccaaaggcaaattgaaatttgatattgcaaaatca

SEQ ID NO: 4536 - protein, 815 aa, Streptococcus agalactiae
MSHYSIKLQEVFRLAQFQAARYESHYLESWHLLLAMVLVHDSVAGLTFAEYESEVAIEEYEAATILALGRAPKEEITNYQFLEQSPALKKILKLAENISIVVGAEDVGTEHVLLAMLVNKDLLATRILELVGFRGQDDGESVRMVDLRKALERHAGFTKDDIKAIYELRNPKKAKSGASFSDMMKPPSTAGDLADFTRDLSQMAVDGEIEPVIGRDKEISRMVQVLSRKTKNNPVLVGDAGVGKTALAYGLAQRIANGNIPYELRDMRVLELDMMSVVAGTRFRGDFEERMNQIIADIEEDGHIILFIDELHTIMGSGSGIDSTLDAANILKPALARGTLRTVGATTQEEYQKHIEKDAALSRRFAKVLVEEPNLEDAYEILLGLKPAYEAFHNVTISDEAVMTAVKVAHRYLTSKNLPDSAIDLLDEASATVQMMIKKNAPSLLTEVDQAILDDDMKSASKALKASYKGKKRKPIAVTEDHIMATLSRLSGIPVEKLTQADSKKYLNLEKELHKRVIGQDDAVTAISRAIRRNQSGIRTGKRPIGSFMFLGPTGVGKTELAKALAEVLFDDESALIRFDMSEYMEKFAASHLNGAPPGYVGYDEGGELTEKVRNKPYSVLLFDEVEKAHPDIFNVLLQVLDDGVLTDSRGRKVDFSNTIIIMTSNLGATALRDDKTVGFGAKDISHDYTAMQKRIMEELKKAYRPEFINRIDEKVVFHSLSQDNMREVVKIMVKPLILALKDKGMDLKFQPSALKHLAEDGYDIEMGARPLRRTIQTQVEDHLSELLLANQVKEGQVIKIGVSKGKLKFDIAKS

SEQ ID NO: 4537 - DNA, 2442 bp, Streptococcus pyogenes
atgattatgtattcaacgaagatgcaagacatttttagacaggcgcagttccaagctgctcgctttgatagccattgcctggaaacttggcatgttttgttagctatggtagctgtagataattctttagcaaatatgattttaagtgaatatgatgcccaagtcgccatagaagaatatgaagctgcagctattttagccatgggcaaaacccctaaagaacagttgtctcgtgtagacttcagacctcaatctaaaactttgactaacttgttagcttttgcgcaggctattagccaaatcactagggatcaagaagtcggctctgagcatgtcttatttgctattttattgaatccagatattatggcgagtcgtttgttagaaatagctggctatcagataaaagataacggcaatgggcagccgcgattagctgacttgcgaaaagcaatagaacgtcatgcaggttacagtaaggaaatgatcaaggctattcacgaactacgtaagcctaaaaaaacgaaaacacaagggaccttttcagatatgatgaagccaccaagtacagctggtgagttgagtgatttcacaagagatttgactgaaatggcaagacaaggtttgttagaatcggtgattggacgtgaccaagaagtatctcgtatgattcaggtactaagtcgtaaaacgaaaaacaatcctgtcttggtaggtgatgcaggtgttggtaaaactgcgcttgcttatggccttgctcaacggattgcaaatggcgctattccttatgaacttaaggagatgcgtgtcctagaattagacatgatgagtgtggtagcaggaacccgttttcgtggggattttgaagagcgcatgaatcaaatcattgatgatattgaagctgatggtcagattattctttttgttgatgaactacatactattatgggttctggcagtggtattgacagtacacttgatgcggctaacattttaaaaccagcattatcgcgcggcactcttcatatggttggagcaacaactcaagaagaataccaaaaacatattgaaaaagatgcagctctttcgcgtcgttttgctaaaatattaattgaagaacctaatacagaagatgcttatcagattttgatgggcctaaaattatcttatgagacctaccataatgtctcgatatcaaatgaggcagttaaaacagctgtaaaaatggcacaccgttatttaaccagtaaaaatctccctgattcagctatcgatttactagatgaagctagtgctgctgtgcaaaacatggtgaaaaaatcagcacctgagactttaacaccaatagaccaagctcttatcaatggtgatatgaaaaaagtatctcgcctcttagctaaagaagcaaaaggtcagatgagaaaaccaacaccggtgacagaagatgatattttggcaaccttgagtaagttatcgggaattccacttgaaaaactgacgcaagctgatagtaaaaaatacctcaatttagaaaaagaactgcataagcgtgtgattggtcaggatgctgctgttacggctatttcaagagccattcgtcgtaatcagtcaggtattcgaacaggaaaacgtcctattggatcatttatgtttcttggcccaacaggagtaggtaagacagaactagcaaaggcccttgcagaagttctctttgatgatgaagcagcgcttattcgttttgatatgtctgagtacatggaaaaattcgcagcgtctaggcttaatggagcacctcctggttatgtcggctatgatgaaggaggtgaactgacacagaaagttagaaataaaccttattcagtcttgctttttgatgaagtggaaaaagcacatcctgatatttttaacgttctccttcaagtattagatgatggtatattgactgatagtcgtgggcgtaaggtcgatttttcaaatactattattatcatgaccagcaatcttggcgcaacagccctgcgcgatgataaaacggtcggttttggggtcaaagacattcaccaagaccatcaagctatggagaaacgtattttagaagaattaagaaaaacttaccgcccagaatttatcaatcgtattgatgaaaaagtggtctttcatagtctgacccaagataacatgcgcgatgtggttaaaatcatggtacagcccctgattactacattggcagaaaaaggtattacccttaaaattcagcctttggccttgaaacatttgtccgaggtcggctatgatgagcatatgggggcaagaccattacgtcgaacgctgcaaactgagatagaagataagctatcagagcttattctttctcgagaattgacaagtgggcatacgctaaaaattggattatcacatggcaaattaacgtttcacatagct

SEQ ID NO: 4538 - protein, 814 aa, Streptococcus pyogenes
MIMYSTKMQDIFRQAQFQAARFDSHCLETWHVLLAMVAVDNSLANMILSEYDAQVAIEEYEAAAILAMGKTPKEQLSRVDFRPQSKTLTNLLAFAQAISQITRDQEVGSEHVLFAILLNPDIMASRLLEIAGYQIKDNGNGQPRLADLRKAIERHAGYSKEMIKAIHELRKPKKTKTQGTFSDMMKPPSTAGELSDFTRDLTEMARQGLLESVIGRDQEVSRMIQVLSRKTKNNPVLVGDAGVGKTALAYGLAQRIANGAIPYELKEMRVLELDMMSVVAGTRFRGDFEERMNQIIDDIEADGQIILFVDELHTIMGSGSGIDSTLDAANILKPALSRGTLHMVGATTQEEYQKHIEKDAALSRRFAKILIEEPNTEDAYQILMGLKLSYETYHNVSISNEAVKTAVKMAHRYLTSKNLPDSAIDLLDEASAAVQNMVKKSAPETLTPIDQALINGDMKKVSRLLAKEAKGQMRKPTPVTEDDILATLSKLSGIPLEKLTQADSKKYLNLEKELHKRVIGQDAAVTAISRAIRRNQSGIRTGKRPIGSFMFLGPTGVGKTELAKALAEVLFDDEAALIRFDMSEYMEKFAASRLNGAPPGYVGYDEGGELTQKVRNKPYSVLLFDEVEKAHPDIFNVLLQVLDDGILTDSRGRKVDFSNTIIIMTSNLGATALRDDKTVGFGVKDIHQDHQAMEKRILEELRKTYRPEFINRIDEKVVFHSLTQDNMRDVVKIMVQPLITTLAEKGITLKIQPLALKHLSEVGYDEHMGARPLRRTLQTEIEDKLSELILSRELTSGHTLKIGLSHGKLTFHIA

SEQ ID NO: 4539 - DNA, 639 bp, Streptococcus agalactiae
atgttgattgttttagctggaaccattggagcaggtaaaagctcccttgcagctgctctaggacaacacctagggacagatgttttctatgaggcggttgataataacccagttttagatctttactatcaagatccccaaaaatatgcttttttactacaaatattctttttaaataaacgattccaatctataaaagaagcctataaggctaacaacaatgttttggatcgttctatttttgaagatgaactattcctcactctaaattataagaatggaaatgtgactaaaacagagctagatatctataaagaacttcttgcaaatatgttggaagaattagaaggtatgcctaagaagagacctgatttgctagtctacattgatgtttcatttgataaaatgttagaacgtattgacaaacgaggacgcagctttgagcaagttgattctaacccagagttatacgactactacaaacaagtccattctgaatatccagaatggtatgaaaattacgacgtttcacctaaaattcggatcgatggtaacaaacttgatttcgtcaaaaatccagaggatcttcaacacgtccttgacactattgattccgaattgcaaaaacttgatttacta

SEQ ID NO: 4540 - protein, 213 aa, Streptococcus agalactiae
MLIVLAGTIGAGKSSLAAALGQHLGTDVFYEAVDNNPVLDLYYQDPQKYAFLLQIFFLNKRFQSIKEAYKANNNVLDRSIFEDELFLTLNYKNGNVTKTELDIYKELLANMLEELEGMPKKRPDLLVYIDVSFDKMLERIDKRGRSFEQVDSNPELYDYYKQVHSEYPEWYENYDVSPKIRIDGNKLDFVKNPEDLQHVLDTIDSELQKLDLL

SEQ ID NO: 4541 - DNA, 639 bp, Streptococcus pyogenes
atgttgattgtactagctggaacaattggggctggcaagagctcgcttgctgctgcacttggagagcatttaggaactgacgttttttacgaagctgttgataataaccccgtgctagacctctactaccaagaccctaaaaaatacgcctttttacttcaaatttattttttgaataaacgatttaagtccatcaaagaagcttatcaagccgataacaacattcttgaccgctctatttttgaagacgaactcttcttaaaacttaactacaaaaatggcaatgtcactaagacagaacttgacatctatcaggaacttctcgccaacatgttagaagaactagaaggcatgcctaaaaaacgccctgatcttctcatctacattgatgtgtcttttgacaaaatgcttgagcgcattgaaagacgtggccgaagttttgagcaggtcgacggcaatcctagtcttgagcaatattaccatcaagtccacggtgaatacccaacctggtacgaagactacgaggtctctccaaaaatgaaaattgatggcaattcccttgacttcgttcaaaacccacaagatttggcgactgtcttaaaaatgattgacaccaaactcaaagagctccatttatta

SEQ ID NO: 4542 - protein, 213 aa, Streptococcus pyogenes
MLIVLAGTIGAGKSSLAAALGEHLGTDVFYEAVDNNPVLDLYYQDPKKYAFLLQIYFLNKRFKSIKEAYQADNNILDRSIFEDELFLKLNYKNGNVTKTELDIYQELLANMLEELEGMPKKRPDLLIYIDVSFDKMLERIERRGRSFEQVDGNPSLEQYYHQVHGEYPTWYEDYEVSPKMKIDGNSLDFVQNPQDLATVLKMIDTKLKELHLL

SEQ ID NO: 4543 - DNA, 975 bp, Streptococcus agalactiae
atgactcaattaaatagttcatttatgattgggaaggttgaaattcctcatcgtaccgtactagcaccgatggcaggtattaccaattctgcttttcgtactatcgctaaagaatttggtgctggtctcgttgttatggaaatgatttctgagaaagggttactttataacaacgaaaagaccttacatatgctccatatcgatgaaaatgaacatcctatgtcaattcaactatttggtggcgatgcagaaggcttaaaacgtgcagctgactttatccaaagtaatacgaaagcagatatcgtagacatcaatatgggatgtccagttaacaaagttgttaaaaacgaagctggagctaaatggttacgtgaccctgaaaaaatttatcatattgttaaagaggtaacgtctgtacttgacattccattaacagtaaaaatgcgtacaggatggtctgactcatctaatgctatagaaaatgcactcgctgccgaatctgctggtgtatctgcacttgctatgcacggtcgaacgcgtgaacaaatgtatactggcacgtgtgaccatgaaacacttggcaaggtcgctaaagctgttactagtattccttttattgctaatggtgacattcgtactgttcacgatgccaaatttatgattgaagagattggagctgacgctataatggttggacgtggtgctcgtagcaatccttacatctttacacaaattaatcatttctttgaaacaggcgaaatccttcctgacctaccatttgagaagatgttagatgttgccgaggatcatctcactcgactagttaatttaaaaggtgaaactattgccgttcgtgaatttcgagggttagcacctcattatctgcgtggaaaatcaggcgcagcaaaaattagaggagctgtttcacgtgcagaaacactagcagaagttcaagaactttttgcaggtttacgc

SEQ ID NO: 4544 - protein, 325 aa, Streptococcus agalactiae
MTQLNSSFMIGKVEIPHRTVLAPMAGITNSAFRTIAKEFGAGLVVMEMISEKGLLYNNEKTLHMLHIDENEHPMSIQLFGGDAEGLKRAADFIQSNTKADIVDINMGCPVNKVVKNEAGAKWLRDPEKIYHIVKEVTSVLDIPLTVKMRTGWSDSSNAIENALAAESAGVSALAMHGRTREQMYTGTCDHETLGKVAKAVTSIPFIANGDIRTVHDAKFMIEEIGADAIMVGRGARSNPYIFTQINHFFETGEILPDLPFEKMLDVAEDHLTRLVNLKGETIAVREFRGLAPHYLRGKSGAAKIRGAVSRAETLAEVQELFAGLR

SEQ ID NO: 4545 - DNA, 1047 bp, Streptococcus pyogenes
gtgctgagattgtttgccaattttgtggtaccaagtaccaatttaatgaaagtgatttggaggccattatcagtgataaagcttaattcttcctttaggattggtgatgtggaaatccctcaccgcactgtccttgctcccatggctggcgtgaccaattctgcctttcgtaccatcgccaaagaatttggtgctggtttggtggttatggaaatgatttccgaaaaagggcttctttacaacaatgaaaagacccttcacatgctccatattgatgaaaatgagcaccctatgtccattcaattatttggtggtgacgcagaagggttgaaacgtgcagctgatttcattcaaaccaataccaaggccgatattgttgatattaatatgggctgccctgttaataaagttgtcaaaaacgaggctggtgccaagtggctccgtgaccctgataagatttaccacattgtcaaggaagtcacgtctgttttagatattccactgactgtcaaaatgcgtacaggttgggcggatagttcacttgctgttgaaaatgcccttgccgctgagtcggcaggtgtatctgctcttgccatgcacggtcgtacccgtgaacaaatgtatacaggaacctgcgaccatgagacattagcccgagtttctaaggctatcactaagattccctttattggaaatggggacgtgcgttcggtgcaagacgccaaatttatgattgaagaaatcggtgtagatgccgtgatgattggccgcgcagccatgaacaatccttatctttttacccaaatcaatcatttctttgaaactggtcaagaattgccagatcttccctttgccaaaaaattagacatcgccaaagaccaccttaaacgcctgattaacctcaaaggtgaaaccattgctgttcgggaatttcggggcttagcaccacactatcttcgcggaacagcaggtgctgccaaagttcgtggtgctgtttcacgcgctgagactctagctgaggttgaagccatcttcgaaacagtacgc

SEQ ID NO: 4546 - protein, 349 aa, Streptococcus pyogenes
VLRLFANFVVPSTNLMKVIWRPLSVIKLNSSFRIGDVEIPHRTVLAPMAGVTNSAFRTIAKEFGAGLVVMEMISEKGLLYNNEKTLHMLHIDENEHPMSIQLFGGDAEGLKRAADFIQTNTKADIVDINMGCPVNKVVKNEAGAKWLRDPDKIYHIVKEVTSVLDIPLTVKMRTGWADSSLAVENALAAESAGVSALAMHGRTREQMYTGTCDHETLARVSKAITKIPFIGNGDVRSVQDAKFMIEEIGVDAVMIGRAAMNNPYLFTQINHFFETGQELPDLPFAKKLDIAKDHLKRLINLKGETIAVREFRGLAPHYLRGTAGAAKVRGAVSRAETLAEVEAIFETVR

SEQ ID NO: 4547 - DNA, 873 bp, Streptococcus agalactiae
atggataaaattataaaatcaatttcaacttccggttctttccgggcttatgtccttgattgtacagaaactgtaagaacagctcaagaaaaacatcagacactttcaagttctactgtagctcttgggagaacattaattgcaaatcaaattttagcagcaaatcaaaaaggaaatagtaaagtaactgtcaaggttattggagatagctcttttggtcatattatttctgtagctgatactaaaggaaatgttaaaggttacatccaaaatacgggtgttgatatcaagaaaacagctactggagaggtcttagttggacctttcatgggtaatggacactttgtcgttattaccgattacgcaactgggcaaccttacacttcaacaactccactaattacaggagaaattggagaagattttgcttattatttaaccgaaagtgagcaaacaccttctgccgtcggtttaaatgtcctcttagatgacgaggataaggttaaagttgcaggtggattcatgcttcaggtgctcccaggtgcttctgacgaagaaatttctcgctatgaaaaacgcattcaggagatgccttctatttcaagtctgctagagtctgaaaatcatatagaatctctcctttcagctatttacggagaagacgactacaagcgcttatcggaagactctttagccttctactgtgactgttcaaaagaacgttttgaagccgctctattgactttaggaactaaagaattgcaagccatgaaggatgaagataaaggtgttgaaattacttgtcaattttgcaaccagacttactatttcacagaagaagatttggagaagataattaatgactcaattaaa

SEQ ID NO: 4548 - protein, 291 aa, Streptococcus agalactiae
MDKIIKSISTSGSFRAYVLDCTETVRTAQEKHQTLSSSTVALGRTLIANQILAANQKGNSKVTVKVIGDSSFGHIISVADTKGNVKGYIQNTGVDIKKTATGEVLVGPFMGNGHFVVITDYATGQPYTSTTPLITGEIGEDFAYYLTESEQTPSAVGLNVLLDDEDKVKVAGGFMLQVLPGASDEEISRYEKRIQEMPSISSLLESENHIESLLSAIYGEDDYKRLSEDSLAFYCDCSKERFEAALLTLGTKELQAMKDEDKGVEITCQFCNQTYYFTEEDLEKIINDSIK

SEQ ID NO: 4549 - DNA, 1254 bp, Streptococcus agalactiae
atgagcgatacctttaattttgatattgaccaaattgcagacaatgctatcactaaaacagataaaacaacagaaattatttccaaccagacaacaagccaaactgggcaaattgccttttttgaaaaactaacaccagcacaaaagtctgctatctctgaaaaaacaccagctttggtagatacttttgtcggcgatcaaaatgcgctccttgattttggacaatccgcagtagaaggcgttaataccactgttaatcatatcttgtctgagcagaaaaaaattcaaattcctcaagttgatgatttactaaaaaatgctaatcgcgaactaaatggatttattgccaaatataaagatgctactccggcagaattagagaaaaaaccaaacttgattcaaaaattattcaaacaaagcaagacctcgctacaggaattttattttgactcacaaaacatcgagcaaaaaatggatatgatggcagcgaatgttgtcaaacaagaagatactttggcaagaaatatcgtctctgctgaaatgctcattgaagataatactaaatctattgaaaatttggttggagttattgcttttattgaatcgagtcaagccgaggctgctaatcgtgcaagccacttacaacaagaaattctagcattagatagccaaacgtccgagtatcaaattaaaagtaaccaattagctcgaatgactgaagttatcaataccctcgaacagcaacatcctgaatatgtcagccgtctctacgttgcatgggcaacaacaccacagatgcgaaacttggtcaaagtatcgtcagatatgcgtcagaaacttggcatgttacgtcgaaataccattccaacaatgaaactctcaatcgctcagttaggcatgatgcaacaatctgtcaaatccggtgtcactgctgatgctattgtcaacgctaataatgcagcattgcagatgctggctgaaactagtaaagaagcgattccgatgttagagaagaccgcacaaagccccactgtttctattaaatctgtcactgcattagctgaaagcttagtggctcaaaataatggtattatcgctgccatagacaaaggacgtaaggaacgtgcccaattggaatctgctgttattaaatcggctgaaacaatcaatgattctgtcaaaattcgtgataaaaaaatagttgaagccttactcaacgaaggtaaatctacccaagaaaaagttgatgagtct

SEQ ID NO: 4550 - protein, 418 aa, Streptococcus agalactiae
MSDTFNFDIDQIADNAITKTDKTTEIISNQTTSQTGQIAFFEKLTPAQKSAISEKTPALVDTFVGDQNALLDFGQSAVEGVNTTVNHILSEQKKIQIPQVDDLLKNANRELNGFIAKYKDATPAELEKKPNLIQKLFKQSKTSLQEFYFDSQNIEQKMDMMAANVVKQEDTLARNIVSAEMLIEDNTKSIENLVGVIAFIESSQAEAANRASHLQQEILALDSQTSEYQIKSNQLARMTEVINTLEQQHPEYVSRLYVAWATTPQMRNLVKVSSDMRQKLGMLRRNTIPTMKLSIAQLGMMQQSVKSGVTADAIVNANNAALQMLAETSKEAIPMLEKTAQSPTVSIKSVTALAESLVAQNNGIIAAIDKGRKERAQLESAVIKSAETINDSVKIRDKKIVEALLNEGKSTQEKVDES

SEQ ID NO: 4551 - DNA, 1260 bp, Streptococcus pyogenes
atggcagattttaattttgacattgaccaaattgctgacaatgctgttatcaaaaccgataaaaccaccgatattatctcagacttaccaactgacacaaatggccaaatctctttttttgagaaactaagtgctgaccagcagacagctattactgccaaagccccggcattggtagatacctttttggcagaccaaaatgcgctacttgattttggtcagtctgctgttgaaggggtcaatgcaacggttaatcatatcttggcagagcaaaaaaaattacagattccacaagtggatgatcttttaaaatcaaccaatcgtgaactcaatggttttatcgctaaatacaaggatgccacacctgtggaccttgataaaaagccaaactttcttcaaaaactctttaaacaaagccgtgataccctgcaagagttttattttgattctcaaaacattgagcaaaaaatggatagtatggctgcagcggttgtcaagcaagaagataccttagctcgcaatattgtctcagcagaattgttaattgaagataatactaagtccattgaacatttggtaggcgtcattgcttttatcgaagctagtcaaaaagaagctagtcagcgcgctgcggctttacaaaaagacctaaaaaccaaagacagtgctacaccagactatcaaataaaagctgatcttttggcaagaactaccgaagtcatcaacactctcgaacaacaacacaccgaatacttgagtcgcctctatgttgcttgggcgacaactccgcaaatgcgtaatctagtcaaggtctcttctgacatgcgtcaaaaactaggcatgttacgccgcaataccattccaacgatgaaactatctattgctcagttaggcatgatgcaacaatcggttaaatctggaatgactgctgatgccattattaatgctaataatgctgcccttcagatgctagcagaaacaagtaaagaagccatcccagcattggaacaatcagcacaaaaccctactttgtctatgaaatctgtgacaagtctggcagaaagtttagtagcacaaaataatgggatcattgcggcgattgatcatggacgcaaagaacgagcacaactagaaagtgctattatcaggtctgccgaaaccattaacgattctgtcaaactacgtgaccaaaatattgtgcaagcacttcttagtgaaggcaaggaaactcaaaaaacaattgataaaataactcgcgca

SEQ ID NO: 4552 - protein, 420 aa, Streptococcus pyogenes
MADFNFDIDQIADNAVIKTDKTTDIISDLPTDTNGQISFFEKLSADQQTAITAKAPALVDTFLADQNALLDFGQSAVEGVNATVNHILAEQKKLQIPQVDDLLKSTNRELNGFIAKYKDATPVDLDKKPNFLQKLFKQSRDTLQEFYFDSQNIEQKMDSMAAAVVKQEDTLARNIVSAELLIEDNTKSIEHLVGVIAFIEASQKEASQRAAALQKDLKTKDSATPDYQIKADLLARTTEVINTLEQQHTEYLSRLYVAWATTPQMRNLVKVSSDMRQKLGMLRRNTIPTMKLSIAQLGMMQQSVKSGMTADAIINANNAALQMLAETSKEAIPALEQSAQNPTLSMKSVTSLAESLVAQNNGIIAAIDHGRKERAQLESAIIRSAETINDSVKLRDQNIVQALLSEGKETQKTIDKITRA

SEQ ID NO: 4553 - DNA, 816 bp, Streptococcus agalactiae
atggttaaaaaacgctattccaaaaattctcataatctaataacattacttggtattgttgttcttgcttccctgatttcagacttttggagtgaggtgattgctactctgttaattattggtggtggttattgtgcctattacgtttatgataaaaagcgtcttaaacgttttacatcaaaccaacgtattgaagctttaaaatccgatattaaagagactgaccaagacattagacacttggaaattttaaaaaaagacaatcgttctaaggaatatatcaaattagcacatcaaatattacctcaattggacctaattcgtaatgaagcaaaccaactacaaaaagccattgagcctaatatctataaacgtatcaccaaaaaagcaaatacatttagtaatgagattaacgaacaactaataaagctacatgcctctccagaactagaacctatttctgatcaggaagatgaaatgatacgcattgctccggaattaaaaccgttctatcacaatattcaagatgaccactttgctatcttaaaaaagattgaagaggcagataacaaagctgaattagcagcaattcatcaagccaatatgaaacgttttacagatgttctggctggctacatcagaatcaaacaatctcctaaaaattttaacaatgctaaggaacgcctagaacaagcattacaagcaattaaaaaatttaatttagatttagatgaaacgctgcgccaattgaatgaaagtgatatgaaagattttgacgttagcctaagaatgatgcaaggcgaaaggaacagtaaa

SEQ ID NO: 4554 - protein, 272 aa, Streptococcus agalactiae
MVKKRYSKNSHNLITLLGIVVLASLISDFWSEVIATLLIIGGGYCAYYVYDKKRLKRFTSNQRIEALKSDIKETDQDIRHLEILKKDNRSKEYIKLAHQILPQLDLIRNEANQLQKAIEPNIYKRITKKANTFSNEINEQLIKLHASPELEPISDQEDEMIRIAPELKPFYHNIQDDHFAILKKIEEADNKAELAAIHQANMKRFTDVLAGYIRIKQSPKNFNNAKERLEQALQAIKKFNLDLDETLRQLNESDMKDFDVSLRMMQGERNSK

SEQ ID NO: 4555 - DNA, 876 bp, Streptococcus pyogenes
atgattagaaagtatgaccgcacgagcacaaaaaagaaatcactaaactggatttggctaatcattgctttttttatgatttcaagctttataggtggctcttcttttactgagtcacttctagacattttgcctgccatagccattggtggtacaggttatgctatttttcgtgttagatctcatcaaaagcggctagcaaaggccaagattgccaaacaattagaagatctaaaagcaaaaattcagctagctgatcgtaaagttcggctgttagacacttatctggcagaccatgatgacttccaatataacgtactagctcagcaattattaccacaacttagtgacatcaaagcaaaagctattacgttaaaagaccagttagatccccaaatttatcgtcgtatcaccaaaaaagccaatgacgttgaaagtgatattacccttcaactcgaaacactgcagattgccacaactcttaaccctcagcctttgaaaaccccatctcctaatcttattaacaaagcacctgagctcaaaccgtattatgataatattcagacagatcatcaagctatccttgctaaaatccaaggagccgacaatcaagaagaattgcttgcgctgcatgatgctaacatgaggaggtttgaggatatcttaacaggctacttaaaaatcaaagaagagcctaaaaattactataacgctgctgctcgtttagaacaagccaaacaagctatccaacaatttgatgaagatcttgacgaaacccttcgtcgactcaatgaaagtgatcttaaagattttgatattagccttcgaatcatgcaaggtgctactcaaagacgaacaacgcatcaccaaaaagac

SEQ ID NO: 4556 - protein, 292 aa, Streptococcus pyogenes
MIRKYDRTSTKKKSLNWIWLIIAFFMISSFIGGSSFTESLLDILPAIAIGGTGYAIFRVRSHQKRLAKAKIAKQLEDLKAKIQLADRKVRLLDTYLADHDDFQYNVLAQQLLPQLSDIKAKAITLKDQLDPQIYRRITKKANDVESDITLQLETLQIATTLNPQPLKTPSPNLINKAPELKPYYDNIQTDHQAILAKIQGADNQEELLALHDANMRRFEDILTGYLKIKEEPKNYYNAAARLEQAKQAIQQFDEDLDETLRRLNESDLKDFDISLRIMQGATQRRTTHHQKD

SEQ ID NO: 4557 - DNA, 2250 bp, Streptococcus agalactiae
gtgattatcgatcgactgttacaaagaagccactctcatctaccgattctacaagctacatttggcttagagagagaaagccttcgtattcaccaacccactcaaagggttgctcaaacaccccatcccaaaacattagggagtcgtaactatcatccttatatccaaacggattatagtgaacctcaattagaactcattacacctattgcaaaggatagccaagaagccattcgatttttgaaagctataagtgatgttgctggacgctctatcaaccacgatgaatacttatggccgctttctatgccacccaaagtgagggaagaagacatacagattgcccaattagaggatgcttttgaatatgattatcgcaaatatttggagaagacttatggaaaactaatacaatccatctctggaattcactataatctcggtttaggtcaagagttattaacttctctctttgaattgagtcaagcagataatgctattgattttcagaaccagctttacatgaaattgtctcaaaattttttacgttaccgttggttactaacttatctatacggagcgagcccagtagctgaagaagactttttagatcagaaactgaataaccctgtccggtcacttagaaatagtcacttaggttatgtgaatcataaagatattcgtatttcttatactagcttgaaggattatgtcaacgatctagaaaatgctgtaaaaagtgggcaattgattgctgagaaagaattttattcacctgttcgtctccgtggtagtaaggcctgtcgtaattatttagaaaaaggaattacatatttagagtttcgcacttttgatctcaacccatttagcccaatcggtataacgcaggaaactgttgatactgttcaccttttcttattggcgcttttgtggatagattctagtagtcatattgaccaagatatcaaggaagccaatagattaaatgaccttatagcacttagtcatccattagaaaaattacctaatcaagcaccagtttctgacttagtggatgctatgcaatctgttatccaacattttaacttatcaccttactatcaagacctattggaatctgtaaaaaggcaaattcagtcacctgaattaacggtagctggtcaacttttagaaatgattgaaggactttccttagaaacatttggacaaagacaaggacaaatttatcacgattatgcttgggaagctccctacgccttaaagggatatgaaacgatggaactttctacccaattgctactatttgacgttatccaaaaaggagtcaacttcgaagtgctggatgaacaagatcaattcctaaaattatggcacaatagtcatattgagtacgttaaaaatggtaatatgacctcaaaagataactatattgtaccgctcgctatggctaacaaagttgttacaaaaaaaatcctagatgaaaagcatttcccaactccttttggagatgaatttactgaccgtaaagaggcacttaactatttttcacaaatccaagataaaccaatcgtcgttaagccaaaatctacaaactttggtttaggcatttctatttttaaaacatcagctaacttagcttcttatgaaaaagcaattgacatcgcttttaccgaagatagtgctattcttgtggaagaatatattgagggtaccgaataccgtttcttcgtccttgagggggactgtattgctgtattgcttagggtagcagctaatgtcgttggagatggtattcatactattagtcagctagttaaacttaaaaaccaaaaccctctcagaggctatgatcatcgctctcctctagaggttattgagctcggagaagtagaacagttaatgttggaacaacaaggatacactgttaacagtatccctccagaaggaacaaaaatagaacttcgccgtaattctaatatttccactggcggtgactctatagatgtaacaaatacaatggatcctacatataaacaactagcagctgagatggcagaggctatgggggcttgggtttgtggagttgatttaattattcctaatgccactcaagcatactcaaaagataagaaaaatgctacttgcattgaactaaactttaacccattgatgtatatgcacacctactgtcaagaggggcctggtcaatctattacacctcgaattttggctaaactgttcccagaatta

SEQ ID NO: 4558 - protein, 750 aa, Streptococcus agalactiae
MIIDRLLQRSHSHLPILQATFGLERESLRIHQPTQRVAQTPHPKTLGSRNYHPYIQTDYSEPQLELITPIAKDSQEAIRFLKAISDVAGRSINHDEYLWPLSMPPKVREEDIQIAQLEDAFEYDYRKYLEKTYGKLIQSISGIHYNLGLGQELLTSLFELSQADNAIDFQNQLYMKLSQNFLRYRWLLTYLYGASPVAEEDFLDQKLNNPVRSLRNSHLGYVNHKDIRISYTSLKDYVNDLENAVKSGQLIAEKEFYSPVRLRGSKACRNYLEKGITYLEFRTFDLNPFSPIGITQETVDTVHLFLLALLWIDSSSHIDQDIKEANRLNDLIALSHPLEKLPNQAPVSDLVDAMQSVIQHFNLSPYYQDLLESVKRQIQSPELTVAGQLLEMIEGLSLETFGQRQGQIYHDYAWEAPYALKGYETMELSTQLLLFDVIQKGVNFEVLDEQDQFLKLWHNSHIEYVKNGNMTSKDNYIVPLAMANKVVTKKILDEKHFPTPFGDEFTDRKEALNYFSQIQDKPIVVKPKSTNFGLGISIFKTSANLASYEKAIDIAFTEDSAILVEEYIEGTEYRFFVLEGDCIAVLLRVAANVVGDGIHTISQLVKLKNQNPLRGYDHRSPLEVIELGEVEQLMLEQQGYTVNSIPPEGTKIELRRNSNISTGGDSIDVTNTMDPTYKQLAAEMAEAMGAWVCGVDLIIPNATQAYSKDKKNATCIELNFNPLMYMHTYCQEGPGQSITPRILAKLFPEL

SEQ ID NO: 4559 - DNA, 1044 bp, Streptococcus pyogenes
atgtccaaacaaacgttagttctattatacggaggccgctcagcagaacgtgaagtctcagtgctttcagcagagagtgtgatgcgagcagtcaactatgataagttcttagtaaaaacttattttattactcagatgggccaatttatcaaaactcagcaattttcagaaaagccatcggaatcagaacgcttgatgacaaatgagacgatagagctaactcaaaaaataaaaccaagtgatatctatgaagaaggtgcagttgtatttcctgtattacatggacctatgggagaagatggctctatccaaggtttcttagaagtgcttagaatgccatatatagggactaatgtcatgtcttctagcatagctatggataaaattactactaaacgtgtcttagaatcaattggaattccacaagttgcctatactgtttatattgacggacaagatttggaggcttgtttagttgaaactttagcaagacttacttttcctatcttcgtaaaaccagctaatatgggttcttctgtggggatttccaaagcccaaacaaaagtagaattaagaaaagcgattcagttagccctgacctatgacagtcgtgtcttgattgaacaaggcgtggttgcaagagaaattgaagttggtctccttggaaatgataaggttaaatcaactctaccaggagaagtaatcaaggacgttgatttttacgactaccaggcaaaatatgttgacaataagattacgatggccattccagcagatgtagaccagagtattgtgacagaaatgcgttcttatgctgaagtagcctttaaagccttaggtggttgtgggttgtcccgttgtgactttttcttgacccaagatggacaggtttaccttaatgaattaaacaccatgccaggctttacccaatggtctatgtatccactcttatgggaaaatatgggattggcttatccagatttgattgaagagctggtgacactggcacaagaaatgtttgaccagcgtgagagccacctgatt

SEQ ID NO: 4560 - protein, 348 aa, Streptococcus pyogenes
MSKQTLVLLYGGRSAEREVSVLSAESVMRAVNYDKFLVKTYFITQMGQFIKTQQFSEKPSESERLMTNETIELTQKIKPSDIYEEGAVVFPVLHGPMGEDGSIQGFLEVLRMPYIGTNVMSSSIAMDKITTKRVLESIGIPQVAYTVYIDGQDLEACLVETLARLTFPIFVKPANMGSSVGISKAQTKVELRKAIQLALTYDSRVLIEQGVVAREIEVGLLGNDKVKSTLPGEVIKDVDFYDYQAKYVDNKITMAIPADVDQSIVTEMRSYAEVAFKALGGCGLSRCDFFLTQDGQVYLNELNTMPGFTQWSMYPLLWENMGLAYPDLIEELVTLAQEMFDQRESHLI

SEQ ID NO: 4561 - DNA, 672 bp, Streptococcus agalactiae
atggataaagaaaaattagactattggaaaacgataataacgtttctccataatgttttaggtgataattacgaaattgttttgcatgtagtagatgaaaatgatatctatattggtgagttggttaatagtcacattagtggacgaaccataagttcacctctaacgactttcgcccttgatttaatcaagaataaagtttataaggaaaaagattttgttactaactataaggcgattgtcagccctctcaataaagaagttcgtggatctactttcttcatcaagaatgctcaaaatgaacttgaagggatgttatgtatcaaccttgatatttctgcataccaaaatattgctttggatattctagacttagttaatttaaatgttaacaaaatactacctaagtcccctcaaaaaatttctctccctcaacaggaggaacctgtagaagttctatcaggcaatattcaggatattattagtgagattgttgatcctagtcttttaaatcagaatattcatttaagtcaagaagttaaggtagaaattgtttctaaacttcacgaaaaaggtgtattccaattaaaaggtgccgtttcaaaggtcgctgaagttctcaacatctccgaaccaagcgtctatcgttatcttaaaaaaattgaaactcat

SEQ ID NO: 4562 - protein, 224 aa, Streptococcus agalactiae
MDKEKLDYWKTIITFLHNVLGDNYEIVLHVVDENDIYIGELVNSHISGRTISSPLTTFALDLIKNKVYKEKDFVTNYKAIVSPLNKEVRGSTFFIKNAQNELEGMLCINLDISAYQNIALDILDLVNLNVNKILPKSPQKISLPQQEEPVEVLSGNIQDIISEIVDPSLLNQNIHLSQEVKVEIVSKLHEKGVFQLKGAVSKVAEVLNISEPSVYRYLKKIETH

SEQ ID NO: 4563 - DNA, 678 bp, Streptococcus pyogenes
atggataaagaaacgctaaactactggaaaacggttatcacatttcttcacgatgtcttaggtgataactatgaaattattttacatgtgattgataaaaatgatatctatattggagaactcgttaatagtcatatcagtggacggtctaaacagtctcctctcaccacctttgctcttgatttgattactaataaagtctataaggaaaaagattttgtgaccaattacaaagcaatcgttagtcctcagcacaaagaagttcggggatctactttttttattaaagataaaaagggtaatctcgagggaatgctatgtattaacttagatatttcagcctatcaaggagtagctagggacctcttaaaacttgtcaatctcaatttagaacatttcatcccaactgctaaagagcctaaaacagtcacaccccagccagaagaagctgttgaaattttaacctctaacatccaagatattatcggtcaaattattgatccctcgttactgagacacaatgtacatcttagccaagatgtcaaaatagacattgttgccaagctttatgaaaaaggggtctttcagctaaaaggagccgtctcaaaagtcgctgatattctatgtatttccgaaccaagtgtttaccgctaccttaaaaaaattgaagccgatcaa

SEQ ID NO: 4564 - protein, 226 aa, Streptococcus pyogenes
MDKETLNYWKTVITFLHDVLGDNYEIILHVIDKNDIYIGELVNSHISGRSKQSPLTTFALDLITNKVYKEKDFVTNYKAIVSPQHKEVRGSTFFIKDKKGNLEGMLCINLDISAYQGVARDLLKLVNLNLEHFIPTAKEPKTVTPQPEEAVEILTSNIQDIIGQIIDPSLLRHNVHLSQDVKIDIVAKLYEKGVFQLKGAVSKVADILCISEPSVYRYLKKIEADQ

SEQ ID NO: 4565 - DNA, 1020 bp, Streptococcus agalactiae
atgaatatcattattgggaccagtcttttaatacttgtattagcgattttcactttatttaattataaagcaccctacggaacaaaagcaatgggagcattggcatctgcggcttgtgcatccttccttgtagaagcttttcaagattctttctttggtaaagttttgggatttcaatttttaagtgaagtgggtggtgctaatggttcactttctggtgtagctgcagctatattggttgctattgctattggtgtaaccccaggatacgcagttttaattggtttatctgtttctggaacaggtattattcctggtttccttgcaggatatttagtgggatttcttgttaagtggatggaaagaaatattcctggtggtttagatcttatttcaattattattattggtgcaccattaacacgtcttgtggccaaactgttgacgccgcttattaatagcactttgctcaccattggagatatcttaacatcaggtgctcatagcaaccctattttaatggggattatacttggcgggacaattgtagtagtggcgacagcaccactttcttctatggcattgacagctatgctaggattaaccggaatgcctatggctataggagccttgtctgtctttggttcgtcatttatgaatggtgtacttttccataaattaaaacttggaagtcgtaaagataatatagcttttgctgttgagcctctaactcaagctgacgtgacttcagctaaccctattccaatctatgtcactaattttgttggtggtgcagcttgtggtattttaattgccttgatgaaattagttaatgatactcctggaacagcgacaccaattgcaggatttgctgtcatgtttgcctataacccaatgataaaagtactaataaccgctctaggttgtattatcctatctttactagcaggctattttggaggcattgtttttaaagattataaattagttacaaaagaagagctacaggctagagataac

SEQ ID NO: 4566 - protein, 340 aa, Streptococcus agalactiae
MNIIIGTSLLILVLAIFTLFNYKAPYGTKAMGALASAACASFLVEAFQDSFFGKVLGFQFLSEVGGANGSLSGVAAAILVAIAIGVTPGYAVLIGLSVSGTGIIPGFLAGYLVGFLVKWMERNIPGGLDLISIIIIGAPLTRLVAKLLTPLINSTLLTIGDILTSGAHSNPILMGIILGGTIVVVATAPLSSMALTAMLGLTGMPMAIGALSVFGSSFMNGVLFHKLKLGSRKDNIAFAVEPLTQADVTSANPIPIYVTNFVGGAACGILIALMKLVNDTPGTATPIAGFAVMFAYNPMIKVLITALGCIILSLLAGYFGGIVFKDYKLVTKEELQARDN

SEQ ID NO: 4567 - DNA, 1017 bp, Streptococcus pyogenes
atggatattattattggaacaagtcttttgattcttgttttagctatttttagcttgtttaactataaggctcctcatggtgccaaggcaatgggagctttggcttcggcagcttgtgcctcttttttagttgaagcctttcaagattctttttttggtaaggttttaggctttcagtttctaagtgaagtaggcggagcaaatggctcattatcaggggtagctgctgctatcttggttgccattgcaattggtgtgtctccaggttatgccgttttgattggtttgtcagtttcaggaacgggtattatcccaggttttgtggctgggtatgtggtatcttttttaatcaagtggatggaaaaaaatattcctggtgggcttgatttaatctcgattattattgtcggtgcaccattaactcgtttcttggcgcagttaattacgccagtgatcaatagtactttattgactattggagacatcctgacctcaagtgctaatagcaaccctattatcatgggaatgatactaggcggtacgattgttgttgtagcaacagctccgctgtcatcaatggctttgacagccatgcttggtctaacaggtattccgatggctataggtgccttatctgtctttggctcttcttttatgaatggtgttcttttttaccgattaaaattgggtgaaagaaaagacaatattgcttttgctattgaaccactaacgcaggcagatgtgacgtcagccaatcccattccgatttatgtgactaattttgttggtggtgctgcatgtggtgttttgatcgccctaatgaaattggttaatgatacgccagggacagctactccgattgccggttttgcggtgatgtttgcctataatcctgtcgctaaagtgttgataacagcccttggatgtattattatcagcttaattgtgggttatattggaggttctgtctttaaaaattaccgtttagtaacaaaacaagaattacaagcgagaaac

SEQ ID NO: 4568 - protein, 339 aa, Streptococcus pyogenes
MDIIIGTSLLILVLAIFSLFNYKAPHGAKAMGALASAACASFLVEAFQDSFFGKVLGFQFLSEVGGANGSLSGVAAAILVAIAIGVSPGYAVLIGLSVSGTGIIPGFVAGYVVSFLIKWMEKNIPGGLDLISIIIVGAPLTRFLAQLITPVINSTLLTIGDILTSSANSNPIIMGMILGGTIVVVATAPLSSMALTAMLGLTGIPMAIGALSVFGSSFMNGVLFYRLKLGERKDNIAFAIEPLTQADVTSANPIPIYVTNFVGGAACGVLIALMKLVNDTPGTATPIAGFAVMFAYNPVAKVLITALGCIIISLIVGYIGGSVFKNYRLVTKQELQARN

SEQ ID NO: 4569 - DNA, 1290 bp, Streptococcus agalactiae
atgacttcagttgttgtagtaggtacccaatggggtgacgaaggtaaaggtaaaattacagattttttatctgctgacgcagaagtaattgcacgttatcaaggtggtgataacgctgggcatactatcgttattgataacaaaaaatttaaacttcatttaattccttcaggaattttcttcaaagaaaaaatttctgtcattggtaatggtgttgtcgttaatccgaaatcattagttaaagagttagcttatcttcacggagaaggtgtaacaacggataaccttcgtatttcagaccgtgcgcatgttatcttgccataccacatcaagcttgaccaactacaagaagatgctaaaggtgataataaaattggaacaaccatcaaaggaattgggccagcttacatggacaaggctgcgcgtgtcggtatccgtattgctgaccttcttgatagagaagtttttgctgagcgtttgaaaattaatttagctgagaaaaatcgtttatttgaaaaaatgtatgacagtacacctcttgaatttgatgatattttcgaagaatattatgaatatggtcaacaaattaagcaatatgtgactgatacatccgttatcttaaatgatgctcttgatgccggtaaacgtgttctttttgaaggagcacaaggagttatgctcgacattgatcaaggaacatacccatttgtaacatcttccaatccagtagcaggtggtgtcacaattggttcgggagttggaccaagtaaaattaataaagtagtaggtgtatgtaaagcttacactagccgtgtcggtgatggaccattcccaacagaactttttgatgaggttggtgaccgtattcgtgagattggtaaagagtatggtacaacgactggtcgtcctcgtcgcgttggatggtttgattctgttgttatgcgtcacagccgtcgagtatcaggtattactaatctctctctgaattcaattgatgttctttcagggcttgatacggtgaaaatttgtgtggcttatgaccttgatgggaaacgtattgactattatccagcaagccttgaacagctaaaacgttgtaaaccaatctatgaagaattaccgggctggtctgaagatattacagcttgccgtagcttagatgatcttccagaaaatgcacgtaattacgttcgccgtgttggcgaattggttggtgttcgtatttctactttctcagtagggcctggtcgtgaacaaacaaacattcttgagtctgtttggtcaaatatt

SEQ ID NO: 4570 - protein, 430 aa, Streptococcus agalactiae
MTSVVVVGTQWGDEGKGKITDFLSADAEVIARYQGGDNAGHTIVIDNKKFKLHLIPSGIFFKEKISVIGNGVVVNPKSLVKELAYLHGEGVTTDNLRISDRAHVILPYHIKLDQLQEDAKGDNKIGTTIKGIGPAYMDKAARVGIRIADLLDREVFAERLKINLAEKNRLFEKMYDSTPLEFDDIFEEYYEYGQQIKQYVTDTSVILNDALDAGKRVLFEGAQGVMLDIDQGTYPFVTSSNPVAGGVTIGSGVGPSKINKVVGVCKAYTSRVGDGPFPTELFDEVGDRIREIGKEYGTTTGRPRRVGWFDSVVMRHSRRVSGITNLSLNSIDVLSGLDTVKICVAYDLDGKRIDYYPASLEQLKRCKPIYEELPGWSEDITACRSLDDLPENARNYVRRVGELVGVRISTFSVGPGREQTNILESVWSNI

SEQ ID NO: 4571 - DNA, 1290 bp, Streptococcus pyogenes
atgacatctgtagttgttgttggtacccagtggggtgacgaaggtaaaggtaaaatcactgatttcttgtcagcggatgcagaagtaattgcacgctatcaaggtggtgataatgctggtcatacgatcgtgattgatggtaagaagtttaaacttcacttgatcccatcaggaattttcttcccgcaaaaaatttccgttattggtaatggcgttgtggtcaaccccaaatctttggtcaaagagttggcgtacctgcatgatgaaggagtgacgacagataaccttcgcatttcagaccgagctcatgtcattttaccttatcatatccagctggatcaactgcaagaagatgcaaaaggtgacaataaaatcggaacaactattaaagggattggtccagcttatatggataaagctgctcgagttggtatccgtatcgcagatttactggataaggatatctttgcagagcgcctacgcattaatttagctgagaaaaaccgtttatttgaaaaaatgtatgacagtacacctcttgattttgatgctatttttgaagaatactatgcttacggtcaagaaatcaagcaatatgtgacagatacttctgtaattttaaatgatgcacttgatgccggtaaacgtgttctttttgaaggtgcacaaggggttatgcttgatattgaccaaggaacgtacccatttgtaacgtcttcaaacccagttgctggtggtgtaaccattggttctggtgttggcccaaataaaatcaacaaagtagttggtgtctgtaaagcctacacaagccgtgtcggtgatgggccattccctacagaactctttgatgaagtgggtgagcgcattcgtgaagtgggtcatgagtacgggacaacgaccggccgtccacgtcgtgtcggttggtttgattcggttgtcatgcgccacagtcgtcgtgtatcaggtattactaacctctctctgaattcaattgatgttctttcagggcttgatacggttaagatttgtgtggcttatgaccttgatgggaaacgtattgactattacccagcaaaccttgaacaactcaaacgttgcaaaccaatctatgaagaattaccaggctggcaagaggacatcacaggtgttcgtagccttgatgagcttcctgaaaatgcccgcaactacgttcgtcgtgttggagaattggttggcgttcgcatttcaaccttctcagttggtccagggcgtgaacagaccaatattcttgagtcagtctgggcatctatc

SEQ ID NO: 4572 - protein, 430 aa, Streptococcus pyogenes
MTSVVVVGTQWGDEGKGKITDFLSADAEVIARYQGGDNAGHTIVIDGKKFKLHLIPSGIFFPQKISVIGNGVVVNPKSLVKELAYLHDEGVTTDNLRISDRAHVILPYHIQLDQLQEDAKGDNKIGTTIKGIGPAYMDKAARVGIRIADLLDKDIFAERLRINLAEKNRLFEKMYDSTPLDFDAIFEEYYAYGQEIKQYVTDTSVILNDALDAGKRVLFEGAQGVMLDIDQGTYPFVTSSNPVAGGVTIGSGVGPNKINKVVGVCKAYTSRVGDGPFPTELFDEVGERIREVGHEYGTTTGRPRRVGWFDSVVMRHSRRVSGITNLSLNSIDVLSGLDTVKICVAYDLDGKRIDYYPANLEQLKRCKPIYEELPGWQEDITGVRSLDELPENARNYVRRVGELVGVRISTFSVGPGREQTNILESVWASI

SEQ ID NO: 4573 - DNA, 645 bp, Streptococcus agalactiae
atgttattagtttataaaagaggagattgtatgcgtaaatttttccaagatgttattgtagaggtggcttattatttagagattgctttgtcagttattctggcaacagctattattttttttagtttagcactctttcatgatttgtttagcatgttgtctgttgatcaaaatgttgataagttgttccagactttccttgctcgcgccatgacaatagcagtcgggattgagttgatcaaaatgttttcaaaaccttccccagatactttaattgaagtgttattgtttgccttagctcgtcaacttgtaattgaacatggtagtgtttcagattaccttatggggattgcttcagttgctattttgtttgctgttcgtaaatatcttttcacccattttgatgggtcaagcaacattgttttacgtgctaataacaaagtcaaaaaagctaatattttagctagggttcaactaccttgtcaacccaatgaaactttaggagacttacttgttcgtcatttaaatgatgaggaaaaggacgttgctattggttcagtagtctatattaataacgttgcattgcgtgttgatagtatgcacgatggtcttgtgacgcgtgtagaaatcattaggagtctacat

SEQ ID NO: 4574 - protein, 215 aa, Streptococcus agalactiae
MLLVYKRGDCMRKFFQDVIVEVAYYLEIALSVILATAIIFFSLALFHDLFSMLSVDQNVDKLFQTFLARAMTIAVGIELIKMFSKPSPDTLIEVLLFALARQLVIEHGSVSDYLMGIASVAILFAVRKYLFTHFDGSSNIVLRANNKVKKANILARVQLPCQPNETLGDLLVRHLNDEEKDVAIGSVVYINNVALRVDSMHDGLVTRVEIIRSLH

SEQ ID NO: 4575 - DNA, 288 bp, Streptococcus agalactiae
atgtacatgaagaaagcttgcttagttggtacaaatgcaccaggtccgattaatttaacattagacataatgtctggaccaaggacagctaagattcctccaaagaaaactagcatcaatgttgctgatgcaacaactgtatcatggaaaatatttaagaatgttggtaattttaagttatcaaggttttcttcttttttaccgaagaatggcgcaactttatcaacaaaccaaattgcaaattgttgttggtgtccgatggcaaatccgccaccacctgtaaggcgt

SEQ ID NO: 4576 - protein, 96 aa, Streptococcus agalactiae
MYMKKACLVGTNAPGPINLTLDIMSGPRTAKIPPKKTSINVADATTVSWKIFKNVGNFKLSRFSSFLPKNGATLSTNQIANCCWCPMANPPPPVRR

SEQ ID NO: 4577 - DNA, 1437 bp, Streptococcus agalactiae
atggaaaacttcctagctccccttaattggttctcgcaaaatatcttgcagaatccagccttcttcgtaggtctattggtactcattgggtatcttttattgaagaaaccacttcatgatgtctttgctggttttatcaaagcgaccgttggatatttgattttgaacgtaggtgcaggaggattggttaatacattccgtccaatcttagttgctcttgctaaaaaatttaatttagaagctgctgttattgacccttactttggtttagcatcagcaaatgctaagttagaaacaatgggctttatcagtgttgcaacaacagcactcttgattggttttgggattaacattctcttggttgctcttcgtaaagtaactaaagtccgtactctttttattactggtcatatcatggtacaacaagctgcaacaatttcagtatttgtactgctcttgattccacaacttcgtaatggttttggtgcatgggctgttggtatcatttgtggtctatattgggcggtaagttctaatatgaccgttgaagcaactcaacgccttacaggtggtggcggatttgccatcggacaccaacaacaatttgcaatttggtttgttgataaagttgcgccattcttcggtaaaaaagaagaaaaccttgataacttaaaattaccaacattcttaaatattttccatgatacagttgttgcatcagcaacattgatgctagttttctttggaggaatcttagctgtccttggtccagacattatgtctaatgttaaattaatcggacctggtgcatttgtaccaactaagcaagctttcttcatgtacatccttcaaacatcattgacattctcagtttaccttttcattttgatgcaaggtgtacgcatgttcgttacagaattgacaaatgccttccaaggtatctcaaacaaacttcttccaggatcattcccagcagttgacgttgcagcttcatatggttttggttcttcaaatgcagttctttcaggatttgcttttggtttgattggtcaattaattacaatcgctctacttgttgtcttcaaaaatccaatcttgattatcacaggattcgttccagtattctttgataatgcggcaatcgctgtttatgcagataaacgtggtggctggaaagcagcagtagctctatcatttatctcaggtattattcaggtggcacttggtgctgttgctgtaggtcttttaggacttgcaggtggttatcatggaaatatcgactttgaattcccatggttagcatttggttacatcttcaagtatttaggtatcgctggttacgtgattgtatgtctcttcttcttagctattccacaacttcaatttatgaaatctaaagataaagaagcatactatcgtggtgatgcgcctgcagaa

SEQ ID NO: 4578 - protein, 479 aa, Streptococcus agalactiae
MENFLAPLNWFSQNILQNPAFFVGLLVLIGYLLLKKPLHDVFAGFIKATVGYLILNVGAGGLVNTFRPILVALAKKFNLEAAVIDPYFGLASANAKLETMGFISVATTALLIGFGINILLVALRKVTKVRTLFITGHIMVQQAATISVFVLLLIPQLRNGFGAWAVGIICGLYWAVSSNMTVEATQRLTGGGGFAIGHQQQFAIWFVDKVAPFFGKKEENLDNLKLPTFLNIFHDTVVASATLMLVFFGGILAVLGPDIMSNVKLIGPGAFVPTKQAFFMYILQTSLTFSVYLFILMQGVRMFVTELTNAFQGISNKLLPGSFPAVDVAASYGFGSSNAVLSGFAFGLIGQLITIALLVVFKNPILIITGFVPVFFDNAAIAVYADKRGGWKAAVALSFISGIIQVALGAVAVGLLGLAGGYHGNIDFEFPWLAFGYIFKYLGIAGYVIVCLFFLAIPQLQFMKSKDKEAYYRGDAPAE

SEQ ID NO: 4579 - DNA, 1431 bp, Streptococcus pyogenes
atggaaatgctcctagctcccctaaactggttctcgcaaaatattttgcaaaacccagcgttctttgtaggtcttttggttttaatcgggtatttactccttaaaaaacccatttatgaggtctttgctggttttgtaaaggctaccgttggttacttgattttgaacgttggagcaggcggtcttgtaacgacttttcgtccgatcttggttgctcttgccaagaaatttgaattgaaagccgccgttattgatccttattttggtttggctgctgctaatactaagttagaagagatgggcttcatcagtgttgctacgacagctctcttgattggatttggggtcaacattcttttggttgcacttcgcaaggtcactaaagttcgtacccttttcatcacaggtcacatcatggtccaacaggcagcgacgatttcggtctttgtccttcttttaatccctcaattccaaaatgcttttggggcatgggcagtcggtatcatctgtgggctttactgggctatcagctcaaacatgaccgttgaagcaactcaacgccttacaggtggcggtgggtttgcgattggtcaccaacaacaatttgcgatttggtttgtggataaggttgcaccgttctttggtaaaaaagaagaaaaccttgataacctaaaattaccgaccttcttaaacattttccatgatactgttgttgcgtcagcaactttgatgttggtctttttcggagctatcttggctgtccttggtccagacattatgtctgatgtggacttaatcggacctggagcattcaacccagctaagcaagctttcttcatgtatattttgcaaacctctctcaccttctcagtttatctctttatcttgatgcagggtgttcgcatgtttgtttctgaattgaccaatgcttttcaagggatctcaagcaaattgcttccagggtcattcccagcggttgacgttgcagcttcctatggctttggttcttcaaatgcggtgctttcaggatttgcctttggtttgattggtcaattaatcaccattgctcttcttgttatctttaaaaatccaatcttaattatcacaggattcgttcccgtattctttgataatgcggcaattgcggtttatgcagataaacgtggtggctggaaagcagcggtagctctatcatttatctcaggtattttgcaagttgcacttggtgctgttgctgtaggtcttttaggacttacaggtggttatcacggtaatatcgacttggttcttccatggttaccatttgggtacctcttcaaattccttggtattgcagggtatgtgcttgtttgcatcttcttacttgccattccacaattgcaattcgcaaaagctaaggacaaagaagcttactaccgtggggaagctcaa

SEQ ID NO: 4580 - protein, 477 aa, Streptococcus pyogenes
MEMLLAPLNWFSQNILQNPAFFVGLLVLIGYLLLKKPIYEVFAGFVKATVGYLILNVGAGGLVTTFRPILVALAKKFELKAAVIDPYFGLAAANTKLEEMGFISVATTALLIGFGVNILLVALRKVTKVRTLFITGHIMVQQAATISVFVLLLIPQFQNAFGAWAVGIICGLYWAISSNMTVEATQRLTGGGGFAIGHQQQFAIWFVDKVAPFFGKKEENLDNLKLPTFLNIFHDTVVASATLMLVFFGAILAVLGPDIMSDVDLIGPGAFNPAKQAFFMYILQTSLTFSVYLFILMQGVRMFVSELTNAFQGISSKLLPGSFPAVDVAASYGFGSSNAVLSGFAFGLIGQLITIALLVIFKNPILIITGFVPVFFDNAAIAVYADKRGGWKAAVALSFISGILQVALGAVAVGLLGLTGGYHGNIDLVLPWLPFGYLFKFLGIAGYVLVCIFLLAIPQLQFAKAKDKEAYYRGEAQ

SEQ ID NO: 4581 - DNA, 276 bp, Streptococcus agalactiae
atggttaaagttcttacagcatgcggaaacggcatgggatcatcaatggttatcaaaatgaaagtcgaaaatgcgcttcgtcaattaggcgttagcaactttgagtcagcatcttgctcagtcggagaagcaaaaggtttagctgcaaactacgatatcgtggttgcttcaaaccaccttatccatgaattagacggacgtacaaaaggtcatttagtaggtcttgataaccttatggatgacaatgaaataaaaacaaaactacaagaaattttg

SEQ ID NO: 4582 - protein, 92 aa, Streptococcus agalactiae
MVKVLTACGNGMGSSMVIKMKVENALRQLGVSNFESASCSVGEAKGLAANYDIVVASNHLIHELDGRTKGHLVGLDNLMDDNEIKTKLQEIL

SEQ ID NO: 4583 - DNA, 276 bp, Streptococcus pyogenes
atggttaaagtcttaacagcatgtggcaatggtatggggtcatctatggtgatcaaaatgaaagttgaaaatgcgcttcgtcaacttggtgtgacagatattcagtcagcttcttgctcagttggtgaagctaaaggtctagcttctggttatgatattgtagtggcatcaaaccacttgattcatgagcttgatggtcgtaccaaaggccacttggttggtcttgataacctgatggatgataatgaaattaaaaccaaactacaagaagtgcta

SEQ ID NO: 4584 - protein, 92 aa, Streptococcus pyogenes
MVKVLTACGNGMGSSMVIKMKVENALRQLGVTDIQSASCSVGEAKGLASGYDIVVASNHLIHELDGRTKGHLVGLDNLMDDNEIKTKLQEVL

SEQ ID NO: 4585 - DNA, 483 bp, Streptococcus agalactiae
atgaatttaaaacaagcctttatcgaaaatgactcaattcgtcttaaattatctgcaagcgattggaaagaagcaatcaaattatcaattgatccattgattgaaagtggtgctgttgatgcagaatattacgatgccattattgaatctacagaggaatttggtccgtactacattcttatgccgggtatggcgatgcctcatgctcgtccagaagcaggcgtaaaacgtgatgcattttcattaattacattaacagagccagtagtttttccagatggcaaagaagtctcagtattgttagcacttgctgcaacaagttcagctattcatacttctgttgctatccctcaaattattgccctttttgaattggaaaattcaattcagcgcttgacggaatgccaagaagcaaaagaagtccttgcaatggtagaggaatcaaaaaacagcccatatttagaaggtttagatttagaaagc

SEQ ID NO: 4586 - protein, 161 aa, Streptococcus agalactiae
MNLKQAFIENDSIRLKLSASDWKEAIKLSIDPLIESGAVDAEYYDAIIESTEEFGPYYILMPGMAMPHARPEAGVKRDAFSLITLTEPVVFPDGKEVSVLLALAATSSAIHTSVAIPQIIALFELENSIQRLTECQEAKEVLAMVEESKNSPYLEGLDLES

SEQ ID NO: 4587 - DNA, 483 bp, Streptococcus pyogenes
atgaatttaaaacaagcctttattgacaacaactccatccgattggggctaagtgctgatacttggcaagaggctgttcgattagctgttcaacctttgattgatagcaaagcagtgacgtcagcttactacgacgccatcattgcatcaacagaaaaatacggcccttattatgtgttgatgccaggtatggctatgccccatgcggaagcaggtttaggcgttaatcgtaatgcatttgctttgattacactaacaaaaccagtcaccttctcagatggtaaagaggtttctgttcttttgacgttggccgctacagacccttctattcacacaacagtggctatcccacaaattgtggccttgtttgaactagataatgccattgaacgcttggtggcctgccaaagtcctaaagaggttctagagatggtagaagaatctaaagacagtccttacttagaaggtatggacttgaatgct

SEQ ID NO: 4588 - protein, 161 aa, Streptococcus pyogenes
MNLKQAFIDNNSIRLGLSADTWQEAVRLAVQPLIDSKAVTSAYYDAIIASTEKYGPYYVLMPGMAMPHAEAGLGVNRNAFALITLTKPVTFSDGKEVSVLLTLAATDPSIHTTVAIPQIVALFELDNAIERLVACQSPKEVLEMVEESKDSPYLEGMDLNA

SEQ ID NO: 4589 - DNA, 663 bp, Streptococcus agalactiae
atgacaaaacgtttaccaaatttacaagttgcacttgaccactcagatttacaaggagctatcaaagctgccgtatcagtaggacatgaagttgatgttattgaagctggaactgtttgccttcttcaagtaggtagtgaattagttgaggtccttcgcagtctcttccctgacaaaataattgttgctgatacaaaatgtgctgatgctggtgggactgttgctaaaaataatgctgttcgcggtgcagactggatgacttgtatctgttgtgctactattccaacaatggaagcagccttaaaagctatcaaagaagaacgcggcgatcgtggagaaattcaaatcgaactatatggtgattggacttatgagcaagcgcaacaatggttggatgcaggtatttcacaagccatttatcaccaatctcgtgatgcgcttcttgctggcgaaacatggggagagaaagaccttaataaggttaaaaaattgattgatatgggcttccgagtttctgtaactggtggtttatcaactgatactcttcaattatttgaaggtgttgatgtctttacttttattgcgggtcgtggtattacagaggcagatgatccagccgcagcagcacgtgcatttaaggatgaaattaaacgtatttggggg

SEQ ID NO: 4590 - protein, 221 aa, Streptococcus agalactiae
MTKRLPNLQVALDHSDLQGAIKAAVSVGHEVDVIEAGTVCLLQVGSELVEVLRSLFPDKIIVADTKCADAGGTVAKNNAVRGADWMTCICCATIPTMEAALKAIKEERGDRGEIQIELYGDWTYEQAQQWLDAGISQAIYHQSRDALLAGETWGEKDLNKVKKLIDMGFRVSVTGGLSTDTLQLFEGVDVFTFIAGRGITEADDPAAAARAFKDEIKRIWG

SEQ ID NO: 4591 - DNA, 660 bp, Streptococcus pyogenes
atgacacatattccaaatttacaagttgctttagaccattctgacttacagggggctgttaaagcagccgttgctgtgggtcacgaagtagatgtgattgaagctggtaccgtttgtttgcttcaagtgggaagcgaactagttgaggtattacgcagcctcttcccagagaaaattatcgtagcagataccaaatgtgctgacgctggcggtacggtcgctaaaaacaatgcaaaacgtggtgctgactggatgacctgcatttgctgtgcgacgattccaaccatggaagcagccctcaaggctattaaagaagagcgcggtgaccgtggggaaattcaaatcgaactttatggtgattggacttatgagcaagctcaattatggcttgacgctgggatttcccaagcgatttaccaccaatctcgtgatgcccttcttgctggagaaacttggggtgaaaaagaccttaacaaggtgaaaacattgattgacatgggctttcgtgtctcagtaactggtgggcttgatgtagacactttgagactttttgaaggggttgatgtctttacctttatcgcagggcgaggcattactgaagcagaagatcctgctgcagcggcgcgtgccttcaaagatgaaatcaaacgtatctggggg

SEQ ID NO: 4592 - protein, 220 aa, Streptococcus pyogenes
MTHIPNLQVALDHSDLQGAVKAAVAVGHEVDVIEAGTVCLLQVGSELVEVLRSLFPEKIIVADTKCADAGGTVAKNNAKRGADWMTCICCATIPTMEAALKAIKEERGDRGEIQIELYGDWTYEQAQLWLDAGISQAIYHQSRDALLAGETWGEKDLNKVKTLIDMGFRVSVTGGLDVDTLRLFEGVDVFTFIAGRGITEAEDPAAAARAFKDEIKRIWG

SEQ ID NO: 4593 - DNA, 861 bp, Streptococcus agalactiae
atgacacgtccaataggaatttacgagaaggcaacaccaaaacattttaactggttagaacgcctacaatttgctaaagaattgggatttgattttgtagaattatccattgatgagtcagatgaacgtttggcacgtttggagtggtcaaaagaagaacgacttgagttggtcaaagctatttttgagacaggagttcgtgttccaacaattacatttagtggtcatcgtcgtttcccaatgggatctaataatcctgagaaagaagcgcgtgcgatggatatgatgaaaaaatgtatcgtctttgctcaagatattggtattcgtaatattcaattagcaggatatgatgtgtactatgaagaaaaatctccagagacacgtgcacgctttattaagaatcttcgtcaagcttgtacttgggccgaagaagcacaagttattctatctattgagattatggatgatccatttatgaattccattgagaaatatttggctgtggaaaaagagattgattctccttatctctttgtctacccagatactggaaatgtatcagcatggcataatgatctttggagtgaattttataatggacatcgctcaattgcagcgcttcatattaaagatacttatgctgttaccgaaacgtctaaaggtcaattccgtgatgttccatttggtcaagggtgtgttgattgggaagaaatgtttgctgtcattaagaaaacaaattataatggtccattcttgattgaaatgtggtcggagaactgtgagactgtagaggaaacacgtgcagccattaaagaggcgcaagattttctttacccattaatggagaaaacaggagtgaaa

SEQ ID NO: 4594 - protein, 287 aa, Streptococcus agalactiae
MTRPIGIYEKATPKHFNWLERLQFAKELGFDFVELSIDESDERLARLEWSKEERLELVKAIFETGVRVPTITFSGHRRFPMGSNNPEKEARAMDMMKKCIVFAQDIGIRNIQLAGYDVYYEEKSPETRARFIKNLRQACTWAEEAQVILSIEIMDDPFMNSIEKYLAVEKEIDSPYLFVYPDTGNVSAWHNDLWSEFYNGHRSIAALHIKDTYAVTETSKGQFRDVPFGQGCVDWEEMFAVIKKTNYNGPFLIEMWSENCETVEETRAAIKEAQDFLYPLMEKTGVK

SEQ ID NO: 4595 - DNA, 903 bp, Streptococcus pyogenes
gtgccttcaaagatgaaatcaaacgtatctgggggtaactttatggcgcgtcctattggtatttatgaaaaagcaacgccaaaacagtttacctggcgtgaacgcttgcaatttgcaaaagacttaggttttgattttgtggaaatgtctgttgatgaatcagatgctcgcttagcgcgcttagagtggactaaggaagaacggcttgatttagtgaaagccatttatgaaacaggcattcgcatcccgaccatttgtttttctggtcatagacgttacccactaggctcaaatgatcctgctattgaagctaagtcccttaaactgatgaaacaatgtattgaattggcacaggacttaggcgttcgtaccattcaattagctggttatgacgtttactatgaaaaaaaatcgcctgaaacccgtgctcgttttatcaaaaacttgagacaatcttgtgactgggccgaagaagcccaagtgatgctttctattgagattatggatgacccttttatcaactctattgagaaatacttggcagttgaaaaagagattgactcgccttatctctttgtttatcctgatgcaggcaatgtttctgcttggcataatgatttgtggagtgaattttacaatgggcacaaatccattgcagccctccacttgaaagatacttatgctgtcacggaaacctcaaaagggcagtttcgtgatgtgccatttggtcaaggttgtgtggactggcaagagctgtttgcggtcctcaagaaaaccaactacaatgggccttttttgattgaaatgtggtcagaaaattgtgacacggtggaggaaacaaaagctgctatcaaagaagctcaggacttcctttacccacttattgagaaagcggggttgaca

SEQ ID NO: 4596 - protein, 301 aa, Streptococcus pyogenes
VPSKMKSNVSGGNFMARPIGIYEKATPKQFTWRERLQFAKDLGFDFVEMSVDESDARLARLEWTKEERLDLVKAIYETGIRIPTICFSGHRRYPLGSNDPAIEAKSLKLMKQCIELAQDLGVRTIQLAGYDVYYEKKSPETRARFIKNLRQSCDWAEEAQVMLSIEIMDDPFINSIEKYLAVEKEIDSPYLFVYPDAGNVSAWHNDLWSEFYNGHKSIAALHLKDTYAVTETSKGQFRDVPFGQGCVDWQELFAVLKKTNYNGPFLIEMWSENCDTVEETKAAIKEAQDFLYPLIEKAGLT

SEQ ID NO: 4597 - DNA, 714 bp, Streptococcus agalactiae
atggcaaaatcattgcaagaaatgcgtgaacgtgtgtgtgaagctaataaatcactaccagttcatagtttagttaaatttacttggggtaacgtttctgaagttgaccgcgaagcaggattgattgttatcaaaccttcaggagttgactatgaccaattgacacctgaaaatatggttgtcacagacttagagggaaatatagtggagggggatttgaatccatcatctgatcttccaactcatgttcaactttataaagcatggccagaagtcggtggtattgttcatactcattcaacagaagcagttggttgggcacaagcgggtcgcgatattccattttatggaacaacacatgcagattatttttatgggccagtaccatgtgctaggtcacttagtgaagatgaagttaacactgcttatgaaaaagaaacaggtagcgttattatagaggaatttgaacgtcgggatttagatccaatggctgttcctggtattgttgtacgtaatcatggaccatttacttgggggaaagatccagcacaagcagtttatcactcagtcgttcttgaagaagttgctaagatgaatcgtttcactgaacaaattaatccacgtgttgaaccagctccaaaatatattatggataaacactatttacgtaagcatggaccaaatgcttattatggtcaaaaaggacaagaacat

SEQ ID NO: 4598 - protein, 238 aa, Streptococcus agalactiae
MAKSLQEMRERVCEANKSLPVHSLVKFTWGNVSEVDREAGLIVIKPSGVDYDQLTPENMVVTDLEGNIVEGDLNPSSDLPTHVQLYKAWPEVGGIVHTHSTEAVGWAQAGRDIPFYGTTHADYFYGPVPCARSLSEDEVNTAYEKETGSVIIEEFERRDLDPMAVPGIVVRNHGPFTWGKDPAQAVYHSVVLEEVAKMNRFTEQINPRVEPAPKYIMDKHYLRKHGPNAYYGQKGQEH

SEQ ID NO: 4599 - DNA, 702 bp, Streptococcus pyogenes
atggcgaaaaacttgcaagaaatgcgtgaacgtgtctgtgcggctaacaagtctctaccacaacacggtcttgtcaaatttacgtggggcaatgtctctgaagtttgtcgtgaattaggacgtattgtcatcaagccttctggggtggactacgacctcttgacaccagaaaatatggttgttacagaccttgatgggaatgtggtcgaaggtgatttgaacccttcttcagatctgccaacccatgtggaactttataaagcttggccagaagtgggcggtattgtccacactcactccacagaagctgttggttgggcacaggcaggtcgtgatattccgttttatgggactacgcatgctgactacttctatggaccagttccgtgtgctcgttctctcacaaaagcagaagttgatggggcttacgagcaagaaactggcaacgtgattttggaagaatttagcaagcgaggcttagatcctatggcggttccaggaatcgtggttcgcaatcatggcccatttacgtgggggaaaaccccagagcaagccgtttaccactcggttgtcttagaagaagtggctaggatgaatcgcttgacagaacaaatcaatccacgcgtagagccagcgccaagatacattatggataagcattatttgcgtaaacatggcccaaatgcttattacggtcaaaaa

SEQ ID NO: 4600 - protein, 234 aa, Streptococcus pyogenes
MAKNLQEMRERVCAANKSLPQHGLVKFTWGNVSEVCRELGRIVIKPSGVDYDLLTPENMVVTDLDGNVVEGDLNPSSDLPTHVELYKAWPEVGGIVHTHSTEAVGWAQAGRDIPFYGTTHADYFYGPVPCARSLTKAEVDGAYEQETGNVILEEFSKRGLDPMAVPGIVVRNHGPFTWGKTPEQAVYHSVVLEEVARMNRLTEQINPRVEPAPRYIMDKHYLRKHGPNAYYGQK

SEQ ID NO: 4601 - DNA, 699 bp, Streptococcus agalactiae
atggaccaaatgcttattatggtcaaaaaggacaagaacattaaggagaataatatgaaatactttttagatactgccgatgtttctgaaattcgtcgtcttaatcgtttaggaatcgttgatggtgttactaccaatccgactattatttcacgtgaggggcgtgactttaaagaagttattaacgaaatttgccaaatcgttgatggcccagttagtgcagaagtgacaggtttaacttgtgatgaaatggttaccgaagctagagaaatcgctaagtggtcaccaaatgttgttgttaaaattccaatgactgaagaaggtttagcagcagtttcacaattatcaaaagaaggtataaagacaaatgtgacattaatatttactgtggctcaaggtctttcggcaatgaaagctggtgcaacatttattagtccttttgtgggtcgtcttgaagatattggaacagatgcttatgctttgattcgtgaccttcgtcacattattgatttttatggtttccaatctgagattattgctgctagcattcgtggattggcgcatgtggagggcgtcgctaaatgcggtgcgcacattgccactattccagataaaacatttgcatcactatttactcacccgcttactgataaagggattgaaactttcttaaaagattgggatagtttcaagaagaag

SEQ ID NO: 4602 - protein, 233 aa, Streptococcus agalactiae
MDQMLIMVKKDKNIKENNMKYFLDTADVSEIRRLNRLGIVDGVTTNPTIISREGRDFKEVINEICQIVDGPVSAEVTGLTCDEMVTEAREIAKWSPNVVVKIPMTEEGLAAVSQLSKEGIKTNVTLIFTVAQGLSAMKAGATFISPFVGRLEDIGTDAYALIRDLRHIIDFYGFQSEIIAASIRGLAHVEGVAKCGAHIATIPDKTFASLFTHPLTDKGIETFLKDWDSFKKK

SEQ ID NO: 4603 - DNA, 642 bp, Streptococcus pyogenes
atgaaatttttcctagatacagctaatgtagccgctattaaagcgattaatgaacttggcgttgtagatggtgtcaccaccaatccaaccattatctcacgtgaaggacgtgattttgaaacagttatcaaagaaatctgtgacatcgtcgatggcccaatcagtgctgaagtgacagggctaacagcagatgctatggtagaagaagctagaagcattgctaagtggcatgacaatgtcgtcgttaaaattccaatgactacagaagggttaaaagcaacaaacattctttcaaaagaagggattaaaactaatgtgaccttgattttcacagtaagccaaggtttaatggcaatgaaagcaggcgcaacttacattagcccatttatcggtcgtttggaagatattggcacagatgcttatcaattaatcagcgaccttcgtgaaatcattgacttgtacgatttccaagcagaaatcatcgcagcaagtattcgtacaacagcccatgtggaagctgttgctaaattaggcgcacacattgcgacgattccagaccccttgtttgctaagatgacgcaacatcccttaacgacaaatggtttgaaaacctttatggaagattgggcttcctttaaaaaa

SEQ ID NO: 4604 - protein, 214 aa, Streptococcus pyogenes
MKFFLDTANVAAIKAINELGVVDGVTTNPTIISREGRDFETVIKEICDIVDGPISAEVTGLTADAMVEEARSIAKWHDNVVVKIPMTTEGLKATNILSKEGIKTNVTLIFTVSQGLMAMKAGATYISPFIGRLEDIGTDAYQLISDLREIIDLYDFQAEIIAASIRTTAHVEAVAKLGAHIATIPDPLFAKMTQHPLTTNGLKTFMEDWASFKK

SEQ ID NO: 4605 - DNA, 981 bp, Streptococcus agalactiae
atgtttgagaaggtaaccattagtgatattgcaaatttagtaggtgtgtcaaaagctacagtttcctattatctcaatgggaactataagaaaatgtctctgcaaacgaaagaaaaaatacgtttagctattaaggagactggttatcaaccaagtaagattgctcaaagtttagttacaaaaaatacccgtactattggggtcgttattgctgatattactaatccctttatttcgtctgtgatgaagggaatacatgatacttgtcaacaatttggttactcggttaactttactaactcggataatgatattgacattgagttggaaaatttaaaccgtttaaatcagcaaaacgtttcaggaattattttagattctgtagatcctaatcattcatttatagaaactttgagtaatgatcgtcttgtcatggttgatagacaagctaaagatattaaagtagatactgtagcatccgacaataaagaatcgactcaaatatttcttgaaaaaatgcaagaagctgggtatcatgacatctattttgtcacttatcccattgaagggatttcaacccgtgagcttcgttacgaaggttttaaagaagtggtcagttcaaatcctgataagttgattattatcactgaagatggtagtacacagagaattcttgatatcattgaacattcagagcaaaaaccagggttcttaatgatgaacggtccaactcttttgaattttatgaaaaaattaaatcaatcaacggtcagctaccctgaggattatggtcttgggagttatgaagatttagaatggatgcaggtgcttacaccaaacgtttcctgtataaaacaggattcatatggcattggttgcctggctgcccaatgtttaattgaaaaaattagtcaaggaaacgaaccaactactgcaaggttactagaagtaaaaaatcaaatcgttattcgtcaatctttt

SEQ ID NO: 4606 - protein, 327 aa, Streptococcus agalactiae
MFEKVTISDIANLVGVSKATVSYYLNGNYKKMSLQTKEKIRLAIKETGYQPSKIAQSLVTKNTRTIGVVIADITNPFISSVMKGIHDTCQQFGYSVNFTNSDNDIDIELENLNRLNQQNVSGIILDSVDPNHSFIETLSNDRLVMVDRQAKDIKVDTVASDNKESTQIFLEKMQEAGYHDIYFVTYPIEGISTRELRYEGFKEVVSSNPDKLIIITEDGSTQRILDIIEHSEQKPGFLMMNGPTLLNFMKKLNQSTVSYPEDYGLGSYEDLEWMQVLTPNVSCIKQDSYGIGCLAAQCLIEKISQGNEPTTARLLEVKNQIVIRQSF

SEQ ID NO: 4607 - DNA, 1017 bp, Streptococcus agalactiae
atgaagattaataaattattgtcagacagacttgaagcttgttattcagtttgtcgtttgcaaaatcaagactatgattttttattagtagcttcagaggttgaccaagcctgctttgcttatgatttgaatagcgatttagcaaaaattgttgtttgggaagatgtgggaggtaccatgagtattattccaattcccggaaccatggattttttggcaacccagaaattttacccagggtttaaggccaaagattgtcaggttgtttatgcaagttttcaaggagatcattgggacatttgtaacgcatttgattttccgtatttacatcgctttgatctcattaaaggtaaagaaaatcaactttactttataggttgtacaattgctaacagtaaagcccacactgaggattggagtgataaaggccgaatttttgttgctcgttttaatactcaaaaccatacattggaaggattgcaacaattgcctcaaactttattaaaaaatcatggatactatgccattcaggatgaaggatattcattgattacttcagtagaaggggtattcaaactcacttatccagaattttctactacaggcgactggcaattagaacggcttttcgatgaggagacaagcgatgtggtgaaagtggatattaatcaggatggcaaggatgagtatgtgattatccaaggttttcatggagatcgtttacgcatcttcactgaagatttcggtcgagaattattccattatccagaaaaaacaccatttggtcatgctatttggagtggtcgtttacttaatcagacttgttttgtattcgggtggcgatcagaaaaagcagaattaaggctttttcactttgtagatgggcacttggtttcagaattagtagatgcaaaagcagcttctagtaatgtcttagcttttgaaaaagatggaaaagcttatcttttctcagccaataacggacgtggcgaagttgctctttatcaattagtaaaa

SEQ ID NO: 4608 - protein, 339 aa, Streptococcus agalactiae
MKINKLLSDRLEACYSVCRLQNQDYDFLLVASEVDQACFAYDLNSDLAKIVVWEDVGGTMSIIPIPGTMDFLATQKFYPGFKAKDCQVVYASFQGDHWDICNAFDFPYLHRFDLIKGKENQLYFIGCTIANSKAHTEDWSDKGRIFVARFNTQNHTLEGLQQLPQTLLKNHGYYAIQDEGYSLITSVEGVFKLTYPEFSTTGDWQLERLFDEETSDVVKVDINQDGKDEYVIIQGFHGDRLRIFTEDFGRELFHYPEKTPFGHAIWSGRLLNQTCFVFGWRSEKAELRLFHFVDGHLVSELVDAKAASSNVLAFEKDGKAYLFSANNGRGEVALYQLVK

SEQ ID NO: 4609 - DNA, 954 bp, Streptococcus agalactiae
atggacaagaaaaaaatcttagtaacgggtattgtgcctaaagaaggtctaagaaagcttatggaccgatttgatgttacttattcagaagatcgcccattttcacgtgactatgtgttagagcatttatctgaatatgacggatggttactcatgggacaaaaaggcgataaagagatgattgatgcaggtgaaaacttacaaattatttctttaaatgcggttggttttgatcatgtagatactgcgtatgctaaagaaaaaggaattatagtctctaattcccctcaagcagtacgagttccgacagcggaaatgacttttgctttaattttagctgccagtaagcgccttgcattttatgatagtattgtaagaagtggagagtggattgatccgagcgaacaacgttatcaaggtttgactttgcaaggttcaacattaggtatttacggaatgggacgcatcggtttgacagtcgcaaattttgctaaagcatttgggatgactgttgtttacaatgatgtttatcgacttcctgaagataaggaaaaagagcttggtgtaacctatctcgaatttgatcagcttattaaaacagctgatgtcataaccatccacgccccagcattaccatcaacaatccacaaattcaataaagatgtttttgctaagatgaaaaatcgaagctacttaatcaacgctgctagaggcccaatcgtttctgaagaagcacttattgaagcactgaaagaaggtgaaatcgcgggtgcgggattagatgtttttgagaatgaaccacaggtatctgaaggattgagaagccttgataatgttatcatgagtccacatgctgggacaggtactattgagggacgtagaactttggctgaagaagcagctgacaacatcattgccttctttgatggcaagccacaaaatattgtcaataaa

SEQ ID NO: 4610 - protein, 318 aa, Streptococcus agalactiae
MDKKKILVTGIVPKEGLRKLMDRFDVTYSEDRPFSRDYVLEHLSEYDGWLLMGQKGDKEMIDAGENLQIISLNAVGFDHVDTAYAKEKGIIVSNSPQAVRVPTAEMTFALILAASKRLAFYDSIVRSGEWIDPSEQRYQGLTLQGSTLGIYGMGRIGLTVANFAKAFGMTVVYNDVYRLPEDKEKELGVTYLEFDQLIKTADVITIHAPALPSTIHKFNKDVFAKMKNRSYLINAARGPIVSEEALIEALKEGEIAGAGLDVFENEPQVSEGLRSLDNVIMSPHAGTGTIEGRRTLAEEAADNIIAFFDGKPQNIVNK

SEQ ID NO: 4611 - DNA, 165 bp, Streptococcus agalactiae
gtgagtccaacaccagctcgtaaggcgctaaagaaagctcgccttggattgacctttagaaaaaggctgacaataaaaatcatagcgggtacaacagttgctgcaccaaagacttcaaagaatttatgtaaagcttctagcataagttcacctttattaaattat

SEQ ID NO: 4612 - protein, 55 aa, Streptococcus agalactiae
MSPTPARKALKKARLGLTFRKRLTIKIIAGTTVAAPKTSKNLCKASSISSPLLNY

SEQ ID NO: 4613 - DNA, 1248 bp, Streptococcus agalactiae
atggttaaaactactggtctccatttaccaattgtagatattggttggcaggctggttctctcaccgccttttcttctgagattggcctctctttctttgtttttggcttgctaattgaattggggcttttcttgcttgggattacccgagtatttgtcccatctaatctttggaataactttggctatatgatttggggtacaatggcctatgcagcaacaggtaattttatattgtctttcgcatttatggtttttgtcttactctattcattagtgatgtcagaagtattggcagatcgatggtcggagtattacggtgttaaaaatgcaacgatcaactcgattcataatattgaaacccttattccagctcttattcttgatcctctttggaacctacttggtgtcaataaggtaaagttgaacccagaatcattaaagactaagttagggatatttggtgagccaatgacacttggttttatacttggtgtgattattggtgtattaggtagtttacgtaaccttgcaagtattgatacttggggaggtatacttggttttgcagttgctcttgcagcggttatgactatttttcctttgattacgggggtatttgctagtgcttttgctcctcttgctgaagcagttgaacgcaataagaaaaaagaaagtcaagctgagcaaggagcactggataaaaaacgttggtttattgcagttgatgacggtgttggttttggtgaaccagcaactattatcgcaggtctcattttagtaccaataatggttgttatttccttgattttacctggaaatgaagctttaccagtcgttgaccttattgctatcccttttatgattgaagctatgatagctgtgtcaaaaggaaatattcttaaagctattttgaatggaatcatatggttttcactaggtctttatgctgctagtgccctaggtccaatctacacagaagctgttaagcattttggaactgctttaccagcaggggtaactttgattatgagctttaatctcctagctcatcctttgacagctctagtcttctttgcttggatatctgggaacccactctatattggtgtgacagttgttatctatcttgctttcttgttcttgcttcgtactcatcgtgaatctatttacgcataccttaaaactatggctgataagaatagcggatatgaaggtagttgtgaaaaaatctttattgctgaagat

SEQ ID NO: 4614 - protein, 416 aa, Streptococcus agalactiae
MVKTTGLHLPIVDIGWQAGSLTAFSSEIGLSFFVFGLLIELGLFLLGITRVFVPSNLWNNFGYMIWGTMAYAATGNFILSFAFMVFVLLYSLVMSEVLADRWSEYYGVKNATINSIHNIETLIPALILDPLWNLLGVNKVKLNPESLKTKLGIFGEPMTLGFILGVIIGVLGSLRNLASIDTWGGILGFAVALAAVMTIFPLITGVFASAFAPLAEAVERNKKKESQAEQGALDKKRWFIAVDDGVGFGEPATIIAGLILVPIMVVISLILPGNEALPVVDLIAIPFMIEAMIAVSKGNILKAILNGIIWFSLGLYAASALGPIYTEAVKHFGTALPAGVTLIMSFNLLAHPLTALVFFAWISGNPLYIGVTVVIYLAFLFLLRTHRESIYAYLKTMADKNSGYEGSCEKIFIAED

SEQ ID NO: 4615 - DNA, 987 bp, Streptococcus agalactiae
atgaaaaaaattgatggacatgctcatattgttgatacaattgcaggatttaatggtaaaggacgtcttaatgcccttggaaacggttatgctatttgggatgatggtgatttaattaagctcatcccagacgaatacggtgacaaagcatttacagctgaagcttttttgaagtatatggatgctaatggtgtagataaagcagtcattttgcaaggtcatcttaatggttatcaaaattattatacgcatttagctattaaacgttatccagaacgttttacaggcgcattctctgttgatccatttgcagataacgcaatgcaaattgtaaaacgtcatgttgaagtccttggttttcgagctattaaatttgaaattagtcaaggagggggtatccatggataccgtggacaaaaaacgcctttccgtcttgatacagacccacatgtgagtcgtattttgacttatctgttagactatccaggatttgtagttacagttgattatggcaattgggatcaaattagtcaccaacctgatgctattgctaatttagctcgcctttatacgagtctcgattttgttgtttgtcacctctcttttccacatgttgagcattcaaatcgattgcgtgctgaacttaatatgtggaaaaacttcaacaatatctatactgatatttcagctattcaagatattgatgccccagatagttttccttttccaaaatcagaacaaaatgtacgtattgctaaagaagttcttggggctaagcgtatcatttggggaactgattctccatggtcagcgaccttcaatacttacgaagaattagctacttggctagagaatgttgatattttcagtcaagaggaactagaagatgttatgtacaataatgctgagcgtgtttactttaaagaagaacatgtaaaggctaacagagcaggtatagatgatacaaccaaagagctcaatctctat

SEQ ID NO: 4616 - protein, 329 aa, Streptococcus agalactiae
MKKIDGHAHIVDTIAGFNGKGRLNALGNGYAIWDDGDLIKLIPDEYGDKAFTAEAFLKYMDANGVDKAVILQGHLNGYQNYYTHLAIKRYPERFTGAFSVDPFADNAMQIVKRHVEVLGFRAIKFEISQGGGIHGYRGQKTPFRLDTDPHVSRILTYLLDYPGFVVTVDYGNWDQISHQPDAIANLARLYTSLDFVVCHLSFPHVEHSNRLRAELNMWKNFNNIYTDISAIQDIDAPDSFPFPKSEQNVRIAKEVLGAKRIIWGTDSPWSATFNTYEELATWLENVDIFSQEELEDVMYNNAERVYFKEEHVKANRAGIDDTTKELNLY

SEQ ID NO: 4617 - DNA, 1554 bp, Streptococcus agalactiae
ttgtacctcctttttaaatcaacaatgaggagacaaattatgacttattaccttagtattgactacggcggtacaaataccaaggcgcttatttttgacaaattaggacaccaaatcgctgtttcgagttttgaaactttaaaaaatgagactcaatctggtcatcgtcaagtaaaccttgttaaaacgtggaatgctataacttctgctattagagaggttattcaaatctcaaaactcagccctgagcagattagtgcagtagcatgtattggacatgggaaaggtctttatctgctagataataagttggagccacttgaacaaggaattttgtctacagataatcgtgccaaagatttggcgcaatatttcgaatctaaacttgataatatttgggagttgactcggcaacatattttcccttcacaaagtccagttattttacgttggcttaaagattatcagcccgaaacctataaatcaataggggcggtcctttctgcaaaggactttattcggtataagcttacaggaaaagtacagcaagaatatggtgacgcttcaggtaatcattggataaatttccaaacaggaacttatgatccagctattttagatttttttggcattagagagatagaaaactcacttcctgaacttatagatagtgcagatttagttcctgggggaattagttctcaagcagcaaaagagactggtcttgtagaagggacccccgttgttggagggctctttgacatcgatgcttgtgctcttggatcaggtgttttagagtcagatacttttagtgttatttcgggaacttggaatattaatacatatccaagtttaaaaccagcaaagcaagatagtggtcttatgacttcctattttccagatcgtcgttatctcttagaggcaagtagccctacttctgcagggaatcttaattttatgttaaaaatgctcatgcatcaagaaattgataacgctaaatctagtggaggttctatctatgataatttagaagaatttctcactcatactgatgctacacatcatggacttattttctttccgtttctttacggtagtaacacatcacaagatgctagcgcttgcttttttgggctaacaactaaatcgacgaaatctcagatgatacgtgcggtatatgaaggtattgcgtttgcacataagcagcatatcactgatttaataaaaagtaggggcagtgtgccaaaaataattcgtttctctggcggagctaccaactcaccagcatggatgcaaatgttttctgatatcttaaactttcctattgaaacagtagaaggcacagaattaggagggttaggaggagctattttagcacgtcatgctttagataagatttcgttaaaggaagcagtccaagatatggttcgtgtaaaagctatttataaacctcaattatccgaagtaaaggggtacaaaaaaaaatatcacgcttaccaaaaattattagaaacactggatcctatttggtcggaactcggtcatctgaataag

SEQ ID NO: 4618 - protein, 518 aa, Streptococcus agalactiae
MYLLFKSTMRRQIMTYYLSIDYGGTNTKALIFDKLGHQIAVSSFETLKNETQSGHRQVNLVKTWNAITSAIREVIQISKLSPEQISAVACIGHGKGLYLLDNKLEPLEQGILSTDNRAKDLAQYFESKLDNIWELTRQHIFPSQSPVILRWLKDYQPETYKSIGAVLSAKDFIRYKLTGKVQQEYGDASGNHWINFQTGTYDPAILDFFGIREIENSLPELIDSADLVPGGISSQAAKETGLVEGTPVVGGLFDIDACALGSGVLESDTFSVISGTWNINTYPSLKPAKQDSGLMTSYFPDRRYLLEASSPTSAGNLNFMLKMLMHQEIDNAKSSGGSIYDNLEEFLTHTDATHHGLIFFPFLYGSNTSQDASACFFGLTTKSTKSQMIRAVYEGIAFAHKQHITDLIKSRGSVPKIIRFSGGATNSPAWMQMFSDILNFPIETVEGTELGGLGGAILARHALDKISLKEAVQDMVRVKAIYKPQLSEVKGYKKKYHAYQKLLETLDPIWSELGHLNK

SEQ ID NO: 4619 - DNA, 759 bp, Streptococcus agalactiae
atgaaacaagaagatattattatcaatagtattgtattcaaaaaacagttagacaaaggttttacacaagttcagctcattaagttagtaaaggatttaggattttcacgatttgagatacgtcaagaattgcttcaagatccagatagagagctacccgctttaaaagcagaggctgacttttatgatatcaatctttactatagtgctaatgaagaccttatcaaaggagggaaagttaatccttatcttaataaaggccttaaagaagcatcacagttaggagctcctttcattaagctaaatgttggacaaaccagaaacttaagtaaagaagagttagaacctcttaaagagatattgaaaagccaaactattggtataaaggtggaaaataatcaagaccctaaagcagctacagtggagaattgccaatattttatgactctagtgaaagaattacaaataccaataagttttgtttttgatactgctaattgggcctttatcaaccaagacctataccaagcggtaaataacttagcttgtgataccacctaccttcactgtaaaaattttatacaggtagctggaaagccccacctctcgaagagcctcttcgaaggagagattaatctgactgatttgttaaagagtttctctaattgtgagtatctagctctagaataccccacagagttggagatattaaaaagggatgttcaacgtttaatctctatcagtaatagtcaaaacttt

SEQ ID NO: 4620 - protein, 253 aa, Streptococcus agalactiae
MKQEDIIINSIVFKKQLDKGFTQVQLIKLVKDLGFSRFEIRQELLQDPDRELPALKAEADFYDINLYYSANEDLIKGGKVNPYLNKGLKEASQLGAPFIKLNVGQTRNLSKEELEPLKEILKSQTIGIKVENNQDPKAATVENCQYFMTLVKELQIPISFVFDTANWAFINQDLYQAVNNLACDTTYLHCKNFIQVAGKPHLSKSLFEGEINLTDLLKSFSNCEYLALEYPTELEILKRDVQRLISISNSQNF

SEQ ID NO: 4621 - DNA, 1677 bp, Streptococcus agalactiae
ttgattattctcgataaaaaaagttatgacctcctcttttacctattgaaattagaggaacctgaaacagttatggcaattgccaacgcacttaatcagtctagacgtaaagtgtattatcacttagagaagataaacgatgcactgcctagcgatgtgcctcagattgttagttatccacgtgtaggaatcttgctaacagaaaaacaaaaagcagcctgtcgtcttttattagatgaagtgactgattatagttacgtcatgaaaagtagtgagaggttgcagctgtctttagtatctatcgtagtagctaaggaccgcgtaacgattgataggttgatgcaactaaacgatgtttctcgaaatactatcttaaacgatttaaacgaattaagaagtgagttagcagagaaagaatataatttacagttacaatcaacaaaatgtcgtggttattttttagatggtcacccattgtccattatccagtacttatataagctcttagatgatatctaccataatggaagtagtagttttatagacctttttaatcataaactgtctcaagcttttggtgccagcacttatttttctaaagaggttcttgattattttcatcattatctcttcatttctcaacgaagtctaggtaagaaaatcaacagtcaagatggtcagtttatgattcagattttgccttttatactaatggcttatcgtaagatgcgattaagtcctgaagtacagacctctcttaatagtgattttagcttggtttggcaacgtaaggaatatgagattgctaaagagttggctgatgagctggaagaaaattttcagttatcactggatgagattgaagtgggactagtagccatgcttatgcttagtttccgcaaggaccgtgacaatcatttagagagccaggattatgatgatatgcgagctactctaaccagttttttgaaagaattggaagaacgatatcaccttcactttgttcataaaaaggacttactaagacaacttcttactcactgcaaggcactcttatatcgtaaacgttatggtattttttctgttaatcctttaacagagcatattaaagacaaatatgaagaactttttgccataacctcgtcttctgtaaagcttttagagaaagcttggcaaatcaaattgaccgatgatgatgtagcatatctaacgattcatttaggaggggaacttcgtaatagtcaacaatctcctaataaacttaagttagttattgtatctgatgaaggaatagcgattcagaaacttcttttaaagcaatgtcaacgctacttaacaaatagtgatatagaagctgtttttacaaccgaacagtatcaaagtgtgagtgatcttatgcatgtagatatggttgtctctactagtgatgctttagaatctcgttttccgatgttagtagttcaccctgttttgacagatgatgatattattcgcttgattcgcttttctaaaaaaggtaactgtgcaaatagtaatcaatttaccaatgaacttgaaaaaacaattgctcaatatgtcaaggaagatagtgaacgctacgtgctgaaatctaagattgagaaacttattcatcaagaattgctccaagacgtccttccccttcaaagtacagtttgt

SEQ ID NO: 4622 - protein, 559 aa, Streptococcus agalactiae
MIILDKKSYDLLFYLLKLEEPETVMAIANALNQSRRKVYYHLEKINDALPSDVPQIVSYPRVGILLTEKQKAACRLLLDEVTDYSYVMKSSERLQLSLVSIVVAKDRVTIDRLMQLNDVSRNTILNDLNELRSELAEKEYNLQLQSTKCRGYFLDGHPLSIIQYLYKLLDDIYHNGSSSFIDLFNHKLSQAFGASTYFSKEVLDYFHHYLFISQRSLGKKINSQDGQFMIQILPFILMAYRKMRLSPEVQTSLNSDFSLVWQRKEYEIAKELADELEENFQLSLDEIEVGLVAMLMLSFRKDRDNHLESQDYDDMRATLTSFLKELEERYHLHFVHKKDLLRQLLTHCKALLYRKRYGIFSVNPLTEHIKDKYEELFAITSSSVKLLEKAWQIKLTDDDVAYLTIHLGGELRNSQQSPNKLKLVIVSDEGIAIQKLLLKQCQRYLTNSDIEAVFTTEQYQSVSDLMHVDMVVSTSDALESRFPMLVVHPVLTDDDIIRLIRFSKKGNCANSNQFTNELEKTIAQYVKEDSERYVLKSKIEKLIHQELLQDVLPLQSTVC

SEQ ID NO: 4623 - DNA, 1644 bp, Streptococcus pyogenes
atgatgattttagataaaaagagttatgacttgctgtcttatttacttaaactagaaacacctgagacagttatggccatttctcatgctttaaatcagtcacgtcgtaaagtttattaccagcttgacaaaattaatcaggctttgccaaagggagtagatcagattatctcttatcctagacttggcattcttttaacggcggatcaaaaagctgcttgtcgcttattattagaagaagtgactgattataattatgtcatgaaaagtgatgagcgcagacgactatcctcgatttatattgcggtttccactgagcgcgtgaccattgataaactgatgcagatcaatgatgtgtctcgtaacacgattttaaatgacctgactgagttaagggaagaactggaagacaaacaatacaagattcagcttcatgcgacaaaggctaggggatattattttggttgtcatccaatggctcttattcaatacctgtacaaattgttagtggacgtttaccaaggtggcaatactagctttattgatatattcaaccgtaaactctcagagatacaaggcttatcggtttatttttctaaagatattttgacctattttcatgagtatctttttttatctcaagctagtttaggaaagacaattaatacccaagatagccaattcatgttgcagattttacctttcatgcttttaagttatcgtaatatgcgtcttgattcagaaacaaagtctgctcttaaacaagaatttcatttgatttggaaacgtaaagaatatcacattgctcaggacttagctagagagctttaccataattttaagcttcatttggatgatatcgaagttagtatggtagcgatgttgatgttgtcttttcgaaaagatcaagatcatcacgtggaaagtcaagattacgatgacatgcgagcaaccattagtcactttattgaccagttggagagccgttatcagttacatttcacgcataaacaggatttgctgaagcggttgacgacccattgtaaggcgctcgtttaccgtaaagcttatgggatttttttagttaatcccttaacagaccatgttaaagaaaaatacgaagaattgtttgctatgactcaatcttgtgccactattttggaacaagattggacgattagcttgacagacgatgatattgcctacttgactatccatcttgggggagagctgcgtcacaataatacagagcaagaaaagaccaaactcgttattgtttcagatgatgggataggcattcaaaagttattgttcaaacagtgtcaaaggtatctagcaaatggtcagattgaagctgtttttacgacagaacagtatcagagtgtttacgatcttttagcagtcgatatgattgttgctactacagatacgctaaagactaaaatcccgatgcttattgttaaccctattttaagtgacgatgatatcatcaaattgatacgcttttcaaagcaaggacgcttgagtgagcactcccgcttttctacagagctcacaaaagcaattgaagctgttgtaaaagatgaatcagatcgttatgccttggtttctaaaattgaaaaactcattcatcgcgagctgcta

SEQ ID NO: 4624 - protein, 548 aa, Streptococcus pyogenes
MMILDKKSYDLLSYLLKLETPETVMAISHALNQSRRKVYYQLDKINQALPKGVDQIISYPRLGILLTADQKAACRLLLEEVTDYNYVMKSDERRRLSSIYIAVSTERVTIDKLMQINDVSRNTILNDLTELREELEDKQYKIQLHATKARGYYFGCHPMALIQYLYKLLVDVYQGGNTSFIDIFNRKLSEIQGLSVYFSKDILTYFHEYLFLSQASLGKTINTQDSQFMLQILPFMLLSYRNMRLDSETKSALKQEFHLIWKRKEYHIAQDLARELYHNFKLHLDDIEVSMVAMLMLSFRKDQDHHVESQDYDDMRATISHFIDQLESRYQLHFTHKQDLLKRLTTHCKALVYRKAYGIFLVNPLTDHVKEKYEELFAMTQSCATILEQDWTISLTDDDIAYLTIHLGGELRHNNTEQEKTKLVIVSDDGIGIQKLLFKQCQRYLANGQIEAVFTTEQYQSVYDLLAVDMIVATTDTLKTKIPMLIVNPILSDDDIIKLIRFSKQGRLSEHSRFSTELTKAIEAVVKDESDRYALVSKIEKLIHRELL

SEQ ID NO: 4625 - DNA, 1089 bp, Streptococcus agalactiae
atgcctaacgttaaagatattactagagaatcatggattttatcaacattcccagaatggggtacatggctaaacgaagaaattgaagaagaagttgttgctgagggcaactttgcaatgtggtggttaggaaactgtggtgtttggattaaaacaccaggtggtgctaatgttgttatggacctatggtcaaaccgcggtaaatcaacaaaaaaagtaaaagatatggttcgtggacaccaaatggctaatatggcaggtgttcgtaaactccaaccaaacttacgcgcacaaccaatggttattgatccatttgctattaatgaattggattactatcttgtttcacatttccacagtgaccacattgatatcaacactgcggcagccattattaataatcctaacttagaccatgttaaatttgttgggccatatgaatgtggtgaaatttggaaaaaatggggagttccagaagaacgaatcatcgtgattaaaccaggtgaatcatttgagtttaaagatatcaaagttactgctgttgaatcatttgaccgtacttgcttggtgacacttccagtagatggtgcagaagaacatgatggagaacttgctggtttagccgtgactgatgaagaaatggctcgtaaagcagttaactatatttttgaaacaccaggtggaacaatctatcatggagctgactcacatttttcaaattattttgctaaacatggtaaagactacaagattgacgtagctattaacaactatggtgataacccagttggtattcaggataaaatgacttcaatcgatcttcttcgtatggcagaaaatctccgtgccaaagtcattattcctgtacactacgatatctggtctaacttcatggcttctacagacgaaatcttacaattgtggaaaatgcgtaaagaacgccttcaatatgacttccatccatttatttgggaagttggaggtaaatacacttatccacaagataaagatagaattgaataccatcacccacgtggttttgatgattgcttcgaacaagaatcaaatattcaatttaaagcacttcta

SEQ ID NO: 4626 - protein, 363 aa, Streptococcus agalactiae
MPNVKDITRESWILSTFPEWGTWLNEEIEEEVVAEGNFAMWWLGNCGVWIKTPGGANVVMDLWSNRGKSTKKVKDMVRGHQMANMAGVRKLQPNLRAQPMVIDPFAINELDYYLVSHFHSDHIDINTAAAIINNPNLDHVKFVGPYECGEIWKKWGVPEERIIVIKPGESFEFKDIKVTAVESFDRTCLVTLPVDGAEEHDGELAGLAVTDEEMARKAVNYIFETPGGTIYHGADSHFSNYFAKHGKDYKIDVAINNYGDNPVGIQDKMTSIDLLRMAENLRAKVIIPVHYDIWSNFMASTDEILQLWKMRKERLQYDFHPFIWEVGGKYTYPQDKDRIEYHHPRGFDDCFEQESNIQFKALL

SEQ ID NO: 4627 - DNA, 1089 bp, Streptococcus pyogenes
atgactaaagtacaagatattacacgtgaatcatggatccttaacacgtttccagaatggggaacatggttaaatgaagaaatcgagcaagaagtcgtgccagctgacaactttgcgatgtggtggttaggaaactgtggtatctggattaagacaccaggcggtgctaatgttgtcatggacttatggtcaaatcgtgggaaagcgaccaagcaagttaaggatatggttcgtggacatcaaatggctaatatggcaggagctcgtaaattacagcccaatcttagggcccaaccaatggtgattgatccatttatgattaatgagttggattattatttggtttctcattatcatagtgaccacatcgatatcaatactgcggcagccattatcaataacccaaaacttaatcatgttaaatttgtaggaccttatgaatgtggtgaagtttggaaaaattggggtgtgccaaaagatcgtattatgatcttaaagccaggtgatagctttgaattcaaagatattaagatcaccgctgtagagtcgtttgaccgcacctgtctggtaactctcccaatacaaggagctgatgctcaagatggtgatttagcaggtttagctatcacagatgatgacatggctcgcaaagctgttaactatatttttgaaacaccaggtggtaccatctatcatggtgcggattctcatttttcgaactactttgctaaacatggacgtgattatgatattgacgttgtgttaaataactatggggaaaacccaattgggattcaagacaagatgacttctgttgaccttcttcgtatggcagaaaatctccgtgccaaagtcgttatcccagttcattatgacatttggtcaaactttatggcatcaacagatgaaatccttgaactgtggaaaatgcgcaaagaacgtctccaatatgatttccatccctttatctgggaggttggtggcaagtatacttatccacaagaccaaaatcgtatcgaataccatcatcctcgtggatttgatgactgcttcttagaagattctaatatccaatttaaagctttacta

SEQ ID NO: 4628 - protein, 363 aa, Streptococcus pyogenes
MTKVQDITRESWILNTFPEWGTWLNEEIEQEVVPADNFAMWWLGNCGIWIKTPGGANVVMDLWSNRGKATKQVKDMVRGHQMANMAGARKLQPNLRAQPMVIDPFMINELDYYLVSHYHSDHIDINTAAAIINNPKLNHVKFVGPYECGEVWKNWGVPKDRIMILKPGDSFEFKDIKITAVESFDRTCLVTLPIQGADAQDGDLAGLAITDDDMARKAVNYIFETPGGTIYHGADSHFSNYFAKHGRDYDIDVVLNNYGENPIGIQDKMTSVDLLRMAENLRAKVVIPVHYDIWSNFMASTDEILELWKMRKERLQYDFHPFIWEVGGKYTYPQDQNRIEYHHPRGFDDCFLEDSNIQFKALL

SEQ ID NO: 4629 - DNA, 2412 bp, Streptococcus agalactiae
atgttactaaaatcacaattaagattaggagaaataatgtcagaatttgatacaaaatcatatttagaaaaacttgatgcatggtggagagcagctaattatatttctgcagcacaaatgtatctaaaggataaccctctcttgagacgagagctggttgaaaacgacttaaaggttcatccaattggtcactggggcactgtacctggacaaaattttatctatgctcacttaaatcgcgctattaataaatacgatttagacatgttctatattgaaggtccaggtcatggtggtcaagttatggtatctaattcatatttagatggttcatatactgaattaaacccaaatattgagcaaacagaggatggctttaagcagttatgtaaaatcttctctttcccatgtggaattgcatcccatgctgcaccagaaacaccagggtcaattcatgaaggcggtgaacttggttacgcactttctcatgcgacaggtgccatcctagacaatccagatgttattgctgcgactgttattggtgatggtgaaggtgaaacaggaccacttatggctggttggctatctaatacctttatcaatccagtaaatgatggtgctgttctaccaatcttctatttaaatggtggtaaaatccataacccaactatctttgaacgtaagacagatgaagaattatctcagttttttgaaggattaggttggaaacctatttttgcagatgttgttgaactctctgaggatcatgcggctgctcatgctttgtttgcagaaaaattagatcaagctattcaagagattaaaaccattcaatcagaagcacgacaaaaaccagcagaagaagctatccaagcaaaattccctgtcttagttgcacgtattcctaagggttggactggtccaaaagcttgggaaggaacaccaattgaaggtggcttccgcgctcaccaagtaccaattccagtagatgcccaccatatggaacatgttgattctcttttgtcatggcttcaatcataccgtccagaagaattatttgatgaaaatggtaaaatcgttgatgagattgctgctatttcaccaaaaggtgatcgtcgcatgtccatgaatccaataaccaatgctggtattgttaaagcaatggatacagcagattggaagaaatttgctcttgatattaatgttccaggtcaaattatggcacaagatatgattgaatttggaaaatatgcagcagatttggtagatgctaatccagataatttccgtatttttggtccagatgaaacgaaatcaaatcgtcttcaagaagtgtttacacgtactagccgtcaatggcttggtcgtcgtaaaccagattatgacgaagctttaagtccagctggacgtgttattgattcccaattgtctgaacaccaagcagaaggtttcttagaaggttatgttttaactggtcgtcacggcttctttgcttcatacgaatcattccttcgcgttgtagattcaatggtaacacaacatttcaaatggttacgtaaatcaaaaacacacacaacatggcgtaaaaattatccagcgcttaacctaattgcagcttcaactgttttccaacaagatcataatggttatactcaccaagatccaggtattttaactcatttagctgaaaaaacacctgaatacattcgtgaatatttaccagcagatactaactcacttctagctgttatggataaagcgtttaaagctgaagataaaattaatttaattgtgacatctaagcaccctcgtccacaattttactctattgctgaagcagaagagttagtggcagaaggatataaggtgattgactgggcttcaaatgtgtcgcttaatcaagagccagatgttgtctttgctgcggcgggaacagaacctaacttagaagctttggcagctattagcattcttcataaggctttcccagaacttaagattagatttgttaatgtattagacatcctaaaacttcgtcatccttcacaagatgctcgcggtttatcagatgaagagtttaacaaagtctttaccacagataaacctgttatttttgctttccatggttatgaagatatgattcgagatattttctttagtcgtcacaatcataatttgcatacgcatggttaccgtgaaaatggtgacatcacaacaccatttgatatgcgcgtgatgtcagaattggaccgattccatctggcacaggatgcagctcttgcttctttaggaaataaagcacaagccttcagtgatgaaatgaatcaaatggttgcttatcacaaagactatattcgtgaacacggagacgatattccagaagtacaaaattggaaatgggaaaatatcaag

SEQ ID NO: 4630 - protein, 804 aa, Streptococcus agalactiae
MLLKSQLRLGEIMSEFDTKSYLEKLDAWWRAANYISAAQMYLKDNPLLRRELVENDLKVHPIGHWGTVPGQNFIYAHLNRAINKYDLDMFYIEGPGHGGQVMVSNSYLDGSYTELNPNIEQTEDGFKQLCKIFSFPCGIASHAAPETPGSIHEGGELGYALSHATGAILDNPDVIAATVIGDGEGETGPLMAGWLSNTFINPVNDGAVLPIFYLNGGKIHNPTIFERKTDEELSQFFEGLGWKPIFADVVELSEDHAAAHALFAEKLDQAIQEIKTIQSEARQKPAEEAIQAKFPVLVARIPKGWTGPKAWEGTPIEGGFRAHQVPIPVDAHHMEHVDSLLSWLQSYRPEELFDENGKIVDEIAAISPKGDRRMSMNPITNAGIVKAMDTADWKKFALDINVPGQIMAQDMIEFGKYAADLVDANPDNFRIFGPDETKSNRLQEVFTRTSRQWLGRRKPDYDEALSPAGRVIDSQLSEHQAEGFLEGYVLTGRHGFFASYESFLRVVDSMVTQHFKWLRKSKTHTTWRKNYPALNLIAASTVFQQDHNGYTHQDPGILTHLAEKTPEYIREYLPADTNSLLAVMDKAFKAEDKINLIVTSKHPRPQFYSIAEAEELVAEGYKVIDWASNVSLNQEPDVVFAAAGTEPNLEALAAISILHKAFPELKIRFVNVLDILKLRHPSQDARGLSDEEFNKVFTTDKPVIFAFHGYEDMIRDIFFSRHNHNLHTHGYRENGDITTPFDMRVMSELDRFHLAQDAALASLGNKAQAFSDEMNQMVAYHKDYIREHGDDIPEVQNWKWENIK

SEQ ID NO: 4631 - DNA, 1221 bp, Streptococcus agalactiae
atgacaaatattttagaagtgaagaatttaaccaaaatttttgggaaaaagcaaaaagctgctcttgaaatggttaagcaaggaaaaagtaagacagaaattcttgaaaaaacaggagcgactgtaggtgtctatgatgcgagttttgaaataaaagaaggcgaaattttcgttatcatgggactttctggttcaggaaaatcaactttagttcggatgttaaaccgtttgattgacccatcatcaggaaatatctatttagatggtaaagatattgcaaagatgaatgtagaagatttacgtaacattcgtcgtcatgatatcaacatggttttccaaaattttggtcttttcccacatcgtacaattttagaaaatacagagtttgggttagagatgcgtggtgtttctaaggaagaacgtacaacgttagctgaaaaagctttggacaatgcaggtctattaccgtttaaagatcagtaccccagtcaattatcaggaggaatgcaacagcgtgttggtttagcacgtgcccttgctaacagccctaaaatccttctgatggatgaggccttctcagctttagacccattaattcgtcgtgaaatgcaagatgagcttcttgatcttcaagacacgaataaacaaactattatttttatcagccatgatttgaatgaagcgttacgtattggtgatcgtattgctctgatgaaagatggagaaatcatgcagattggtacaggagaagagattttgactaatccggctaatgattttgttcgtgagtttgttgaagacgttgatcgctcaaaagtgttaactgctcaaaatattatgataaaacctttaacaactgttttagaaattgatggcccacaagttgctttaacaagaatgcatcgtgaggaagtctcaatgttaatggcaacgaatcgtcgtcgccaacttctgggatccctaactgcagatgctgcaattgaagctcgtaagaaagatttgccgctttctgaagtgattgataaagatgttgtaacggtctcaaaagatacagttattacagatatcatgcctttaatttatgattcatctgctccgatagccgttactgatgataatgatagactcctaggggttatcattagaggacgtgtgatcgaagcacttgctaacgttcaagatgaaacagtagtagaatcgccaaaagaaacggtagaagct

SEQ ID NO: 4632 - protein, 407 aa, Streptococcus agalactiae
MTNILEVKNLTKIFGKKQKAALEMVKQGKSKTEILEKTGATVGVYDASFEIKEGEIFVIMGLSGSGKSTLVRMLNRLIDPSSGNIYLDGKDIAKMNVEDLRNIRRHDINMVFQNFGLFPHRTILENTEFGLEMRGVSKEERTTLAEKALDNAGLLPFKDQYPSQLSGGMQQRVGLARALANSPKILLMDEAFSALDPLIRREMQDELLDLQDTNKQTIIFISHDLNEALRIGDRIALMKDGEIMQIGTGEEILTNPANDFVREFVEDVDRSKVLTAQNIMIKPLTTVLEIDGPQVALTRMHREEVSMLMATNRRRQLLGSLTADAAIEARKKDLPLSEVIDKDVVTVSKDTVITDIMPLIYDSSAPIAVTDDNDRLLGVIIRGRVIEALANVQDETVVESPKETVEA

SEQ ID NO: 4633 - DNA, 1194 bp, Streptococcus pyogenes
atggaaacaattttagaagtcaaacatctcagtaaaatttttggcaaaaaacaaaaagcagctcttgagatggtaaagactggcaaaaataagagtgagatttttaagaaaacaggcgctactgtaggtgtctatgacgctagttttgaggtcaaaaaaggtgaaatctttgttattatggggctatcaggaagtgggaaatcaacccttgtccgcatgctaaatcgtttgattgaaccttcagcaggatctatcttgctggaaggtaaagacatctcaaccatgtcagcagatcagctgcgtgaggtgcgccgccatgacattaacatggttttccaaagctttgccctctttcctcataaaaccattttggaaaataccgaatttggtttggaattacgtggcgttcccaaagaagaacgccagcgattggcagaaaaagcccttgataattcaggcctattagattttaaagaccagtacccaaaccaactatctggtgggatgcagcagcgtgtcggcctagcccgtgcgctagctaatagccctaaaattctcttaatggacgaggcattctcagcgcttgatcctttgattcgtcgtgagatgcaagatgaattacttgatttgcaagacagcatgaaacaaaccatcatctttatcagtcatgacttgaatgaagccttgcggattggtgatcggattgctttgatgaaagacggacaaattatgcaaattggtactggtgaggaaatcttgactaacccagccaatgactttgtgcgtgaattcgttgaggatgtggaccgttctaaagtcttgacagcacaaaatatcatgatcaaaccgttaacaactactgttgaattagatggacctcaagttgccttgaaccgtatgcacaacgaagaggtgtctatgttgatggcgacgaatcgccgccgccaattagtcggtagtttgacggccgatgccgctatagaggcgcgcaaaaaagggttaccgctatcagaagtgattgatcgcgatgtgagaactgtctcaaaagatactattattacagatattttgcctcttatctatgattcatctgctccgattgcagtgacagatgataataatcgtctgttaggtgtcattattcgaggacgagtgattgaagccttggctaatatctcagacgaagaccttaac

SEQ ID NO: 4634 - protein, 398 aa, Streptococcus pyogenes
METILEVKHLSKIFGKKQKAALEMVKTGKNKSEIFKKTGATVGVYDASFEVKKGEIFVIMGLSGSGKSTLVRMLNRLIEPSAGSILLEGKDISTMSADQLREVRRHDINMVFQSFALFPHKTILENTEFGLELRGVPKEERQRLAEKALDNSGLLDFKDQYPNQLSGGMQQRVGLARALANSPKILLMDEAFSALDPLIRREMQDELLDLQDSMKQTIIFISHDLNEALRIGDRIALMKDGQIMQIGTGEEILTNPANDFVREFVEDVDRSKVLTAQNIMIKPLTTTVELDGPQVALNRMHNEEVSMLMATNRRRQLVGSLTADAAIEARKKGLPLSEVIDRDVRTVSKDTIITDILPLIYDSSAPIAVTDDNNRLLGVIIRGRVIEALANISDEDLN

SEQ ID NO: 4635 - DNA, 1725 bp, Streptococcus agalactiae
ttggaaaatttattacaacataagttaccggtcgcaccatttgtagagtcaacgaccaattggattacgaaaactttttctggtttatttgactttatccagacaatcggtaatgcattgatggattggatgacaaaaacattactattcattaatcctttactttttattgtactaattacaattgctgtatttttcttagctaagaaaaaatggcaattaccgacatttactttcattggtttgctatttatctataaccaagggctgtgggaacagttgattaatacttttaacttggttttagtagcaagtttaatttctattattattggtgtaccactaggtatttggatggcaaaaagtgataaagttaaacaagttgttaatccaattcttgactttatgcaaactatgccggcattcgtttaccttattcctgcagtagccttctttggtatcggtatggtaccaggtgtctttgcctctgttgtatttgctctgcctccaacagtgcgctttactaacttggctattcgtgaaatcccacttgaattaatagaagcatctgattcatttggttcaacagttaagcaaaaattattcaaagttgaactaccacttgctaagaacactattatggcaggaatcaatcaaactatgatgttggctctttctatggtggttacaggatctatgatcggtgcacctggacttggtcgtgaggtgttatcggcgcttcaacatgctgatattggtacaggatttgttagtggtctatcgctagttattttagcaatcgtgttagaccgtgttagtcaattctttaattccaaaccgggtgagaagcaagctaaaacatcaaaagttaaaaaatgggtaggtttaggggccctggctctcttcattctagcagctcttggtcgcattgttgtcaatatgacttcaggaaatgaagccaaaggtcaaaaagtgaagatagcttatgtccaatgggattcagaagttgcttcaaccaacgttattgctgaagttttaaaatctaaaggatatgatgttgaattgacaccacttgacaatgcggtcatgtggcaaacagtcgccaatgggaatgctgattttacaacaagtgcttggttaccaaagacccacgggcaatattttaataaatacaaaaatagtttagatgacttaggtcctcacgttgagaacgtcaaaataggtttagttgttcctaaatacatgaacgtaaatagtattgaagaattatcaaatcaagcagataaacaaattacaggtatcgaaccaggtgcaggtattatgaagtctgctaaacaatcccttaaagattatccaaacctttcaagttggaagttgttatcagcatcaacaggagctatgacaacaaccttagggaaggctatcaaaaacaaagatcaagtagtcattacaggttggtcacctcactggatgtttgctaagtatgatttaaaataccttaaagatcctaagaaatcatttggtggtgaagaacatatcaatacaatagcacgcaagaatttgaaaaaagatatgccaaaagtatataaaattatcgataagttcaagtggactaaagaagatatggaatctatcatgttagatatggataaaggtatggagcctgctaaagcagctcaaaaatggattaaaaaccacaaaaaagaagtttcagagtggactaaa

SEQ ID NO: 4636 - protein, 575 aa, Streptococcus agalactiae
MENLLQHKLPVAPFVESTTNWITKTFSGLFDFIQTIGNALMDWMTKTLLFINPLLFIVLITIAVFFLAKKKWQLPTFTFIGLLFIYNQGLWEQLINTFNLVLVASLISIIIGVPLGIWMAKSDKVKQVVNPILDFMQTMPAFVYLIPAVAFFGIGMVPGVFASVVFALPPTVRFTNLAIREIPLELIEASDSFGSTVKQKLFKVELPLAKNTIMAGINQTMMLALSMVVTGSMIGAPGLGREVLSALQHADIGTGFVSGLSLVILAIVLDRVSQFFNSKPGEKQAKTSKVKKWVGLGALALFILAALGRIVVNMTSGNEAKGQKVKIAYVQWDSEVASTNVIAEVLKSKGYDVELTPLDNAVMWQTVANGNADFTTSAWLPKTHGQYFNKYKNSLDDLGPHVENVKIGLVVPKYMNVNSIEELSNQADKQITGIEPGAGIMKSAKQSLKDYPNLSSWKLLSASTGAMTTTLGKAIKNKDQVVITGWSPHWMFAKYDLKYLKDPKKSFGGEEHINTIARKNLKKDMPKVYKIIDKFKWTKEDMESIMLDMDKGMEPAKAAQKWIKNHKKEVSEWTK

SEQ ID NO: 4637 - DNA, 1725 bp, Streptococcus pyogenes
ttggaaacgatattacaaacaaaattaccagtagctcaactggtggagcagctaacggagtggctaactaaaactttctcaggtctatttgatattatgcaagtagttggtagctttttgatggattggatgaccaaaacacttttatttatccacccgttactttttattgttctagtaacagcagggatgtttttccttgctaagaaaaaatggcctttgccaacctttaccttgttaggattgctctttatttacaatcaagggttatggaagcagctaatgaatacctttactctggtgttagtagctagtttgatttcggtacttattggtattccgctggggatttggatggctaaaaatgccactgtccgtcagattgtgaatcctattttggactttatgcaaaccatgccggcttttgtttacttgattcctgccgttgccttttttggtattggtatggtgcctggagtatttgcttcagtcatctttgccttaccaccaacggttcgtttcacaaatttggccattcgtgacattccaacagaattgattgaggcctcagatgcctttgggtcaactgggaaacaaaagctctttaaagtggaattgcctttagctaaaaatactattatggcaggtgttaatcagaccatgatgttagccctttccatggtagtaacaggctccatgattggtgctcctggtttaggacgtgaagtcttgtcagcccttcaacacgctgatattggtagtggatttgtcagtggtcttgccttggttatcttggcgattgtgcttgaccgtatgacacagttgttcaatagcaaacctcaagaaaaagccaaagctggcaaaaccaataaatggattggtttagcagcccttgctgtctttttgatagctgctttaggacgcggtattatggctatgacttctggtatggcagataagggtgaaactgttaacatcgcttacgtgcagtgggattctgaggttgcctcaactcatgtgattgcagaagttttgaaaaacgaaggttaccatgtgaccttgactccgcttgacaatgccgttatgtggcaaaccgttgcaaatgggaacgctgatttttcaactagtgcttggttgccagtcacccatggccaacaatatcagaaatacaagtcaaaattagatgatttaggacctaacctaaaagggaccaaacttggtttagctgttccaaaatacatgacagatgtcaatagtattgaggacttaagcaaacaagccgatcaaaaaatcacagggatcgaaccaggtgcaggtatcatggcagcagcccaaaagactctaaaagagtatcataatctatctagttgggagttagtggcggcatcaacaggagccatgacgacttccttggatcaagcgatcaagaaaaaagatcctattgttgtgacagcttggtcaccacactggatgtttgccaagtatgacttgaagtaccttaaagatcctaaagaaatctttggctcgactgagaacatcaataccattgctcgtaaaggcttgaaaaaagaacttccaaatgtctacaaaatcattgataagttccactggacccaaaaagatatggaagcagtcatgcttgacatcaacaaaggcatgagtccagaagctgccgccaaaaaatgggtagaggcaaacaaatctaaagtatcaagttggacaaaa

SEQ ID NO: 4638 - protein, 575 aa, Streptococcus pyogenes
LETILQTKLPVAQLVEQLTEWLTKTFSGLFDIMQVVGSFLMDWMTKTLLFIHPLLFIVLVTAGMFFLAKKKWPLPTFTLLGLLFIYNQGLWKQLMNTFTLVLVASLISVLIGIPLGIWMAKNATVRQIVNPILDFMQTMPAFVYLIPAVAFFGIGMVPGVFASVIFALPPTVRFTNLAIRDIPTELIEASDAFGSTGKQKLFKVELPLAKNTIMAGVNQTMMLALSMVVTGSMIGAPGLGREVLSALQHADIGSGFVSGLALVILAIVLDRMTQLFNSKPQEKAKAGKTNKWIGLAALAVFLIAALGRGIMAMTSGMADKGETVNIAYVQWDSEVASTHVIAEVLKNEGYHVTLTPLDNAVMWQTVANGNADFSTSAWLPVTHGQQYQKYKSKLDDLGPNLKGTKLGLAVPKYMTDVNSIEDLSKQADQKITGIEPGAGIMAAAQKTLKEYHNLSSWELVAASTGAMTTSLDQAIKKKDPIVVTAWSPHWMFAKYDLKYLKDPKEIFGSTENINTIARKGLKKELPNVYKIIDKFHWTQKDMEAVMLDINKGMSPEAAAKKWVEANKSKVSSWTK

SEQ ID NO: 4639 - DNA, 1179 bp, Streptococcus agalactiae
atgagtttatccatcatgacaaaacacaaacacctaactctcttagaccgtaatgacatccaatctggtttggatagaggagaaacctttaaagccatcgggcttaatctactgaaacaccctactactatcgcaaaagaagtcaaacgaaataagcaactaagagaatcaaccaaagactgcctagactgtccgctactaagaaaagctccctatgtttgtaatgggtgtccaaagaggaggatcaactgtggttacaagaagaccttctatcttgctaagcaagctcaaagaaactatgaaaaacttttagttgaatctagagaaggaatccctttgaacaaagagaccttctggaaaatagatagagtgctttctaatggggtcaagaagggccaacgtatctatcatatcctcaaaaccaacgatctagaagtgagttcttcaaccgtttatcgacacatcaagaaaggctacctatccatcacaccaatcgacctacccagagctgtgaagttcaaaaaaaggcgaaagagcacactccctcctattccaaaagcgattaaagaagggcgacggtacgaggattttatagaacacatgaaccaatcagagctgaactcctggcttgaaatggacacggttattggacggattggtggaaaggtccttctcaccttcaatgtcgccttctgtaacttcatctttgccaaactgatggattctaagacagctatcgaaactgctaaacacatacaggtcattaagaggacactctatgataacaagagagacttcttcgaactctttcctgttatcctaacggataatggtggggaattcgctagagtggatgatattgagatagatgtttgtggacagtctcaactcttcttttgtgaccctaatcggtctgaccagaaagcaagaatcgagaagaatcataccctcgtgagagacatactgcctaaggggacttccttcgacaacttgactcaagaggacattaatctggcactatctcatatcaacagcgttaagagacaggctctaaatggtaaaacggcttatgagctattctcttttacttacggaaaagacatcgcaagtatactcggtattgaggaaattactgcggaagacgtctgccaatctcccaaactattaaaagacaaaatc

SEQ ID NO: 4640 - protein, 393 aa, Streptococcus agalactiae
MSLSIMTKHKHLTLLDRNDIQSGLDRGETFKAIGLNLLKHPTTIAKEVKRNKQLRESTKDCLDCPLLRKAPYVCNGCPKRRINCGYKKTFYLAKQAQRNYEKLLVESREGIPLNKETFWKIDRVLSNGVKKGQRIYHILKTNDLEVSSSTVYRHIKKGYLSITPIDLPRAVKFKKRRKSTLPPIPKAIKEGRRYEDFIEHMNQSELNSWLEMDTVIGRIGGKVLLTFNVAFCNFIFAKLMDSKTAIETAKHIQVIKRTLYDNKRDFFELFPVILTDNGGEFARVDDIEIDVCGQSQLFFCDPNRSDQKARIEKNHTLVRDILPKGTSFDNLTQEDINLALSHINSVKRQALNGKTAYELFSFTYGKDIASILGIEEITAEDVCQSPKLLKDKI

SEQ ID NO: 4641 - DNA, 699 bp, Streptococcus agalactiae
  misc_feature (1)..(699): n = a, c, g, or t
atgaaaaaagaaagtatatctattaaagatatcttgtggtttattattccgtcgttatttggagtattattattaatgactccatttaaatataatggtatgacaacagtagctgtctctgtaatctctaagacaattaatcaatggattaacgctgtttttcctatacattatattattttactaatcatttttatttcatgtgtgttagcactttgttatcgtctgtttagacctagctttattgaaaaaaatgacttgctaaaagaaatttctgacattaccattttctggctgattattcgtttgatcggtttggcacttggtctgatgacggttttacatattggtcctgaaatggtatgggggaaagagacaggcggccttatcctttttgatttgattggtggtttgtttaccattttccttgctgcgggttttattcttccatttttgacagaatttggtctactggagtttgttggtgtcttcctaactcccattatgcgtccattctttcagctacctggtcggtcagcagttaattgtgtagcctcatttgtaggtgatggtactattggaattgctttgaccgataagcagtatgttgagggttattataccagtagagaagctgcaacgatttccactactttttcagcagtatcaatcactttttgtcttgnnnnnttaattaat

SEQ ID NO: 4642 - protein, 233 aa, Streptococcus agalactiae
  MISC_FEATURE (1)..(233): Xaa = Any Amino Acid
MKKESISIKDILWFIIPSLFGVLLLMTPFKYNGMTTVAVSVISKTINQWINAVFPIHYIILLIIFISCVLALCYRLFRPSFIEKNDLLKEISDITIFWLIIRLIGLALGLMTVLHIGPEMVWGKETGGLILFDLIGGLFTIFLAAGFILPFLTEFGLLEFVGVFLTPIMRPFFQLPGRSAVNCVASFVGDGTIGIALTDKQYVEGYYTSREAATISTTFSAVSITFCLXXLIN

SEQ ID NO: 4643 - DNA, 1125 bp, Streptococcus agalactiae
atgcatattatcattcaaattacaatcattttgttggcaagcgttcttgcaactcttatttcaaaaagaattggaataccggctgttgttggacaactacttgtaggtatcatcatcggacctgcaatgctaggacttgttcatcaaaatcaggtattacatgtcttgtcagaaattggtgttatcttactcatgtttttagcgggtcttgaagctaattttgatcttttaaagaagtatcttaagcccagtctactggtcgcaattactggtgttattgttcctatggctctcttctacttcttgacacgcttgtttgggttccaaatcaatactgctatcttttacgggctcgtatttgctgcaactagtatttctatcacagttgaagttttacaagaatacaatcgtgtaaaaacagatactggtgctattattttaggtgctgctgttgctgatgatgtcttagctgttttgcttctgagtgtctttattgcaacaaatggaagctcttctaatatcggattacaaattatcattcaattgttattctttgttttcttatttatttgtatgaaataccttgtacctgctcttttcaaattaatcgaaaaggttcatttctttgagaaatatactattcttgctatccttatctgtttttctctatcaattttagccgataaagttggaatgagttctatcattggttcgttttttgcaggattagctattggacaaacttcttttgttgataaggtagaacataaaatttcacttcttagttacaccttctttatcccaattttcttcgcttcaattgcactacctcttaaattcgatggaatgatgtctcaccttcacacgatattaatctttactgctttggctgttttatcaaaattaattccagggtactttgtcggtcgaggctttaatttttcaaaattagaatctttaacaattggtggtggaatggtcagtcgtggcgagatggctctcattatagttcaagttggattagctgctaaaattatttcaagcactacttattccgagcttgttattgttgttatactatcaactattattgcgccatttattcttaaatattcatttaaagat

SEQ ID NO: 4644 - protein, 375 aa, Streptococcus agalactiae
MHIIIQITIILLASVLATLISKRIGIPAVVGQLLVGIIIGPAMLGLVHQNQVLHVLSEIGVILLMFLAGLEANFDLLKKYLKPSLLVAITGVIVPMALFYFLTRLFGFQINTAIFYGLVFAATSISITVEVLQEYNRVKTDTGAIILGAAVADDVLAVLLLSVFIATNGSSSNIGLQIIIQLLFFVFLFICMKYLVPALFKLIEKVHFFEKYTILAILICFSLSILADKVGMSSIIGSFFAGLAIGQTSFVDKVEHKISLLSYTFFIPIFFASIALPLKFDGMMSHLHTILIFTALAVLSKLIPGYFVGRGFNFSKLESLTIGGGMVSRGEMALIIVQVGLAAKIISSTTYSELVIVVILSTIIAPFILKYSFKD

SEQ ID NO: 4645 - DNA, 960 bp, Streptococcus agalactiae
atgagtattaaaaagctattgtttgcaggccttgcttttattttatttaccctagcgagtccagcatatgctgcatcagatgttcagaaagttattgatgaaacttatgttcaacctgattatgtcttaggttattcgctaaatcaagaacagcgtgcacagacattacaacttctgaattatgatgaatctagagacacgaaagttaaaacgctaaatactagctcatatgctaaaataatgaatatagctgatgatgcaagcatccaattatattcatctgttaaaataaaaaaattagggtctaacgataccttagcagtaaacattgttacacctgagaatattactaaagttacagaagatatgtatcgcaatgctgcagttacattaggtattgagcatgcaacgatatcagtggctgctccaataaaagtaactggggagagtgctcttgcaggtatctattattcattagagaaaaatggagcaagtgtatcatcagaaaataaacaactagcacaagaagagttaagtactttatctggtattaatgctgagaataagggtaaggaaggttatgacgccgacaagcttaatgtagctttaacggatattaagtcagccgtagctaaaggaggatctgatctttcaaaagatgatattcgaaaaattgttgaggaaacattgaaaaattatcatcttgataacgctgtaacggaaaatcaaataaatttaattgttaattttgcagttaatctttcacaaagtaatgtcatcaaaaatagtgatttcacgaacaccttgaataatttgaaagacaacattgtttcgaaagcaggatctaaatttaaaaatatcaatgtcaattttaatgctaataaagctgttgaatcaggtaagggatttttagctaatatttggcaacaaattgttaattttttccagcagtttggtagt

SEQ ID NO: 4646 - protein, 320 aa, Streptococcus agalactiae
MSIKKLLFAGLAFILFTLASPAYAASDVQKVIDETYVQPDYVLGYSLNQEQRAQTLQLLNYDESRDTKVKTLNTSSYAKIMNIADDASIQLYSSVKIKKLGSNDTLAVNIVTPENITKVTEDMYRNAAVTLGIEHATISVAAPIKVTGESALAGIYYSLEKNGASVSSENKQLAQEELSTLSGINAENKGKEGYDADKLNVALTDIKSAVAKGGSDLSKDDIRKIVEETLKNYHLDNAVTENQINLIVNFAVNLSQSNVIKNSDFTNTLNNLKDNIVSKAGSKFKNINVNFNANKAVESGKGFLANIWQQIVNFFQQFGS

SEQ ID NO: 4647 - DNA, 411 bp, Streptococcus agalactiae
atgaaattaaaggctgttcatcatattgcgataattgtttctgactatgaaaagtcaaaagacttctatgttaataagctaggatttgaaattattcgtgaaaaccatcgtccggagcgtcatgattataaattagatttacggtgcggtgatattgagcttgaaatatttggaaatcgtcttgatgatccagaatatgaaactcctcctcagagaataggtaggccgaattggccacgtgaagcatgtggtttacgacaccttgccttttacgttccagatgtggaagcgtacaaggtagaactggagaatttaggaatttttgtagagcctattcgttacgatgactatactggcaaaaagatgacctttttctttgatccagatggtttacctttagaattacatgaa

SEQ ID NO: 4648 - protein, 137 aa, Streptococcus agalactiae
MKLKAVHHIAIIVSDYEKSKDFYVNKLGFEIIRENHRPERHDYKLDLRCGDIELEIFGNRLDDPEYETPPQRIGRPNWPREACGLRHLAFYVPDVEAYKVELENLGIFVEPIRYDDYTGKKMTFFFDPDGLPLELHE

SEQ ID NO: 4649 - DNA, 414 bp, Streptococcus pyogenes
atgatgaaactaaatgccattcatcacgttgctattattgtatctgattatcatctgtcaaaagatttttatgtgaataaactcggatttgaaattatcagagaaaattatcgtcctgacaagcatgattacaaattagatttatcttgtggtcgtattgaattggagatttttggtaaggtgacaagtgaccccaactatcaagctcctcctaaacgtgtaagtgaaccagaatttaaaagtgaggcctgtggtttgaggcaccttgcatttcgtgttaccaacattgagagttatgtagatgatctaaagagcttaggaattccagtggagcctatcaggcatgatgattacacaggtgagaaaatgactttcttttttgatccggatggtttgcctttagaattacatgaa

SEQ ID NO: 4650 - protein, 138 aa, Streptococcus pyogenes
MMKLNAIHHVAIIVSDYHLSKDFYVNKLGFEIIRENYRPDKHDYKLDLSCGRIELEIFGKVTSDPNYQAPPKRVSEPEFKSEACGLRHLAFRVTNIESYVDDLKSLGIPVEPIRHDDYTGEKMTFFFDPDGLPLELHE

SEQ ID NO: 4651 - DNA, 741 bp, Streptococcus agalactiae
atgcgtaataaaaaaaaatcacatggtttctttaactttgttagatggttattggttgtattgctaattattgttgggttggctttggtgttcaataaaccaattcgcaatgctttcatagctcatcaatcaaatcattatcaaatttcacgagttagtaaaaaaacaattgaaaaaaataagaaatctaaaacaagttatgacttttcatcagtcaaatctattagtacagaatcgattttatctgctcaaacgaaatcacataatttgcctgtaataggagggattgctataccagatgtcgaaatcaatctcccaattttcaaaggactgggcaatacagagttgagttatggtgcaggaacgatgaaagaaaaccagattatgggaggcccaaataactatgccttagctagtcaccatgtctttggtttgacaggttcttctaagatgctcttttcacctttagaacatgctaagaaaggtatgaaagtttacctcactgataaaagcaaagtatacacttacactattactgaaatttcaaaggtaacaccagaacatgttgaggttattgatgatacacctggcaagagccaactcactttagtgacctgtacggatccagaagccacagaacgtattattgtgcatgctgaattagaaaaaacaggtgaattttcaacagcagatgagtcgatattaaaagcattttcgaaaaaatataatcaaattaatctc

SEQ ID NO: 4652 - protein, 247 aa, Streptococcus agalactiae
MRNKKKSHGFFNFVRWLLVVLLIIVGLALVFNKPIRNAFIAHQSNHYQISRVSKKTIEKNKKSKTSYDFSSVKSISTESILSAQTKSHNLPVIGGIAIPDVEINLPIFKGLGNTELSYGAGTMKENQIMGGPNNYALASHHVFGLTGSSKMLFSPLEHAKKGMKVYLTDKSKVYTYTITEISKVTPEHVEVIDDTPGKSQLTLVTCTDPEATERIIVHAELEKTGEFSTADESILKAFSKKYNQINL

SEQ ID NO: 4653 - DNA, 747 bp, Streptococcus pyogenes
atggtaaaaaaacaaaagcgtcgaaaaataaaatccatgtcttgggcaagaaaactactaatagctgtacttttaattctaggtttagcattgctttttaacaaacctatccgaaatacattaattgctcgaaactctaataaatatcaagtaacgaaagtttcgaaaaaacaaatcaaaaagaataaagaggctaagtcaacatttgatttccaagccgtagagccagttagtacagagagtgtcttgcaagcacaaatggcggctcagcaacttcctgttatagggggcattgccataccagagcttggcattaatttaccaatttttaaaggtttaggaaatactgagcttatttatggcgcaggaacgatgaaagaagaacaagttatgggaggagaaaataattattctcttgccagtcatcatatttttggaattacaggttcatctcaaatgctcttttcgccgcttgaaagagcacaaaatgggatgtccatctatttaacagataaagaaaaaatttacgaatacatcataaaagatgttttcacggtagctcctgaacgcgttgatgttatcgatgatacagctggtctcaaagaagtgactttagtgacttgtacagatatcgaagcaacagaacgtattattgtcaaaggagaactaaaaacagaatacgattttgataaagcgcccgccgatgtattgaaagcttttaatcattcttataaccaagtatctacc

SEQ ID NO: 4654 - protein, 249 aa, Streptococcus pyogenes
MVKKQKRRKIKSMSWARKLLIAVLLILGLALLFNKPIRNTLIARNSNKYQVTKVSKKQIKKNKEAKSTFDFQAVEPVSTESVLQAQMAAQQLPVIGGIAIPELGINLPIFKGLGNTELIYGAGTMKEEQVMGGENNYSLASHHIFGITGSSQMLFSPLERAQNGMSIYLTDKEKIYEYIIKDVFTVAPERVDVIDDTAGLKEVTLVTCTDIEATERIIVKGELKTEYDFDKAPADVLKAFNHSYNQVST

SEQ ID NO: 4655 - DNA, 2457 bp, Streptococcus agalactiae
atgcaagataaaaatttagtagatgttaatctaactagtgaaatgaaaacgagttttatcgattacgccatgagtgtcattgttgctcgtgcacttccagatgttagagatggtttaaaacctgttcatcgtcgtattttatatggtatgaatgaactaggtgtgacacctgataaacctcataagaaatcagcacgtattactggtgatgttatgggtaaataccatccacatggtgattcatctatttacgaagcaatggtgcgtatggcacaatggtggtcatatcgtcatatgctcgttgatggtcatggaaactttggttcaatggatggggatggtgctgccgcacagcgttatacagaagcacgtatgagtaaaattgctcttgagatgcttcgtgatatcaataaaaatacagttgattttcaagataactatgatggcagtgaacgtgaacctcttgttttaccagcgcgtttccctaatttattagtcaatggtgcaactggtattgctgtaggtatggcaacaaatattccaccacataatctaggtgagtctatagatgctgtcaaattggttatggataaccctgatgttactacacgggagttaatggaagttattcctggtccagattttcctactggtgccttggtgatgggacgttcaggtattcaccgtgcctatgaaactgggaagggatcaattgtcttacgttcacggactgaaattgaaacaacttcaaatgggaaagagcgtattgttgtcacagagtttccatatggcgttaataaaacaaaagtacacgagcatattgtacgtttagcacaagaaaagcgcattgaaggtattactgctgttcgtgatgaatcaagtcgtgaaggcgttcgttttgttattgaagttcgtcgtgctgcttcagcaaatgtgattttaaataatcttttcaaattaactagcttgcagacaaattttagcttcaatatgcttgctattgaaaaaggtgttccaaaaattttgtcattacgacaaatcattgataactatattgaacaccaaaaggaagttattgttcgtcgtactcagtttgacaaagctaaagcaggagcccgtgctcatatcttagaaggtttacttgtggcgcttgatcacttggatgaagttatcacaattattcgtaatagtgagacagacaccattgctcaagcagagttgatgtcacgttttgaattatcggagcgtcagagtcaagctattttagatatgcgtcttcgtcgtttaactggattagaacgcgataaaatccaatcagaatacaatgacttactagctttaattgctgatttagcagatatcttagctaagcctgaacgtgttgttaccattataaaagaagagatggatgaggttaagcgtaagtatgctgatgcccgtcgtacagaattaatgattggtgaagttttatcacttgaagatgaagaccttattgaggaagaagatgttcttattactctctcaaacaagggatatatcaagcgtctcgctcaagatgagtttagagcacaaaaacgtggaggacgcggtattcaagggactggagttaataacgatgattttgttcgtgaattggtttcaacaagtactcacgatactgtgcttttctttacaaatttagggcgtgtgtatcgtttgaaagcatatgaaattccagaatatggacgtacagctaaaggcctccctatcgttaaccttttaaaacttgacgaaggtgagacaattcaaacaattattaacgctagaaaagaagatgtcgctaataaatatttctttttcacaactcagcaaggtatagtgaaacgtacaagtgtttctgaatttagtaacattcgtcaaaatggacttcgtgctattaatttgaaagagaatgacgagttgattaacgtcctcttgattgacgaaaatgaagatgttattatcgggacacgtacaggctactctgttcgcttcaaagtgaacgctgtacgtaatatgggacgcacagcgactggggtacgaggcgttaatcttcgtgaaggtgataaagttgtgggagcttctcgtatcgttaatggacaagaagtactaatcatcactgaaaaaggttatggcaagagaacagaagcttcggaatatcctacaaaaggccgtggtggtaaaggaataaaaaccgctaatattactgctaaaaatgggccattagcacgcttagtgacgattaatggaaatgaggacatcatggtcattacagatacaggtgttattattcgaaccaatgttgctaatatttctcaaactggtcgttctaccatgggtgttaaagtgatgagacttgatcaagaagctaaaatcgtcactgttgcgctagtggaacaagaaattgaagataagtctaatatagaggatacaaaagaa

SEQ ID NO: 4656 - protein, 819 aa, Streptococcus agalactiae
MQDKNLVDVNLTSEMKTSFIDYAMSVIVARALPDVRDGLKPVHRRILYGMNELGVTPDKPHKKSARITGDVMGKYHPHGDSSIYEAMVRMAQWWSYRHMLVDGHGNFGSMDGDGAAAQRYTEARMSKIALEMLRDINKNTVDFQDNYDGSEREPLVLPARFPNLLVNGATGIAVGMATNIPPHNLGESIDAVKLVMDNPDVTTRELMEVIPGPDFPTGALVMGRSGIHRAYETGKGSIVLRSRTEIETTSNGKERIVVTEFPYGVNKTKVHEHIVRLAQEKRIEGITAVRDESSREGVRFVIEVRRAASANVILNNLFKLTSLQTNFSFNMLAIEKGVPKILSLRQIIDNYIEHQKEVIVRRTQFDKAKAGARAHILEGLLVALDHLDEVITIIRNSETDTIAQAELMSRFELSERQSQAILDMRLRRLTGLERDKIQSEYNDLLALIADLADILAKPERVVTIIKEEMDEVKRKYADARRTELMIGEVLSLEDEDLIEEEDVLITLSNKGYIKRLAQDEFRAQKRGGRGIQGTGVNNDDFVRELVSTSTHDTVLFFTNLGRVYRLKAYEIPEYGRTAKGLPIVNLLKLDEGETIQTIINARKEDVANKYFFFTTQQGIVKRTSVSEFSNIRQNGLRAINLKENDELINVLLIDENEDVIIGTRTGYSVRFKVNAVRNMGRTATGVRGVNLREGDKVVGASRIVNGQEVLIITEKGYGKRTEASEYPTKGRGGKGIKTANITAKNGPLARLVTINGNEDIMVITDTGVIIRTNVANISQTGRSTMGVKVMRLDQEAKIVTVALVEQEIEDKSNIEDTKE

SEQ ID NO: 4657 - DNA, 2484 bp, Streptococcus pyogenes
atgcaagatcgaaatttaattgacgtcaatctgacaagtgaaatgaaaacgagtttcattgactatgccatgagtgtcattgtggcaagagctttgccagatgtgcgtgatggtctgaaacctgtgcatcgtcgtattctctatgggatgaatgaactcggtgtgacacctgataaaccgcataaaaaatctgctcgtattacgggtgatgtcatgggtaaatatcacccgcatggggattcttctatttatgaagctatggttcgtatggctcagtggtggagttatcgccatatgcttgttgatgggcatggcaattttggttctatggatggtgatggtgctgccgctcaacgttatactgaagcgcgcatgagtaaaattgcgcttgaattattaagggatatcaataaaaataccgttaattttcaagataactacgatggaagcgaaagagaaccagtagtattaccagctcgctttcctaatttattagtcaatggagcgacagggattgccgttgggatggcaactaacattccgcctcataatttggcagagtctattgatgctgtcaagatggtaatggaacatccagactgtacaacaagagagttgatggaagtgatccctggacctgactttccgactggtgcccttgttatggggcgctcaggtattcatagggcttatgatactggtaaaggttctatcgttttacgctctcgaacagaaattgaaacaactcaaacaggtcgggaacgtattgtggttactgaatttccctatggcgtcaataaaacgaaagtgcatgaacacattgttcgtttagcacaagaaaaaagactagaaggtattacagcagttcgtgacgaatctagccgtgaaggagtgcgttttgttatcgagattcgtcgagaggcatccgcgacagttatcttaaataacctctttaaattaacaagtcttcagacgaatttcagttttaatatgttggctattgaaaatggtgtgcctaaaatattgtcactcagacaaatcattgataattacattagtcatcaaaaagaagttattatacgtcgcacccgatttgataaagataaagctgaagccagagctcatattttagaaggcttactgattgcccttgatcatttagacgaagtgattgctattattcgtaacagcgagacagatgtcattgctcagacagaattgatgtcacgtttcgacttgtctgaacgccaaagccaagctattttggatatgcgtttgcgtcgtttgactggtttggaacgtgataagattcaatcagaatatgatgatttgttggccttgattgctgacttatctgatattttagccaaaccagaacgtattatcactatcatcaaagaagaaatggatgagatcaagcgtaaatacgctaacccacgccgtacagaattaatggtcggtgaagtcctttctctagaagatgaagatctaattgaagaagaagatgttttgattaccttgtcaaataaaggttatatcaagcgtcttgctcaagatgaatttcgtgcccagaagcgtggtggacgtggcgtccaaggaactggagtcaacaatgacgactttgtacgtgaattgatatcaacaagtacccatgatactttgctcttctttacgaattttgggcgtgtctatcggttgaaagcttacgaaattccagaatatggtcgtacagcaaaaggtcttccaattgttaatctattgaaattagaagatggtgaaaccattcaaactattatcaacgcacgtaaggaagaaacagcaggtaaatccttcttctttacaacgaaacaaggcattgtcaaacgtacagaagtttcagaatttaataatatccgtcaaaacggtctccgtgctcttaagttgaaagagggagatcagctgattaacgtccttttgacaagcggtcaggatgacattatcattggaactcattccggatattctgttcgttttaatgaagcaagcatccgcaacatgggccgatcagctacgggtgttcgcggggttaagcttcgtgaagatgatcgcgttgttggcgcgtcacgtattcaagataaccaagaagttcttgtaattaccgaaaatggctttggtaagagaacaagtgctacagactatcctacaaaaggtagggggggaaaaggaataaaaacagctaatattacccctaaaaatggtcaattggctggattggttaccgtagatggtacagaagatatcatggtgattacaaataaaggtgtcattattcgcacaaatgttgcaaatatttcgcaaacaggtcgtgctactttgggtgttaaaattatgaaactagatgctgatgctaagattgtaacatttaccttggttcagcctgaagacagtagtatcgctgaaatcaatactgatcgtgaaaatagtatttcaaaaaataaagataat

SEQ ID NO: 4658 - protein, 828 aa, Streptococcus pyogenes
MQDRNLIDVNLTSEMKTSFIDYAMSVIVARALPDVRDGLKPVHRRILYGMNELGVTPDKPHKKSARITGDVMGKYHPHGDSSIYEAMVRMAQWWSYRHMLVDGHGNFGSMDGDGAAAQRYTEARMSKIALELLRDINKNTVNFQDNYDGSEREPVVLPARFPNLLVNGATGIAVGMATNIPPHNLAESIDAVKMVMEHPDCTTRELMEVIPGPDFPTGALVMGRSGIHRAYDTGKGSIVLRSRTEIETTQTGRERIVVTEFPYGVNKTKVHEHIVRLAQEKRLEGITAVRDESSREGVRFVIEIRREASATVILNNLFKLTSLQTNFSFNMLAIENGVPKILSLRQIIDNYISHQKEVIIRRTRFDKDKAEARAHILEGLLIALDHLDEVIAIIRNSETDVIAQTELMSRFDLSERQSQAILDMRLRRLTGLERDKIQSEYDDLLALIADLSDILAKPERIITIIKEEMDEIKRKYANPRRTELMVGEVLSLEDEDLIEEEDVLITLSNKGYIKRLAQDEFRAQKRGGRGVQGTGVNNDDFVRELISTSTHDTLLFFTNFGRVYRLKAYEIPEYGRTAKGLPIVNLLKLEDGETIQTIINARKEETAGKSFFFTTKQGIVKRTEVSEFNNIRQNGLRALKLKEGDQLINVLLTSGQDDIIIGTHSGYSVRFNEASIRNMGRSATGVRGVKLREDDRVVGASRIQDNQEVLVITENGFGKRTSATDYPTKGRGGKGIKTANITPKNGQLAGLVTVDGTEDIMVITNKGVIIRTNVANISQTGRATLGVKIMKLDADAKIVTFTLVQPEDSSIAEINTDRENSISKNKDN

SEQ ID NO: 4659 - DNA, 987 bp, Streptococcus agalactiae
atgactgcaactaaacaacataaaaaagttattctcgttggtgatggtgccgtaggttcttcttacgcttttgcacttgttaaccaaggtattgcgcaagagttaggtatcattgaaatcccagctttatttgataaagctgttggtgatgctgaagatctttcacatgcccttgcatttacatcacctaaaaaaatctacgcagctacttatgcagactgcgcagatgctgaccttgttgtcattactgctggcgcacctcaaaaaccaggtgaaactcgacttgaccttgttggtaaaaacttagcaattaacaaatcaatcgtaactcaagttgttgaatcaggtttcaacggtatcttcttagtagcggctaaccctgtagatgtacttacatattcaacttggaaattctcaggtttccctaaggaacgcgttattggttcaggtacttcacttgactctgcacgtttccgtcaagctttagcagataaaattggtgttgatgctcgttcagttcacgcatacatcatgggtgaacacggtgactcagaatttgccgtttggtcacatgctaacgttgctggtgtccaacttgaacaatggttacaagaaaatcgcgatattgatgaacaaggacttgttgatttgtttatttcagttcgtgacgctgcatactcaatcatcaacaaaaaaggtgctacatattacggtattgctgtcgcacttgctcgtattactaaagctatccttgatgatgaaaatgcagttcttccattatctgtatatcaagaaggccaatacggtgatgttaaagatgtctttatcggtcagcctgcaatcgtaggtgcacatggtatcgttcgtccagttaatatcccattaaatgatgctgaacttcaaaaaatgcaagcctcagctgaacaattaaaagatattattgacgaagcttggaaaaacccagaattccaagaagcatcaaaaaac

SEQ ID NO: 4660 - protein, 329 aa, Streptococcus agalactiae
MTATKQHKKVILVGDGAVGSSYAFALVNQGIAQELGIIEIPALFDKAVGDAEDLSHALAFTSPKKIYAATYADCADADLVVITAGAPQKPGETRLDLVGKNLAINKSIVTQVVESGFNGIFLVAANPVDVLTYSTWKFSGFPKERVIGSGTSLDSARFRQALADKIGVDARSVHAYIMGEHGDSEFAVWSHANVAGVQLEQWLQENRDIDEQGLVDLFISVRDAAYSIINKKGATYYGIAVALARITKAILDDENAVLPLSVYQEGQYGDVKDVFIGQPAIVGAHGIVRPVNIPLNDAELQKMQASAEQLKDIIDEAWKNPEFQEASKN

SEQ ID NO: 4661 - DNA, 981 bp, Streptococcus pyogenes
atgactgcaactaaacaacacaaaaaagtaatcttggtcggtgatggtgccgtcggttcatcatacgcttttgcattggtaacacaaaatattgctcaagaacttggtattattgatatttttaaagaaaaaactcaaggagatgcagaagatttaagccacgctctagcttttacatcacctaaaaaaatctatgcagctgactactcagactgtcatgatgctgatcttgttgtcttaacagctggtgctcctcaaaaaccaggtgaaacacgccttgaccttgttgaaaaaaaccttcgtatcaataaagaggttgttacacaaatcgttgcatctggtttcaaaggaatctttcttgttgctgctaacccagttgacgttttgacttactcaacatggaaattctcaggtttccctaaagagcgtgtcattggttcaggtacatctctagattcagcccgtttccgtcaagctctggctgctaaaatcggtgttgatgcgcgttcggttcacgcttacatcatgggagaacacggtgactctgaatttgctgtttggtcacacgctaacgttgctggtgtaggtctttacgactggctccaagctaatcgtgacattgatgagcaaggcctagttgatcttttcatttctgtacgtgatgctgcttactcaatcatcaataaaaaaggtgctactttctacggtattgcagttgccctagctcgtattacaaaagctattcttgatgatgaaaatgctgttcttccgctttctgttttccaagaaggccaatacgaaggtgttgaagattgctatattggtcaaccagctatcgttggagcgtatggaattgttcgtccagtaaacattccacttaacgatgctgaattacaaaaaatgcaagcctctgcaaatcaattgaaagctatcattgatgaagcctttgctaaggaagaatttgcttctgctgctaaaaac

SEQ ID NO: 4662 - protein, 327 aa, Streptococcus pyogenes
MTATKQHKKVILVGDGAVGSSYAFALVTQNIAQELGIIDIFKEKTQGDAEDLSHALAFTSPKKIYAADYSDCHDADLVVLTAGAPQKPGETRLDLVEKNLRINKEVVTQIVASGFKGIFLVAANPVDVLTYSTWKFSGFPKERVIGSGTSLDSARFRQALAAKIGVDARSVHAYIMGEHGDSEFAVWSHANVAGVGLYDWLQANRDIDEQGLVDLFISVRDAAYSIINKKGATFYGIAVALARITKAILDDENAVLPLSVFQEGQYEGVEDCYIGQPAIVGAYGIVRPVNIPLNDAELQKMQASANQLKAIIDEAFAKEEFASAAKN

SEQ ID NO: 4663 - DNA, 1368 bp, Streptococcus agalactiae
atgagtaaaatcgttgtcgtagggacaaaccacgctggtacagcagcaattaaaacaatgcttagtaattatggtgaagccaatgaaattgtaacatttgatcaaaattccaatatctctttcttaggatgtggtatggctctttggattggtgaacagattgatggtccagaaggattgttctactctgataaagagcagttggaaagtatgggagctaaggtttacatgaactctccagtacttaatattgactacgataaaaaagaagttacagctttagtagatggaaaagaacatgttgaaagttatgaaaaacttattttagcaactggttcacaacctatcattccaccaattaaaggtgttgaaattcaagaaggatctcgtgaatttaaagctactcttgaaaaccttcaatttgtgaaactttatcaaaattcagaagaagttattgaaaagttagctaaacctggtatcaatcgtgttgctgttgttggggctgggtatattggtgtagaattagcagaagctttccaacgtattggaaaagaagtaacacttgttgatgttgctgatacttgtatgggtggttactatgatcgtgactttactgatatgatgagtaaaaaccttgaagaccatggtattcgtcttgctttcggacaagctgttcaagcagttgaaggtgatggtaaagtagaacgtcttgttactgataaagaaacatttgatgttgatatggtgatcttagctgttggattccgtccaaatacagaactcggtgcaggtaaattagatacattccgtaatggcgcttgggtagttgataagaagcaagaaacaagcgtgaaagatgtttatgctataggtgattgtgcgacaatttgggataattctcgtgatgatatcaattatattgctcttgcttcaaacgccgttcgtactggtattgtagcagctcacaatgcatgtggtacagagcttgaaggtgctggtgtccaagggtcaaatggtatctcaatctatggccttaacatggtgtcaactggtttgactttagaaaaagcaaaacaagctgggtacaatgcagttgaaacaggctttaatgaccttcaaaaaccagaatttatcaaacacaataatcatgaagtagctattaagattgtctatgataaagatagccgagttatccttggttgccaaatggtctcacacgaagatgtatctatgggaattcatatgttctcacttgctattcaagaaaaagttactattgaaaagcttgctttgaccgatatcttcttcttaccacattttaataagccatataactatattacaatggctgcattaggcgctaaagat

SEQ ID NO: 4664 - protein, 456 aa, Streptococcus agalactiae
MSKIVVVGTNHAGTAAIKTMLSNYGEANEIVTFDQNSNISFLGCGMALWIGEQIDGPEGLFYSDKEQLESMGAKVYMNSPVLNIDYDKKEVTALVDGKEHVESYEKLILATGSQPIIPPIKGVEIQEGSREFKATLENLQFVKLYQNSEEVIEKLAKPGINRVAVVGAGYIGVELAEAFQRIGKEVTLVDVADTCMGGYYDRDFTDMMSKNLEDHGIRLAFGQAVQAVEGDGKVERLVTDKETFDVDMVILAVGFRPNTELGAGKLDTFRNGAWVVDKKQETSVKDVYAIGDCATIWDNSRDDINYIALASNAVRTGIVAAHNACGTELEGAGVQGSNGISIYGLNMVSTGLTLEKAKQAGYNAVETGFNDLQKPEFIKHNNHEVAIKIVYDKDSRVILGCQMVSHEDVSMGIHMFSLAIQEKVTIEKLALTDIFFLPHFNKPYNYITMAALGAKD

SEQ ID NO: 4665 - DNA, 1368 bp, Streptococcus pyogenes
atgagtaaaatcgttgttgttggtgcaaaccatgctggtacggcctgtatcaagactatgttaacaaactacggtgatgctaatgagattgttgtatttgaccaaaactcaaatatttcatttttaggctgtggtatggcactttggattggtgagcaaattgctggaccagaaggacttttctattcagataaagaagaattagagtctttaggggctaaagtttacatggaatcacctgttcaatcaatcgactacgatgccaaaacagtgacagcgcttgttgatggtaaaaaccacgtggaaacttacgacaagttgatttttgcaactggctcacaacctatcttaccaccgattaaaggtgccgaaatcaaagaaggatcacttgaatttgaagcaactcttgaaaatcttcaatttgtgaagttataccaaaactcagctgatgtgattgcaaagcttgaaaacaaagacattaaacgtgtagccgtagttggtgctggttacattggtgttgagttagctgaagctttccaacgcaaaggcaaagaagtggttctgattgatgtcgtggacacttgcttggcaggttattacgaccgtgatttgactgacttaatggctaaaaacatggaagaacatggtattcaactagcctttggtgaaacagttaaagaagtagctggtaatggtaaggttgaaaagatcattactgacaaaaatgagtacgatgtggatatggttatcctcgccgttggtttccgtccaaacacaactcttggaaatggtaagattgatcttttccgtaatggtgctttccttgtcaataaacgccaagaaacttctattccaggtgtttatgctatcggtgactgtgcaactatctacgataatgctactcgcgatacaaactacattgctttagcttcaaatgccgtccgtacaggaattgtagcagcacataacgcttgtggtacagaccttgaaggtattggcgttcaaggctcaaacggtatttccatttacggattgcacatggtttcaactggtttgacacttgaaaaagcaaaacgtcttggttttgatgctgcagtgactgagtatactgataaccaaaaacctgaatttatcgaacacggtaacttcccagtaaccattaagattgtttacgataaagactcacgtcgtatcttgggtgctcaaatggcagcccgtgaagatgtgtcaatgggaattcacatgttctcacttgctatccaagaaggcgtaaccattgaaaagttggcattaactgatattttcttcttaccacatttcaacaaaccttacaactacatcacaatggcagcacttggtgccaaagac

SEQ ID NO: 4666 - protein, 456 aa, Streptococcus pyogenes
MSKIVVVGANHAGTACIKTMLTNYGDANEIVVFDQNSNISFLGCGMALWIGEQIAGPEGLFYSDKEELESLGAKVYMESPVQSIDYDAKTVTALVDGKNHVETYDKLIFATGSQPILPPIKGAEIKEGSLEFEATLENLQFVKLYQNSADVIAKLENKDIKRVAVVGAGYIGVELAEAFQRKGKEVVLIDVVDTCLAGYYDRDLTDLMAKNMEEHGIQLAFGETVKEVAGNGKVEKIITDKNEYDVDMVILAVGFRPNTTLGNGKIDLFRNGAFLVNKRQETSIPGVYAIGDCATIYDNATRDTNYIALASNAVRTGIVAAHNACGTDLEGIGVQGSNGISIYGLHMVSTGLTLEKAKRLGFDAAVTEYTDNQKPEFIEHGNFPVTIKIVYDKDSRRILGAQMAAREDVSMGIHMFSLAIQEGVTIEKLALTDIFFLPHFNKPYNYITMAALGAKD

SEQ ID NO: 4667 - DNA, 171 bp, Streptococcus agalactiae
ttgctcaaaagtggtaaatggctaccgataactgctaaactttgcgataaaccaaagaatagactagcaagcattgcaccaattggattccacttaccaaaaatcatcgccgctaaggagataaagcccggtcctaatatagttgtcgctgcaaagttaacagaaatagat

SEQ ID NO: 4668 - protein, 57 aa, Streptococcus agalactiae
MLKSGKWLPITAKLCDKPKNRLASIAPIGFHLPKIIAAKEIKPGPNIVVAAKLTEID

SEQ ID NO: 4669 - DNA, 966 bp, Streptococcus agalactiae
gtggtaagtaaattgagtttaacaacgatttttgcattgctattttcatcaatgctaatttacgcaacacctcttatctttacaagtattgggggaaccttctctgaacgtggtggtatcgtcaacgttggtttagaaggaattatggtaattggagctttctcaggcgttgtatttaatttagagtttgcttctgtttttggtgatgcgactccatggatttctgtactagttggtggtttagttggtttaattttttctgttatccatgcagttgcgacagttaattttcgtgcagatcatattatcagcggaaccgttcttaatttaatggcaccttcattagctgttttcttgattaaggttctttataataaaggtcaaactgataatattcaagaatcatttggaaaatttaatttccctatactatcagatattccttttgttggtgatatcttctttaaaggaacaagcttagtcggttatattgctattcttttctcattccttgcttggtttattctatataaaactcgctttggattaagattacgctcagttggagaacatcctcaagcagcagacaccttaggtattaatgtttatcttatgcgttactctggtgtcttgatttcaggtttccttggtggaataggaggagctgtatatgctcaatctatttctgttaactttgcagcgacaactatattaggaccgggctttatctccttagcggcgatgatttttggtaagtggaatccaattggtgcaatgcttgctagtctattctttggtttatcgcaaagtttagcagttatcggtagccatttaccacttttgagcaatattccaacagtttatctacaaattgctccatatgtcctcactatcattgtattagcagctttctttggacaagcagtagctcctaaggcggatggtattaattatattaaaacgaaa

SEQ ID NO: 4670 - protein, 322 aa, Streptococcus agalactiae
MVSKLSLTTIFALLFSSMLIYATPLIFTSIGGTFSERGGIVNVGLEGIMVIGAFSGVVFNLEFASVFGDATPWISVLVGGLVGLIFSVIHAVATVNFRADHIISGTVLNLMAPSLAVFLIKVLYNKGQTDNIQESFGKFNFPILSDIPFVGDIFFKGTSLVGYIAILFSFLAWFILYKTRFGLRLRSVGEHPQAADTLGINVYLMRYSGVLISGFLGGIGGAVYAQSISVNFAATTILGPGFISLAAMIFGKWNPIGAMLASLFFGLSQSLAVIGSHLPLLSNIPTVYLQIAPYVLTIIVLAAFFGQAVAPKADGINYIKTK

SEQ ID NO: 4671 - DNA, 966 bp, Streptococcus pyogenes
gtggtaaataagatgagtttagtaacaatttttgccttattgatgtcatctatgcttatttatgcaacaccactcattttcacaagtattggaggaactttctcagagcgctcaggcgttgttaatgttggtttagaaggtatcatggtcatgggagcgttctctgggattgttttcaacttagagtttgctgaaacatttggaaaagcaacgccttggatagccgttttagtcggtggtattgttggtttgattttttctttgattcacgctgtagcaaccatcaactttcgagctgaccacattgtcagtggtacagtgttgaacttgttagcaccttcttttgctgtcttcttggttaaagctatgtacggtaagggacaaacagacaacattcaacaatcttttgggaagtttgatttcccaggtttatcacaaattcctgtgattggtgatattttctttaaaaatactagccttattggttacttcgccattgctttttcgttctttgcttggtttttgctttataaaaccaggtttggtctgcgtttacgatcagttggggaacaccctcaggcagctgacacacttggtattaacgtctatttgatgaaatactatggtgtgatgatctcaggttttcttggtggaataggtggagctgtttatgctcagtcaatctccgttaactttgctgtaacaactatcttaggtcctggatttattgctttggcagctatgatctttggtaaatggaatccagttggcgccatgctatctagtcttttctttggcttatcgcaaagtttagccgttattggtgctcaattaccattactagaaaagattccaacggtttacttacagattgcaccttatatggtaacgattattattttagctgctttctttggtcaagcagttgcaccaaaagctgatggaatcaactatattaaatctaaa

SEQ ID NO: 4672 - protein, 322 aa, Streptococcus pyogenes
VVNKMSLVTIFALLMSSMLIYATPLIFTSIGGTFSERSGVVNVGLEGIMVMGAFSGIVFNLEFAETFGKATPWIAVLVGGIVGLIFSLIHAVATINFRADHIVSGTVLNLLAPSFAVFLVKAMYGKGQTDNIQQSFGKFDFPGLSQIPVIGDIFFKNTSLIGYFAIAFSFFAWFLLYKTRFGLRLRSVGEHPQAADTLGINVYLMKYYGVMISGFLGGIGGAVYAQSISVNFAVTTILGPGFIALAAMIFGKWNPVGAMLSSLFFGLSQSLAVIGAQLPLLEKIPTVYLQIAPYMVTIIILAAFFGQAVAPKADGINYIKSK

SEQ ID NO: 4673 - DNA, 1086 bp, Streptococcus agalactiae
gtggaaaaattgaaaaggaggagagagatgtctaagaaggcgcaaaaaattgcagttcctctgatttcagttgtactaggaatcattctaggagctattattatgctgatatttggttatgatccactttggggttatgagggattgttccaaacagcattcggtagtataaaaaatattggtgaaattttccgtgcaatgggaccattaattttaattgctctaggtttctcagttgccagtcgtgcaggtttctttaatattggacttccagggcaagccttatcaggatggattgccgcaggttggttcgctctttcacacccagatatgccacgtccagcaatgattctttgtactattattattggtatcgttgctgggggaatcactggagctattccaggtattctcagagcataccttggaacaagtgaagttattgtaactattatgatgaactatattgttctttattcaggaaatgctattgtacaacgtgttttcccaaaaagcattatgcgtacaagtgactcgagtgtatatgtttctgccaatgcatcataccagacagattggttatctagtttaacgaataattcacgtatcaatattggtatcttcattgctattattgcagttgtgttagtttggttcctattaaataaaacaacgcttggatttgaaattcgttcagttggtttaaatccaaatgctagtgagtacgctggtatgtctgcaaagcgtacaattattctatcaatgattatttctggagcttttgcaggacttggtggtgttgttgaaggactaggtacatttgagaatgtatttgtacagccatcctcgttagctattggctttgacggtatggcagtaagtctactcgcagcgaatagtccaataggtattttatttgcagcatttctatttggtgttctaagtgttggtgcgcctggtatgaacattgcaggtattccacctgagttaattaaagttgtaacagcttcaatcatcttcttcgtaggtgtccattacattattgagtatgttattaaacctaaaaaacaaatgaaaggtggtaag

SEQ ID NO: 4674 - protein, 362 aa, Streptococcus agalactiae
MEKLKRRREMSKKAQKIAVPLISVVLGIILGAIIMLIFGYDPLWGYEGLFQTAFGSIKNIGEIFRAMGPLILIALGFSVASRAGFFNIGLPGQALSGWIAAGWFALSHPDMPRPAMILCTIIIGIVAGGITGAIPGILRAYLGTSEVIVTIMMNYIVLYSGNAIVQRVFPKSIMRTSDSSVYVSANASYQTDWLSSLTNNSRINIGIFIAIIAVVLVWFLLNKTTLGFEIRSVGLNPNASEYAGMSAKRTIILSMIISGAFAGLGGVVEGLGTFENVFVQPSSLAIGFDGMAVSLLAANSPIGILFAAFLFGVLSVGAPGMNIAGIPPELIKVVTASIIFFVGVHYIIEYVIKPKKQMKGGK

SEQ ID NO: 4675 - DNA, 1560 bp, Streptococcus agalactiae
atgaatttttctgaaagggagaaccacatgacacagaatgtcattgaaatgaaagaaatcactaagaaattcggtgattttgtggcaaatgatcatatcaatttgacggttgaaaaaggtgagatacatgctctgcttggcgaaaacggtgcagggaaatcaactttaatgaacatgttagcaggtttactagaaccaacagacggtcaaatttttattaatggtcagcctgtaactattgattcaccttccaaatcgtcacaattggggattggtatggtacatcagcatttcatgcttgttgaagcatttactgtagctgaaaatattgttctaggaaatgaaaccacccaaaatggtgttttagacattaagacagcagctaaagaaataaaggaactatcagagaaatatggtttgtcagtaaatccaaatgctaaaatatctgatatttctgtaggagcacagcagcgtgttgaaattttgaagacactttatcgcggtgcagatattttaatttttgatgagccgacggcggtgcttacaccatcagaaataaaagaattgatgacaattatgaagagccttgttaaagaaggcaaatccattatactaattacccataaattggatgaaattcgggcagttgctgataaagttactgtgattcgccgtggtaaaagtattgaaacagtccctgttgcaggcgcaagttctcaacaactggcggaaatgatggttggacgatctgtttccttcagaactgaaaaaaaggaagctaatccgactgacataatcctttctgtaaaggatttagttgtagaagaaaatagaggcggcgttctagctgttaaaaatctgtcgttagatgttcgagcaggtgaaattgtaggtatagctggtattgatggtaatggacaaagtgaattaattcaagctattacaggtttaagaaaggtaacttctggtcaaattgtaattaaaggtaaagatgtcacaaaattttcaagtcgacaaattacagaattaagtgtaggtcatgttccagaagatcgtcatagagatggtttggttctagatatgacgatggcagaaaatttagctttacaaacttattataaagagccattgagtcataaaggtatccttaattttgctaaaattaaagagtatgctcgtcaattaatgacagaatttgatgtgcgtggtgctggtgaacatgttttagcaagaggattttctggtggtaaccaacaaaaagcaattattgctcgtgaagtggatcgcgatccagacctactcattgttagccaaccgactcgtggtctagatgttggtgctatcgagtatattcataaacgtttgattgaagagcgcgataaagggaaagcggtcttagtagttagctttgagttagatgaaatcttaaacttatcagatcgtattgcagttattcatgatggtaaaattcaaggaattgttaaacccgaccaaaccaacaagcaagaattgggtattttgatggctggtggaaaaattgaaaaggaggagagagatgtc

SEQ ID NO: 4676 - protein, 520 aa, Streptococcus agalactiae
MNFSERENHMTQNVIEMKEITKKFGDFVANDHINLTVEKGEIHALLGENGAGKSTLMNMLAGLLEPTDGQIFINGQPVTIDSPSKSSQLGIGMVHQHFMLVEAFTVAENIVLGNETTQNGVLDIKTAAKEIKELSEKYGLSVNPNAKISDISVGAQQRVEILKTLYRGADILIFDEPTAVLTPSEIKELMTIMKSLVKEGKSIILITHKLDEIRAVADKVTVIRRGKSIETVPVAGASSQQLAEMMVGRSVSFRTEKKEANPTDIILSVKDLVVEENRGGVLAVKNLSLDVRAGEIVGIAGIDGNGQSELIQAITGLRKVTSGQIVIKGKDVTKFSSRQITELSVGHVPEDRHRDGLVLDMTMAENLALQTYYKEPLSHKGILNFAKIKEYARQLMTEFDVRGAGEHVLARGFSGGNQQKAIIAREVDRDPDLLIVSQPTRGLDVGAIEYIHKRLIEERDKGKAVLVVSFELDEILNLSDRIAVIHDGKIQGIVKPDQTNKQELGILMAGGKIEKEERDV

SEQ ID NO: 4677 - DNA, 1548 bp, Streptococcus pyogenes
ttgaaaggaaatgatcctatgacacagcatgtcattgaaatgagagaaatcacgaaaaaatttggtgattttgttgcaaatgaccacattaacttaaatgtcagaaaaggtgagattcatgccttattgggtgaaaatggggcaggtaaatcaactttgatgaatatgctagctggtctcttagagcctactagtggagaaattgtcattaatgacaagccagttcaaattgattcgccatctaaatcagctaagcttggtatcggaatggtacatcaacatttcatgttagtagaagccttcacggttgctgagaatattattttaggaaatgaagtagtaaaaaatgggtgcttagatcttaaccaagcatcgaaagatattaaggtactatccgaaaaatatggccttgcaatcaatccatcagctaaagtttctgatatttcagtaggagcacaacaacgtgttgagattttgaaaaccttgtatcgtggtgcagatattcttatctttgatgagccaactgccgttttaacacctgcagaaattaaagaattgatgactatcatgaagaatctcgtgaaagaaggaaaatcaattattttaattacccataaactggacgagattcgtgctgtcgccgaccgtgtcacagttattcgtcgtggtaagagtatcgaaacagttgatgtggcaggagcaacttcacaagatttagctgagatgatggtgggacgctcggtttcctttacaactagcaaaaaagctgctgaaccaaaagatgtggtcttatccatcaaaaatcttgaagtagatgaaaatagaggggttccagcagttaaggggctatctctagatgtccgagctggtgaaattgtagggattgctggaattgacggaaatggtcaatctgagttaattcaagctattacaggtttacgtaaagtcaaatctggaagtattatgattaaaaacaatgaagtcactcatttgtcttcacgcaaaattactgagttatcagtgggtcacgtgccagaagatcgtcatcgagatggtttgatactagatctttctttagctgaaaatacagccttacaaacctattacaaacaacctctaagtcaaaatggaatcttaaattatactaaaattaatgactatgctcgtcaattaatgaaagaatttgatgttcgcggagccaatgagctagtaccagctagaggattttctggtggtaaccaacaaaaggccattattgctcgtgaagtggaccgtgatccagatttacttattgttagccaaccaacacgtggtcttgatgtaggagctattgaatatatccataagcgtttgattaaagaacgtgataaaggtaaagctgtcctcgttgttagttttgaacttgatgaaatattgaatttatctgatcgaattgctgttattcatgatggtaaaattcaaggtatcgtatcgccagaaaataccaataaacaagaattgggtattttaatggcaggtggttcaattcataaggaggaaggtcatgtc

SEQ ID NO: 4678 - protein, 516 aa, Streptococcus pyogenes
LKGNDPMTQHVIEMREITKKFGDFVANDHINLNVRKGEIHALLGENGAGKSTLMNMLAGLLEPTSGEIVINDKPVQIDSPSKSAKLGIGMVHQHFMLVEAFTVAENIILGNEVVKNGCLDLNQASKDIKVLSEKYGLAINPSAKVSDISVGAQQRVEILKTLYRGADILIFDEPTAVLTPAEIKELMTIMKNLVKEGKSIILITHKLDEIRAVADRVTVIRRGKSIETVDVAGATSQDLAEMMVGRSVSFTTSKKAAEPKDVVLSIKNLEVDENRGVPAVKGLSLDVRAGEIVGIAGIDGNGQSELIQAITGLRKVKSGSIMIKNNEVTHLSSRKITELSVGHVPEDRHRDGLILDLSLAENTALQTYYKQPLSQNGILNYTKINDYARQLMKEFDVRGANELVPARGFSGGNQQKAIIAREVDRDPDLLIVSQPTRGLDVGAIEYIHKRLIKERDKGKAVLVVSFELDEILNLSDRIAVIHDGKIQGIVSPENTNKQELGILMAGGSIHKEEGHV

SEQ ID NO: 4679 - DNA, 1047 bp, Streptococcus agalactiae
atgaacaaaaaaattgccgggatcggcttggcttcgattgcagtacttagtttagctgcatgtggacatcgtggtgcttctaaatctggtggtaaatcagatagcttgaaggttgcaatggtaacagataccggtggtgttgatgataaatcatttaaccaatctggttgggaaggtatgcaagcttggggcaagaagaatggccttaaaaaaggagctggttttgactatttccaatcggcaagtgaatctgattatgcaactaacttagatacagctgtgtctagtggttataaattgattttcggtattggattttctcttcatgatgctattgataaagcagcagacaataacaaagatgttaattacgtcatcgttgatgatgttattaaagggaaagataatgttgcaagtgttgtctttgcggataatgaatcagcttacttagcaggtattgcagccgctaaaactaccaaaacaaaaacagttggctttgtaggtggtatggaatctgaggttattacccgttttgaaaaaggttttgaagcaggtgtcaaatcagttgataaatcaattaaaattaaagttgactatgctggttcattcggtgatgctgctaagggtaagacaattgcagccgcacaatatgcttctggcgcagatattgtttatcaagtagctggtggaactggtgcaggtgtattcagtgaagcaaaatcacgcaatgaatctttaaaagaagctgacaaagtttgggtattaggtgtagaccgtgaccaagcagcagaaggtaagtatacttctaaagatggtaaggcttctaactttgttttggcttcatcaattaaagaagttggaaaatcagttgaattgattgctactaaaacaagtaaaggtaaattcccaggtggtaatgtaacaacttatggtttgaaggatggtggagttgatatagcaactacaaacctttcagatgacgccgttaaagcgattaaagaggctaaagctaaaattatttcaggagatatcaaagttcctagcaaa

SEQ ID NO: 4680 - protein, 349 aa, Streptococcus agalactiae
MNKKIAGIGLASIAVLSLAACGHRGASKSGGKSDSLKVAMVTDTGGVDDKSFNQSGWEGMQAWGKKNGLKKGAGFDYFQSASESDYATNLDTAVSSGYKLIFGIGFSLHDAIDKAADNNKDVNYVIVDDVIKGKDNVASVVFADNESAYLAGIAAAKTTKTKTVGFVGGMESEVITRFEKGFEAGVKSVDKSIKIKVDYAGSFGDAAKGKTIAAAQYASGADIVYQVAGGTGAGVFSEAKSRNESLKEADKVWVLGVDRDQAAEGKYTSKDGKASNFVLASSIKEVGKSVELIATKTSKGKFPGGNVTTYGLKDGGVDIATTNLSDDAVKAIKEAKAKIISGDIKVPSK

SEQ ID NO: 4681 - DNA, 429 bp, Streptococcus agalactiae
ttgccagtaaacattatgaagcgaaaggtgcagctactaaaaatgggaaatatagagttgaaaaaattggctgtaaaagcgagtgaaaatgcatacgttccttactcgaaatttccagtaggcgcagcattgcgtacagcagaaggaaaaatatttacaggatgtaacgttgaaaatatcagttatggattagcaaactgtgctgagcgtactgcaatttttaaagctgtttcagaaggttataaagatttttcggaaattgctatttatggaaatactgaagaaccaatttctccttgcggtgcatgccgtcaagtgatggtggaattttttaataagaatgctaaagttacattgattgctaaaaatggtaagacggtcgagacgacggtcggtgagttgttaccatactcgtttgttgatttaaaa

SEQ ID NO: 4682 - protein, 143 aa, Streptococcus agalactiae
MPVNIMKRKVQLLKMGNIELKKLAVKASENAYVPYSKFPVGAALRTAEGKIFTGCNVENISYGLANCAERTAIFKAVSEGYKDFSEIAIYGNTEEPISPCGACRQVMVEFFNKNAKVTLIAKNGKTVETTVGELLPYSFVDLK

SEQ ID NO: 4683 - DNA, 387 bp, Streptococcus pyogenes
atggggactactgatttagttagttgtgctgtacaagctagtgagtatgcttatgtcccttactctcattttccagtaggagcagctttaaaaacaaaagatggaacgatctatactggctgtaatattgaaaatgttagttttggtctgacaaattgtggagagcgaacagctatatttaaagccatatctgatggtcataaagaattggttgaaattgctatttatggagaaactatgcaacctgtatctccttgtggggcttgtcgtcaggtaatggcagaattttttgatccttcttctttagtcactttaattgctaaaaatggtcaaactgttgaaatgactgttggagatttactcctctattcttttacagatttaata

SEQ ID NO: 4684 - protein, 129 aa, Streptococcus pyogenes
MGTTDLVSCAVQASEYAYVPYSHFPVGAALKTKDGTIYTGCNIENVSFGLTNCGERTAIFKAISDGHKELVEIAIYGETMQPVSPCGACRQVMAEFFDPSSLVTLIAKNGQTVEMTVGDLLLYSFTDLI

SEQ ID NO: 4685 - DNA, 588 bp, Streptococcus agalactiae
atggctaatatgtattatacagagaatcctaatgttgaacatgatattcatgagctaaatgtcaaattattaggagaatcattcagttttttaactgatgcaggagttttctctaaaagaatgatagattatggtagtcaagtccttctaaatagtttacattttgaaaaaaataaatccttgttagaccttgggtgtggatacggtccgctgggaatttctctagccaaagtgcaaggagttaaagcaactatggttgacattaatacgagagcattggaattagctaagaaaaatgcaacacgcaatggagtagtagttgaagtctttcagtcaaacatttatgaaaatatttctaaaactttcgactatattataagcaacccacctattcgtgctggaaagcaagttgttcattctattatcgaagaaagtatctgttaccttaatacaggcggtagccttaccattgtcattcaaaagaaacaaggcgctccaagtgcaaaagctaaaatgctagatacttttggtaattgcgatattttaaaaaaagataagggatattatatattgagaagtgaaaaagtc

SEQ ID NO: 4686 - protein, 196 aa, Streptococcus agalactiae
MANMYYTENPNVEHDIHELNVKLLGESFSFLTDAGVFSKRMIDYGSQVLLNSLHFEKNKSLLDLGCGYGPLGISLAKVQGVKATMVDINTRALELAKKNATRNGVVVEVFQSNIYENISKTFDYIISNPPIRAGKQVVHSIIEESICYLNTGGSLTIVIQKKQGAPSAKAKMLDTFGNCDILKKDKGYYILRSEKV

SEQ ID NO: 4687 - DNA, 624 bp, Streptococcus pyogenes
atgaaaaagtaccttaaaaagataggaaaaatgatgacaaagatgtattatgatgaaaatccagatagcctacacgatattcatgaagtaaaagtagagctgcttaatcatccctttacttttttgacggattcaggtgtcttttcaaagaaaatggttgatttcggtagccaagtattattaaagacactaaatttcaaggagaacgaacgtgtactggacttaggttgcggctatggccctcttgggattagtctagccaaggttcaaagggtagacgcaaccttagtggacatcaataatcgtgctcttgatttagctagaaaaaatgcaactaataaccaagtggcagtaactatttttcaatcaaatatttatgaaaatattagtggccattttgagcatattattagtaatcctcctattagagcaggaaagagagtagttcatagtattattgaaaaaagcatagattttttagtggttaatggtgacttaacgattgtgattcaaaaaaaacaaggagctcctagcgctaaagcaaaaatggcaactatttttggtaatgttgagatattaaggaaagataaaggttattatgtattaagaagtataaagcaagcc

SEQ ID NO: 4688 - protein, 208 aa, Streptococcus pyogenes
MKKYLKKIGKMMTKMYYDENPDSLHDIHEVKVELLNHPFTFLTDSGVFSKKMVDFGSQVLLKTLNFKENERVLDLGCGYGPLGISLAKVQRVDATLVDINNRALDLARKNATNNQVAVTIFQSNIYENISGHFEHIISNPPIRAGKRVVHSIIEKSIDFLVVNGDLTIVIQKKQGAPSAKAKMATIFGNVEILRKDKGYYVLRSIKQA

SEQ ID NO: 4689 - DNA, 918 bp, Streptococcus agalactiae
atgaataatgaatttattaatttcgaccgtatttccagagaaaattggaaggacttacatcagcaatcccaagctttactaactgaaaaagagcttgaatctatcaaaagcttaaacgataatattaatattcaagatgttattgacatctaccttcctttaattaaccttattcaaatctataaacgtagtcaagaaaatttatctttttctaaagcaatatttcttaaaaaggaaaattatcaacgtccttttattatcggcatatcagggtcagttgctgttggaaaatcaactaccagtcgcttactacaattactaatttcacgaacttttaaagatagtcacgtcgaattagtcactactgatggctttttatatcctaacgagaaactcatacaaaatggaattttaaaccgtaaaggtttcccggaatcctatgatatggagtcacttctaaatttcttagatactataaagaacggtataaccgcgaaaatcccaatttattctcatgaaatctacgatatcgttccaaatcaattgcaaactattgaaacaccagattttttaattttagaaggaataaatgtctttcaaaaccaacaaaaccatcgactttacatgaatgattattttgatttttcaatatacattgatgctgaaaataaacaaattgaagaatggtatttacaacgatttaacagtcttctacaattagccgaagcagaccctagtaattactatcataaattcacacaaataccgccacataaagctatggaactagctaaagatatttggaaaactattaatttagtcaaccttgaaaaatatatagaaccaaccagaaatagggctgattttattattcataaagggaaacatcataaaattgatgaaatttatctcaaaaag

SEQ ID NO: 4690 - protein, 306 aa, Streptococcus agalactiae
MNNEFINFDRISRENWKDLHQQSQALLTEKELESIKSLNDNINIQDVIDIYLPLINLIQIYKRSQENLSFSKAIFLKKENYQRPFIIGISGSVAVGKSTTSRLLQLLISRTFKDSHVELVTTDGFLYPNEKLIQNGILNRKGFPESYDMESLLNFLDTIKNGITAKIPIYSHEIYDIVPNQLQTIETPDFLILEGINVFQNQQNHRLYMNDYFDFSIYIDAENKQIEEWYLQRFNSLLQLAEADPSNYYHKFTQIPPHKAMELAKDIWKTINLVNLEKYIEPTRNRADFIIHKGKHHKIDEIYLKK

SEQ ID NO: 4691 - DNA, 918 bp, Streptococcus pyogenes
atgtcaaatgaatttattaactttgaaaaaatttctagagagtcttggaaaacattacatcaaaaggcaaaagctctcctcacacaagaggaacttaaaagtattactagcttaaatgataacatcagtattaacgatgtcattgatatctaccttccattaattaatctgatccaggtttacaaaattgcgcaagaaaatctttctttttctaaaagcctttttctaaaaaaagacattcaattaaggccttttattattggaatttctggttcagtagctgttggtaaatcaacaactagtcgtcttttacaacttttattatcacgaacgcaccccaatagtcaagtcgaactggtaacgactgatggttttttatatcctaatcagtttcttattgaacaaggactgttaaatcgtaaaggatttccagaatcttataacatggaacttctcttagattttctagattccatcaaaaatggtcaaactgcttttgcacccgtctattctcatgatatttacgatattatcccaaatcaaaaacaatcatttaataaccctgacttccttatcgtcgaaggtattaacgtttttcaaaatcaacaaaacaatcgtttatatatgagtgattactttgatttttctatttatattgatgcagacagcagtcacatcgaaacctggtacattgaacggtttctaagcattttaaaattagcaaaacgtgaccctcataattattatgcccaatatgcacaattacctcgatctgaggctatagcatttgcgcgcaacgtttggaaaaccgttaatttagaaaatcttgaaaaattcattgaacctacacgtaaccgtgctgaattaattttacataaaagtgctgatcataaaattgatgaaatttacctcaaaaag

SEQ ID NO: 4692 - protein, 306 aa, Streptococcus pyogenes
MSNEFINFEKISRESWKTLHQKAKALLTQEELKSITSLNDNISINDVIDIYLPLINLIQVYKIAQENLSFSKSLFLKKDIQLRPFIIGISGSVAVGKSTTSRLLQLLLSRTHPNSQVELVTTDGFLYPNQFLIEQGLLNRKGFPESYNMELLLDFLDSIKNGQTAFAPVYSHDIYDIIPNQKQSFNNPDFLIVEGINVFQNQQNNRLYMSDYFDFSIYIDADSSHIETWYIERFLSILKLAKRDPHNYYAQYAQLPRSEAIAFARNVWKTVNLENLEKFIEPTRNRAELILHKSADHKIDEIYLKK

SEQ ID NO: 4693 - DNA, 246 bp, Streptococcus agalactiae
atggaggtgaaaacattggcaaatattaaatcagctatcaaacgcgctgaacttaacgttaaacaaaacgaaaaaaactcagcacaaaaatcagctatgcgtactgctattaaagcatttgaagctaacccttcagaagaactttaccgcgctgcttcttcaagcatcgacaaagctgcttctaaaggtttaattcacacaaacaaagcaagccgcgataaagcacgtcttgcaactaaacttggt

SEQ ID NO: 4694 - protein, 82 aa, Streptococcus agalactiae
MEVKTLANIKSAIKRAELNVKQNEKNSAQKSAMRTAIKAFEANPSEELYRAASSSIDKAASKGLIHTNKASRDKARLATKLG

SEQ ID NO: 4695 - DNA, 246 bp, Streptococcus pyogenes
ttggaggtgaaaacattggcaaatattaaatcagctattaaacgcgctgaacttaacgttaaagcaaacgaaaaaaactcagcacaaaaatcagctatgcgtactgctatcaaagcatttgaagctaacccatctgaagagcttttccgcgctgcttcttcaagcatcgataaagctgaatcaaaaggtttgattcacaaaaacaaagcaagccgcgataaagcacgccttgctgcaaaacttggc

SEQ ID NO: 4696 - protein, 82 aa, Streptococcus pyogenes
LEVKTLANIKSAIKRAELNVKANEKNSAQKSAMRTAIKAFEANPSEELFRAASSSIDKAESKGLIHKNKASRDKARLAAKLG

SEQ ID NO: 4697 - DNA, 903 bp, Streptococcus agalactiae
atgatcttcaatttgctgaaagtatatctgatacgattctcaaaattaatcctaagtagacttgggggtagattgttgactcacaaaaatatattattaaccattatatttggattatttatgattatattatcagcatgtggtatgtctaataaggaaatggctggtattgataattgggaacattatcaaaaggaaaagaaaattactattggatttgataatacttttgttcctatgggatttgaaagtcgttctggtgactataccggctttgatattgatttagctaatgctgtttttaaagaatacggtatttcagtgaaatggcagcctattaactgggatatgaaagaaactgaacttaataatggtaatatagaccttatttggaatggttattcaaaaacggcagaacgtgctaaaaaagtcgcttttacaaacccatatatgaataatcatcaagtaattgttactaaaacttcatcacatattaatagtattaaggatatgaaggggaaaaaactaggagcccagtcgggttcatctggttttgatgcttttaacgctaaacctgatattttaaaaaagtttgtaaaaggaaaagaagcagttcaatacgatactttcactcaggctttgattgatttaaaaaataaccgtattgatggtcttttgattgatgaagtttatgctaactattatttaaagcaagaaggaaatataaaagcttattattttgttaaaactgcttatcaaggagaaaattttgtagtaggagctcgtaaagttgatcgtagactaattgaaaagattaacaaagctttcaaacagcttcataataaggggagatttcaaaaaatctcttacaaatggtttggtgaagatgtttatagtaaagaa

SEQ ID NO: 4698 - protein, 301 aa, Streptococcus agalactiae
MIFNLLKVYLIRFSKLILSRLGGRLLTHKNILLTIIFGLFMIILSACGMSNKEMAGIDNWEHYQKEKKITIGFDNTFVPMGFESRSGDYTGFDIDLANAVFKEYGISVKWQPINWDMKETELNNGNIDLIWNGYSKTAERAKKVAFTNPYMNNHQVIVTKTSSHINSIKDMKGKKLGAQSGSSGFDAFNAKPDILKKFVKGKEAVQYDTFTQALIDLKNNRIDGLLIDEVYANYYLKQEGNIKAYYFVKTAYQGENFVVGARKVDRRLIEKINKAFKQLHNKGRFQKISYKWFGEDVYSKE

SEQ ID NO: 4699 - DNA, 834 bp, Streptococcus pyogenes
atgattataaaaaaaagaaccgtagcaattttagccatagctagtagctttttcttggtagcttgtcaagctactaaaagtcttaaatcaggagatgcttggggagtttaccaaaagcaaaaaagtattacagttggttttgacaatacgtttgttcctatgggctataaggatgaaagcggcagatgcaaaggttttgatattgatttggctaaagaagtttttcaccaatatggactcaaggttaactttcaagctattaattgggacatgaaagaagcagaactaaacaatggtaaaattgatgtaatctggaatggttattcaataactaaggagcgtcaggataaggttgcctttactgattcttacatgagaaatgaacaaattattgttgtcaaaaaaagatctgatattaaaacaatatcagatatgaaacataaagtgttaggagcacaatcagcttcatcaggttatgactccttgttaagaactcctaaactgctgaaagattttattaaaaataaagacgctaatcaatatgaaacctttacacaagcttttattgatttaaaatcagatcgtatcgatggaatattgattgacaaagtatatgccaattactatttagcaaaagaagggcaattagagaattatcggatgatcccaacgacctttgaaaatgaagcattttcggttggacttagaaaagaagacaaaacgttgcaagcaaaaattaatcgtgctttcagggtgctttatcaaaatggcaaatttcaagctatttctgagaaatggtttggagatgatgttgccactgccaatattaaatct

SEQ ID NO: 4700 - protein, 278 aa, Streptococcus pyogenes
MIIKKRTVAILAIASSFFLVACQATKSLKSGDAWGVYQKQKSITVGFDNTFVPMGYKDESGRCKGFDIDLAKEVFHQYGLKVNFQAINWDMKEAELNNGKIDVIWNGYSITKERQDKVAFTDSYMRNEQIIVVKKRSDIKTISDMKHKVLGAQSASSGYDSLLRTPKLLKDFIKNKDANQYETFTQAFIDLKSDRIDGILIDKVYANYYLAKEGQLENYRMIPTTFENEAFSVGLRKEDKTLQAKINRAFRVLYQNGKFQAISEKWFGDDVATANIKS

SEQ ID NO: 4701 - DNA, 627 bp, Streptococcus agalactiae
atgttagaattaaaaaatatttctaaatgctatgggcaaaaagaaatctttaaagatttcaatctgactgtagaagaaggtaaaattctctctttagtaggaccttctggaggtggaaaaacaacactattacgtatgttagctggattggaaaagattgattcagggactattgttcacgatggtaaagaagtatctgttgatcatttggaaacactaaatcttttaggattcgtcttccaagactttcaattattcccacatttaacagtattagataatttgatcctctctcctgttaaaacgatgggattatcaaaagaacttgctaaagaaaaagccttagtattacttgaacgcttgggacttaaagaccatgctttagtctatccattttcattatctggggggcaaaagcaacgtgtcgcactagctcgtgcgatgatgattgatccacagattattggttatgatgagccaactagcgctcttgatccagagttgcgtcaagaagtagaaaaactaattttacaaaatagagaaacaggtatgacacaaattgtagtaacacatgatcttcaatttgctgaaagtatatctgatacgattctcaaaattaatcctaag

SEQ ID NO: 4702 - protein, 209 aa, Streptococcus agalactiae
MLELKNISKCYGQKEIFKDFNLTVEEGKILSLVGPSGGGKTTLLRMLAGLEKIDSGTIVHDGKEVSVDHLETLNLLGFVFQDFQLFPHLTVLDNLILSPVKTMGLSKELAKEKALVLLERLGLKDHALVYPFSLSGGQKQRVALARAMMIDPQIIGYDEPTSALDPELRQEVEKLILQNRETGMTQIVVTHDLQFAESISDTILKINPK

SEQ ID NO: 4703 - DNA, 627 bp, Streptococcus pyogenes
atgttagaactcaaaaatatttccaaacagtttggtcaaaaaaccatttttgatggctttaatctaaccgttcaagacggagaagtgctctctttggtaggcccatcaagtggcggtaagacaacactcttacggatgttggctggtcttgaatctattgattcaggtcaagtcttttacaatggcgaagatgttggtattgatcatttggaaaatcgtaacttgcttggatttgttttccaagattttcaattgtttcctcatcttaccgttttagacaacctaacgctgtctccaacaattacaatgggcaagcaaaaggctgacgctaaagaaaaggctttggatttactggcacgtttaggattaaaagaacatgcccaagtttatccctattctttatctggaggtcaaaaacaacgggttgctttggcaagagccatgatgattgaccctcaaattatcggttacgatgaaccgaccagtgctctagatcctgaactacgtcagacggtagaagccttgattgttcaaaaccgtgaaatgggaataactcaaattgtagtcactcacgatcttgtttttgccgaagccatctcagatcgtattattagggttaatcctaaa

SEQ ID NO: 4704 - protein, 209 aa, Streptococcus pyogenes
MLELKNISKQFGQKTIFDGFNLTVQDGEVLSLVGPSSGGKTTLLRMLAGLESIDSGQVFYNGEDVGIDHLENRNLLGFVFQDFQLFPHLTVLDNLTLSPTITMGKQKADAKEKALDLLARLGLKEHAQVYPYSLSGGQKQRVALARAMMIDPQIIGYDEPTSALDPELRQTVEALIVQNREMGITQIVVTHDLVFAEAISDRIIRVNPK

SEQ ID NO: 4705 - DNA, 390 bp, Streptococcus agalactiae
atgccagctgcgattattgcttttacgatgaattatgcagcttattttgcagagatttttcgaggaggtattgagtctattcctaaagggcaatatgaagctgcaaaggtattaaagttttctaagtttcaaacggtttggtacatagtattacctcaagtcttcaaaatagtcttaccgagtgttttcaatgaaacgattactttagtgaaagattcctcattggtttacatacttggtgtgggcgacttacttctagaaagtaagacagccgcaaatagggatgcaacacttgcaccaatgtttatagcaggtggtatttacctattattaattggtcttttaactattttatctaaacaagttgaaaagcgttttaactactataaa

SEQ ID NO: 4706 - protein, 130 aa, Streptococcus agalactiae
MPAAIIAFTMNYAAYFAEIFRGGIESIPKGQYEAAKVLKFSKFQTVWYIVLPQVFKIVLPSVFNETITLVKDSSLVYILGVGDLLLESKTAANRDATLAPMFIAGGIYLLLIGLLTILSKQVEKRFNYYK

SEQ ID NO: 4707 - DNA, 639 bp, Streptococcus pyogenes
atgacctatattcagcaagttttacccagcttattagatggtgccttggtgactttacaagtattctttattgttatcattctttctatacccttaggggctattttagctttcttgatgaagattccctttaaaccgctacagtggtttttgaccctatacgtgtggatgatgcgagggacaccattactacttcaattgatttttttctattatgttttgccaagtgtggggattagttttgatcgaatgccagctgctattttggcgtttactttgaattatgctgcctactttgctgaaatttttagaggtgggattgaggctattccaaaaggtcaatatgaagcagctaaagtattaaagttaaaacctcttcaaaccattcgttatattattttgcctcaagtgtttaaaattgtgttaccaagtgttttcaatgaagtcattaatttggtcaaagattcttcccttgtctatgtactcggtgtaggagatcttttattagcaagtaagacggcagccaatagggatgcaaccttagcccctatgtttatcgctggtcttatctatttgcttttaattggactggtcacgattatttcaaaacaagttgaaaaacggtttaattattatcag

SEQ ID NO: 4708 - protein, 213 aa, Streptococcus pyogenes
MTYIQQVLPSLLDGALVTLQVFFIVIILSIPLGAILAFLMKIPFKPLQWFLTLYVWMMRGTPLLLQLIFFYYVLPSVGISFDRMPAAILAFTLNYAAYFAEIFRGGIEAIPKGQYEAAKVLKLKPLQTIRYIILPQVFKIVLPSVFNEVINLVKDSSLVYVLGVGDLLLASKTAANRDATLAPMFIAGLIYLLLIGLVTIISKQVEKRFNYYQ

SEQ ID NO: 4709 - DNA, 480 bp, Streptococcus agalactiae
  misc_feature (1)..(480): n = a, c, g, or t
atggagaatcataattctattaaacagacctatggattaatgactacaattgctatgattgtaggtgtagtgattggttcaggcatttattttaaagttgatgacatccttaaatttactggtggagatgtctttttaggcatggtaattttagtactaggttctttttcgattgtttttggaagtttgtcaatttctgagctagctattagaacgagtgaaagtggtggtattttttcttactacgaaaaatatgttagcccagctttagcagcaactttaggcttgtttgcgtcttttttgtatcttccaactttaacagcaatcgtttcatgggtagctgcattttatactttaggtgaatcatcaagtttggaatcacagattattttagctgctgtttatattttagcgcttagtctcatgaatatctttgctaagcgtattgcagggggattccaatctttaacgaccnnnnnt

SEQ ID NO: 4710 - protein, 160 aa, Streptococcus agalactiae
  MISC_FEATURE (1)..(160): Xaa = Any Amino Acid
MENHNSIKQTYGLMTTIAMIVGVVIGSGIYFKVDDILKFTGGDVFLGMVILVLGSFSIVFGSLSISELAIRTSESGGIFSYYEKYVSPALAATLGLFASFLYLPTLTAIVSWVAAFYTLGESSSLESQIILAAVYILALSLMNIFAKRIAGGFQSLTTXX

SEQ ID NO: 4711 - DNA, 120 bp, Streptococcus agalactiae
ttggcgaagtgttcaactgaagttgcatttggaaattctatggtattagcgatatattgtgctgctaacaattcagggttgacaactgaagagaagccaagaaagtttttatctttgaag

SEQ ID NO: 4712 - protein, 40 aa, Streptococcus agalactiae
MAKCSTEVAFGNSMVLAIYCAANNSGLTTEEKPRKFLSLK

SEQ ID NO: 4713 - DNA, 1359 bp, Streptococcus agalactiae
ttggaggtaaaaatgagaataattgttgtcggcggaggtaaagtcggaaccgcactttgtcgctcacttgttgctgaaaagcacgatgttgttttaattgagaaaaaagaaaacgtccttaaacgtgtcactaaacagcatgatattatgggaattgttgggaatggagcaaactataaaattttagaacaagccgaagtcaaaaattgtgatatttttatcgctatcactgatcgagatgaagttaatatgatttcagcagttcttgccaaaaaaatgggggcaaaagagactgttgttcgcatgcgtaatcctgagtattctaatccttacttcaaagataaaaactttcttggcttctcttcagttgtcaaccctgaattgttagcagcacaatatatcgctaataccatagaatttccaaatgcaacttcagttgaacacttcgccaacgggcgtgtgatgttaatggaatttaaaattttagaaggaaataaactctgtcatacttcaatgagtcaaattcgtaaaaaatttggtaatattgttatttgcgcaattgaacgcgatggcaaattgattattcctgatggcgatgcaactatccaagtcaaagataaaatctttgtaactggaaatcgtattgaaatgatacttttccataattacgttaaaaataaagttgtcaaaaacttgatggttatcggtgcaggacgcatcgcctactacctactcaatatccttaaaaataccaatacacacgtcaaactagttgaactcaaccaagagcaagctgaatattttagtcaagaatttcccaatgttcctgtcgttcatggggatggtactgctaaaaatattttgttagaagaaagcgttacaagttttgacgcagttgctactttgactggtgttgatgaagaaaatatcattacctcaatgttcttagaaagtatcggtatccctaaaaacattaccaaagttaatcgaactagcctactagaaatcattgacgataaacaactatcaagcattatcacacccaagcgtattgccgtagaccatgtgatgcactttgtacgcgggcgtgtaaatgctcaggattccaacctagaagctatgcatcatattgctaacgatcgcattgaaaccttacaatttgaaataaaagaaactagcaaattagcaaatcgtagccttgcatctttaaaattaaagcaaaatattttaattgcagcgattattcgcaataataaaacgattttcccaactggtgaggatgttttaacagtgggtgatcgtatcgttgttatcaccttattaaaaaatattactagaactagtgatatgttagcgagg

SEQ ID NO: 4714 - protein, 453 aa, Streptococcus agalactiae
MEVKMRIIVVGGGKVGTALCRSLVAEKHDVVLIEKKENVLKRVTKQHDIMGIVGNGANYKILEQAEVKNCDIFIAITDRDEVNMISAVLAKKMGAKETVVRMRNPEYSNPYFKDKNFLGFSSVVNPELLAAQYIANTIEFPNATSVEHFANGRVMLMEFKILEGNKLCHTSMSQIRKKFGNIVICAIERDGKLIIPDGDATIQVKDKIFVTGNRIEMILFHNYVKNKVVKNLMVIGAGRIAYYLLNILKNTNTHVKLVELNQEQAEYFSQEFPNVPVVHGDGTAKNILLEESVTSFDAVATLTGVDEENIITSMFLESIGIPKNITKVNRTSLLEIIDDKQLSSIITPKRIAVDHVMHFVRGRVNAQDSNLEAMHHIANDRIETLQFEIKETSKLANRSLASLKLKQNILIAAIIRNNKTIFPTGEDVLTVGDRIVVITLLKNITRTSDMLAR

SEQ ID NO: 4715 - DNA, 672 bp, Streptococcus pyogenes
atgttaaaacgtaaaactgtcggcgttcttggccttggtatttttggccgtactgttgccagagaattaagtaactttgatcaagacgttattgctattgatatcagagaaagtcatgtcaaagaggtggccgacttggtcactaaagccgctgttggagatattactgacaaagaatttctattagctgtagggattgaacattgtgatactgtcgttatcgcttcagggaataacttggaatcttctgttcttgcagtcatgcactgtaaaaaactcggtgttccaaccattattgccaaggctaaaaataaaatttttgaagaagttctatatggcatcggagcaactaaagtcatcacccctgaacgtgattctggaaaacgtgtagcttcaaatctgttaagacgtcatatcgaaagcatcatctatttggaacatggtatttcgatgattgaatttgtcattcctaaaagctgggaaggacaatctctttccgaactagatgttcgtcgtaaatatgagttaaatgtgattggcatgcgtcaaaaagaagttaaaaccttagatactaatgtcaaaccttttgaacctttagaaccgaatactatcattgtggccatcgctaatgaccacacctttgaaaaatttgattatcttggctatcttaaa

SEQ ID NO: 4716 - protein, 224 aa, Streptococcus pyogenes
MLKRKTVGVLGLGIFGRTVARELSNFDQDVIAIDIRESHVKEVADLVTKAAVGDITDKEFLLAVGIEHCDTVVIASGNNLESSVLAVMHCKKLGVPTIIAKAKNKIFEEVLYGIGATKVITPERDSGKRVASNLLRRHIESIIYLEHGISMIEFVIPKSWEGQSLSELDVRRKYELNVIGMRQKEVKTLDTNVKPFEPLEPNTIIVAIANDHTFEKFDYLGYLK

SEQ ID NO: 4717 - DNA, 234 bp, Streptococcus agalactiae
atgactttaaagcccccagctgtagagccagcagaaccaccgataaacatcaagaatagcaaaataacctgtgaaaacaaaggccaacgagtgatatcagtcacgccaaaaccagttgtcgtaataatagctgatacttcaaagaaaatatgttcgaggccttgtcgaaaattatcatacataccgatgacgtttagagcaatcatgaaagttgctattgccacgatgcggaga

SEQ ID NO: 4718 - protein, 78 aa, Streptococcus agalactiae
MTLKPPAVEPAEPPINIKNSKITCENKGQRVISVTPKPVVVIIADTSKKICSRPCRKLSYIPMTFRAIMKVAIATMRR

SEQ ID NO: 4719 - DNA, 1437 bp, Streptococcus agalactiae
atgaataaaagtatgattcgtttccttctctcaaaacttttgctaattgaagctgctcttctagcgattcctctaactgttggacttatttaccgtgaaccgcaaagtgtcatgatgagtatagtcattaccatgattattttaatcatccttggattactgggttctctctttaaacctaaaaattatcatatctacactaaagaaggcatgttaattgttgcactctgctggatactttggtccttctttggcgcccttccatttgttatttcagggcaaatccctaatattatcgatgctttctttgaagtatcttctggttttacgacaacaggagcaactattcttgatgacgtcagtgtcttatcacccgcgctcttattttggcgtagctttacccatcttatcggtggaatgggggttttagtatttgcccttgccatcatggaaaattctaaaaatagccatttagaggttatgagagctgaagttcctggacctgtatttggtaaagttgtctcgaaacttaaaaaaactgcacaaattttgtatttgttatatcttcttatgtttgcagtatttgcagtaatattatattttgcaggtatgcctttctttgatagtattatcatagcgatgggaactgcaggtacaggtggttttgcagtttacaatgatagcattgctcattataatagtcctctgataactaacttagtttctattggtatgcttatcttcggggttaactttaatctttactatcttcttttactccgaaaaattaaagcattctttggtgatgaggaactaaaaacctatctccgcatcgtggcaatagcaactttcatgattgctctaaacgtcatcggtatgtatgataattttcgacaaggcctcgaacatattttctttgaagtatcagctattattacgacaactggttttggcgtgactgatatcactcgttggcctttgttttcacaggttattttgctattcttgatgtttatcggtggttctgctggctctacagctgggggctttaaagtcatgcgtagcttaatcctagcaaagattgcacgtaaccaagtattgtctacactctatcctaatagagtcatgtcactacacattaataaaagcgttctagataaaaatacacaacatggtgttttaaaatatctaactatctatttagctatcttcatggcactcgttcttgttttaacgcttgatactaatgattttttggttgttatcagtgctgcagcctcatgttttaacaacataggcccactcttaggtagcaatgaaactttctcattctttagtccattctcaaaactccttctttcatttgctatgatagcaggacgtttagaaatataccctgttttattgatgtttattcctaaaacatggtcaaaacta

SEQ ID NO: 4720 - protein, 479 aa, Streptococcus agalactiae
MNKSMIRFLLSKLLLIEAALLAIPLTVGLIYREPQSVMMSIVITMIILIILGLLGSLFKPKNYHIYTKEGMLIVALCWILWSFFGALPFVISGQIPNIIDAFFEVSSGFTTTGATILDDVSVLSPALLFWRSFTHLIGGMGVLVFALAIMENSKNSHLEVMRAEVPGPVFGKVVSKLKKTAQILYLLYLLMFAVFAVILYFAGMPFFDSIIIAMGTAGTGGFAVYNDSIAHYNSPLITNLVSIGMLIFGVNFNLYYLLLLRKIKAFFGDEELKTYLRIVAIATFMIALNVIGMYDNFRQGLEHIFFEVSAIITTTGFGVTDITRWPLFSQVILLFLMFIGGSAGSTAGGFKVMRSLILAKIARNQVLSTLYPNRVMSLHINKSVLDKNTQHGVLKYLTIYLAIFMALVLVLTLDTNDFLVVISAAASCFNNIGPLLGSNETFSFFSPFSKLLLSFAMIAGRLEIYPVLLMFIPKTWSKL

SEQ ID NO: 4721 - DNA, 249 bp, Streptococcus agalactiae
atgcttaaatcttttttgattttcttagttcgcttttaccaaaaaaatatttctccagctttcccagctagctgtcgttatcgtccaacttgctctacgtatatgatagaagctattcaaaaacatggtctaaaaggtgtgttgatggggattgcacgtattttgcgatgtcatcccttagcccacggaggaaatgatcctgtccctgatcattttagcttaagacgtaataaaacggatatatcagat

SEQ ID NO: 4722 - protein, 83 aa, Streptococcus agalactiae
MLKSFLIFLVRFYQKNISPAFPASCRYRPTCSTYMIEAIQKHGLKGVLMGIARILRCHPLAHGGNDPVPDHFSLRRNKTDISD

SEQ ID NO: 4723 - DNA, 261 bp, Streptococcus pyogenes
atgatgaaaaaactattaatagtatctgttaaagcttatcaaaaatacatttctcctttatctcctcctagttgtcgctacaagccaacctgttcagcttatatgttaactgctattgaaaaacatggtactaagggaatattaatggggatagcaagaatattaagatgtcacccttttgttgctggtggtgtcgatcctgttccagaagattttagcctaatgagaaataaaaacacgtctaaaaacgctgaaaaggca

SEQ ID NO: 4724 - protein, 87 aa, Streptococcus pyogenes
MMKKLLIVSVKAYQKYISPLSPPSCRYKPTCSAYMLTAIEKHGTKGILMGIARILRCHPFVAGGVDPVPEDFSLMRNKNTSKNAEKA

SEQ ID NO: 4725 - DNA, 720 bp, Streptococcus agalactiae
atgagaattaataaatatattgcgcatgcagggattgcaagtcgtagaaaagctgaggaattaatcaagcaaggaatggtcacgattaatggtcaagtggttaatgaattggcgacccaagtaaaggctggtgatctggttgaaattgaaggaagtccaatttacaacgaagagaaggtatattatctcttaaataaaccacgtggtgttatttcaagtgtctcagatgataaaggacgtaagacagttattgacttgttgccacaagtcaaagaacggatatatcctgttggtcgcttggattgggatacaactggacttttaattttgactaatgatggtgattttactgataaaatgattcatcctcgtaatgaaattgataaagtttatttagcacgtgttaaaggaatagctactaaagaaaaccttcgaccattaacgcgtggcgttgttatcgatggtaagaaaacaaaacctgctcgctatactatcataaaagtggatcatgaaaaaaatcgttcagtagttgaattaactattcatgaaggtcgtaatcatcaagttaagaaaatgtttgaacaagttgggttattagtggacaagctatctcgtacacaattcggtaccttagatttaacgggtctccgtcctggggaagcacgacgattaaataaaaaagaaattagtcagttgcataatgcggctattaataaatct

SEQ ID NO: 4726 - protein, 240 aa, Streptococcus agalactiae
MRINKYIAHAGIASRRKAEELIKQGMVTINGQVVNELATQVKAGDLVEIEGSPIYNEEKVYYLLNKPRGVISSVSDDKGRKTVIDLLPQVKERIYPVGRLDWDTTGLLILTNDGDFTDKMIHPRNEIDKVYLARVKGIATKENLRPLTRGVVIDGKKTKPARYTIIKVDHEKNRSVVELTIHEGRNHQVKKMFEQVGLLVDKLSRTQFGTLDLTGLRPGEARRLNKKEISQLHNAAINKS

SEQ ID NO: 4727 - DNA, 744 bp, Streptococcus pyogenes
ttgctcaaaagaaagaagaatataatgcgaattaacaaatacattgcccatgcgggtattgccagtcgtcgtaaggctgaagaattgattaagcaaggcttagtaaccttaaatggtcaggttattacggatttagcaaccactgtaaaatcgggagacgtggttgaaatagaaggaagtcctatttacaacgaggaaaaggtttactatttgcttaataaacctcgtggcgctatctcaagtgtgtcagatgacaaaggccgtaaaacggtactggatttactacctcaggttaaagaacgcatataccctgttggacgattggattgggacacatcaggggtccttattttaacgaatgatggtgattttacagatactatgattcatcctagaaatgaaatagacaaggtttatctggcgcgtgtcaaaggtattgcaacgaaagaaaatcttcgtcccttaactcgaggaattgttattgatggtaaaaagaccaaaccagctcgctacaatattgttcgtgtagaagctgataagagtcgatcgatcgtagaattgactatccatgaagggcgaaaccatcaagtgaaaaaaatgtttgagtctgtggggcttctggttgataaattatctcgtacacgttttgggaccgtcgacttaaagggactaagaccaggagaagcaagacgcttaaataaaaaagaaataagtcaactgcataacttagctaatacgaaaaaa

SEQ ID NO: 4728 - protein, 248 aa, Streptococcus pyogenes
LLKRKKNIMRINKYIAHAGIASRRKAEELIKQGLVTLNGQVITDLATTVKSGDVVEIEGSPIYNEEKVYYLLNKPRGAISSVSDDKGRKTVLDLLPQVKERIYPVGRLDWDTSGVLILTNDGDFTDTMIHPRNEIDKVYLARVKGIATKENLRPLTRGIVIDGKKTKPARYNIVRVEADKSRSIVELTIHEGRNHQVKKMFESVGLLVDKLSRTRFGTVDLKGLRPGEARRLNKKEISQLHNLANTKK

SEQ ID NO: 4729 - DNA, 582 bp, Streptococcus agalactiae
atgacttatttaggctcaatagaagctcttctttttgttgcaggtgaagatggactgagtttgcgtcaaatggcagaattattgtctttgacaccatcagcattaatacagcaactagaaaagttggctaaacgatatgaagaagatgacgattctagtctattattgcttgagacagcacaaacttataaattggtaacaaaggatagttatatgactttgttgagagattatgcgaaggctccgattaatcagagtctatctcgggcaagtttggaagttctatctattattgcttataaacaacctattactaggattgaaattgatgatattcgtggcgtgaattccagtggagctataacgagactgatagcttttggtttaattaaagaggctggaaagaaagaagtgttgggacgtcctaacctttatgagacaactaattatttcttagattatatgggaattaatcagttagatgacttaattgacgcctcttcaattgaattagttgacgaagaagtatcgttattttcaatggattcaattaatacagaagataaggaaaacaatgagaat

SEQ ID NO: 4730 - protein, 194 aa, Streptococcus agalactiae
MTYLGSIEALLFVAGEDGLSLRQMAELLSLTPSALIQQLEKLAKRYEEDDDSSLLLLETAQTYKLVTKDSYMTLLRDYAKAPINQSLSRASLEVLSIIAYKQPITRIEIDDIRGVNSSGAITRLIAFGLIKEAGKKEVLGRPNLYETTNYFLDYMGINQLDDLIDASSIELVDEEVSLFSMDSINTEDKENNEN

SEQ ID NO: 4731 - DNA, 549 bp, Streptococcus pyogenes
atgacgtatttgtcacagatagaagcgctgctatttgttgcaggtgaagaaggattaagtttgcgacatctagcgtctatgttatcattaacgccaacagctcttcaacagcaattagaaaaactctctcaaaagtatgaaaaagatcaacattctagtctttgcttgatagaaacagctaatacctacaggctagtaactaaagaaggttttgcagaactcttgcgtgcttatgccaaaacaccaatgaaccaaagtttatctcgtgcgagtttagaggtcttgtctattgttgcatacaaacaacctattacacgaatagaaattgatgacattcgaggggtaaactccagtggagctttgagtaaattattggcatttgatctcattagagaagctggcaaaaaagatgtggttgggcgtcctcatttgtatgcgacaacagattattttctggactatatgggaattaatcatttagacgaattgattgaagtatctgccgttgaaccagcagatgaagagattgctctttttaggacacaagac

SEQ ID NO: 4732 - protein, 183 aa, Streptococcus pyogenes
MTYLSQIEALLFVAGEEGLSLRHLASMLSLTPTALQQQLEKLSQKYEKDQHSSLCLIETANTYRLVTKEGFAELLRAYAKTPMNQSLSRASLEVLSIVAYKQPITRIEIDDIRGVNSSGALSKLLAFDLIREAGKKDVVGRPHLYATTDYFLDYMGINHLDELIEVSAVEPADEEIALFRTQD

SEQ ID NO: 4733 - DNA, 705 bp, Streptococcus agalactiae
atggatattaagttaaaagatttcgaggggcccctagacttactcttgcacctcgtatctaaatatgaggttgatatatacgatgtaccgattgtggaagttattgagcagtaccttgcttatatagcaacattacaggcgatgcgtctagaagtagctggtgagtatatgcttatggcaagtcagctgatgttgataaaaagccgtaacttattacctaaagtagtggagtcaaatcctattgaagatgatccagaaatggaattgttgagccaattagaggaatatagacgttttaaagtgctaagtgaagagttagctaatcagcatcaggaacgcgccaaatatttttcaaaaccaaaacaagaagttatctttgaagatgcaattcttctacacgataaatcggtgatggatctttttttgactttttctcaaatgatgtcccaaaaacaaaaagaattgtcaaatagtcaaacggtaattgagaaagaagactaccgtattgaagatatgatgatcgttattgaaagacattttaatcttaaaaagaaaacgacattacaagaagtgtttgcggattgccaaacaaaatctgaaatgataactttatttttggcaatgttagagttgataaaattacatcaaatcacagtagaacaagacagtaattttagtcaagttatcttaagaaaggaagagaaa

SEQ ID NO: 4734 - protein, 235 aa, Streptococcus agalactiae
MDIKLKDFEGPLDLLLHLVSKYEVDIYDVPIVEVIEQYLAYIATLQAMRLEVAGEYMLMASQLMLIKSRNLLPKVVESNPIEDDPEMELLSQLEEYRRFKVLSEELANQHQERAKYFSKPKQEVIFEDAILLHDKSVMDLFLTFSQMMSQKQKELSNSQTVIEKEDYRIEDMMIVIERHFNLKKKTTLQEVFADCQTKSEMITLFLAMLELIKLHQITVEQDSNFSQVILRKEEK

SEQ ID NO: 4735 - DNA, 699 bp, Streptococcus pyogenes
atggatataaaacttaaagattttgaaggtcctcttgatttactcttacacttggtatcacagtacaaagttgacatctacgaggttcctattgttgaggttattgagcagtaccttaattatattgaaaccttacaggtaatgaaacttgaagtggctggtgactacatgctgatggcaagtcagctcatgttaatcaaaagtagaaggctattaccaaaggtggtagaacacatcgaagaagatttagaacaagatctgttagaaaagatcgaagaatatagtcgctttaaagcagttagtcaagcgttagcgaagcaacatgaccaaagggcaaaatggtattcaaaacctaaacaagaattaatttttgaagatgctatcttacaggaagataaaacggtgatggatctatttctagctttttcaaacataatggcagctaaaagagcagttttaaaaaacaaccatacagtcatcgagcgtgatgattataagattgaagacatgatggcttctattaaacagcgactggaaaaagaaaacgttattagattatcagcgatttttgaggaatgccaaacattaaatgaagttatcagtatatttttagctagtctagaattgattaagcttcacgtggtatttgtagagcagctctctaattttggggctatcatactacgaaaggagaagaaa

SEQ ID NO: 4736 - protein, 233 aa, Streptococcus pyogenes
MDIKLKDFEGPLDLLLHLVSQYKVDIYEVPIVEVIEQYLNYIETLQVMKLEVAGDYMLMASQLMLIKSRRLLPKVVEHIEEDLEQDLLEKIEEYSRFKAVSQALAKQHDQRAKWYSKPKQELIFEDAILQEDKTVMDLFLAFSNIMAAKRAVLKNNHTVIERDDYKIEDMMASIKQRLEKENVIRLSAIFEECQTLNEVISIFLASLELIKLHVVFVEQLSNFGAIILRKEKK

SEQ ID NO: 4737 - DNA, 777 bp, Streptococcus agalactiae
atgattttacagacgaatatactatcactcctaaaaacaatgataaatgatattaataattttattgagagtaagaaattatctctcaattcgcgtaagtcctatcactatgatttaaagcaattttataaaataattggtggacatgtaaattctgaaaaactggcattgtatcaacagtctctaagtgaatttaagttaacagctcgtaagcgaaagttatctgcagtcaatcaatttcttttctttttatataatagaggaacgctgaaggaattttacagactacaagagactgaaaaaatcactttggctcagacaaagtctcaaataatggatttatcaaatttctatcaagatactgattatccgagtggtcgtttgattgctttgttgattttatctttaggtttaactccggctgaaattgctaatttgaagaaggctgattttgatacaacttttaatatcttaagtattgaaaaatcgcagatgaagcgtattttaaaacttccagaagacttgcttccttttcttttggaatctttagaggaagatggtgacttagtctttgagcataacggtaagccttattctagacaatggttttttaatcaattaacagatttcttaaatgagaagaatgagcaacaactaactgcacaacttctgcgagaacaatttattctaaagcaaaaagaaaatggcaaaacgatgacggagctcagtcgccttctaggcttaaaaactcctatcactttagagagatattataga

SEQ ID NO: 4738 - protein, 259 aa, Streptococcus agalactiae
MILQTNILSLLKTMINDINNFIESKKLSLNSRKSYHYDLKQFYKIIGGHVNSEKLALYQQSLSEFKLTARKRKLSAVNQFLFFLYNRGTLKEFYRLQETEKITLAQTKSQIMDLSNFYQDTDYPSGRLIALLILSLGLTPAEIANLKKADFDTTFNILSIEKSQMKRILKLPEDLLPFLLESLEEDGDLVFEHNGKPYSRQWFFNQLTDFLNEKNEQQLTAQLLREQFILKQKENGKTMTELSRLLGLKTPITLERYYR

SEQ ID NO: 4739 - DNA, 744 bp, Streptococcus pyogenes
atgaagagttatattgaaccttttattgctagcaaggctttatctcaaaatagtcaaaaagcttatcgatacgatttgcaacagttttgtcaactgattggtgaacgtgtcaatcaagacaaactattactttatcaaaatagcatagctaacctaagtttatctgcaaaaaaacgcaaattatcaacagctaatcaattcttatattacttgtatcaaataaagtatttaaatagctattttcgattaacagacaccatgaaagtgatgcggactgagaagcagcaagctgctattattaatactgatattttctatcaaaaaaccccttttgtgtgggggcaattaatcagcttattaatattggagctgggtttaactccgagtgaagtagctggtattgaagtagctaacttggatttaaattttcaaatgttgacgctaaagactaaaaaaggtgtgcgtgtattacctttatcgcaaatactaatcccttttttagaacaacaactcgttggcaaagaagtctatctttttgaacatcgaggcatccctttttcaagacaatggttttttaatcacctaaaaacctttgttcgaagtattggttatgaaggattgactgctcaaaaattacgagagcaatttattttgaaagaaaaactagctggtaaatcgataatagaacttagcgatattcttgggctgaaaagccctatgaccttagaaaaatactacaaatca

SEQ ID NO: 4740 - protein, 248 aa, Streptococcus pyogenes
MKSYIEPFIASKALSQNSQKAYRYDLQQFCQLIGERVNQDKLLLYQNSIANLSLSAKKRKLSTANQFLYYLYQIKYLNSYFRLTDTMKVMRTEKQQAAIINTDIFYQKTPFVWGQLISLLILELGLTPSEVAGIEVANLDLNFQMLTLKTKKGVRVLPLSQILIPFLEQQLVGKEVYLFEHRGIPFSRQWFFNHLKTFVRSIGYEGLTAQKLREQFILKEKLAGKSIIELSDILGLKSPMTLEKYYKS

SEQ ID NO: 4741 - DNA, 471 bp, Streptococcus agalactiae
atgattgctaaagaatttgagtcgtttttgctaaatcatttggaccactatctaattccagctgaagacgttgctatttttgtggatacacacaatgcagaccacgttatgttactattagcaagtaatggtttttcacgtgtaccagttatcactaaagagaaaaaatatgtaggtactattagtatctcagacattatgggctaccaatctaaaggtcaattaacagattgggagatggcacagactgatattgttgagatggttaatacaaaaatcgagccgattaatgaggcagctactctgacagcaattatgcataagattgtagattatccatttttacctgttatcagtgatcaaaatgattttagaggcattataacccgtaaatcgattttaaaagctattaatagcctcctacatgattttacagacgaatatactatcactcctaaaaacaatgataaa

SEQ ID NO: 4742 - protein, 157 aa, Streptococcus agalactiae
MIAKEFESFLLNHLDHYLIPAEDVAIFVDTHNADHVMLLLASNGFSRVPVITKEKKYVGTISISDIMGYQSKGQLTDWEMAQTDIVEMVNTKIEPINEAATLTAIMHKIVDYPFLPVISDQNDFRGIITRKSILKAINSLLHDFTDEYTITPKNNDK

SEQ ID NO: 4743 - DNA, 459 bp, Streptococcus pyogenes
atgatcgcaaaagaatttgaaacatttttaatgagtcatttagataattatcttatcccggaacaagacttggctatttttatcgacacacataatgcagaccatgtgatgttactattggtgagcaatggtttttctagagttcctgttatcacacgggagaaaaaatatgtgggaaccattagcatctcagatattatgatgtaccaatctaaaaggcagctgacagattgggaaatgagtcaaacagatattggcgagatggttaataccaaaattgaaaccattagcattacttctagcctaacagaaattatgcacaagttaattgatttcccattcttaccggttgtagatagagcgaatcgctttgttgggattattacgcgaaaatctatattaaaggctgtcaacagtcttttacatgattttacagatgattacacgattataaaaaaa

SEQ ID NO: 4744 - protein, 153 aa, Streptococcus pyogenes
MIAKEFETFLMSHLDNYLIPEQDLAIFIDTHNADHVMLLLVSNGFSRVPVITREKKYVGTISISDIMMYQSKRQLTDWEMSQTDIGEMVNTKIETISITSSLTEIMHKLIDFPFLPVVDRANRFVGIITRKSILKAVNSLLHDFTDDYTIIKK

SEQ ID NO: 4745 - DNA, 519 bp, Streptococcus agalactiae
atggcaattagaaaattagttgtaatgagtgattctcacggagatcgtgacattgtaaaagatataaagaatcattatttgggaaaagtggatgctatttttcacaatggggattccgaacttcctagctcagatcctatatgggaaggcattcatgtggtcacaggaaattgtgattatgattcaggttatccggaagttttggttacaaaaatagataatgctgttattgttcaaacccatggtcatctccatcagattaattttacctgggataaattggatttattagctcagcaagaagacgcggatatttgtttatatggtcatcttcatcgtgcagatgcttggaaaaatggtaaaactatttttatcaatccaggtagtgttttgcagccaagaggaccaataaatgagaagctttacgctgttgtaactataacagatagtaaggttttggtagagtattatactcgccaacaccaaccctatcctaacttgacaaaggaattatcaaga

SEQ ID NO: 4746 - protein, 173 aa, Streptococcus agalactiae
MAIRKLVVMSDSHGDRDIVKDIKNHYLGKVDAIFHNGDSELPSSDPIWEGIHVVTGNCDYDSGYPEVLVTKIDNAVIVQTHGHLHQINFTWDKLDLLAQQEDADICLYGHLHRADAWKNGKTIFINPGSVLQPRGPINEKLYAVVTITDSKVLVEYYTRQHQPYPNLTKELSR

SEQ ID NO: 4747 - DNA, 519 bp, Streptococcus pyogenes
atggcaagcaaaacaatcatagtaatgagtgactctcatggtgaccgagatatcgttcaagccattaaagacaagtatcttggtcaagttgatgctattttccataatggggattctgaattaaacagctcagatcctatttgggctggtatttatgtcgttggcggtaattgtgactatgatacaggttaccctgatcgtttagtaactcaattaggcacagttacgattgcccagacacatggtcacttgtaccatattaatttcacttgggataaactggactactttgctcaagaagtagtagcagatatttgtctatatggacacctacaccgtccagctgcttggcaagttgggcaaaccctctttatgaatcccggatcagtaacacaacctcgcggagaaattaacgagaaattatatgctcgtgttgaactaactgatactcaaattaaagttgattactttaccagagatcataaactttacccatcactgtctaaggaatttaaacga

SEQ ID NO: 4748 - protein, 173 aa, Streptococcus pyogenes
MASKTIIVMSDSHGDRDIVQAIKDKYLGQVDAIFHNGDSELNSSDPIWAGIYVVGGNCDYDTGYPDRLVTQLGTVTIAQTHGHLYHINFTWDKLDYFAQEVVADICLYGHLHRPAAWQVGQTLFMNPGSVTQPRGEINEKLYARVELTDTQIKVDYFTRDHKLYPSLSKEFKR

SEQ ID NO: 4749 - DNA, 972 bp, Streptococcus agalactiae
atgacaaaaacaatttttgaaagtaaaactgaaggcaattggtttttaggtagtttccaagcttttaattattttacttgttttggtaatgatgaatcttacgaagctatccaagatgtttttcatcgtctattatcaactttgaaagttgaaggtctacagcttcacgttgtgcagatgacttcggattttcaattattagcattcctcgttgatatgattaatcaagagtattcaaggcatatcaaagtgactcaacataaaggggccatcttagttagtgaagatgatcagttgttcttagttcacttacctaaagagggcacttctttagaaaaattctttgatttaaagaatgataataattttggggataccatattaattgcgactcacaatgaaggaaaaacgaaggaatttagagaattatttgggaaattaggactcaaagttgaaaatttaaatgattacccagatttaccagaagttgaagagactggtatgacctttgaagaaaatgctcgacttaaagcagagactatttcaaaattaactggaaaaatggtaatttcagatgattccggattaaaagtagatgctttaggtggtttgccaggggtatggtctgctcgtttttcaggtcctgacgcgacagatgctcgtaataatgccaaattattgcatgaattagccatggtatttgacaaagaaagacgttcagcacagtttcatacaaccttagtcgtgtcagctccaaataaagaaagtttggtagttgaagcagagtggccaggttatattggtacggaacctaagggggaaaatggctttggttatgatccgctctttattgtcggagaaggtagtaggacagcagctgaattgagcgcacaagaaaaaaataatctatcacatcgtgggcaagctgtccgtaaattgatggaggtatttccaaaatggcaattagaaaat

SEQ ID NO: 4750 - protein, 324 aa, Streptococcus agalactiae
MTKTIFESKTEGNWFLGSFQAFNYFTCFGNDESYEAIQDVFHRLLSTLKVEGLQLHVVQMTSDFQLLAFLVDMINQEYSRHIKVTQHKGAILVSEDDQLFLVHLPKEGTSLEKFFDLKNDNNFGDTILIATHNEGKTKEFRELFGKLGLKVENLNDYPDLPEVEETGMTFEENARLKAETISKLTGKMVISDDSGLKVDALGGLPGVWSARFSGPDATDARNNAKLLHELAMVFDKERRSAQFHTTLVVSAPNKESLVVEAEWPGYIGTEPKGENGFGYDPLFIVGEGSRTAAELSAQEKNNLSHRGQAVRKLMEVFPKWQLEN

SEQ ID NO: 4751 - DNA, 1023 bp, Streptococcus pyogenes
ttggctgaaacaaaaaataaatgtggagcatgtcaccttatgagtgaaaaaatttacgaatacaaagatgaaaataactggtttatcggaaagatgactggtcataatttaatatcgggctggggagtcaaacacacgacaatcaaaaaaatagatgaccttttagacggtattgccgcaacgttagattgggaaaatcctaaaggttacgatgtttcggtggtgcgtcatcagtctcctttatctctcatcacctttattatcgacatgataaatcaagagacccagcgtgagattaaggtaactccccatgcaggcacgattttattaatggaaaatgcgaaactgcttgcagtttatctcccagaaggtggagtttcaacggctacattttttgcgactagtgaacagggatttggggatattattttaatcgctacacgaaacgagggaaaaaccaaagagttccgcaatctgtttggccagctaggttatcgtgtggaaaatcttaatgattatccagaattgccagaagtagcagaaactggtactacttttgaagaaaatgctcgcttgaaagcagaaacgatttcacgcctcacaggaaaaatggtattagcagacgattcaggactaaaagttgatgccttgggtggtttacctggtgtttggtcagctcgtttctcaggaccagatgccacagatgccaagaataatgccaaactcttacacgaattagctatggtgtttgaccaaaagaagcgctcagctcaatttcatacgactttggtagtggctgctcccaataaagatagtttggttgtggaagccgattggccaggctatattgctacgcagcctaagggagaaaatggttttgggtatgatcctgtctttatcgtcggagagactgggcatcatgctgcagaattagaggctgaccaaaaaaatcagttgtcgcatagaggtcaagcagttcgaaaattaatggaggtctttccagcatggcaagcaaaacaatca

SEQ ID NO: 4752 - protein, 341 aa, Streptococcus pyogenes
LAETKNKCGACHLMSEKIYEYKDENNWFIGKMTGHNLISGWGVKHTTIKKIDDLLDGIAATLDWENPKGYDVSVVRHQSPLSLITFIIDMINQETQREIKVTPHAGTILLMENAKLLAVYLPEGGVSTATFFATSEQGFGDIILIATRNEGKTKEFRNLFGQLGYRVENLNDYPELPEVAETGTTFEENARLKAETISRLTGKMVLADDSGLKVDALGGLPGVWSARFSGPDATDAKNNAKLLHELAMVFDQKKRSAQFHTTLVVAAPNKDSLVVEADWPGYIATQPKGENGFGYDPVFIVGETGHHAAELEADQKNQLSHRGQAVRKLMEVFPAWQAKQS

SEQ ID NO: 4753 - DNA, 870 bp, Streptococcus agalactiae
ttgactgattggttattgtatagagaggctaggactgttgtccagcctcttttagtcactaatattggaggaataaaaatggatagtaggcctattggctttctagattctggtgtaggtggtttaacggttgttaaggaaatgttccgtcaacttccagaagaggaagtaatcttcattggagatcaggctagagctccgtatggtcctagacctgctcaacagattagagagtttacctggcagatggttaacttcttattgactaaaaatgttaagatgattgttatagcttgtaatacagcaactgcagttgcctggcaagaaattaaagaaaaactagacatccctgttttaggcgttattttaccaggagctagcgcagctatcaaatcaactaatttagggaaagttggtattataggtactcccatgactgttaaatcagatgcttatcgtcaaaaaattcaagctttgtctccaaatactgctgtggtatcccttgcttgtccgaaatttgttccaattgtggaatcaaatcagatgtcttctagtttagccaaaaaggtggtttatgaaacgttgtccccattagttggtaaattagatactttaattttaggttgcacgcattatcccctattacgtcccatcattcaaaatgttatgggggctgaggttaaattaattgatagtggcgcagaaaccgttcgtgatatttctgttttattgaactattttgagataaaccataattggcaaaataaacacggtggtcatcacttttacacaaccgccagcccaaaaggttttaaagaaattgcagaacaatggcttagtcaagaaataaatgtggagcgtatcgtatta

SEQ ID NO: 4754 - protein, 290 aa, Streptococcus agalactiae
MTDWLLYREARTVVQPLLVTNIGGIKMDSRPIGFLDSGVGGLTVVKEMFRQLPEEEVIFIGDQARAPYGPRPAQQIREFTWQMVNFLLTKNVKMIVIACNTATAVAWQEIKEKLDIPVLGVILPGASAAIKSTNLGKVGIIGTPMTVKSDAYRQKIQALSPNTAVVSLACPKFVPIVESNQMSSSLAKKVVYETLSPLVGKLDTLILGCTHYPLLRPIIQNVMGAEVKLIDSGAETVRDISVLLNYFEINHNWQNKHGGHHFYTTASPKGFKEIAEQWLSQEINVERIVL

SEQ ID NO: 4755 - DNA, 792 bp, Streptococcus pyogenes
atggatacaagaccaattgggtttttagattctggtgtgggaggtctgaccgtcgtttgtgaattgattcgtcagctccctcatgagaagattgtatatattggtgattcagcaagagccccctatggtcctagacccaaaaaacaaattaaggagtatacttgggagctagtcaattttttgctgactcaaaatgttaaaatgattgtttttgcatgcaataccgcaacagcggtggcttgggaagaagtaaaagcagctttagatattcctgttttaggagttgtcttaccgggggcaagcgcagctattaaatcaacgacaaaaggccaggttggggtcatcggaaccccaatgacagtggcttcagacatttatcgcaaaaaaatccagctattagcaccatctattcaagtaaggagtcttgcttgcccgaagtttgtaccgattgtggaatcaaatgagatgtgttcgagtatagctaaaaaaatagtttatgacagtctagcaccattagtcggtaaaatagatacccttgtactaggatgtactcactatcccttgttacgaccaattatccaaaatgttatggggccatctgttaagctgattgacagtggagcagaatgcgtccgagatatctctgtcttattaaactattttgacattaacggtaattatcatcaaaaagctgtcgaacaccgcttttttacaacagcaaatcctgagatttttcaagaaattgcctcgatttggctgaaacaaaaaataaatgtggagcatgtcacctta

SEQ ID NO: 4756 - protein, 264 aa, Streptococcus pyogenes
MDTRPIGFLDSGVGGLTVVCELIRQLPHEKIVYIGDSARAPYGPRPKKQIKEYTWELVNFLLTQNVKMIVFACNTATAVAWEEVKAALDIPVLGVVLPGASAAIKSTTKGQVGVIGTPMTVASDIYRKKIQLLAPSIQVRSLACPKFVPIVESNEMCSSIAKKIVYDSLAPLVGKIDTLVLGCTHYPLLRPIIQNVMGPSVKLIDSGAECVRDISVLLNYFDINGNYHQKAVEHRFFTTANPEIFQEIASIWLKQKINVEHVTL

SEQ ID NO: 4757 - DNA, 237 bp, Streptococcus agalactiae
atgtcaataactatttggattttattaattatcgtcgctttgtttggtggtctcgtgggaggcatttttattgctcgtaaacaaattgaaaaagagattggagagcaccctcgtttaacaccggatgctattcgtgaaatgatgagtcaaatgggacaaaaacctagtgaagctaaagttcaacaaacataccgtaatattgtaaaacacgcaaaaacagctatcaaaactaaaaaa

SEQ ID NO: 4758 - protein, 79 aa, Streptococcus agalactiae
MSITIWILLIIVALFGGLVGGIFIARKQIEKEIGEHPRLTPDAIREMMSQMGQKPSEAKVQQTYRNIVKHAKTAIKTKK

SEQ ID NO: 4759 - DNA, 240 bp, Streptococcus pyogenes
atgtcaacagctatttggattttattacttattgttgcccttggggtaggtgtttttggtgggatttttattgcccgtaaacaaattgaaaaagaaattggtgaacacccacgtttaacaccagaagctatccgtgaaatgatgagccagatggggcaaaaaccaagtgaagcaaaaatccaacaaacttatcgtaatatcatcaaacaatcaaaagcagccgtatccaaaggcaaaaaa

SEQ ID NO: 4760 - protein, 80 aa, Streptococcus pyogenes
MSTAIWILLLIVALGVGVFGGIFIARKQIEKEIGEHPRLTPEAIREMMSQMGQKPSEAKIQQTYRNIIKQSKAAVSKGKK

SEQ ID NO: 4761 - DNA, 315 bp, Streptococcus agalactiae
atgttaatagctacagcaaataacaatgtttgccatttactcatcaataaagagggctttgacttaatcaagaaagccgcaattaatgcaaatccgatatgtgataaagctctaagaacgattacaatcggaaaaccagctagtagaaatccaagtcctgtccctaaagctaccaatattgcaactggaacagatataaaaatacttaaaaataaaggtacatggcttgctaaggtgaaagaagcaggcccaataattattttagcaggcatgattataggaatcatgattgcaaaagctactaaaatagaagta

SEQ ID NO: 4762 - protein, 105 aa, Streptococcus agalactiae
MLIATANNNVCHLLINKEGFDLIKKAAINANPICDKALRTITIGKPASRNPSPVPKATNIATGTDIKILKNKGTWLAKVKEAGPIIILAGMIIGIMIAKATKIEV

SEQ ID NO: 4763 - DNA, 573 bp, Streptococcus agalactiae
ttgttttgtataatagcttcaaaggagataaaaatgtcaaaaaaaacaacacaaatggtttcttatacttctattttagtagcttttgcaatcatgattcctataatcatgcctgctaaaataattattgggcctgcttctttcaccttagcaagccatgtacctttatttttaagtatttttatatctgttccagttgcaatattggtagctttagggacaggacttggatttctactagctggttttccgattgtaatcgttcttagagctttatcacatatcggatttgcattaattgcggctttcttgattaagtcaaagccctctttattgatgagtaaatggcaaacattgttatttgctgtagctattaacataattcatggtctgctcgaatttattactgtttatataatcacaatgacttctaacagtagttcaacttatttatggtcactattttctttgataggactaggctctttgctacatggattggtagatttttacatagctctcttcatttggaaatggatgacacaaaagttggggaaaacacttaggataaga

SEQ ID NO: 4764 - protein, 191 aa, Streptococcus agalactiae
MFCIIASKEIKMSKKTTQMVSYTSILVAFAIMIPIIMPAKIIIGPASFTLASHVPLFLSIFISVPVAILVALGTGLGFLLAGFPIVIVLRALSHIGFALIAAFLIKSKPSLLMSKWQTLLFAVAINIIHGLLEFITVYIITMTSNSSSTYLWSLFSLIGLGSLLHGLVDFYIALFIWKWMTQKLGKTLRIR

SEQ ID NO: 4765 - DNA, 540 bp, Streptococcus pyogenes
atgactaaaaaaccaacacaactaatagcttatacctctattttggtcgcatttgcgattttgattccgataatcatgcctcttaagcttattattggaccagcttcctttactctggcgagccatgttcctttgtttttggctatttttatgtcgattccagtagcaattttggtcgctcttggtaccacattaggttttttattagctggactacctttaattattgttttaagagcactctctcatttattgtttgctattttggcagcgtggtggttaagtagaaaaccacaattgatgacatcggcagtaaaatgttttagttttgcgtttttcattaatgtcattcatggcttggctgaatttttagttgtctatattttaacagcaaccacagcaacttctatgtcttatttttggtctatgctaggcttgattggcttaggttcgcttattcatggcatattggatttctatcttgctttagttctatggcgttttttagcaaaaaacttaaaacttcccaccataaatgcc

SEQ ID NO: 4766 - protein, 180 aa, Streptococcus pyogenes
MTKKPTQLIAYTSILVAFAILIPIIMPLKLIIGPASFTLASHVPLFLAIFMSIPVAILVALGTTLGFLLAGLPLIIVLRALSHLLFAILAAWWLSRKPQLMTSAVKCFSFAFFINVIHGLAEFLVVYILTATTATSMSYFWSMLGLIGLGSLIHGILDFYLALVLWRFLAKNLKLPTINA

SEQ ID NO: 4767 - DNA, 519 bp, Streptococcus agalactiae
atgaaggcacaggagcgtcgagaaaatattttaacgactttaaaaggaacaaaagaagctatatcggcaagcacattagcaaagatttttagtgttagtaggcaggtgattgttggagatattgccttattgcgtgcacaacaatgtgatattatttctaccccaaaaggataccttatgtccagtgctctaagtactcatcaattcacagctagattggtttgtcagcatggcatagaacagacagaagaagaactggaaattattttgcggtatcaaggaatcattatgaatgtggaggtagagcaccctatttatgggatgctgactgctcccttaaacattcaaagccaaaaagacattgataattttactgctaaattaaaagtttccaatgcagaattgctatcctctttgacagatggtctacatacacatatgatttcttgtcaagatcagtcagtttttgaccaaatatgtgaggctctaaaaaaagcaggaattttatacatagacaaa

SEQ ID NO: 4768 - protein, 173 aa, Streptococcus agalactiae
MKAQERRENILTTLKGTKEAISASTLAKIFSVSRQVIVGDIALLRAQQCDIISTPKGYLMSSALSTHQFTARLVCQHGIEQTEEELEIILRYQGIIMNVEVEHPIYGMLTAPLNIQSQKDIDNFTAKLKVSNAELLSSLTDGLHTHMISCQDQSVFDQICEALKKAGILYIDK

SEQ ID NO: 4769 - DNA, 519 bp, Streptococcus pyogenes
atgaaagcagaagatcgtcgtcaaaaaattattgagtgcttaaatagtgaacaaaaagctgtatctgctactcgtttaggtaagttattaggagtgagtcgccaagtaatcgttggagatatagctcttcttcgagctcagcagattgatattatttcgactccaaaaggttatattatgtcaacagcactttatagtcaccaattttgtgcacgtattgtgtgccaacataatgtagaagaaactaaaaaagaattagaaattattttagctcatcaagggattattacgacggtagaggtagaacatcctatttacggtatgataacagcccctttaaatattaagacacactctgatgtaactaatttcatgtccaaactcagtcaatctaaagcagagttattgtcttcgttgacagaaggactacatagtcacttaatttcgtgtcctagtcaagaagcctttttagctattaagcatgatttagaattagcaggtatcttatacaaaggaata

SEQ ID NO: 4770 - protein, 173 aa, Streptococcus pyogenes
MKAEDRRQKIIECLNSEQKAVSATRLGKLLGVSRQVIVGDIALLRAQQIDIISTPKGYIMSTALYSHQFCARIVCQHNVEETKKELEIILAHQGIITTVEVEHPIYGMITAPLNIKTHSDVTNFMSKLSQSKAELLSSLTEGLHSHLISCPSQEAFLAIKHDLELAGILYKGI

SEQ ID NO: 4771 - DNA, 687 bp, Streptococcus agalactiae
atgaatgataacgtcatttacacacaatctgattcagggctgaatcaattttttgctaagatttacggtcttgtagggataggagtaggtttgtcagctgctgtttctgcgattatgctgtatatgtttccacaaaatatgattgccatcatgcaaaaaatgccagggttgtattttggagcaatcatcttagaattggttttagtctttgttgctagtggagcggcgcgtcgaaacacaccagctgcattaccattatttttgatttattcagctttgaatgggtttactttaagtttcattatcgcaaggtacacgcaaactacagttcttcaagcttttataacatctgcggctgttttctttgcaatggctttgattggagctaagactaaaaaagatttatcaggtatgcgtaaagcgttaatggctgctttaattgggattttaattgcaagtcttgttaatttatttatcggtagtgggggtatgagttatatcattagtatcgtatgtgtcatcatcttttctggattgattgcttacgataaccaaatgattaaatatgtctacaatagccaaggcggccaagtcgcagatggttgggcagtttcgatggcactaagcctttatcttgattttattaatctattcttaaatattcttcgtctttttgcacgaaatgat

SEQ ID NO: 4772 - protein, 229 aa, Streptococcus agalactiae
MNDNVIYTQSDSGLNQFFAKIYGLVGIGVGLSAAVSAIMLYMFPQNMIAIMQKMPGLYFGAIILELVLVFVASGAARRNTPAALPLFLIYSALNGFTLSFIIARYTQTTVLQAFITSAAVFFAMALIGAKTKKDLSGMRKALMAALIGILIASLVNLFIGSGGMSYIISIVCVIIFSGLIAYDNQMIKYVYNSQGGQVADGWAVSMALSLYLDFINLFLNILRLFARND

SEQ ID NO: 4773 - DNA, 687 bp, Streptococcus pyogenes
atgaacgatcacgttatttatacacaatcagatgtgggattaaatcagttttttgctaaaatttatagtctagtgggaatgggagtgggtttgtctgcttttgtttcttatttgatgctttatccatttagagaaaatttaatctctattcttgttaatcagccgatgatttactatggtgctgcgattattgaacttattttagtttttgtagccagtagtgcagcacgaaaaaacacaccagctgcattgcccatttttcttatctattctgcgctaaatggctttaccctaagctttattattgtggcatacgctcaaacgacagtttttcaagcatttctttcttcagcagctgtgttttttgccatgtcaatcattggtgtcaagactaaacgggatatgtcaggtcttagaaaggctatgtttgctgctttgattggtgttgttgtggctagtctgattaatctttttattggtagtgggatgatgagttatgtcattagtgtgatttccgtgctaattttctcaggtctcatcgcatcagataatcaaatgattaagcgcgtttatcaagcaacaaatggccaggttggtgatggctgggctgttgctatggccttaagcttgtatttagattttattaacttatttatcagccttcttcgtatttttggaagaaatgat

SEQ ID NO: 4774 - protein, 229 aa, Streptococcus pyogenes
MNDHVIYTQSDVGLNQFFAKIYSLVGMGVGLSAFVSYLMLYPFRENLISILVNQPMIYYGAAIIELILVFVASSAARKNTPAALPIFLIYSALNGFTLSFIIVAYAQTTVFQAFLSSAAVFFAMSIIGVKTKRDMSGLRKAMFAALIGVVVASLINLFIGSGMMSYVISVISVLIFSGLIASDNQMIKRVYQATNGQVGDGWAVAMALSLYLDFINLFISLLRIFGRND

SEQ ID NO: 4775 - DNA, 510 bp, Streptococcus agalactiae
gtgattataatgaaaaagtatcaagacgataaggacttcatggatttggtcggtcaccttattgaccatccacgtttccaaaaactcgaagctattgtccaacatcatcactcaactcgcttagagcattctataaatgttagttatacaagttataaaattgctaagaagtttggttgggatgcgagtagtactgctcgaggtggtttactacatgatttcttttattatgattggcgtgtaacgaaatttaacaagagccatgcctgggttcatccaaggatagcggttcgtaatgcgcgaaaattaactgatttaaacgctagagaagaagatattattttgaagcacatgtggggagcgactattgcaccgccacgttataaagaaagttatattgtgactatggttgataagtattgggcagtacgagaggcttctcgtccactcaaacgtatttttaagaaacctatccgttttagtcgcaaattcttaggtagtcataatcat

SEQ ID NO: 4776 - protein, 170 aa, Streptococcus agalactiae
MIIMKKYQDDKDFMDLVGHLIDHPRFQKLEAIVQHHHSTRLEHSINVSYTSYKIAKKFGWDASSTARGGLLHDFFYYDWRVTKFNKSHAWVHPRIAVRNARKLTDLNAREEDIILKHMWGATIAPPRYKESYIVTMVDKYWAVREASRPLKRIFKKPIRFSRKFLGSHNH

SEQ ID NO: 4777 - DNA, 498 bp, Streptococcus pyogenes
atgcattatacagaagataaagaatatatggaacacgtcggtcatttgatcgctcatcctcgctttcaaaaattgagtcatattgttcagcaccaacattcaacgcgtcttgaacattctatcaatgtttcttattcaagttataaattagccaagcgattcggttgggatgctaaaagtacagccagagggggcttacttcatgatttcttttattatgattggcgcgtgaccaagtttaataagggtcatgcctgggttcatcctcgtattgctgtacgaaatgcgaaaaagttaacagaactcaataaaaaagaagaggatatcattctaaaacacatgtggggagcgaccattgcttttccgcgttacaaggaaagttatattgtgacaatggtagataaatactgggctgtcaaggaagcagtgacgcctttgagacaaaaatggtctaatcgacggtttcttcgccgcaagaccctccaaagtcataatcgt

SEQ ID NO: 4778 - protein, 166 aa, Streptococcus pyogenes
MHYTEDKEYMEHVGHLIAHPRFQKLSHIVQHQHSTRLEHSINVSYSSYKLAKRFGWDAKSTARGGLLHDFFYYDWRVTKFNKGHAWVHPRIAVRNAKKLTELNKKEEDIILKHMWGATIAFPRYKESYIVTMVDKYWAVKEAVTPLRQKWSNRRFLRRKTLQSHNR

SEQ ID NO: 4779 - DNA, 687 bp, Streptococcus agalactiae
ttgttacaaaaaaaatatcggaaatcttcatatcttattgaaggctggcatttatttgaggaagctgaaaaatatggtgcacaatttttaaatatttttgtgacagaaacggcaatagatcgtttgagaaaacccgagagagctattgttgttacagatgatgttttgaaagaattaactgactcacagactcctcaagggattgtagctgagattgcctttcaagagacaagatggacagatattaaaaaaggacgttttcttgtattagaagatgtgcaggatccaggaaacctaggaacaatggttcgaactgcagatgcagcgaattttgatgctgtttttttatctcagaaatctgctgatttgtataaccaaaaaacacttcgttctatgcaaggcagtcactttcatttaccagtatttagggtagaaatagagcagtttgttaacttttgtaaagcagaagggataactatgattgcgacaactttatctgaacaatcggtaaattataagaatctccctaaatatgattattttgctttaatcatgggaaatgagggacagggaatttccaaaactatgacagaagaagcagatgttttagcacatattgaaatgcctggacaagcagaaagtcttaatgtagcagtagctgcgggagtagtcattttcagcttaatt

SEQ ID NO: 4780 - protein, 229 aa, Streptococcus agalactiae
MLQKKYRKSSYLIEGWHLFEEAEKYGAQFLNIFVTETAIDRLRKPERAIVVTDDVLKELTDSQTPQGIVAEIAFQETRWTDIKKGRFLVLEDVQDPGNLGTMVRTADAANFDAVFLSQKSADLYNQKTLRSMQGSHFHLPVFRVEIEQFVNFCKAEGITMIATTLSEQSVNYKNLPKYDYFALIMGNEGQGISKTMTEEADVLAHIEMPGQAESLNVAVAAGVVIFSLI

SEQ ID NO: 4781 - DNA, 735 bp, Streptococcus pyogenes
atggttattacatcaaaagcaaatcaactaattaagcaaacaaaaaaattattgcaaaaaaagcatcgaaaacagtcctatttgattgagggctggcacctttttgaagaagcccaaaaatcaggacaagtttttcgccacatctttgttttagaggaaatggtggagcgtctagcaggtgagcaagaactcgttattgttagcccacaagtgctcaaggagttgactgactctcctagtccacaaggcattgttgctgaggtggagatacctaagttagcctttccatcagattacaaagggaaatatttggttttagaggacgtccaagacccaggaaatcttgggaccatcattcgtacagcagacgctgcacggtttgatggggtctttctttctgaaaaatcagcagatatttacaaccaaaaaaccctacgttccatgcaaggtagccattttcatttaccaatttggcgaacagatgtctatcagctttgtcgagagctccaagagtatgaaactcccatcctagcaacaactctgtcaaagaaatctgttgattataaaagcctcacacatcatgaaaggttagctttggtgttgggaaatgaaggccagggcattagtgctgaaatggcagccctagcagaccaactggttcatattacaatgcctggtcaggcggaaagtttgaatgttgccgtagcagcaggaatcctcattttcagcttgatt

SEQ ID NO: 4782 - protein, 245 aa, Streptococcus pyogenes
MVITSKANQLIKQTKKLLQKKHRKQSYLIEGWHLFEEAQKSGQVFRHIFVLEEMVERLAGEQELVIVSPQVLKELTDSPSPQGIVAEVEIPKLAFPSDYKGKYLVLEDVQDPGNLGTIIRTADAARFDGVFLSEKSADIYNQKTLRSMQGSHFHLPIWRTDVYQLCRELQEYETPILATTLSKKSVDYKSLTHHERLALVLGNEGQGISAEMAALADQLVHITMPGQAESLNVAVAAGILIFSLI

SEQ ID NO: 4783 - DNA, 345 bp, Streptococcus agalactiae
atgagattatttgattttgaagttataatagtagtcataaacctattatatcagaaaagaggtcaagttatgaaaaaagttcatttaattgtctcagggcgcgttcaaggagtcggatttcgctatgcaacttattccttagctttagaaataggtgatatttacggtcgcgtttggaataacgatgatggaactgttgaaattttagcacaatctacagattcaaataaaatgacacaatttattcagaaaattcgaaaaggaccttcaaaatggtctaaagtaacttatgttgatattaaactagataacttcgatgattttaatgactttaaaatgagtaat

SEQ ID NO: 4784 - protein, 115 aa, Streptococcus agalactiae
MRLFDFEVIIVVINLLYQKRGQVMKKVHLIVSGRVQGVGFRYATYSLALEIGDIYGRVWNNDDGTVEILAQSTDSNKMTQFIQKIRKGPSKWSKVTYVDIKLDNFDDFNDFKMSN

SEQ ID NO: 4785 - DNA, 309 bp, Streptococcus pyogenes
atgtgctataataaaagcaaggaggcccttcttatgcaaaaagtacgtttaattgtttctggacgtgtacaaggtgttggttttcgatacgctacccatactttagctctagatataggagatatttatggtcgtgtctggaataacaacgatgggaccgttgaaattctggcccaatcaaaagattcagataaaatagccacatttattcaagaagttcgtaaaggaccatccaaatgggcaaaagtcacttatgtggatgtcaccatggctaattttgaagactttcaggactttcaaataggcaag

SEQ ID NO: 4786 - protein, 103 aa, Streptococcus pyogenes
MCYNKSKEALLMQKVRLIVSGRVQGVGFRYATHTLALDIGDIYGRVWNNNDGTVEILAQSKDSDKIATFIQEVRKGPSKWAKVTYVDVTMANFEDFQDFQIGK

SEQ ID NO: 4787 - DNA, 930 bp, Streptococcus agalactiae
ttgaaaaaaacattgaaacgtatcttattctctagcttatctttgtctatgttattattattgacaggatgtgttagcgttgataaggctggaaaaccctatggagttatctggaatactcttggagtgcctatggccaacctcattacttatttcgctcaacaccaagggcttggttttggtgtcgctatcattattgtaaccgtcatcgtacgtgtcgttatcttaccacttggactttatcagtcttggaaagctagctatcaagctgaaaaaatggcatactttaagcctttatttgaacctattaatgaacgactacgcaatgctaaaacacaagaagaaaaattagcagctcagacagaattaatgacagctcaacgtgagaatggccttagcatgtttggcggtattggctgcttgccattactcattcagatgccatttttctcagctattttctttgctgcacgctatactcctggagtctctagtgcaaccttcttgggacttaacttaggtcaaaagagtctgacacttactgtcattatcgccattctttattttgtacaatcttggttgtcaatgcaaggtgttccagatgaacaacgtcagcaaatgaaaacaatgatgtatctgatgccaataatgatggtattcatgtctattagtttacctgctagtgttgcgctttattggtttattggtggtattttcagtattatccagcagctagttacgacttatgtacttaagcctaaactacgccgaaaagtagaagaagaatatactaaaaatcctcctaaagcctacaaagctaataacgcacgaaaagatgttacaaattcaactaaagccactgaatctaatcaagcaattattacatctaaaaaaacaaatcgtaacgccggaaaacaaaaaagacgggga

SEQ ID NO: 4788 - protein, 310 aa, Streptococcus agalactiae
MKKTLKRILFSSLSLSMLLLLTGCVSVDKAGKPYGVIWNTLGVPMANLITYFAQHQGLGFGVAIIIVTVIVRVVILPLGLYQSWKASYQAEKMAYFKPLFEPINERLRNAKTQEEKLAAQTELMTAQRENGLSMFGGIGCLPLLIQMPFFSAIFFAARYTPGVSSATFLGLNLGQKSLTLTVIIAILYFVQSWLSMQGVPDEQRQQMKTMMYLMPIMMVFMSISLPASVALYWFIGGIFSIIQQLVTTYVLKPKLRRKVEEEYTKNPPKAYKANNARKDVTNSTKATESNQAIITSKKTNRNAGKQKRRG

SEQ ID NO: 4789 - DNA, 921 bp, Streptococcus pyogenes
ttgaaactaacattaaatcgcatcctcttttcaggactagcactgtcaattctactcaccttgacaggctgtgtgggaagagacgctcacggaaatcccaaaggtatgatttgggaatttcttggaaaacccatgtcatactttatcgattactttgcaaacaatgctggactaggttatggactggctatcatcatcgtaaccattattgttagaacacttatcttaccactaggtctatatcaatcttggaaagcaagttatcaatctgagaaaatggccttcttgaaacctgtttttgaaccaatcaacaaacgtatcaaacaggcaaatagtcaggaagaaaaaatggctgcccaaacagaattaatggctgctcagcgtgctcatgggattaaccctcttggaggtattggatgtctacctcttctcatccagatgccattcttttctgccatgtattttgccgctcaatacactaaaggagtatcaacaagcacctttatgggtattgatcttggtagccgtagtttagtgttaacagcaattatcgctgctctttacttcttccaatcatggttatcaatgatggccgtttcagaagaacaacgtgagcaaatgaagacgatgatgtacaccatgcctatcatgatgatcttcatgtccttctcactccctgctggtgttggtctttactggctagttggtggtttctttagtattattcaacagttaatcacaacctacctcttaaaacctcgattgcataagcaaattaaagaagaatacgctaaaaacccgcctaaagcataccaatcaacttcttctcgtaaggacgttacgccttcacaaaacatggaacaggctaacttgcctaaaaaaataaaatccaatcgtaatgctggaaaacagcgaaagcgt

SEQ ID NO: 4790 - protein, 307 aa, Streptococcus pyogenes
LKLTLNRILFSGLALSILLTLTGCVGRDAHGNPKGMIWEFLGKPMSYFIDYFANNAGLGYGLAIIIVTIIVRTLILPLGLYQSWKASYQSEKMAFLKPVFEPINKRIKQANSQEEKMAAQTELMAAQRAHGINPLGGIGCLPLLIQMPFFSAMYFAAQYTKGVSTSTFMGIDLGSRSLVLTAIIAALYFFQSWLSMMAVSEEQREQMKTMMYTMPIMMIFMSFSLPAGVGLYWLVGGFFSIIQQLITTYLLKPRLHKQIKEEYAKNPPKAYQSTSSRKDVTPSQNMEQANLPKKIKSNRNAGKQRKR

SEQ ID NO: 4791 - DNA, 663 bp, Streptococcus agalactiae
gtgataaactgggatgccatttttaatttggaactagctgttaaggcttttccaagtgttattcaggggttaccatataccattggattatccttggttggctttattttaggagctatcgtaggattctttgtagctctaatgaagatgtctcatttccgcttactgaggtatctagctaatattcatatttccttaatgcgtgggattcctttaatggttctactctttcttatctactttggtttgccttttatagggatacagttagatgctgtgactgcttctatcgtaggttttaccatgatgtctagtgcatatatatcagaaattatcagagcagctcttttagctgttgatcatggtcagtgggaagctgctagagctttagggttaaaaacaccgacgatttatagaggcattattattccgcaagcaacaagaattgcactcccttctttaagtaatgttttgctagatatggtcaagagttcctcattgactgcgatgattacggtacctgatatctttaataatgctaaaatagttgggggaacctactccgactatatgaccgcctatatcttagtagcccttatctattgggtaatttgtacgctttatgcaattattcaagactggtgggaaaaacgattactttat

SEQ ID NO: 4792 - protein, 221 aa, Streptococcus agalactiae
MINWDAIFNLELAVKAFPSVIQGLPYTIGLSLVGFILGAIVGFFVALMKMSHFRLLRYLANIHISLMRGIPLMVLLFLIYFGLPFIGIQLDAVTASIVGFTMMSSAYISEIIRAALLAVDHGQWEAARALGLKTPTIYRGIIIPQATRIALPSLSNVLLDMVKSSSLTAMITVPDIFNNAKIVGGTYSDYMTAYILVALIYWVICTLYAIIQDWWEKRLLY

SEQ ID NO: 4793 - DNA, 648 bp, Streptococcus pyogenes
atgattaatatcccattaatgaaagatagtttaggatttgtgttatcgggattaccttatacccttggtatttcgttgctcagtttttttacgggtctgtttttaggtttaggcctagcccttctgggaaggtcacgtcagccgttgattcattatcttgttagagcgtacatctctattatgcgaggtgtgccgatgatcgtggtgctctttgttctttatttcgggttgccttattatggtttagaattgccagctttactttgcgcttatcttggtttttctatggttagcgctgcctatatttctgaagtttttcgctcttctatagaagctattgacaagggacaatgggaagcagctaaggctttagggttgccatatgctcttatggttaagaaaattattcttcctcaagcctttcgaattgcagttcctcctttaggaaatgtcattattgatatggttaaaagttcgtcgctagctgccatgattaccgtaccagatatttttcaaaatgccaaaattattggcggtagagagtgggattacatgtccatgtatattttagtagcctttatctattggcttattgcttttttgttagaacgttaccaagaattcttagaaaataagctagcacttgtt

SEQ ID NO: 4794 - protein, 216 aa, Streptococcus pyogenes
MINIPLMKDSLGFVLSGLPYTLGISLLSFFTGLFLGLGLALLGRSRQPLIHYLVRAYISIMRGVPMIVVLFVLYFGLPYYGLELPALLCAYLGFSMVSAAYISEVFRSSIEAIDKGQWEAAKALGLPYALMVKKIILPQAFRIAVPPLGNVIIDMVKSSSLAAMITVPDIFQNAKIIGGREWDYMSMYILVAFIYWLIAFLLERYQEFLENKLALV

SEQ ID NO: 4795 - DNA, 855 bp, Streptococcus agalactiae
atgaaaaagacaattttacttggtttagtcggtttatctgcaatgacattagcagcttgctcaaatggtcaatctagcaaagaaacaacatgggacaatattaaaaaagatggtgtccttaaggttgctacccctgcaacgctttatccaacaagttattatgatgaccataaaaaattgactggttatgagattgatatgatgaaagcgattgctaaaaaacttaagataaaagttaagtttgttgaagttggagttgctgaatcatttacttctgtagatagtggtaaggtggatgttgctgtcaataactttgacacaactcccgagcgtttgaaaaaatacaatttctctcaaccttataaatattctgttggaggtatgattgtacgtgcagatggttcttcaaagattacagcaaaagatttatctgactggaaaggtaaaaaagctggtggtggcgctggaacgcaatatatgaaaattgcaaaacagcaaggtgctgaacctgttatttatgacaatgtaactaatgacgtttaccttcgagatgtatcaactggacgtacagatttcattccgaatgattactacacacaagtcattgctgtaaaatatgtaacaaaacaatatccagatatcaaagtaaaaatgggtgatgtgaagtataatccgactgagcaaggtattgtgatgagtaaaaaagataagagcctcaaaacaaaaattgatgcagctatcaaggatatgaagaaagacggttctttgaaaaaaatctctgaaaaatattatgctggtcaagatctcacaaaagaacctgctggaacggataaaattccagtaattaaagttaaa

SEQ ID NO: 4796 - protein, 285 aa, Streptococcus agalactiae
MKKTILLGLVGLSAMTLAACSNGQSSKETTWDNIKKDGVLKVATPATLYPTSYYDDHKKLTGYEIDMMKAIAKKLKIKVKFVEVGVAESFTSVDSGKVDVAVNNFDTTPERLKKYNFSQPYKYSVGGMIVRADGSSKITAKDLSDWKGKKAGGGAGTQYMKIAKQQGAEPVIYDNVTNDVYLRDVSTGRTDFIPNDYYTQVIAVKYVTKQYPDIKVKMGDVKYNPTEQGIVMSKKDKSLKTKIDAAIKDMKKDGSLKKISEKYYAGQDLTKEPAGTDKIPVIKVK

SEQ ID NO: 4797 - DNA, 1458 bp, Streptococcus agalactiae
atggtttttaaagatgctaccgctatggtacaagcgataaaacagcataagatttcgtcgcaagaattagtagagcaagcaatctacaagatcgaggaacagaatgtaagcgttaatgctgttgtcagcaagcaatataatgaggcgcgtcaagcagccaaatacgcaaatgaatcaaatgctccttttgcaggagttcctattcttctgaaagatttgggacagaatcaaaaaggacaactctcaacctcaggttcacaattatttaaacactatcatgctaaacaaacggactatttagtgcagtcctttgaaaaattagggtttattattttaggaagaacaaatacccctgaatttggttttaagaatattagtgatggtcaacttcacgggaatgttaatcttccatttgaccattcaagaaatgctggaggctctagtggtggtgcagccgcagctgttagttcaggaatggttccaattgcaggagctagtgatggaggagggtcaatcagaattccagcaagttttaatggtttgattggtttaaaaccgagtcgaggacgtatacctgttggaccttcatcctatagaggttggcaaggggcttctagtcattttgctttaacaaagtcagttagagatacaaaacgactattatattatttacaatcatatcaagtagaaagcccatttcccctgaaaaaactcagcaaagagagtcttttcgagtttagcgttagtaaacccctaaaaatagcagtattgatggattctcccttaaaaacaaaggtatcaagtgaggctaaagcagctattaaagaagccgcagattttctgtctcaaaaagggaatcatttagaattagtagaacaacctttagatggtattcattctatgaaaacttattgtatgatgaatagcgttgaaacagcagcaatgtttgatgacatcgaaaagagtttagggcgttcaatggaatttagcgatatggaattaatgacctgggctatgtatcagagtggacaaagggtattggctaaagattacagtaaactcttagattcatgggatcaatttgcagctaccatggcgaggtttcatgaaaattatgatttaattttaacagcagcaactaatcaaccagctccttttcatggacaatttgatttagacgagacactccagaaacaattgaggcatatgggagaattctcagtaagtgaacaacaggatttaatttggaaaatgtttgaagactcaatggcctggacaccttttacacatcagccaaacttgacagggcaaccttctttagccataccaactcatctaactaaagaggggctacctttaggtgtacaattgacagcggctaaagggagagaagatttattgcttgctgttgcagagttgtttgaaaaagagaagcaattcaaagggcctgtttaccat

SEQ ID NO: 4798 - protein, 486 aa, Streptococcus agalactiae
MVFKDATAMVQAIKQHKISSQELVEQAIYKIEEQNVSVNAVVSKQYNEARQAAKYANESNAPFAGVPILLKDLGQNQKGQLSTSGSQLFKHYHAKQTDYLVQSFEKLGFIILGRTNTPEFGFKNISDGQLHGNVNLPFDHSRNAGGSSGGAAAAVSSGMVPIAGASDGGGSIRIPASFNGLIGLKPSRGRIPVGPSSYRGWQGASSHFALTKSVRDTKRLLYYLQSYQVESPFPLKKLSKESLFEFSVSKPLKIAVLMDSPLKTKVSSEAKAAIKEAADFLSQKGNHLELVEQPLDGIHSMKTYCMMNSVETAAMFDDIEKSLGRSMEFSDMELMTWAMYQSGQRVLAKDYSKLLDSWDQFAATMARFHENYDLILTAATNQPAPFHGQFDLDETLQKQLRHMGEFSVSEQQDLIWKMFEDSMAWTPFTHQPNLTGQPSLAIPTHLTKEGLPLGVQLTAAKGREDLLLAVAELFEKEKQFKGPVYH

SEQ ID NO: 4799 - DNA, 480 bp, Streptococcus agalactiae
atggcagaaaaaacttacccaatgacacaagtggaaaaagatcaacttgaaaaagaacttgaagagttaaaattagttcgtagaccagaagttgtagagcgtatcaagattgctcgttcttatggtgacttatcagaaaatagcgaatatgatgcagcaaaagacgaacaagcatttgttgagggtcaaattcaaattttagaaacaaaaattcgttatgctgaaattattgatagtgatgcagttgctaaagatgaggttgcaattggtaaaactgtccttgtccaagaagttggtacaaatgataaagatacttaccatatcgttggtgctgctggagctgacattttttcaggaaaaatttcgaatgaaagcccaattgctcatgctttaattggtaaaaaaacaggagacttagctacaattgaatcacctgctggtagctatcaagttgaaatcattagtgttgaaaaaacaaat

SEQ ID NO: 4800 - protein, 160 aa, Streptococcus agalactiae
MAEKTYPMTQVEKDQLEKELEELKLVRRPEVVERIKIARSYGDLSENSEYDAAKDEQAFVEGQIQILETKIRYAEIIDSDAVAKDEVAIGKTVLVQEVGTNDKDTYHIVGAAGADIFSGKISNESPIAHALIGKKTGDLATIESPAGSYQVEIISVEKTN

SEQ ID NO: 4801 - DNA, 528 bp, Streptococcus pyogenes
atgtttgtgtttctgattcgttcaaaaaagaaaagagagaaaacaattatggcagaaaaaacgtatccgatgaccctaacggaaaaagaacaacttgaaaaagaacttgaagaattaaaacttgtgcgtcgtccagaaatagtggagcgtattaaaattgcacgttcgtatggagatctttcagagaactctgaatacgatgccgcaaaagatgagcaagcttttgttgaaggtcaaatttcaacgcttgaaactaagattcgctatgctgaaatcattgacagtgatgctgttgcaaaagatgaagtcgctatcggaaaaacagttatcgttcaagaagttggaacaacagataaagatacttatcatattgtaggtgctgctggagcagatatcttctccggaaaaatttcaaatgaaagcccgattgctcaagctttgattggtaaaaaaacaggtgacaaggttagaattgaatcaccagcagctacttatgatgttgaaatcatcagcgttgaaaagacaaat

SEQ ID NO: 4802 - protein, 176 aa, Streptococcus pyogenes
MFVFLIRSKKKREKTIMAEKTYPMTLTEKEQLEKELEELKLVRRPEIVERIKIARSYGDLSENSEYDAAKDEQAFVEGQISTLETKIRYAEIIDSDAVAKDEVAIGKTVIVQEVGTTDKDTYHIVGAAGADIFSGKISNESPIAQALIGKKTGDKVRIESPAATYDVEIISVEKTN

SEQ ID NO: 4803 - DNA, 1800 bp, Streptococcus agalactiae
ttgaccgaatttaatgacgatcagcattctaaccatgatcagaaaagttttaaagaacaaattctggcagagttagaagaagctaaccgtttgagaaagttgcgtgaagaagaactctatcaaaaagagcaagaagccaaagaagctgctcgcagaacagcacaattgatggcagattatgaagcgcaacgtttgaaagacgaacgagaagctagagcaaaggcgctagagactaagcaacgcttagaagagcaagagaaggctcggattgaggcgaaacttctggcagaagctgctcgagaagaagaaagacgtcaggcggaacaagcattagcttcccaagaagaacaagttatcaatcaagggatggaaccttcaagagagcttgatagcggctccaaatctagtgaatttaggacaactgaaaatgtacctgacatagatttaaaagcagataagactgatgttgcaactgctgtgcctaatcaagaaacggaagaaatctttcttgtgagagcaacagatattcctacagaaggtgaaaatgtaaaacttggtgagatatcagagttagagcccgtagcaaaggaacctatccgagtagaggatttgtcaaaagaagaagagggtatagctttgtcagccaagaacaaacataacaagcgtgaaagacgtcagaaagcagataatgtggcaaaacgaattgcacgtattctgatatcaattatcatacttgtattgctcttgacagcatttgtaggttatcgttttgtagatagtgctattaaacctgttgattccaattcaaataaatttgtacaagttgaaattccgataggatctgggaataaattaattggtcaaattttagaaaaagcaggagtcattaagagcgccacagtctttaattactattccaagttcaaaaactatagtaattttcaaagtggatactacaatcttaaaaaaagtatgactttagatcagattgctgctgaattggaaaaaggcggaactgcagaaccgacaaaaccagctttaggtaagatattaattaccgagggttacactattaaacagattgctaaagctattgagtctaataaaattgatacaaagactacaagtacaccttataaagctgatgatttcttgaaacttgttcaagatgaaacgtttattaaaaaaatggtagctaaatatccaaatttactaggaagtttacctgataaatcaaaagctatttatcaattggaaggatatttattcccagctacctacaactattataaagatacaaccttagaaggacttgttgaagatatgatttcaacaatgaatactaagatggcaccttactataacactattaaagcgaagaatatgtctgtaaatgatgttttgacattatcatctcttgttgaaaaagagggatcaacagacgaagatcgccgtaaaatagcaagtgtcttttataaccgattatcagccggtcaagctcttcaaagtaacattgcaattttgtatgctatggggaaattaggtgataaaacaagtttagctgaagatgctcaaattaatacttcaattaaatcaccatacaacatctatactaatactggtttgatgcctggaccagttgatagtccaagtatctcagcaattgaagcgactataaaacctgcttcaacagattacctttattttgtcgctgatgtgaagaccggaaatgtatactacgctaaagattttgaaacacacaaggctaacgttgaaaaatatatcaatagtcaaattaac

SEQ ID NO: 4804 - protein, 600 aa, Streptococcus agalactiae
MTEFNDDQHSNHDQKSFKEQILAELEEANRLRKLREEELYQKEQEAKEAARRTAQLMADYEAQRLKDEREARAKALETKQRLEEQEKARIEAKLLAEAAREEERRQAEQALASQEEQVINQGMEPSRELDSGSKSSEFRTTENVPDIDLKADKTDVATAVPNQETEEIFLVRATDIPTEGENVKLGEISELEPVAKEPIRVEDLSKEEEGIALSAKNKHNKRERRQKADNVAKRIARILISIIILVLLLTAFVGYRFVDSAIKPVDSNSNKFVQVEIPIGSGNKLIGQILEKAGVIKSATVFNYYSKFKNYSNFQSGYYNLKKSMTLDQIAAELEKGGTAEPTKPALGKILITEGYTIKQIAKAIESNKIDTKTTSTPYKADDFLKLVQDETFIKKMVAKYPNLLGSLPDKSKAIYQLEGYLFPATYNYYKDTTLEGLVEDMISTMNTKMAPYYNTIKAKNMSVNDVLTLSSLVEKEGSTDEDRRKIASVFYNRLSAGQALQSNIAILYAMGKLGDKTSLAEDAQINTSIKSPYNIYTNTGLMPGPVDSPSISAIEATIKPASTDYLYFVADVKTGNVYYAKDFETHKANVEKYINSQIN

SEQ ID NO: 4805 - DNA, 1572 bp, Streptococcus pyogenes
ttggctttgaccgattttaaggataaagaccaacaagatcagcagcgaagctttaaagagcagattcttgctgagttggaaaaagcaaatcaaatcagaaaagaaaaagaggaagaactttttcaaaaagagttggaagctaaagaagcagctaggagaacggcccagctatatgctgaatataaaagacaagatgcttttcaaaaagagtctatagcacataacaataagacagctaaacactttcaagctataaaaggtgcggtaatgacttcagaagcgcttaaaccgactttactttctgaaaaagaaaactcatctttaaaaacgacaaataagagagtcgtgcaggcaaatgagcttcaagagactgcctctaaagaatctcaagtaccgttaactattgagaaaggtcattcagtgagacgaaaattaagcaaacgccaacagactgagcgagctgctaaaaagatttcaaccgttttgattagttctattattataacccttttggctgttactctagcaggagcaggctatgtttatagtgctttaaatcctgttgataaaaatagtgatgcctttgttcaagttgagattccatctgggtcaggcaataaattgattggtcaaattcttcaaaaaaaaggtttaatcaagaatagcactgtttttagtttttatacaaaatttaaaaactttacaaattttcagagcgggtattataatctgcaaaaaagtatgagtctagaagaaattgctagtgctttacaagaaggtggtacagcagaacctaccaagccatctcttgggaagatcttgattccagaaggatacacgattaaacaaatagctaaagctgttgagcataatagcaagggaaagaccaaaaaagctaaaacaccttttaacgagaaggattttttggatttagtcacggatgaggcttttattcaagatatggtaaaaagatatccaaaattattagcaactatcccaactaaagaaaaagctatttaccgtttggaaggttaccttttcccagcaacctataactattacaaagaaactaccatgagagaacttgtagaggacatgctggcagctatggatgctactttggtaccctattatgataaaattgctgctagtggtaagacagtcaacgaggtattgaccttggcctctttggttgaaaaagaaggttcaacagacgatgacagacgtcaaattgcaagtgtcttttataaccgccttaatagcggaatggcactacaatctaatatagctattttgtatgcgatggggaaacttggtgagaaaacaaccttggctgaggatgctactattgacaccaccattaattctccttataatatttataccaatacaggtctgatgcctggtccagttgctagctcgggggtttctgcaattgaagcaaccctaaatccagcctcaacggattatttatactttgtggccaatgtccatactggtgaagtttactatgcaaaaacatttgaagaacactctgcaaatgttgaaaaatatgtgaatagtcaaattcag

SEQ ID NO: 4806 - protein, 524 aa, Streptococcus pyogenes
LALTDFKDKDQQDQQRSFKEQILAELEKANQIRKEKEEELFQKELEAKEAARRTAQLYAEYKRQDAFQKESIAHNNKTAKHFQAIKGAVMTSEALKPTLLSEKENSSLKTTNKRVVQANELQETASKESQVPLTIEKGHSVRRKLSKRQQTERAAKKISTVLISSIIITLLAVTLAGAGYVYSALNPVDKNSDAFVQVEIPSGSGNKLIGQILQKKGLIKNSTVFSFYTKFKNFTNFQSGYYNLQKSMSLEEIASALQEGGTAEPTKPSLGKILIPEGYTIKQIAKAVEHNSKGKTKKAKTPFNEKDFLDLVTDEAFIQDMVKRYPKLLATIPTKEKAIYRLEGYLFPATYNYYKETTMRELVEDMLAAMDATLVPYYDKIAASGKTVNEVLTLASLVEKEGSTDDDRRQIASVFYNRLNSGMALQSNIAILYAMGKLGEKTTLAEDATIDTTINSPYNIYTNTGLMPGPVASSGVSAIEATLNPASTDYLYFVANVHTGEVYYAKTFEEHSANVEKYVNSQIQ

SEQ ID NO: 4807 - DNA, 585 bp, Streptococcus agalactiae
ttgatggtaagggctgagagaagtttctcagtcctctatctgactttatcaagagaatttcataaagaaattaaggagatgagtatgattattagaaatggttgcctagaggatttacagcaagtcattagtattgaacaaataaatttttcagaagcagaggctgcgagtaaaaaagcaatgcaagaacgtttaacgataatgactgatacttttttagttgcagagattaatggtcgtttagcaggttacattgaaggaccggttattaaaggtcggtacttaacggacgatttattccataaagtttctgaattccctgtaagggtaggtggtttcataggaattactagtctatcaatacatcctgattttaaaggtcaggggattggtacagcattattagcagcgatgaaagacctggttgtttctcaagaacgagatggtataagtttaacttgccatgatgatttaatttccttctatgaaatgaatggatttaaagatgagggagaatctgactccaaacatggtggttcgctttggtataatatgatttggaataatccaacacgatcaatttgt

SEQ ID NO: 4808 - protein, 195 aa, Streptococcus agalactiae
MMVRAERSFSVLYLTLSREFHKEIKEMSMIIRNGCLEDLQQVISIEQINFSEAEAASKKAMQERLTIMTDTFLVAEINGRLAGYIEGPVIKGRYLTDDLFHKVSEFPVRVGGFIGITSLSIHPDFKGQGIGTALLAAMKDLVVSQERDGISLTCHDDLISFYEMNGFKDEGESDSKHGGSLWYNMIWNNPTRSIC

SEQ ID NO: 4809 - DNA, 480 bp, Streptococcus pyogenes
atgttgattagacaggttcaaggatccgatttggaagttattgctaccattgaaagtgacaatttttcaccacaagaagcaacgacaagagcagttcttgaagagcacatacggctgataccagatacttttttagtggcacttatcgatcaggaaattgttggctatatcgaaggtccagttgtcactactcctattttggaggattctttgttccacggggtgactaaaaatcctaaaactggaggctatattgctattactagtttgtccatagctaaacattttcagcaacaaggggttgggacagctttgttggcggcactaaaagatttagtagtagcgcagcaaagaacaggtcttattttgacttgtcatgattacttgatttcctattatgaaatgaatgggtttattaaccaaggaatttcagagtctcaacatggtggaaccctttggtaccaaatgatttggaaactt

SEQ ID NO: 4810 - protein, 160 aa, Streptococcus pyogenes
MLIRQVQGSDLEVIATIESDNFSPQEATTRAVLEEHIRLIPDTFLVALIDQEIVGYIEGPVVTTPILEDSLFHGVTKNPKTGGYIAITSLSIAKHFQQQGVGTALLAALKDLVVAQQRTGLILTCHDYLISYYEMNGFINQGISESQHGGTLWYQMIWKL

SEQ ID NO: 4811 - DNA, 1329 bp, Streptococcus agalactiae
atgtcaaaaacttatcattttattggtattaaaggatccggaatgagtgccctagcactgatgcttcatcaaatgggacataacgtccaaggaagtgacgttgacaaatattattttacccaacgtggtttagagcaagcaggtgtaactatattacctttctcaccgaataatatcagtgaggatttagagattattgcaggaaatgcttttcgtccagataacaatgaagagttggcttatgttattgaaaagggctatcaatttaaacgatatcatgaatttctcggagattttatgcgtcagttcactagtctaggtgtagctggggcacatggaaaaacctcaacgacaggtttattagctcatgttttaaaaaatattacagacacttctttcctaattggagatggtacaggacgtggttctgctaatgctaattactttgtgtttgaagctgatgaatacgaacgtcattttatgccgtaccatccagaatactcaattattaccaatattgattttgaccatcctgattattttacaggcttagaggacgtattcaatgcctttaatgactatgctaagcaagttcaaaaaggtttattcatttatggagaagatccaaaacttcatgaaatcacttctgaggcaccaatatattattatggttttgaagattcaaatgattttatagcaaaagacatcactcgaactgttaatggttctgactttaaggttttctataaccaagaagaaattggtcagtttcatgtaccagcatacggtaaacataatatcttaaatgcaactgctgttattgctaacctttacataatgggaattgatatggcattagtagctgagcatttgaagacgttttcaggggtaaagcgtcgttttactgagaagattattgacgatactgtcattattgatgactttgctcaccatcctactgagattattgcgacattagatgctgctcgacaaaaatacccgtcaaaagaaattgtagctattttccaaccgcatacgttcactcgtacgatagctcttttagacgaatttgcccatgccttgagtcaagcggatagcgtttatctcgctcaaatatatggttctgctagagaagtagataatggtgaggtgaaggtagaagatttagctgctaagattgtcaaacactcagatttagtgacagtcgaaaatgtctcgcctttactcaatcatgataatgctgtctatgtctttatgggtgctggagacattcaattgtatgagcgctcttttgaagaattattagctaacctaactaaaaatacacaa

SEQ ID NO: 4812 - protein, 443 aa, Streptococcus agalactiae
MSKTYHFIGIKGSGMSALALMLHQMGHNVQGSDVDKYYFTQRGLEQAGVTILPFSPNNISEDLEIIAGNAFRPDNNEELAYVIEKGYQFKRYHEFLGDFMRQFTSLGVAGAHGKTSTTGLLAHVLKNITDTSFLIGDGTGRGSANANYFVFEADEYERHFMPYHPEYSIITNIDFDHPDYFTGLEDVFNAFNDYAKQVQKGLFIYGEDPKLHEITSEAPIYYYGFEDSNDFIAKDITRTVNGSDFKVFYNQEEIGQFHVPAYGKHNILNATAVIANLYIMGIDMALVAEHLKTFSGVKRRFTEKIIDDTVIIDDFAHHPTEIIATLDAARQKYPSKEIVAIFQPHTFTRTIALLDEFAHALSQADSVYLAQIYGSAREVDNGEVKVEDLAAKIVKHSDLVTVENVSPLLNHDNAVYVFMGAGDIQLYERSFEELLANLTKNTQ

SEQ ID NO: 4813 - DNA, 1326 bp, Streptococcus pyogenes
atgtcaaaaacgtatcattttatcggaattaaagggtcaggaatgagtgccttggcccttatgttgcatcaaatggggcataaggtgcaaggtagtgatgttgaaaaatactatttcactcaaagaggattggaacaagcgggcatcactatcttaccttttagcgaggacaacattacgccagatatggaacttatcgttgggaatgcctttcgtgaaaacaacaaagaagtggcctatgctttgagacaccagattcctttcaaacgttatcatgactttttaggtgattttatgaaatcatttatcagttttgcagtagcaggtgctcatggtaaaacttctacaacgggtttattgtcacatgtcttgaaaaatatcacagacacatcttatttaattggtgatggtactgggcgtggatctgctaatgcacagtattttgtttttgaatcagacgaatacgaacgccattttatgccttatcacccagaatactctatcattactaatattgattttgaccatcctgattatttcacaggaattgctgatgtgcgaaacgctttcaacgattatgctaagcaggtcaagaaagctttgtttgtttatggtgaagatgacgaactaaaaaagatcgaagcacctgcacctatttactattatggttttgaagagggcaatgattttatcgcttacgacattacgcgtactacgaacggatcggactttaaggtaaaacaccaaggagaggtcattggtcagtttcacgtacctgcttatggaaaacataacattttaaacgctacagcagtaattgcaaacttgtttgtagccggcattgatatggctctagtggcagaccatcttaaaactttttcaggtgtgaaacgtcgttttacagagaaaattatcaatgacactattattattgatgactttgctcatcatccaaccgaaattgtggcaacaattgatgcggctagacaaaaatacccaagtaaagaaattgtagcaatattccagccacatacttttactcgcactattgccttattagaggattttgcttgtgctttaaatgaagctgacagtgtttatttagcccagatttatggttctgcacgtgaagtagataaaggtgaagttaaggttgaagatttggctgctaagattatcaaaccatcacaagtagtaacggtggaaaatgtctctcctcttcttgatcacgataatgctgtttatgtttttatgggagctggagatattcagctatatgaacattcttttgaggaattacttgcaaatttaactaaaaataaccaa

SEQ ID NO: 4814 - protein, 442 aa, Streptococcus pyogenes
MSKTYHFIGIKGSGMSALALMLHQMGHKVQGSDVEKYYFTQRGLEQAGITILPFSEDNITPDMELIVGNAFRENNKEVAYALRHQIPFKRYHDFLGDFMKSFISFAVAGAHGKTSTTGLLSHVLKNITDTSYLIGDGTGRGSANAQYFVFESDEYERHFMPYHPEYSIITNIDFDHPDYFTGIADVRNAFNDYAKQVKKALFVYGEDDELKKIEAPAPIYYYGFEEGNDFIAYDITRTTNGSDFKVKHQGEVIGQFHVPAYGKHNILNATAVIANLFVAGIDMALVADHLKTFSGVKRRFTEKIINDTIIIDDFAHHPTEIVATIDAARQKYPSKEIVAIFQPHTFTRTIALLEDFACALNEADSVYLAQIYGSAREVDKGEVKVEDLAAKIIKPSQVVTVENVSPLLDHDNAVYVFMGAGDIQLYEHSFEELLANLTKNNQ

SEQ ID NO: 4815 - DNA, 615 bp, Streptococcus agalactiae
gtgaatagaggctctagacgatttccgttgatagcagatgatgaaccagtaatgtctccgcttgtaaagatgaatctttatgataatgaagatttaattaacaacattcgagacttttatcaagaaaaaacatatcaaagcatggtcaaaagcaattatgaacatgaagaaatatcacatcctaaggtaattgaaaatgatcctgtaccaccgcagagttttgtaaaaaaagcgacagagttgagcaaatctcgacaagaggcaaagaggtctgttcgggagaaacgacaagcttactatgcgaaacaggaatttaaggcgccatcaaaggaagcttttcagcaacaattgaaggcaacagtaccgaaaaaacaaactcagcgaaaggtgactgaactaagtcatctttctgatcgtttacagcaggaaagctatatattagcagaaattccaatcatatttcaagaacctgataatacaccgaacccaaaaacaaagaaaaataattttgattttttgaaacgcagtcaagtttacaataaacaagacaatcagtttcataaagaaagagccaaggctcaagaattaaatctgacacgttttaaagacattaat

SEQ ID NO: 4816 - protein, 205 aa, Streptococcus agalactiae
MNRGSRRFPLIADDEPVMSPLVKMNLYDNEDLINNIRDFYQEKTYQSMVKSNYEHEEISHPKVIENDPVPPQSFVKKATELSKSRQEAKRSVREKRQAYYAKQEFKAPSKEAFQQQLKATVPKKQTQRKVTELSHLSDRLQQESYILAEIPIIFQEPDNTPNPKTKKNNFDFLKRSQVYNKQDNQFHKERAKAQELNLTRFKDIN

SEQ ID NO: 4817 - DNA, 600 bp, Streptococcus pyogenes
atggtaaaaaatcagtttcctttagttgcagatggcattgctattagtgatccagcaaagcaaatggctctgtatgaaaatgaagatctcattaccaacatccgtggctattaccaggacaaggagtatgatgatattgctagaaatgaggagtttactgctaaagcaacttctcggcagaccccttctagtaagcgcttttgtagcaatgatgaaaaacaccattatgtcaaagaggcgcgtcaaaaagcaaagcaagatctcaaggaaaaaagacaggcttatcttgccaaagaaatggcctatgttcctaaacaggtttctaaaaagcaacagcctgcggattcttctccttctcaaaagcaagcaacaacagaaatgagtcgttttacaaaaaagcttcatcaagacaactatattttagctgagttgccaaaagaatataaagagccaaaaaatcttcctcaacaaggaactacaaaaaaaaataattacgattttttaaaatccagtcaaatttacaataataaagaaatgagacaacaacgagaaaaaacaattgcgcaagagcttaatcttagtaggtttgaggatcttcct

SEQ ID NO: 4818 - protein, 200 aa, Streptococcus pyogenes
MVKNQFPLVADGIAISDPAKQMALYENEDLITNIRGYYQDKEYDDIARNEEFTAKATSRQTPSSKRFCSNDEKHHYVKEARQKAKQDLKEKRQAYLAKEMAYVPKQVSKKQQPADSSPSQKQATTEMSRFTKKLHQDNYILAELPKEYKEPKNLPQQGTTKKNNYDFLKSSQIYNNKEMRQQREKTIAQELNLSRFEDLP

SEQ ID NO: 4819 - DNA, 96 bp, Streptococcus agalactiae
atgaatgaaaaataccaatctgataagctttacttagttgaaaactttgaaaaaacagaaaaattagtttataataggtctgttgtagaaaggaag

SEQ ID NO: 4820 - protein, 32 aa, Streptococcus agalactiae
MNEKYQSDKLYLVENFEKTEKLVYNRSVVERK

SEQ ID NO: 4821 - DNA, 3096 bp, Streptococcus agalactiae
atgagtagaatgattccaggacgtattcgaaatcaaggtatagaactctacgaacaaggtttggtgtccttgatttctcaagaaggtaatctattaaaagctaaagttggggattgtcagattgaatattcattagtaacagaagaaacaaaatgttcttgtgatttttttgcaagaaaaggctattgtcaacatttagctgctctggagcatttcttgaaaaacgatccagaaggtaaagcaatcttatctaaagttcaagttcaacaagaaagtcaacaagaaactaagaagaaaacctcttttggtagtgtttttttagatagtctaattattaatgaagatgatactataaaatatcaattatcggctcaaggagaacaaaatccttatgctaatgatatctggtggactttaaaaattagacgactgcctgatgatagaagttatgttattcgtgacatcaaagcctttttaaatactgttcgaaaagaagcttattatcagattggaaaacaatactttgaaactttgtctttaatacagtttgatgagaccagtcaagaattgatagaatttttatggaggctcattccaagtcattcaagcaaaattgatctagagtttattttaccaaatcaaggtcgtcaccttagtctcactcgtggtttttttgaagagggtgttactttgatgaatgctttagaaaatttttcatttgaaagtgattttcatcaatttaatcacctctactttaaggaattagaaggtgaggatcatctttatcaatttaaggttattgtccataggcaatcaattgaattagaaatcaaagagaaagacttaaaaccactatttgcgaattcttatttgttttatcgcgatactttctaccatcttaatttgaagcaagaaaagatggtaacggctattcgtagtcttcccattgagggagatttagcaaaacatatccattttgatttagatgatcaagataagttagcagctcatttactggattttaaggagattggactagtggatgctccacggagcttctctattcatgattttaaggtaaattttgagttcgatattaatagtcaaaatgaaattttattgcaaatggtatttgattatggtaatgatttaactgttcataatcgtcaagaactagaacagttaacatttgctagtcacttcaaacatgaagaaaaagtatttaaactcttagaaaaatatggctttgcaccccacttttcaaccagccatccagcatacagtgcacaagaattatacgatttttatacctatatgcttccacaatttaaaaaaatgggaacagtgagcttatccgcaaaattggaaagttatcgtctcatagaacgaccgcaaattgatattgaagctaagggaagcctgctagatatttcttttgatttctctgatttactggaaaacgatgttgatcaagctctggtagctttgtttgacaataatccttattttgtgaataaatcagggcaattagttatttttgatgaagaaactaagaaagtaagtgcaactttgcaagggttgagagctagacgagcaaagaatgggcatattgaattagataatattgcagcatttcaattatcagaactgtttgcaaatcaagataatgttagcttttcacaacatttttaccaattgattgaagatttgagacacccagaaaagtttaaaatacctggtctatctgtttcagcttccttgcgcgattatcagcttacaggtgtccgttggttaagtatgttagatcattatggctttgcagggattttagctgatgatatggggcttggaaaaacacttcaaacgatttcatttttaagtacaaaactaactagagattctcgtgtgcttattttatcaccatcaagtttaatttataattggcaagatgaattccacaaatttgcgccagacgtagatgtagcagttgcctatggttctaagattcgtagagatgaaattattgctgaacgtcatcaagtaatcattacaagttattcatcatttaggcaggattttgagacttattctgaaggaaattatgattatttaattttggatgaagcacaggttatgaaaaatgctcaaactaaaatagcccatagcttgagatcttttgaggtcaaaaactgttttgcattatcgggaacacctattgagaataaactgttagaaatttggtccattttccagatcattttacctggtttattacctggtaagaaagagtttttgaagttgaaccctaaacaagttgctcgttatatcaaaccatttgtgatgagacgtcgaaaagaagaagttctcccagaattaccggatttgattgaaatgaactatccaaatgaaatgacagacagtcaaaaagttatctatttggcgcaattacgccaaattcaagaaagtatccaacattctagtgacgctgacttaaatcgtcgtaaaattgaaattttatctggcatcacacgattacgtcaaatttgtgacactccacgtctttttatggattatgatggtgaaagcggtaagttagaaagcctacgtcaacttttaacacaaattaaggaaaatggacatcgtgctctgattttttctcagttcaggggtatgttagatatcgcagaacgtgagatggtagctatggggcttacaacttataaaattactggttctacaccagcaaatgaacgtcatgaaatgaccagagcatttaatgcaggatcaaaagatgctttcttgatttctttaaaagctggtggcgttggtctcaaccttacaggagctgataccgttgttctgattgacttgtggtggaatccagctgttgaaatgcaggcgattagtcgcgcacataggttggggcaaaaagagaatgtcgaggtttatcgcttgattactagaggcacaatcgaagaaaaaattctagaaatgcaagaaactaaaaaacatttggttacaacagttctggatggaaatgaaacccatgctagcatgagcgtagatgatattcgagagatacttggagtttctaaa

SEQ ID NO: 4822 - protein, 1032 aa, Streptococcus agalactiae
MSRMIPGRIRNQGIELYEQGLVSLISQEGNLLKAKVGDCQIEYSLVTEETKCSCDFFARKGYCQHLAALEHFLKNDPEGKAILSKVQVQQESQQETKKKTSFGSVFLDSLIINEDDTIKYQLSAQGEQNPYANDIWWTLKIRRLPDDRSYVIRDIKAFLNTVRKEAYYQIGKQYFETLSLIQFDETSQELIEFLWRLIPSHSSKIDLEFILPNQGRHLSLTRGFFEEGVTLMNALENFSFESDFHQFNHLYFKELEGEDHLYQFKVIVHRQSIELEIKEKDLKPLFANSYLFYRDTFYHLNLKQEKMVTAIRSLPIEGDLAKHIHFDLDDQDKLAAHLLDFKEIGLVDAPRSFSIHDFKVNFEFDINSQNEILLQMVFDYGNDLTVHNRQELEQLTFASHFKHEEKVFKLLEKYGFAPHFSTSHPAYSAQELYDFYTYMLPQFKKMGTVSLSAKLESYRLIERPQIDIEAKGSLLDISFDFSDLLENDVDQALVALFDNNPYFVNKSGQLVIFDEETKKVSATLQGLRARRAKNGHIELDNIAAFQLSELFANQDNVSFSQHFYQLIEDLRHPEKFKIPGLSVSASLRDYQLTGVRWLSMLDHYGFAGILADDMGLGKTLQTISFLSTKLTRDSRVLILSPSSLIYNWQDEFHKFAPDVDVAVAYGSKIRRDEIIAERHQVIITSYSSFRQDFETYSEGNYDYLILDEAQVMKNAQTKIAHSLRSFEVKNCFALSGTPIENKLLEIWSIFQIILPGLLPGKKEFLKLNPKQVARYIKPFVMRRRKEEVLPELPDLIEMNYPNEMTDSQKVIYLAQLRQIQESIQHSSDADLNRRKIEILSGITRLRQICDTPRLFMDYDGESGKLESLRQLLTQIKENGHRALIFSQFRGMLDIAEREMVAMGLTTYKITGSTPANERHEMTRAFNAGSKDAFLISLKAGGVGLNLTGADTVVLIDLWWNPAVEMQAISRAHRLGQKENVEVYRLITRGTIEEKILEMQETKKHLVTTVLDGNETHASMSVDDIREILGVSK

SEQ ID NO: 4823 - DNA, 3096 bp, Streptococcus pyogenes
atgatggctagattaattccaggacgagtaaggaatgaaggtattaagctttatgagcaaggtttagtttcattccaagatgataataaaggcattcttcaaatagaagtggagacttatcaggttcaatatggagcagatgatgaggatatcacttgtcaatgcgacacatttcatatgaaacattattgcaagcatattgcagcagtcgagtattttttaaaaaatgatcaaaaaggtaagctttttttaaaacagttaacaaatcaaacaaaaatcaaagaaacaacaaagaaaatgacatcttttggtagcctctttttagatagcttagccatgaatgaagatgattctgttaaatacaggctgtctgctcttggtagtcgaagccctttttcgtcagattactggtggagtctgaaaatcaatcgtttaccagatgatcgttcttatgtgattcgggatattaaaggctttttgcagcttattaaaaaagaaggcttttatcagattggaaaaaattattttgaacaactttcatggctgcagtttgacccatctagtcaggcccttattgagtttttatggcgcttagcatctgatactgacaaaggggacaacgagaacatttttccaaatcatgcaaggcatttgcgcttacctagtggtttttttgaagaaggtattcactatttgacgtcactttatgactttacttttgaggggccttctcaaacttatcatcatctttttgtccgttctttggaagcagaggcaggcctttatgagtttaaagtggaagtgcatcgcaaatctattgaattgcaaattgctgaaaaaaatgtgcaatacctctttgataatgactatcttctttatcaagataccttttatcacttgacgttaaagcaacgaaaaatggttcaggctattcgtagtctgcccattgaggccgacttggctaaacatattcattttgatttggatgatcatgcgaaattagctgcaagcttatcagattttaaacagatcggtctagtagaggctcctaaaagctttgctattagagactttgaggtgacttttcaatttgatttgttaaatcgagatgaaatcagttgtcagcttatgtttgattatggcaattaccaagttagtgacaaagcaagtttagaagcacttccttttgctagtcatttaaaaaaagaagaaaaaatcaatcgttctttacttgcttttggcttctcgccacaattttactcaaaaaagcgactaacaagtgcaaaagagctctatactttttttgaagaaacagttccatgttttgagcgcttaggtaatgttgcgttgagtacagctatccaagcattacaagtgaaagaaatgcccaagatcgctattagacgcaatcagggattactagatatttcgtttgatttttcaaccattattgaaaatgatattgaccaagctgttacagctctttttcaaaataatccttattttgtgagtcaaacgggtcaattagtggtttttgatgatgaaactcaaaaagttagcaaaagtttacaagaattaagagcaagacagctaaaaaatggtcacttgcaactggatggcattagagctctacaagtatccaaactttttgaaggcatgacatctgttcatttttcaaaggaattagaagagttagcctatcatttgcagcatcctgaaactttttcaataaaaccgttaccagttaaggctcaaatgcgagattatcaacgcaacggtgttcagtggttatcaatgctcaatcattatggctttggtggcattttagcagatgacatgggacttggaaaaactctccagacacttgcttttttagctagtcacctgaaatcagatagtaaagtgctcattttatctccatctagtcttatctataattggtttgatgaatgtcaaaaattcacacctcagctagatgttgtggtttcttacggacttaaacaaatcagagatcaaatcatcgaagaaggtcatcaaataaccataaccagctattcctcctttagacaggattttgagacctatcaagcgtttcactacgattatcttatcttagatgaagctcaagtgataaaaaatgcacaaactaagatttcacactgtttacgtgcgtttaatacagccaattgttttgcgctttcgggcactcctattgaaaataaaatgcttgaaatttggtccattttccaaattgttttgccagggttgctaccgactaaaaaagagtttttaaaattaacagctgagcaagtatcacgctatatcaaaccctttgtgatgcgtcgtaaaaaagaagatgtcctaccagaattacctgatttaattgaaattaattattcaaacgagatgacagatgaacaaaaagctatttacttagcgcagttaaggcagatgcaagatcaaattcgaaattctagtgatgtggatattagccgtcaaaaaattgagattttatctggtatcactcgattgaggcaaatctgtgacactccaagtctctttatggattaccaaggcaaaagtggtaaactagatagtttgcgaatcttattgacacaaattaaagaaaatggtcatcgggctttgattttttctcaatttagagggatgctggacttggccaagcaagagatgactgctctagggttgacctcttatcaaatgacgggatctacccctgccaatgaacgtcaagaaatgactagagcctttaataacggttccaaggatgcttttttgatttccctcaaggcaggtggagttggaatcaaccttacgggagcagacacagtgattttaatcgatttatggtggaatcctgctgttgaaatgcaggcaatcagtcgcgcctaccgtattggtcaaaaagaaaacgttgaagtatatcgcttaatcactcgagggacgattgaagaaaagattttagagcttcaagaaagtaagcgcaatttggtgactacagttttggatggcaatgaaagccgagcaagtatgtccattgaagaaataaaagaaattttggggctaaacactcat

SEQ ID NO: 4824 - protein, 1032 aa, Streptococcus pyogenes
MMARLIPGRVRNEGIKLYEQGLVSFQDDNKGILQIEVETYQVQYGADDEDITCQCDTFHMKHYCKHIAAVEYFLKNDQKGKLFLKQLTNQTKIKETTKKMTSFGSLFLDSLAMNEDDSVKYRLSALGSRSPFSSDYWWSLKINRLPDDRSYVIRDIKGFLQLIKKEGFYQIGKNYFEQLSWLQFDPSSQALIEFLWRLASDTDKGDNENIFPNHARHLRLPSGFFEEGIHYLTSLYDFTFEGPSQTYHHLFVRSLEAEAGLYEFKVEVHRKSIELQIAEKNVQYLFDNDYLLYQDTFYHLTLKQRKMVQAIRSLPIEADLAKHIHFDLDDHAKLAASLSDFKQIGLVEAPKSFAIRDFEVTFQFDLLNRDEISCQLMFDYGNYQVSDKASLEALPFASHLKKEEKINRSLLAFGFSPQFYSKKRLTSAKELYTFFEETVPCFERLGNVALSTAIQALQVKEMPKIAIRRNQGLLDISFDFSTIIENDIDQAVTALFQNNPYFVSQTGQLVVFDDETQKVSKSLQELRARQLKNGHLQLDGIRALQVSKLFEGMTSVHFSKELEELAYHLQHPETFSIKPLPVKAQMRDYQRNGVQWLSMLNHYGFGGILADDMGLGKTLQTLAFLASHLKSDSKVLILSPSSLIYNWFDECQKFTPQLDVVVSYGLKQIRDQIIEEGHQITITSYSSFRQDFETYQAFHYDYLILDEAQVIKNAQTKISHCLRAFNTANCFALSGTPIENKMLEIWSIFQIVLPGLLPTKKEFLKLTAEQVSRYIKPFVMRRKKEDVLPELPDLIEINYSNEMTDEQKAIYLAQLRQMQDQIRNSSDVDISRQKIEILSGITRLRQICDTPSLFMDYQGKSGKLDSLRILLTQIKENGHRALIFSQFRGMLDLAKQEMTALGLTSYQMTGSTPANERQEMTRAFNNGSKDAFLISLKAGGVGINLTGADTVILIDLWWNPAVEMQAISRAYRIGQKENVEVYRLITRGTIEEKILELQESKRNLVTTVLDGNESRASMSIEEIKEILGLNTH

SEQ ID NO: 4825 - DNA, 135 bp, Streptococcus agalactiae
ttggagaaagaggctaagcagatcattgatttaaaaaggaatcttttcaaaattgatgtccgggcacaaaaggatgaagagaaagttttcatgcgtacggcgtgtcaatttagtatttttacaagaaattggact

SEQ ID NO: 4826 - protein, 45 aa, Streptococcus agalactiae
MEKEAKQIIDLKRNLFKIDVRAQKDEEKVFMRTACQFSIFTRNWT

SEQ ID NO: 4827 - DNA, 1308 bp, Streptococcus agalactiae
atggtattacctacagttgctattgttggtcgtccgaatgttggaaaatcaacattatttaacagaattgcaggagaacgtatttccattgttgaggacgttgaaggagtcactcgtgatcgtatctatacaacgggtgagtggctaaatcgtaagttttcattaattgatactggtgggattgatgatgttgatgcaccgtttatggagcaaattaagcaccaagcagacattgctatgacagaggctgatgttattgtgtttgttgtgtcgggtaaagaaggtgtgactgatgcagatgagtatgtctcacgtattctttataagaccaataaaccggttattttagctgttaataaggtagataatcctgagatgcgcaatgatatttacgatttctactctcttggtttaggggatccttatcccttgtcatcagttcatggtattggtactggtgatatattggatgctattgtggaaaatcttccggtagaagaggaaaatgaaaatccagatattattcgttttagtttgattggacgtccaaatgttgggaaatctagtttaattaatgccatccttggggaagaccgtgttattgctagcccagttgctggtactacgcgcgatgctattgatactaatttcgttgatagccaggggcaagagtatactatgattgatactgctggtatgcgtaaatctggtaaggtatatgaaaacacagagaaatattctgttatgcgttctatgcgcgccatcgaccgctcagatgttgttcttatggtgattaatgcagaggaaggtattcgtgagtatgacaagcgtattgcagggtttgcacatgaaactggtaaaggtattattattgtagttaataaatgggatactatcgaaaaagacaatcatactgtcagtcagtgggaagctgatatacgtgataacttccaattcttgtcttatgcgccaattatctttgtttctgcagagacaaagcaacgtttgcacaagttaccagatatgattaaacgtattagcgaaagtcaaaacaaacgtattccgtctgctgtattaaatgatgtgattatggatgctattgctattaatccaacaccaactgataaaggaaaacgtcttaagattttctacgcaactcaagttgctgttaaaccaccaactttcgttgtttttgttaacgaagaagaattgatgcacttttcatatcttcgtttcttagaaaatcaaatccgtgaagcatttgtttttgaaggaacaccaattaatctaatagcacgtaaacgtaaa

SEQ ID NO: 4828 - protein, 436 aa, Streptococcus agalactiae
MVLPTVAIVGRPNVGKSTLFNRIAGERISIVEDVEGVTRDRIYTTGEWLNRKFSLIDTGGIDDVDAPFMEQIKHQADIAMTEADVIVFVVSGKEGVTDADEYVSRILYKTNKPVILAVNKVDNPEMRNDIYDFYSLGLGDPYPLSSVHGIGTGDILDAIVENLPVEEENENPDIIRFSLIGRPNVGKSSLINAILGEDRVIASPVAGTTRDAIDTNFVDSQGQEYTMIDTAGMRKSGKVYENTEKYSVMRSMRAIDRSDVVLMVINAEEGIREYDKRIAGFAHETGKGIIIVVNKWDTIEKDNHTVSQWEADIRDNFQFLSYAPIIFVSAETKQRLHKLPDMIKRISESQNKRIPSAVLNDVIMDAIAINPTPTDKGKRLKIFYATQVAVKPPTFVVFVNEEELMHFSYLRFLENQIREAFVFEGTPINLIARKRK

SEQ ID NO: 4829 - DNA, 1308 bp, Streptococcus pyogenes
atggttttacctaccgttgccattgtgggccgtccaaatgtgggcaagtccaccttatttaatcgaatcgcaggagagcgcatttcaattgtagaagacgttgaaggggttactcgtgaccgtatttatgctactggggagtggcttaaccgccaattctcattgattgatacaggtggtattgatgacgttgatgccccgtttatggagcaaatcaagcaccaggctcaaattgccatggaagaagctgatgttatcgtttttgttgtttctggtaaagaaggggtgaccgacgctgacgaatatgtgtctaaaattctgtatcgaaccaataccccagtcattttagctgttaataaggttgataatcctgaaatgcgtaatgacatttatgatttttattcacttggtttgggtgatccttatccagtttcttctgttcatggtatcggaacaggggatgtcttagatgcgatcgttgaaaacttgccagtagaagaggctgaagaaaatgatgatattattcgcttcagtttaatcggtcgtcctaatgttgggaaatctagcttgattaacgctattttaggtgaggaccgtgttatcgctagccctgtcgcagggacaacacgtgatgccattgacacgcattttacggatgctgacggtcaagaatttaccatgattgacacggctggaatgcgcaaatctggcaagatttacgaaaatacagagaaatattctgtcatgcgtgccatgcgtgccattgaccgctccgatgtggtcttgatggttatcaatgctgaagaaggtatccgtgaatacgacaagcgtatcgctggctttgcacacgaagctggtaaaggaatgattatcgtggttaacaaatgggataccattgacaaggataatcataccgttgctaagtgggaagccgatattcgtgaccaattccaatttttgacatacgctccgattatttttgtgtcagctttgacgaagcagcgcctcaacaaattgcctgacttgattaaacgtatcagtgagagtcagaataaacgtatcccatctgctgtcctcaatgatgttatcatggatgctattgccattaatccaacgccaacggataagggtaaacgtttgaaaattttctatgccactcaagtgtcagtaaagccaccaacatttgtcgtctttgttaacgaggaagaattgatgcacttctcttatctacgcttcttggaaaaccagattcgcgcagcctttacctttgaagggacaccgattcatctaattgctcgcaaacgaaaa

SEQ ID NO: 4830 - protein, 436 aa, Streptococcus pyogenes
MVLPTVAIVGRPNVGKSTLFNRIAGERISIVEDVEGVTRDRIYATGEWLNRQFSLIDTGGIDDVDAPFMEQIKHQAQIAMEEADVIVFVVSGKEGVTDADEYVSKILYRTNTPVILAVNKVDNPEMRNDIYDFYSLGLGDPYPVSSVHGIGTGDVLDAIVENLPVEEAEENDDIIRFSLIGRPNVGKSSLINAILGEDRVIASPVAGTTRDAIDTHFTDADGQEFTMIDTAGMRKSGKIYENTEKYSVMRAMRAIDRSDVVLMVINAEEGIREYDKRIAGFAHEAGKGMIIVVNKWDTIDKDNHTVAKWEADIRDQFQFLTYAPIIFVSALTKQRLNKLPDLIKRISESQNKRIPSAVLNDVIMDAIAINPTPTDKGKRLKIFYATQVSVKPPTFVVFVNEEELMHFSYLRFLENQIRAAFTFEGTPIHLIARKRK

SEQ ID NO: 4831 - DNA, 900 bp, Streptococcus agalactiae
atgaaatcagtgggacaagcattagaaaatcaagggagagtgcctcgtaatacaaatgatgagcttattcaaatgattttagcagatgctcaggtagcggagttcattaaaacccaccaactttctcagcgtgaaataaatatcagcatgtctaaatttaatcaatttttgattgagcgtcagaaatttaaaaataaggatagtcaatatattgctaaaggctatgagcctattttggttatgaatgaaggttatgcagatgtttcttatttagaaacacgagagttaattgaagcacaaaaaaaacaagctatcagtgatcgtattaatttagttaatctacccaagtcctatcggaatatcagaatgactgactttgatattaataacgagagtcgaatgaaagctatgtcacaactgcttgattttgtagagacttatccttcatataatcacaaggggctttatttatatggagatatgggggttgggaaatcctatttaatggcagcaatggcgagggaattatcagagagaaagggtgtgtcaacgactcttcttcatttccctagttttgctattgatgtcaaaaatgctatttcaagcggaactgtaaaagatgaaattgatgctgtgaaaagtgttccgattttgattttagatgatattggggctgaacaggcaacgtcctgggttcgtgacgagattttacaagttatattacaacatcgtatgctagaagagttgcccactttctttacgtcaaattatagttttaacgatttggaaagaaaatgggctaatataaaaggaagcgacgaaacttggcaagcaaaacgagttatggagcgcgtacggtatttagcgatagaattccacttagaaggaccgaatcgccgt

SEQ ID NO: 4832 - protein, 300 aa, Streptococcus agalactiae
MKSVGQALENQGRVPRNTNDELIQMILADAQVAEFIKTHQLSQREINISMSKFNQFLIERQKFKNKDSQYIAKGYEPILVMNEGYADVSYLETRELIEAQKKQAISDRINLVNLPKSYRNIRMTDFDINNESRMKAMSQLLDFVETYPSYNHKGLYLYGDMGVGKSYLMAAMARELSERKGVSTTLLHFPSFAIDVKNAISSGTVKDEIDAVKSVPILILDDIGAEQATSWVRDEILQVILQHRMLEELPTFFTSNYSFNDLERKWANIKGSDETWQAKRVMERVRYLAIEFHLEGPNRR

SEQ ID NO: 4833 - DNA, 900 bp, Streptococcus pyogenes
atggaaaagattggagaaaccatggcgaaattgggtcaaaacactcgtgttaatagcgaccagttgattcaaaccattttagcggatcctgaagtagcaagcttcatcagtcaacatcacttatctcaagagcaaattaaccttagcttatctaagttcaatcaatttttggtggaacgccagaagtatcaactcaaagatccctcttatattgctaagggctatcagcctattctagctatgaatgagggctacgctgatgtgtcttatttggaaaccaaagaattggtagaagctcaaaaacaggcagctatctctgaacggattcaactggttagtttgccaaaatcctatcgccatattcatttatcagatattgatgttaataatgcgagccgtatggaagccttctctgctattttagattttgtggaacaatacccatcagcagagcaaaaaggcttgtatttgtacggagatatgggaattggcaagtcttacttgttggctgctatggcccatgaattgtctgagaaaaaaggtgtgtcaacgacccttctacattttccgagctttgccattgatgtaaaaaatgccatttcaaacggctctgttaaagaagaaatcgatgcggtcaaaaatgtaccggtgctcattttagatgatattggtgcagagcaagccacttcttgggtccgtgatgaggtgttgcaggtgattttacaataccgtatgttagaggaattgccaaccttctttacctctaattacagctttgcggatttggagcgaaaatgggcaaccatcaaaggaagtgacgaaacttggcaggccaaacgtgtcatggaacgcgtgcgttatttggctagagagtttcatttagaaggggctaaccgccgt

SEQ ID NO: 4834 - protein, 300 aa, Streptococcus pyogenes
MEKIGETMAKLGQNTRVNSDQLIQTILADPEVASFISQHHLSQEQINLSLSKFNQFLVERQKYQLKDPSYIAKGYQPILAMNEGYADVSYLETKELVEAQKQAAISERIQLVSLPKSYRHIHLSDIDVNNASRMEAFSAILDFVEQYPSAEQKGLYLYGDMGIGKSYLLAAMAHELSEKKGVSTTLLHFPSFAIDVKNAISNGSVKEEIDAVKNVPVLILDDIGAEQATSWVRDEVLQVILQYRMLEELPTFFTSNYSFADLERKWATIKGSDETWQAKRVMERVRYLAREFHLEGANRR

SEQ ID NO: 4835 - DNA, 1176 bp, Streptococcus agalactiae
gtgatgagtccaatagatgagtttacatatattaagcaaaataagattgtttatgatagtaatagtttaatacaattgtatttcccaattatgggaagtgatgccatggcactctatgattattttgttcatttttttgatgacggaatacgacgtcataaattttcagaggttctcaatcatctgcaatacgggatgccaagatttcaagatgcattggtaatgttaacagctttggatttgttgactgtttaccaagccacaggtacttaccttgttaagttgaatcaagctatgtcaaatgagttatttttatctaatcccatctatcgtcgtttgttagaaaaacgtataggagaggtagcagtggcagaattagatatgaaaatacctaaaaatgctagagatatctctaaaaaatttacagatgttttctcggatttaggacaaccaaaacaagaggtaaaccggagtaaaaatgtttttgacttggaaagtttcaaacgtttgatgatgcgagatggcttacgttttaacaatgaaaaagatgatgtcttaggtatttatagtgtatcagaactttatcatttaaattggtatgatacctatcaattagcaaaacaaacagctatcaatggaatgattgcgcctcagcgaatgaaagttcaacaaaatgaggggcagcatattaaagataatcagagttttacaaataatgaaaaggtcatactaagggaatctaaaaatgatagtgctctagtgttccttgaaaaaatcaagagaagccgtaaggcagtgacaacaagtggtgagaagactttacttgaggatttggcaaaaatgaatttcctagacgaagtcattaatgttatggttttatataccttgaataagacaaaatctgctaacttaaataaggcctatatcatgaaagttgctaatgattttgcttttcagaatgttatgacggccgaagatgctgtgcttaaaattcgtgatttttcagatcaaaaagtaaggactaaaacagaaacgaagaagaaacaatcgaatgttcctgaatggagtaatcctgattataaagatgaggttagcccagaaaaagaaattgaattagaacagtttaaaacagatgccctcaagcgtttagaacgattaggaaaggatggtgaatca

SEQ ID NO: 4836 - protein, 392 aa, Streptococcus agalactiae
MMSPIDEFTYIKQNKIVYDSNSLIQLYFPIMGSDAMALYDYFVHFFDDGIRRHKFSEVLNHLQYGMPRFQDALVMLTALDLLTVYQATGTYLVKLNQAMSNELFLSNPIYRRLLEKRIGEVAVAELDMKIPKNARDISKKFTDVFSDLGQPKQEVNRSKNVFDLESFKRLMMRDGLRFNNEKDDVLGIYSVSELYHLNWYDTYQLAKQTAINGMIAPQRMKVQQNEGQHIKDNQSFTNNEKVILRESKNDSALVFLEKIKRSRKAVTTSGEKTLLEDLAKMNFLDEVINVMVLYTLNKTKSANLNKAYIMKVANDFAFQNVMTAEDAVLKIRDFSDQKVRTKTETKKKQSNVPEWSNPDYKDEVSPEKEIELEQFKTDALKRLERLGKDGES

SEQ ID NO: 4837 - DNA, 1173 bp, Streptococcus pyogenes
atgatgaaaccaattgatacttttacatatctaaaacgcaacaaagtaactcttgattcggtgactttaatacagttgtactttccaattattggaagtgacgcggtctctatctaccaatactttattcacttttttgacgatggtttacaacgtcataaattcagcgatattttaaatcacctacagtttggtatgaaacgttttgaagatgctcttgctatattgacagcaatggaattagtgagtgtgtatcagctatcagatacatatcttattacgttgcaccagccgcttagccgtgacttgttttttcaacatccagcttattctcgattattagaacaaaagattggagaggtagctgtctctgagttgcaggtaactgtcccaagtcaagcaagaaatatttctaagcgattttcggatatttttggggtgcaaggagatttgacgaacgtacctcaaaagccacaaaagaattttgacctttcaagtttccagcaattaatggttcgtgatgggttacaatttgaagataatcaaaaagatatcattagcctttacagtattgctgaacagtatgatatgacgtggtttgatacttatcaaatagctaaggcgacggctgttaatgggaaaattcgacctgaacgcttattggctaaaaaaaatcaaagcatgacaaaaccaagcaaagaaaatttttcacaggctgagcaaattattttgcgagaagcaaagcaagacagtgctttagtctttttggaaaaaattaaaaaggctagacgtgcaacgattactaaggatgaacgcattttattgcaaacattggccaaaatgaattttcttgatgatgttatcaatgtcatggtgctttatacctttaataagacaaaatctgctaatttacagaagagttatgtcttaaaaatggccaatgatttcgcctaccaaaaggtgtcaacggctgaagaagctatagtggttttgcgagccttcacggatcgtcaaagtcgtcggcaatcaaaagtaaaaacaagtcaaagtaatgtgcctaagtggagcaatcctgattaccaagagacaacaagtcaagaagagcaggcgaaactagatcagttcaaacaggctgctttgaagaggttagaaaacctaggaaaagggggtgac

SEQ ID NO: 4838 - protein, 391 aa, Streptococcus pyogenes
MMKPIDTFTYLKRNKVTLDSVTLIQLYFPIIGSDAVSIYQYFIHFFDDGLQRHKFSDILNHLQFGMKRFEDALAILTAMELVSVYQLSDTYLITLHQPLSRDLFFQHPAYSRLLEQKIGEVAVSELQVTVPSQARNISKRFSDIFGVQGDLTNVPQKPQKNFDLSSFQQLMVRDGLQFEDNQKDIISLYSIAEQYDMTWFDTYQIAKATAVNGKIRPERLLAKKNQSMTKPSKENFSQAEQIILREAKQDSALVFLEKIKKARRATITKDERILLQTLAKMNFLDDVINVMVLYTFNKTKSANLQKSYVLKMANDFAYQKVSTAEEAIVVLRAFTDRQSRRQSKVKTSQSNVPKWSNPDYQETTSQEEQAKLDQFKQAALKRLENLGKGGD

SEQ ID NO: 4839 - DNA, 477 bp, Streptococcus agalactiae
atgcgttgtccaaaatgtggctataataaatctagtgtggttgatagccgacaagctgaagaaggtacgactatcagacgccggagagagtgcgaaaaatgtggcaaccgctttacaacatttgaacgtttggaagaattgcctcttttagtcataaagaaagatggtactcgcgagcaattttctcgagataaaattttgaatggtattattcagagtgctcaaaaacgccctgtttcgagcgaagatattgaaaattgtatcttacgtatcgaacgtaaaattaggagtgagtatgaagatgaggtttctagtatcactatcggaaatttagtgatggatgaactcgccgaattagatgagattacttatgtgcgctttgctagtgtttataaatcttttaaagatgtagatgaaattgaagaactacttcaacaaattacaaagcgcgtacggagtaaaaagagtggtagcgtg

SEQ ID NO: 4840 - protein, 159 aa, Streptococcus agalactiae
MRCPKCGYNKSSVVDSRQAEEGTTIRRRRECEKCGNRFTTFERLEELPLLVIKKDGTREQFSRDKILNGIIQSAQKRPVSSEDIENCILRIERKIRSEYEDEVSSITIGNLVMDELAELDEITYVRFASVYKSFKDVDEIEELLQQITKRVRSKKSGSV

SEQ ID NO: 4841 - DNA, 492 bp, Streptococcus pyogenes
gtgcgttgtccaaaatgtaattaccataaatcgagtgttgttgacagtagacaagctgaagacggcaacaccattcgtcgtcgaagagaatgtgaacagtgtcatactcgctttactacctttgagcgtgttgaagaactccctttattagtcatcaaaaaagatggcacacgagagcaattttctagagataaaatattaaatggggttgttcaaagtgcgcaaaaacgacctgtctcgagcacagatattgaaaatgtcatttctcgtattgaacaagaagttcgaacaacctacgaaaatgaagtgtcaagtactgctattggtaatttagtgatggatgagttggccgaactcgatgaaatcacatatgtacgctttgctagtgtctacaagagtttcaaggacgttgatgaaatcgaagaacttttgcaacaaattacgaatcgcgtacgcggaaagaaaaaacgtttaaataatgatgaaaccaat

SEQ ID NO: 4842 - protein, 164 aa, Streptococcus pyogenes
VRCPKCNYHKSSVVDSRQAEDGNTIRRRRECEQCHTRFTTFERVEELPLLVIKKDGTREQFSRDKILNGVVQSAQKRPVSSTDIENVISRIEQEVRTTYENEVSSTAIGNLVMDELAELDEITYVRFASVYKSFKDVDEIEELLQQITNRVRGKKKRLNNDETN

SEQ ID NO: 4843 - DNA, 1503 bp, Streptococcus agalactiae
gtgaaaaataaaaaagatcagtttataggggtaaaacaacctctgtcaaaaaaattatcgcaattagtttttatcttattttttagcctatttacagtattttctgttttagtttatacttcggcaacaagatacgtccttcacagggaaaaaattaatgtcggtaggtcattagaaaaaactagagttcgtttgtcgcaagcgaactctagtttgacatccgatgatattttagagatcctgtacaaccaggtttttgcggatgacatctatcctcataagcgtcaaaatggaattgttagaacgggcgagtcaatcgatagtattctttatgttaatcaagaaatgaccctatacgatgtcaacaggaaaccagttttttctacactgagaacgggtatgccaactattggtaaatccatgggaaaagttatcatctctaaagttgcagatatggaaggttttgttggtacaaaagcaatctactctcaaaaaacaggacagttgcttggatacgttcaaattttctataatttaggtcgttattatagtatgaggcaaaacatcattgttttcttgattatgatggaagttttagggactgttttagccttggtcgttattaatagtgctactaagcgtattgttcgtccggttaaaaatttacacgacttaatgcatcagatatctgaaaatcctagtaatttagaaattagaagtaaggtccgttcagaagacgaaattggagaattgtctaggatttttgatgggatgttggatcagttggaagactatactcgtcgacaatcacaattcattagtgatgttagtcatgaattaagaacgcctgtcgctgttgtaaagggtcatattggtttattacaacgttgggggaaagatgatccagaaattcttgaagaaagtttagcagcggcataccatgaggcagatcgtatgtccttaatgattaatgacatgttaaatatgattcgcgtccaaggaagcttggaacttcatcaagatgaagtgacagatttatcaagctctatatcagttgttattgaaaatttccgtattttgagagaagattttcaatttatttttgaaaataatatttcagatatcgtttggggaaagatatataagatacattttgagcaagctctcatgatcttaattgataacgctatcaagtactctcctagttataaagaagtcagtgttgttttatcagtagacaatgattttgcgacagtagttgtaaaagataaaggagaaggtatctcagatgaagatattgagtttatctttgatcgtttttatcgaactgataaatcacgtaacagagaaagtacacaagctggtttaggtatcgggctttcagtgtttaaacaaattatggatgcttaccatttaaaggtggatattaaaagtgaactaaatcaagggactgaattcattgttcgcattcctataaaaaaatttgaagaaactaaagaaata

SEQ ID NO: 4844 - protein, 501 aa, Streptococcus agalactiae
MKNKKDQFIGVKQPLSKKLSQLVFILFFSLFTVFSVLVYTSATRYVLHREKINVGRSLEKTRVRLSQANSSLTSDDILEILYNQVFADDIYPHKRQNGIVRTGESIDSILYVNQEMTLYDVNRKPVFSTLRTGMPTIGKSMGKVIISKVADMEGFVGTKAIYSQKTGQLLGYVQIFYNLGRYYSMRQNIIVFLIMMEVLGTVLALVVINSATKRIVRPVKNLHDLMHQISENPSNLEIRSKVRSEDEIGELSRIFDGMLDQLEDYTRRQSQFISDVSHELRTPVAVVKGHIGLLQRWGKDDPEILEESLAAAYHEADRMSLMINDMLNMIRVQGSLELHQDEVTDLSSSISVVIENFRILREDFQFIFENNISDIVWGKIYKIHFEQALMILIDNAIKYSPSYKEVSVVLSVDNDFATVVVKDKGEGISDEDIEFIFDRFYRTDKSRNRESTQAGLGIGLSVFKQIMDAYHLKVDIKSELNQGTEFIVRIPIKKFEETKEI

SEQ ID NO: 4845 - DNA, 687 bp, Streptococcus agalactiae
atgggtaaaaagatcttaataatcgaagatgagaaaaatttagctcgcttcgtctcgttagaactactacatgaaggatatgatgttgttgttgaaacaaacggtcgtgaaggattggacacagcattagaaaaagattttgatttgattctactggatttaatgcttccagagatggatggtttcgaaatcacacgtcgcctgcaggctgaaaaaacaacctatatcatgatgatgacagcacgtgattctgttatggatattgtagctggtcttgatcgtggagcagatgattatattgttaagccgtttgcaatcgaagaattattagcacgtgttagagcgattttccgacgccaagaaattgaaacgaagacaaaagaaaaaggtgatagtggtagtttccgtgatttgtcattaaatactcataatcgttcagcgatgcgtggtgatgaggaaatttcactaacaaaacgtgaatttgatttgttgaatgtcttgatgacaaatatgaatcgtgttatgacacgagaagagttgctagaacatgtttggaaatacgatgtggcagcagagacaaacgttgttgatgtttatatccgttacctaagaggtaaaattgatatcccaggtcgtgaatcatatattcaaactgttcgcggaatgggctatgtgattcgtgaaaaa
